United States Patent Application Publication US 2025/0302929 A1 - sequence listing, part 5

SEQ ID NO: 25263 - protein, 1303 aa, Artificial Sequence
  Synthetic polypeptide
VCNKNFDDEDSVDGNRPSSASSTSSKAPPSSRRNVGMGTTRRLGSSTLGSKSSAAKEGAGAVDEEDFIKAFDDVPVVQIYSSRDLEESINKIREILSDDKHDWEQRVNALKKIRSLLLAGAAEYDNFFQHLRLLDGAFKLSAKDLRSQVVREACITLGHLSSVLGNKFDHGAEAIMPTIFNLIPNSAKIMATSGVVAVRLIIRHTHIPRLIPVITSNCTSKSVAVRRRCFEFLDLLLQEWQTHSLERHISVLAETIKKGIHDADSEARIEARKCYWGFHSHFSREAEHLYHTLESSYQKALQSHLKNSDSIVSLPQSDRSSSSSQESLNRPLSAKRSPTGSTTSRASTVSTKSVSTTGSLQRSRSDIDVNAAASAKSKVSSSSGTTPFSSAAALPPGSYASLGRIRTRRQSSGSATNVASTPDNRGRSRAKVVSQSQRSRSANPAGAGSRSSSPGKLLGSGYGGLTGGSSRGPPVTPSSEKRSKIPRSQGCSRETSPNRIGLARSSRIPRPSMSQGCSRDTSRESSRDTSPARGFPPLDRFGLGQPGRIPGSVNAMRVLSTSTDLEAAVADALKKPVRRRYEPYGMYSDDDANSDASSVCSERSYGSRNGGIPHYLRQTEDVAEVLNHCASSNWSERKEGLLGLQNLLKSQRTLSRVELKRLCEIFTRMFADPHSKRVFSMFLETLVDFIIIHKDDLQDWLFVLLTQLLKKMGADLLGSVQAKVQKALDVTRDSFPFDQQFNILMRFIVDQTQTPNLKVKVAILKYIESLARQMDPTDFVNSSETRLAVSRIITWTTEPKSSDVRKAAQIVLISLFELNTPEFTMLLGALPKTFQDGATKLLHNHLKNSSNTSVGSPSNTIGRTPSRHTSSRTSPLTSPTNCSHGGLSPSRLWGWSADGLAKHPPPFSQPNSIPTAPSHKALRRSYSPSMLDYDTENLNSEEIYSSLRGVTEAIEKFSFRSQEDLNEPIKRDGKKECDIVSRDGGAASPATEGRGGSEVEGGRTALDNKTSLLNTQPPRAFPGPRARDYNPYPYSDAINTYDKTALKEAVFDDDMEQLRDVPIDHSDLVADLLKELSNHNERVEERKGALLELLKITREDSLGVWEEHFKTILLLLLETLGDKDHSIRALALRVLREILRNQPARFKNYAELTIMKTLEAHKDSHKEVVRAAEEAASTLASSIHPEQCIKVLCPIIQTADYPINLAAIKMQTKVVERIAKESLLQLLVDIIPGLLQGYDNTESSVRKASVFCLVAIYSVIGEDLKPHLAQLTGSKMKLLNLYIKRAQTTNSNSSSSSDVSTHS

SEQ ID NO: 25264 - protein, 1243 aa, Artificial Sequence
  Synthetic polypeptide
VCNKNFDDEDSVDGNRPSSASSTSSKAPPSSRRNVGMGTTRRLGSSTLGSKSSAAKEGAGAVDEEDFIKAFDDVPVVQIYSSRDLEESINKIREILSDDKHDWEQRVNALKKIRSLLLAGAAEYDNFFQHLRLLDGAFKLSAKDLRSQVVREACITLGHLSSVLGNKFDHGAEAIMPTIFNLIPNSAKIMATSGVVAVRLIIRHTHIPRLIPVITSNCTSKSVAVRRRCFEFLDLLLQEWQTHSLERHISVLAETIKKGIHDADSEARIEARKCYWGFHSHFSREAEHLYHTLESSYQKALQSHLKNSDSIVSLPQSDRSSSSSQESLNRPLSAKRSPTGSTTSRASTVSTKSVSTTGSLQRSRSDIDVNAAASAKSKVSSSSGTTPFSSAAALPPGSYASLDGTTTKAEGRIRTRRQSSGSATNVASTPDNRGRSRAKVVSQSQRSRSANPAGAGSRSSSPGKLLGSGYGGLTGGSSRGPPVTPSSEKRSKIPRSQGCSRETSPNRIGLDRFGLGQPGRIPGSVNAMRVLSTSTDLEAAVADALLLGDSRSKKKPVRRRYEPYGMYSDDDANSDASSVCSERSYGSRNGGIPHYLRQTEDVAEVLNHCASSNWSERKEGLLGLQNLLKSQRTLSRVELKRLCEIFTRMFADPHSKVFSMFLETLVDFIIIHKDDLQDWLFVLLTQLLKKMGADLLGSVQAKVQKALDVTRDSFPFDQQFNILMRFIVDQTQTPNLKVKVAILKYIESLARQMDPTDFVNSSETRLAVSRIITWTTEPKSSDVRKAAQIVLISLFELNTPEFTMLLGALPKTFQDGATKLLHNHLKNSSNTSVGSPSNTIGRTPSRHTSSRTSPLTSPTNCSHGGLSPSMLDYDTENLNSEEIYSSLRGVTEAIEKFSFRSQEDLNEPIKRDGKKECDIVSRDGGAASPATEGRGGSEVEGGRTALDNKTSLLNTQPPRAFPGPRARDYNPYPYSDAINTYDKTALKEAVFDDDMEQLRDVPIDHSDLVADLLKELSNHNERVEERKGALLELLKITREDSLGVWEEHFKTILLLLLETLGDKDHSIRALALRVLREILRNQPARFKNYAELTIMKTLEAHKDSHKEVVRAAEEAASTLASSIHPEQCIKVLCPIIQTADYPINLAAIKMQTKVVERIAKESLLQLLVDIIPGLLQGYDNTESSVRKASVFCLVAIYSVIGEDLKPHLAQLTGSKMKLLNLYIKRAQTTNSNSSSSSDVSTHS

SEQ ID NO: 25265 - protein, 1259 aa, Artificial Sequence
  Synthetic polypeptide
VCNKNFDDEDSVDGNRPSSASSTSSKAPPSSRRNVGMGTTRRLGSSTLGSKSSAAKEGAGAVDEEDFIKAFDDVPVVQIYSSRDLEESINKIREILSDDKHDWEQRVNALKKIRSLLLAGAAEYDNFFQHLRLLDGAFKLSAKDLRSQVVREACITLGHLSSVLGNKFDHGAEAIMPTIFNLIPNSAKIMATSGVVAVRLIIRHTHIPRLIPVITSNCTSKSVAVRRRCFEFLDLLLQEWQTHSLERHISVLAETIKKGIHDADSEARIEARKCYWGFHSHFSREAEHLYHTLESSYQKALQSHLKNSDSIVSLPQSDRSSSSSQESLNRPLSAKRSPTGSTTSRASTVSTKSVSTTGSLQRSRSDIDVNAAASAKSKVSSSSGTTPFSSAAALPPGSYASLGRIRTRRQSSGSATNVASTPDNRGRSRAKVVSQSQRSRSANPAGAGSRSSSPGKLLGSGYGGLTGGSSRGPPVTPSSEKRSKIPRSQGCSRETSPNRIGLDRFGLGQPGRIPGSVNAMRVLSTSTDLEAAVADALVRGTSTGKKKPVRRRYEPYGMYSDDDANSDASSVCSERSYGSRNGGIPHYLRQTEDVAEVLNHCASSNWSERKEGLLGLQNLLKSQRTLSRVELKRLCEIFTRMFADPHSKIADSEAECEDKEGNLFPSEVSCTRVFSMFLETLVDFIIIHKDDLQDWLFVLLTQLLKKMGADLLGSVQAKVQKALDVTRDSFPFDQQFNILMRFIVDQTQTPNLKVKVAILKYIESLARQMDPTDFVNSSETRLAVSRIITWTTEPKSSDVRKAAQIVLISLFELNTPEFTMLLGALPKTFQDGATKLLHNHLKNSSNTSVGSPSNTIGRTPSRHTSSRTSPLTSPTNCSHGGLSPSMLDYDTENLNSEEIYSSLRGVTEAIEKFSFRSQEDLNEPIKRDGKKECDIVSRDGGAASPATEGRGGSEVEGGRTALDNKTSLLNTQPPRAFPGPRARDYNPYPYSDAINTYDKTALKEAVFDDDMEQLRDVPIDHSDLVADLLKELSNHNERVEERKGALLELLKITREDSLGVWEEHFKTILLLLLETLGDKDHSIRALALRVLREILRNQPARFKNYAELTIMKTLEAHKDSHKEVVRAAEEAASTLASSIHPEQCIKVLCPIIQTADYPINLAAIKMQTKVVERIAKESLLQLLVDIIPGLLQGYDNTESSVRKASVFCLVAIYSVIGEDLKPHLAQLTGSKMKLLNLYIKRAQTTNSNSSSSSDVSTHS

SEQ ID NO: 25266 - protein, 1242 aa, Artificial Sequence
  Synthetic polypeptide
VCNKNFDDEDSVDGNRPSSASSTSSKAPPSSRRNVGMGTTRRLGSSTLGSKSSAAKEGAGAVDEEDFIKAFDDVPVVQIYSSRDLEESINKIREILSDDKHDWEQRVNALKKIRSLLLAGAAEYDNFFQHLRLLDGAFKLSAKDLRSQVVREACITLGHLSSVLGNKFDHGAEAIMPTIFNLIPNSAKIMATSGVVAVRLIIRHTHIPRLIPVITSNCTSKSVAVRRRCFEFLDLLLQEWQTHSLERHISVLAETIKKGIHDADSEARIEARKCYWGFHSHFSREAEHLYHTLESSYQKALQSHLKNSDSIVSLPQSDRSSSSSQESLNRPLSAKRSPTGSTTSRASTVSTKSVSTTGSLQRSRSDIDVNAAASAKSKVSSSSGTTPFSSAAALPPGSYASLESRHMREDMEYIGLDSGRIRTRRQSSGSATNVASTPDNRGRSRAKVVSQSQPGSRSSSPGKLLGSGYGGLTGGSSRGPPVTPSSEKRSKIPRSQGCSRETSPNRIGLDRFGLGQPGRIPGSVNAMRVLSTSTDLEAAVADALLLGDSRSKKPVRRRYEPYGMYSDDDANSDASSVCSERSYGSRNGGIPHYLRQTEDVAEVLNHCASSNWSERKEGLLGLQNLLKSQRTLSRVELKRLCEIFTRMFADPHSKRVFSMFLETLVDFIIIHKDDLQDWLFVLLTQLLKKMGADLLGSVQAKVQKALDVTRDSFPFDQQFNILMRFIVDQTQTPNLKVKVAILKYIESLARQMDPTDFVNSSETRLAVSRIITWTTEPKSSDVRKAAQIVLISLFELNTPEFTMLLGALPKTFQDGATKLLHNHLKNSSNTSVGSPSNTIGRTPSRHTSSRTSPLTSPTNCSHGGLSPSMLDYDTENLNSEEIYSSLRGVTEAIEKFSFRSQEDLNEPIKRDGKKECDIVSRDGGAASPATEGRGGSEVEGGRTALDNKTSLLNTQPPRAFPGPRARDYNPYPYSDAINTYDKTALKEAVFDDDMEQLRDVPIDHSDLVADLLKELSNHNERVEERKGALLELLKITREDSLGVWEEHFKTILLLLLETLGDKDHSIRALALRVLREILRNQPARFKNYAELTIMKTLEAHKDSHKEVVRAAEEAASTLASSIHPEQCIKVLCPIIQTADYPINLAAIKMQTKVVERIAKESLLQLLVDIIPGLLQGYDNTESSVRKASVFCLVAIYSVIGEDLKPHLAQLTGSKMKLLNLYIKRAQTTNSNSSSSSDVSTHS

SEQ ID NO: 25267 - protein, 1242 aa, Artificial Sequence
  Synthetic polypeptide
VCNKNFDDEDSVDGNRPSSASSTSSKAPPSSRRNVGMGTTRRLGSSTLGSKSSAAKEGAGAVDEEDFIKAFDDVPVVQIYSSRDLEESINKIREILSDDKHDWEQRVNALKKIRSLLLAGAAEYDNFFQHLRLLDGAFKLSAKDLRSQVVREACITLGHLSSVLGNKFDHGAEAIMPTIFNLIPNSAKIMATSGVVAVRLIIRHTHIPRLIPVITSNCTSKSVAVRRRCFEFLDLLLQEWQTHSLERHISVLAETIKKGIHDADSEARIEARKCYWGFHSHFSREAEHLYHTLESSYQKALQSHLKNSDSIVSLPQSDRSSSSSQESLNRPLSAKRSPTGSTTSRASTVSTKSVSTTGSLQRSRSDIDVNAAASAKSKVSSSSGTTPFSSAAALPPGSYASLDGTTTKAEGRIRTRRQSSGSATNVASTPDNRGRSRAKVVSQSQRSRSANPAGAGSRSSSPGKLLGSGYGGLTGGSSRGPPVTPSSEKRSKIPRSQGCSRETSPNRIGLDRFGLGQPGRIPGSVNAMRVLSTSTDLEAAVADALLLGDSRSKKPVRRRYEPYGMYSDDDANSDASSVCSERSYGSRNGGIPHYLRQTEDVAEVLNHCASSNWSERKEGLLGLQNLLKSQRTLSRVELKRLCEIFTRMFADPHSKVFSMFLETLVDFIIIHKDDLQDWLFVLLTQLLKKMGADLLGSVQAKVQKALDVTRDSFPFDQQFNILMRFIVDQTQTPNLKVKVAILKYIESLARQMDPTDFVNSSETRLAVSRIITWTTEPKSSDVRKAAQIVLISLFELNTPEFTMLLGALPKTFQDGATKLLHNHLKNSSNTSVGSPSNTIGRTPSRHTSSRTSPLTSPTNCSHGGLSPSMLDYDTENLNSEEIYSSLRGVTEAIEKFSFRSQEDLNEPIKRDGKKECDIVSRDGGAASPATEGRGGSEVEGGRTALDNKTSLLNTQPPRAFPGPRARDYNPYPYSDAINTYDKTALKEAVFDDDMEQLRDVPIDHSDLVADLLKELSNHNERVEERKGALLELLKITREDSLGVWEEHFKTILLLLLETLGDKDHSIRALALRVLREILRNQPARFKNYAELTIMKTLEAHKDSHKEVVRAAEEAASTLASSIHPEQCIKVLCPIIQTADYPINLAAIKMQTKVVERIAKESLLQLLVDIIPGLLQGYDNTESSVRKASVFCLVAIYSVIGEDLKPHLAQLTGSKMKLLNLYIKRAQTTNSNSSSSSDVSTHS

SEQ ID NO: 25268 - protein, 688 aa, Artificial Sequence
  Synthetic polypeptide
VCNKNFDDEDSVDGNRPSSASSTSSKAPPSSRRNVGMGTTRRLGSSTLGSKSSAAKEGAGAVDEEDFIKAFDDVPVVQIYSSRDLEESINKIREILSDDKHDWEQRVNALKKIRSLLLAGAAEYDNFFQHLRLLDGAFKLSAKDLRSQVVREACITLGHLSSVLGNKFDHGAEAIMPTIFNLIPNSAKIMATSGVVAVRLIIRHTHIPRLIPVITSNCTSKSVAVRRRCFEFLDLLLQEWQTHSLERHISVLAETIKKGIHDADSEARIEARKCYWGFHSHFSREAEHLYHTLESSYQKALQSHLKNSDSIVSLPQSDRSSSSSQESLNRPLSAKRSPTGSTTSRASTVSTKSVSTTGSLQRSRSDIDVNAAASAKSKVSSSSGTTPFSSAAALPPGSYASLGRIRTRRQSSGSATNVASTPDNRGRSRAKVVSQSQRSRSANPAGAGSRSSSPGKLLGSGYGGLTGGSSRGPPVTPSSEKRSKIPRSQGCSRETSPNRIGLDRFGLGQPGRIPGSVNAMRVLSTSTDLEAAVADALLLGDSRSKKKPVRRRYEPYGMYSDDDANSDASSVCSERSYGSRNGGIPHYLRQTEDVAEVLNHCASSNWSERKEGLLGLQNLLKSQRTLSRVELKRLCEIFTRMFADPHSKIADSEAECEDKEGNLFPSEVSCTVSFQYVFGDSCGFYNNS

SEQ ID NO: 25269 - protein, 146 aa, Artificial Sequence
  Synthetic polypeptide
VCNKNFDDEDSVDGNRPSSASSTSSKAPPSSRRNVGMGTTRRLGSSTLGSKSSAAKEGAGAVDEEDFIKAFDDVPVVQIYSSRDLEESINKIREILSDDKHDWEQRVNALKKIRSLLLAGAAEYDNFFQHLRLLDGAFKLSAKDLR

SEQ ID NO: 25270 - protein, 106 aa, Artificial Sequence
  Synthetic polypeptide
VCNKNFDDEDSVDGNRPSSASSTSSKAPPSSRRNVGMGTTRRLGSSTLGSKSSAAKEGAGAVDEEDFIKAFDDVPVVQIYSSRDLEESINKIREILSDDKHDWEQR

SEQ ID NO: 25271 - protein, 1211 aa, Artificial Sequence
  Synthetic polypeptide
RRSQDGRIGTAPVYSSQRERRRRWVISAFPSETFAGNMNADSVVHHKLLHSVRARFVRFVPLEWNPSGKIGMRVEVYGCSYKSDVADFDGRSSLLYRFNQKLMSTLKDVISLKFKSMQGDGVLFHGEGQRGDHITLELQKGRLALHLNLGDSKARLSSSLPSATLGSLLDDQHWHSVLIERVGKQVNFTVDKHTQHFRTKGETDALDIDYELSFGGIPVPGKPGTFLKKNFHGCIENLYYNGVNIIDLAKRRKHQIYTGNVTFSCSEPQIVPITFVNSSGSYLLLPGTPQIDGLSVSFQFRTWNKDGLLLSTELSEGSGTLLLSLEGGILRLVIQKMTERVAEILTGSNLNDGLWHSVSINARRNRITLTLDDEAAPPAPDSTWVQIYSGNSYYFGGCPDNLTDSQCLNPIKAFQGCMRLIFIDNQPKDLISVQQGSLGNFSDLHIDLCSIKDRCLPNYCEHGGSCSQSWTTFYCNCSDTSYTGATCHNSIYEQSCEVYRHQGNTAGFFYIDSDGSGPLGPLQVYCNITEDKIWTSVQHNNTELTRVRGANPEKPYAMALDYGGSMEQLEAVIDGSEHCEQEVAYHCRRSRLLNTPDGTPFTWWIGRSNERHPYWGGSPPGVQQCECGLDESCLDIQHFCNCDADKDEWTNDTGFLSFKDHLPVTQIVITDTDRSNSEAAWRIGPLRCYGDRRFWNAVSFYTEASYLHFPTFHAEFSADISFFFKTTALSGVFLENLGIKDFIRLEISSPSEITFAIDVGNGPVELVVQSPSLLNDNQWHYVRAERNLKETSLQVDNLPRSTRETSEEGHFRLQLNSQLFVGGTSSRQKGFLGCIRSLHLNGQKMDLEERAKVTSGVRPGCPGHCSSYGSICHNGGKCVEKHNGYLCDCTNSPYEGPFCKKEVSAVFEAGTSVTYMFQEPYPVTKNISLSSSAIYTDSAPSKENIALSFVTTQAPSLLLFINSSSQDFVVVLLCKNGSLQVRYHLNKEETHVFTIDADNFANRRMHHLKINREGRELTIQMDQQLRLSYNFSPEVEFRVIRSLTLGKVTENLGLDSEVAKANAMGFAGCMSSVQYNHIAPLKAALRHATVAPVTVHGTLTESSCGFMVDSDVNAVTTVHSSSDPFGKTDEREPLTNAVRSDSAVIGGVIAVVIFIIFCIIGIMTRFLYQHKQSHRTSQMKEKEYPENLDSSFRNEIDLQNTVSECKREYFI

SEQ ID NO: 25272 - protein, 12 aa, Artificial Sequence
  Synthetic polypeptide
FLHFHLRPLQET

SEQ ID NO: 25273 - protein, 43 aa, Artificial Sequence
  Synthetic polypeptide
EGQSRGQSNIRAVESALGLTALQCSPALGERGNTSAPQFSHLA

SEQ ID NO: 25274 - protein, 80 aa, Artificial Sequence
  Synthetic polypeptide
GAEQRPEQHPCCGVSPGFDCPPMFTSFGRERKYLSTSVFPSSLIRGWPLPPPQCILPPLQSLIQGCLDGRMAEWRPPPPP

SEQ ID NO: 25275 - protein, 33 aa, Artificial Sequence
  Synthetic polypeptide
LFAYRKTIMYVRFSRISGFRHPLGVLESIPHRA

SEQ ID NO: 25276 - protein, 132 aa, Artificial Sequence
  Synthetic polypeptide
GSVVSLVSGIRWGSWKASPIEPDPGMASASTTMHTTTIAEPDPGMSGWPDGRMETSTPTIMDIVVIAGVIAAVAIVLVSLLFVMLRYMYRHKGTYHTNEAKGTEFAESADAALQGDPALQDAGDSSRKEYFI

SEQ ID NO: 25277 - protein, 47 aa, Artificial Sequence
  Synthetic polypeptide
TLLLSISPCGLFANVRSPSAFCHEWEQYEALTRCSCPIWTSQPLELA

SEQ ID NO: 25278 - protein, 56 aa, Artificial Sequence
  Synthetic polypeptide
GPHQMQLPNLDFPATRTSLIRGWPLPPPQCILPPLQSLIQGCLDGRMAEWRPPPPP

SEQ ID NO: 25279 - protein, 642 aa, Artificial Sequence
  Synthetic polypeptide
GQVQWLTPVIPALWVAELCTVSYGKVKLVLKHNRYFVESCHPDVIQHLLQDPVIRECRLRNSEGEATELITETFTSKSAISKTAESSGGPSTSRVTDPQGKSDIPMDLFDFYEQMDKDEEEEEETQTVSFEVKQEMIEELQKRCIHLEYPLLAEYDFRNDSVNPDINIDLKPTAVLRPYQEKSLRKMFGNGRARSGVIVLPCGAGKSLVGVTAACTVRKRCLVLGNSAVSVEQWKAQFKMWSTIDDSQICRFTSDAKDKPIGCSVAISTYSMLGHTTKRSWEAERVMEWLKTQEWGLMILDEVHTIPAKMFRRVLTIVQAHCKLGLTATLVREDDKIVDLNFLIGPKLYEANWMELQNNGYIAKVQCAEVWCPMSPEFYREYVAIKTKKRILLYTMNPNKFRACQFLIKFHERRNDKIIVFADNVFALKEYAIRLNKPYIYGPTSQGERMQILQNFKHNPKINTIFISKVGDTSFDLPEANVLIQISSHGGSRRQEAQRLGRVLRAKKGMVAEEYNAFFYSLVSQDTQEMAYSTKRQRFLVDQGYSFKVITKLAGMEEEDLAFSTKEEQQQLLQKVLAATDLDAEEEVVAGEFGSRSSQASRRFGTMSSMSGADDTVYMEYHSSRSKAPSKHVHPLFKRFRK

SEQ ID NO: 25280 - protein, 20 aa, Artificial Sequence
  Synthetic polypeptide
SQHFGWLSCVLSAMEKSSWS

SEQ ID NO: 25281 - protein, 204 aa, Artificial Sequence
  Synthetic polypeptide
GQVQWLTPVIPALWVAELCTVSYGKVKLVLKHNRYFVESCHPDVIQHLLQDPVIRECRLRNSEGEATELITETFTSKSAHLPLSQISKTAESSGGPSTSRVTDPQGKSDIPMDLFDFYEQMDKDEEEEEETQTVSFEVKQEMIEELQKRCIHLEYPLLAEYDFRNDSVNPDINIDLKPTAVLRPYQEKSLRKMFGNGRARSGVI

SEQ ID NO: 25282 - protein, 627 aa, Artificial Sequence
  Synthetic polypeptide
GQLCTVSYGKVKLVLKHNRYFVESCHPDVIQHLLQDPVIRECRLRNSEGEATELITETFTSKSAISKTAESSGGPSTSRVTDPQGKSDIPMDLFDFYEQMDKDEEEEEETQTVSFEVKQEMIEELQKRCIHLEYPLLAEYDFRNDSVNPDINIDLKPTAVLRPYQEKSLRKMFGNGRARSGVIVLPCGAGKSLVGVTAACTVRKRCLVLGNSAVSVEQWKAQFKMWSTIDDSQICRFTSDAKDKPIGCSVAISTYSMLGHTTKRSWEAERVMEWLKTQEWGLMILDEVHTIPAKMFRRVLTIVQAHCKLGLTATLVREDDKIVDLNFLIGPKLYEANWMELQNNGYIAKVQCAEVWCPMSPEFYREYVAIKTKKRILLYTMNPNKFRACQFLIKFHERRNDKIIVFADNVFALKEYAIRLNKPYIYGPTSQGERMQILQNFKHNPKINTIFISKVGDTSFDLPEANVLIQISSHGGSRRQEAQRLGRVLRAKKGMVAEEYNAFFYSLVSQDTQEMAYSTKRQRFLVDQGYSFKVITKLAGMEEEDLAFSTKEEQQQLLQKVLAATDLDAEEEVVAGEFGSRSSQASRRFGTMSSMSGADDTVYMEYHSSRSKAPSKHVHPLFKRFRK

SEQ ID NO: 25283 - protein, 14 aa, Artificial Sequence
  Synthetic polypeptide
ASCVLSAMEKSSWS

SEQ ID NO: 25284 - protein, 21 aa, Artificial Sequence
  Synthetic polypeptide
PVVYCQLWKSQAGLEAQQILR

SEQ ID NO: 25285 - protein, 189 aa, Artificial Sequence
  Synthetic polypeptide
GQLCTVSYGKVKLVLKHNRYFVESCHPDVIQHLLQDPVIRECRLRNSEGEATELITETFTSKSAHLPLSQISKTAESSGGPSTSRVTDPQGKSDIPMDLFDFYEQMDKDEEEEEETQTVSFEVKQEMIEELQKRCIHLEYPLLAEYDFRNDSVNPDINIDLKPTAVLRPYQEKSLRKMFGNGRARSGVI

SEQ ID NO: 25286 - protein, 35 aa, Artificial Sequence
  Synthetic polypeptide
EETPEHAFSHLPFLSFVYCQLWKSQAGLEAQQILR

SEQ ID NO: 25287 - protein, 644 aa, Artificial Sequence
  Synthetic polypeptide
CPPKKRHRSMLSLTCPSCHLCTVSYGKVKLVLKHNRYFVESCHPDVIQHLLQDPVIRECRLRNSEGEATELITETFTSKSAISKTAESSGGPSTSRVTDPQGKSDIPMDLFDFYEQMDKDEEEEEETQTVSFEVKQEMIEELQKRCIHLEYPLLAEYDFRNDSVNPDINIDLKPTAVLRPYQEKSLRKMFGNGRARSGVIVLPCGAGKSLVGVTAACTVRKRCLVLGNSAVSVEQWKAQFKMWSTIDDSQICRFTSDAKDKPIGCSVAISTYSMLGHTTKRSWEAERVMEWLKTQEWGLMILDEVHTIPAKMFRRVLTIVQAHCKLGLTATLVREDDKIVDLNFLIGPKLYEANWMELQNNGYIAKVQCAEVWCPMSPEFYREYVAIKTKKRILLYTMNPNKFRACQFLIKFHERRNDKIIVFADNVFALKEYAIRLNKPYIYGPTSQGERMQILQNFKHNPKINTIFISKVGDTSFDLPEANVLIQISSHGGSRRQEAQRLGRVLRAKKGMVAEEYNAFFYSLVSQDTQEMAYSTKRQRFLVDQGYSFKVITKLAGMEEEDLAFSTKEEQQQLLQKVLAATDLDAEEEVVAGEFGSRSSQASRRFGTMSSMSGADDTVYMEYHSSRSKAPSKHVHPLFKRFRK

SEQ ID NO: 25288 - protein, 36 aa, Artificial Sequence
  Synthetic polypeptide
SAMISVLLRRDTGACFLSPALLVICVLSAMEKSSWS

SEQ ID NO: 25289 - protein, 206 aa, Artificial Sequence
  Synthetic polypeptide
CPPKKRHRSMLSLTCPSCHLCTVSYGKVKLVLKHNRYFVESCHPDVIQHLLQDPVIRECRLRNSEGEATELITETFTSKSAHLPLSQISKTAESSGGPSTSRVTDPQGKSDIPMDLFDFYEQMDKDEEEEEETQTVSFEVKQEMIEELQKRCIHLEYPLLAEYDFRNDSVNPDINIDLKPTAVLRPYQEKSLRKMFGNGRARSGVI

SEQ ID NO: 25290 - protein, 24 aa, Artificial Sequence
  Synthetic polypeptide
SRYTLDPALCSGCVLSAMEKSSWS

SEQ ID NO: 25291 - protein, 31 aa, Artificial Sequence
  Synthetic polypeptide
AATLWIQHCVLVVYCQLWKSQAGLEAQQILR

SEQ ID NO: 25292 - protein, 636 aa, Artificial Sequence
  Synthetic polypeptide
PLHSGSSIVFWLCTVSYGKVKLVLKHNRYFVESCHPDVIQHLLQDPVIRECRLRNSEGEATELITETFTSKSAISKTAESSGGPSTSRVTDPQGKSDIPMDLFDFYEQMDKDEEEEEETQTVSFEVKQEMIEELQKRCIHLEYPLLAEYDFRNDSVNPDINIDLKPTAVLRPYQEKSLRKMFGNGRARSGVIVLPCGAGKSLVGVTAACTVRKRCLVLGNSAVSVEQWKAQFKMWSTIDDSQICRFTSDAKDKPIGCSVAISTYSMLGHTTKRSWEAERVMEWLKTQEWGLMILDEVHTIPAKMFRRVLTIVQAHCKLGLTATLVREDDKIVDLNFLIGPKLYEANWMELQNNGYIAKVQCAEVWCPMSPEFYREYVAIKTKKRILLYTMNPNKFRACQFLIKFHERRNDKIIVFADNVFALKEYAIRLNKPYIYGPTSQGERMQILQNFKHNPKINTIFISKVGDTSFDLPEANVLIQISSHGGSRRQEAQRLGRVLRAKKGMVAEEYNAFFYSLVSQDTQEMAYSTKRQRFLVDQGYSFKVITKLAGMEEEDLAFSTKEEQQQLLQKVLAATDLDAEEEVVAGEFGSRSSQASRRFGTMSSMSGADDTVYMEYHSSRSKAPSKHVHPLFKRFRK

SEQ ID NO: 25293 - protein, 198 aa, Artificial Sequence
  Synthetic polypeptide
PLHSGSSIVFWLCTVSYGKVKLVLKHNRYFVESCHPDVIQHLLQDPVIRECRLRNSEGEATELITETFTSKSAHLPLSQISKTAESSGGPSTSRVTDPQGKSDIPMDLFDFYEQMDKDEEEEEETQTVSFEVKQEMIEELQKRCIHLEYPLLAEYDFRNDSVNPDINIDLKPTAVLRPYQEKSLRKMFGNGRARSGVI

SEQ ID NO: 25294 - protein, 45 aa, Artificial Sequence
  Synthetic polypeptide
CGSHENVPFRFPVGSITTDYPSRYTLDPALCSGCVLSAMEKSSWS

SEQ ID NO: 25295 - protein, 36 aa, Artificial Sequence
  Synthetic polypeptide
RLITPAATLWIQHCVLVVYCQLWKSQAGLEAQQILR

SEQ ID NO: 25296 - protein, 639 aa, Artificial Sequence
  Synthetic polypeptide
LPQPLHSGSSIVFWLCTVSYGKVKLVLKHNRYFVESCHPDVIQHLLQDPVIRECRLRNSEGEATELITETFTSKSAISKTAESSGGPSTSRVTDPQGKSDIPMDLFDFYEQMDKDEEEEEETQTVSFEVKQEMIEELQKRCIHLEYPLLAEYDFRNDSVNPDINIDLKPTAVLRPYQEKSLRKMFGNGRARSGVIVLPCGAGKSLVGVTAACTVRKRCLVLGNSAVSVEQWKAQFKMWSTIDDSQICRFTSDAKDKPIGCSVAISTYSMLGHTTKRSWEAERVMEWLKTQEWGLMILDEVHTIPAKMFRRVLTIVQAHCKLGLTATLVREDDKIVDLNFLIGPKLYEANWMELQNNGYIAKVQCAEVWCPMSPEFYREYVAIKTKKRILLYTMNPNKFRACQFLIKFHERRNDKIIVFADNVFALKEYAIRLNKPYIYGPTSQGERMQILQNFKHNPKINTIFISKVGDTSFDLPEANVLIQISSHGGSRRQEAQRLGRVLRAKKGMVAEEYNAFFYSLVSQDTQEMAYSTKRQRFLVDQGYSFKVITKLAGMEEEDLAFSTKEEQQQLLQKVLAATDLDAEEEVVAGEFGSRSSQASRRFGTMSSMSGADDTVYMEYHSSRSKAPSKHVHPLFKRFRK

SEQ ID NO: 25297 - protein, 201 aa, Artificial Sequence
  Synthetic polypeptide
LPQPLHSGSSIVFWLCTVSYGKVKLVLKHNRYFVESCHPDVIQHLLQDPVIRECRLRNSEGEATELITETFTSKSAHLPLSQISKTAESSGGPSTSRVTDPQGKSDIPMDLFDFYEQMDKDEEEEEETQTVSFEVKQEMIEELQKRCIHLEYPLLAEYDFRNDSVNPDINIDLKPTAVLRPYQEKSLRKMFGNGRARSGVI

SEQ ID NO: 25298 - protein, 37 aa, Artificial Sequence
  Synthetic polypeptide
RKYRRKEMQERMISDGRLEMQEGEKSNKIWTFCQILR

SEQ ID NO: 25299 - protein, 17 aa, Artificial Sequence
  Synthetic polypeptide
RCRREKRATKYGLSVRF

SEQ ID NO: 25300 - protein, 332 aa, Artificial Sequence
  Synthetic polypeptide
LTVYQLKEIQKERNARKNDLRWKVRDAGGRKEQQNMDFLSDFEMMLQRKKSMSGKRRRNRDGGTFISDADDVVSAMIVKMNEAAEEDRQLNNQKKPALKKLTLLPAVVMHLKKQDLKETFIDSGVMSAIKEWLSPLPDRSLPALKIREELLKILQELPSVSQETLKHSGIGRAVMYLYKHPKESRSNKDMAGKLINEWSRPIFGLTSNYKGMTREEREQRDLEQMPQRRRMNSTGGQTPRRDLEKVLTGEEKALRPGDPGFCARARVPMPSNKDYVVRPKWNVEMESSRFQATSKKGISRLDKQMRKFTDIRKKSRSAHAVKISIEGNKMPL

SEQ ID NO: 25301 - protein, 36 aa, Artificial Sequence
  Synthetic polypeptide
RKYRRKEMQERMISDGRLEMQEGEKSNKIWTFCQIL

SEQ ID NO: 25302 - protein, 42 aa, Artificial Sequence
  Synthetic polypeptide
LTVYQLKEIQKERNARKNDLRWKVRDAGGRKEQQNMDFLSDF

SEQ ID NO: 25303 - protein, 1347 aa, Artificial Sequence
  Synthetic polypeptide
DVGSASAPPPHLGCEECLCPAETPSGRFQHQAPRQLFYKRPDFAQQQAMQQLTFDGKRMRKAVNRKTIDYNPSVIKYLENRIWQRDQRDMRAIQPDAGYYNDLVPPIGMLNNPMNAVTTKFVRTSTNKVKCPVFVVRWTPEGRRLVTGASSGEFTLWNGLTFNFETILQAHDSPVRAMTWSHNDMWMLTADHGGYVKYWQSNMNNVKMFQAHKEAIREASFSPTDNKFATCSDDGTVRIWDFLRCHEERILRGHGADVKCVDWHPTKGLVVSGSKDSQQPIKFWDPKTGQSLATLHAHKNTVMEVKLNLNGNWLLTASRDHLCKLFDIRNLKEELQVFRGHKKEATAVAWHPVHEGLFASGGSDGSLLFWHVGVEKEVGGMEMAHEGMIWSLAWHPLGHILCSGSNDHTSKFWTRNRPGDKMRDRYNLNLLPGMSEDGVEYDDLEPNSLAVIPGMGIPEQLKLAMEQEQMGKDESNEIEMTIPGLDWGMEEVMQKDQKKVPQKKVPYAKPIPAQFQQAWMQNKVPIPAPNEVLNDRKEDIKLEEKKKTQAEIEQEMATLQYTNPQLLEQLKIERLAQKQVEQIQPPPSSGTPLLGPQPFPGQGPMSQIPQGFQQPHPSQQMPMNMAQMGPPGPQGQFRPPGPQGQMGPQGPPLHQGGGGPQGFMGPQGPQGPPQGLPRPQDMHGPQGMQRHPGPHGPLGPQGPPGPQGSSGPQGHMGPQGPPGPQGHIGPQGPPGPQGHLGPQGPPGTQGMQGPPGPRGMQGPPHPHGIQGGPGSQGIQGPVSQGPLMGLNPRGMQGPPGPRENQGPAPQGMIMGHPPQEMRGPHPPGGLLGHGPQEMRGPQEIRGMQGPPPQGSMLGPPQELRGPPGSQSQQGPPQGSLGPPPQGGMQGPPGPQGQQNPARGPHPSQGPIPFQQQKTPLLGDGPRAPFNQEGQSTGPPPLIPGLGQQGAQGRIPPLNPGQGPGPNKGDSRGPPNHHMGPMSERRHEQSGGPEHGPERGPFRGGQDCRGPPDRRGPHPDFPDDFSRPDDFHPDKRFGHRLREFEGRGGPLPQEEKWRRGGPGPPFPPDHREFSEGDGRGAARGPPGAWEGRRPGDERFPRDPEDPRFRGRREESFRRGAPPRHEGRAPPRGRDGFPGPEDFGPEENFDASEEAARGRDLRGRGRGTPRGGRKGLLPTPDEFPRFEGGRKPDSWDGNREPGPGHEHFRDTPRPDHPPHDGHSPASRERSSSLQGMDMASLPPRKRPWHDGPGTSEHREMEAPGGPSEDRGGKGRGGPGPAQRVPKSGRSSSLDGEHHDGYHRDEPFGGPPGSGTPSRGGRSGSNWGRGSNMNSGPPRRGASRGGGRGR

SEQ ID NO: 25304 - protein, 69 aa, Artificial Sequence
  Synthetic polypeptide
GASLPGRPSSEMWGAPLPRRPIWDVRSASARPRPRLGGSSTRHLDSCFISDLILHNSKQCNSLLLMENE

SEQ ID NO: 25305 - protein, 23 aa, Artificial Sequence
  Synthetic polypeptide
GVPLPGRDPVWEVPAPGTSTAVL

SEQ ID NO: 25306 - protein, 268 aa, Artificial Sequence
  Synthetic polypeptide
DVGSASAPPPHLGCEECLCPAETPSGRFQHQAPRQLFYKRPDFAQQQAMQQLTFDGKRMRKAVNRKTIDYNPSVIKYLENRIWQRDQRDMRAIQPDAGYYNDLVPPIGMLNNPMNAVTTKFVRTSTNKVKCPVFVVRWTPEGRRLVTGASSGEFTLWNGLTFNFETILQAHDSPVRAMTWSHNDMWMLTADHGGYVKYWQSNMNNVKMFQAHKEAIREASFSPTDNKFATCSDDGTVRIWDFLRCHEERILRDTCFHHCRCYFLSVKR

SEQ ID NO: 25307 - protein, 337 aa, Artificial Sequence
  Synthetic polypeptide
DVGSASAPPPHLGCEECLCPAETPSGRFQHQAPRQLFYKRPDFAQQQAMQQLTFDGKRMRKAVNRKTIDYNPSVIKYLENRIWQRDQRDMRAIQPDAGYYNDLVPPIGMLNNPMNAVTTKFVRTSTNKVKCPVFVVRWTPEGRRLVTGASSGEFTLWNGLTFNFETILQAHDSPVRAMTWSHNDMWMLTADHGGYVKYWQSNMNNVKMFQAHKEAIREARFIHNIPFSVVPIVMVKLFSKCILGAEMHGLCQFLGNFLHPINTIFFFVFTHSPFCWHLSEVVLSRYQPLQYVRDVLSAAFCTGFLFSFMINNVYTLFLFIIYCVRQEYFIPNKEFSL

SEQ ID NO: 25308 - protein, 129 aa, Artificial Sequence
  Synthetic polypeptide
DVGSASAPPPHLGCEECLCPAETPSGRFQHQAPRQLFYKRPDFAQQQAMQQLTFDGKRMRKAVNRKTIDYNPSVIKYLENRIWQRDQRDMRAIQPDAGYYNDLVPPIGMLNNPMNAVTTKFVRTSTNKV

SEQ ID NO: 25309 - protein, 90 aa, Artificial Sequence
  Synthetic polypeptide
VLTRADGFIRGSLRFTSLFSLSCRLMKKVPASPSPSTMVVKFPEASPAMRNCESINPLSFMNYLVSVTNKMILRSNFVKNRTLEYYTMRF

SEQ ID NO: 25310 - protein, 493 aa, Artificial Sequence
  Synthetic polypeptide
SSFLYELPSLSDEQNDTQKQFCEEQNTGILHDEILIHEEKQIEVVEKMNSELSLSCKKEKDILHENSTLREEIAMLRLELDTMKHQSQLREKKYLEDIESVKKRNDNLLKALQLNELTMDDDTAVLVIDNGSGMCKAGFAGDDAPRAVFPSIVGRPRQQGMMGGMHQKESYVGKEAQSKRGILTLKYPMEHGIITNWDDMEKIWHHTFYNELRVAPEEHPVLLTEATLNPKANREKMTQIMFETFNTPAMYVAIQAVLSLYTSGRTTGIVMDSGDGVTHTVPIYEGNALPHATLRLDLAGRELPDYLMKILTEHGYRFTTMAEREIVRDIKEKLCYVALDFEQEMATVASSSSLEKSYELPDGQVITIGNERFRCPEALFQPCFLGMESCGIHETTFNSIMKSDVDIRKDLYTNTVLSGGTTMYPGMAHRMQKEIAALAPSMMKIRIIAPPKRKYSVWVGGSILASLSTFQQMWISKQEYDESGPSIVHRKCL

SEQ ID NO: 25311 - protein, 232 aa, Artificial Sequence
  Synthetic polypeptide
HDLRYKLIMNQTSQKKDSLSTSSFQSVKSISNSGKARPQPGSFNKQDSKADVPQKADLEEEPLLHNSKLDKVPGVQGQARKEKAEASNAGAACMGNSQHQGRQMGAAAHPPMILPLPLRKPTTLRQCEVLIRELWNTNLLQTQELQHLKSLLEGSQRPQAVPEEASFPRDQEATHFPKVSTKSLSKKCLLLSPPVAERAILPALKQTPKNNFAERQKRLQAMQKRRLHRSVL

SEQ ID NO: 25312 - protein, 38 aa, Artificial Sequence
  Synthetic polypeptide
RARRLTPVIPALWETETGGSRGQEIETILANTISVTSS

SEQ ID NO: 25313 - protein, 53 aa, Artificial Sequence
  Synthetic polypeptide
FQHFGRPRRADREVRRSRPSWLTRSPLQAHNESDITEERQPLHVKLPVCQVHL

SEQ ID NO: 25314 - protein, 298 aa, Artificial Sequence
  Synthetic polypeptide
HDLRYKLIMNQTSQKKDGPSGNHLSRASAPLGARWVCINGVWVEPGGPSPARLKEGSSRTHRPGGKHGRLAGGSADTVRSPADSLSTSSFQSVKSISNSGKARPQPGSFNKQDSKADVPQKADLEEEPLLHNSKLDKVPGVQGQARKEKAEASNAGAACMGNSQHQGRQMGAAAHPPMILPLPLRKPTTLRQCEVLIRELWNTNLLQTQELQHLKSLLEGSQRPQAVPEEASFPRDQEATHFPKVSTKSLSKKCLLLSPPVAERAILPALKQTPKNNFAERQKRLQAMQKRRLHRSVL

SEQ ID NO: 25315 - protein, 95 aa, Artificial Sequence
  Synthetic polypeptide
FQHFGRPRRADREVRRSRPSWLTRSPLQAHNESDITEERWPLRKPPFQGLCSLGRSLGLHQRSVGRAGRTQPCQAEGGLLTDTQARRQAWASCGR

SEQ ID NO: 25316 - protein, 33 aa, Artificial Sequence
  Synthetic polypeptide
HDLRYKLIMNQTSQKKGPLLPWALAGSASTECG

SEQ ID NO: 25317 - protein, 56 aa, Artificial Sequence
  Synthetic polypeptide
FQHFGRPRRADREVRRSRPSWLTRSPLQAHNESDITEERASAPLGARWVCINGVWV

SEQ ID NO: 25318 - protein, 80 aa, Artificial Sequence
  Synthetic polypeptide
HDLRYKLIMNQTSQKKDSLSTSSFQSVKSISNSGKARPQPGSFNKQDSKADVPQKADLEEEPLLHNSKLDKVPGVQGQAR

SEQ ID NO: 25319 - protein, 81 aa, Artificial Sequence
  Synthetic polypeptide
HDLRYKLIMNQTSQKKDGPSGNHLSRASAPLGARWVCINGVWVEPGGPSPARLKEGSSRTHRPGGKHGRLAGGSADTVRSP

SEQ ID NO: 25320 - protein, 143 aa, Artificial Sequence
  Synthetic polypeptide
HDLRYKLIMNQTSQKKGENWALQFLMGCSCHPGEPLQTVLAHLAALAPVCQPSGDRFWGTWTDAATSSRGWMMLRSQAQHVLLSGSPGPEVIAVGRWAQGAPQTSLLQVELKWEGTPGTAPALLDLCLRLLLWPGPGSPALWL

SEQ ID NO: 25321 - protein, 39 aa, Artificial Sequence
  Synthetic polypeptide
FQHFGRPRRADREVRRSRPSWLTRSPLQAHNESDITEER

SEQ ID NO: 25322 - protein, 35 aa, Artificial Sequence
  Synthetic polypeptide
HDLRYKLIMNQTSQKKGENWALQFLMGCSCHPGEP

SEQ ID NO: 25323 - protein, 63 aa, Artificial Sequence
  Synthetic polypeptide
DQPGQHGETPVSTNTKISLVWWCVRLCSQLPGRLRWEDPLSPGGRGCSEPRPRHYSAGVVHAY

SEQ ID NO: 25324 - protein, 527 aa, Artificial Sequence
  Synthetic polypeptide
ALEAEAAVSRDHDTTARESFTPTEEHVLVVRLLLKHLHAFANSLKPEQASPSAHSHATSPLEEFKRAAVPRFVQQKLYLFLQHCFGHWPLDASFRAVLEMWLSYLQPWRYAPDKQAPGSDSQPRCVSEKWAPFVQENLLMYTKLFVGFLNRALRTDLVSPKHALMVFRVAKVFAQPNLAEMIQKGEQLFLEPELVIPHRQHRLFTAPTFTGSFLSPWPPAVTDASFKVKSHVYSLEGQDCKYTPMFGPEARTLVLRLAQLITQAKHTAKSISDQCAESPAGHSFLSWLGFSSMDTNGSYTANDLDEMGQDSVRKTDEYLEKALEYLRQIFRLSEAQLRQFTLALGTTQDENGKKQLPDCIVGEDGLILTPLGRYQIINGLRRFEIEYQGDPELQPIRSYEIASLVRTLFRLSSAINHRFAGQMAALCSRDDFLGSFCRYHLTEPGLASRHLLSPVGRRQVAGHTRGPRLSLRFLGSYRTLVSLLLAFFVASLFCVGPLPCTLLLTLGYVLYASAMTLLTERGKLHQP

SEQ ID NO: 25325 - protein, 25 aa, Artificial Sequence
  Synthetic polypeptide
AETTTLQRGSRSRLLRSMCWWCACC

SEQ ID NO: 25326 - protein, 573 aa, Artificial Sequence
  Synthetic polypeptide
ALEAEAAVSRDHDTTARESFTPTEEHVLVVRLLLKHLHAFANSLKPEQASPSAHSHATSPLEEFKRMGLNLPEVPSALPRRSQPSLMGALGSSVSRASLLGKQQVTLPIPCRAAVPRFVQQKLYLFLQHCFGHWPLDASFRAVLEMWLSYLQPWRYAPDKQAPGSDSQPRCVSEKWAPFVQENLLMYTKLFVGFLNRALRTDLVSPKHALMVFRVAKVFAQPNLAEMIQKGEQLFLEPELVIPHRQHRLFTAPTFTGSFLSPWPPAVTDASFKVKSHVYSLEGQDCKYTPMFGPEARTLVLRLAQLITQAKHTAKSISDQCAESPAGHSFLSWLGFSSMDTNGSYTANDLDEMGQDSVRKTDEYLEKALEYLRQIFRLSEAQLRQFTLALGTTQDENGKKQLPDCIVGEDGLILTPLGRYQIINGLRRFEIEYQGDPELQPIRSYEIASLVRTLFRLSSAINHRFAGQMAALCSRDDFLGSFCRYHLTEPGLASRHLLSPVGRRQVAGHTRGPRLSLRFLGSYRTLVSLLLAFFVASLFCVGPLPCTLLLTLGYVLYASAMTLLTERGKLHQP

SEQ ID NO: 25327 - protein, 178 aa, Artificial Sequence
  Synthetic polypeptide
ALEAEAAVSRDHDTTARESFTPTEEHVLVVRLLLKHLHAFANSLKPEQASPSAHSHATSPLEEFKRAAVPRFVQQKLYLFLQHCFGHWPLDASFRAVLEMWLSYLQPWRYAPDKQAPGSDSQPRAPFVQENLLMYTKLFVGFLNRALRTDLVSPKHALMVFRVAKVFAQPNLAEMIQK

SEQ ID NO: 25328 - protein, 85 aa, Artificial Sequence
  Synthetic polypeptide
ALEAEAAVSRDHDTTARESFTPTEEHVLVVRLLLKHLHAFANSLKPEQASPSAHSHATSPLEEFKRIALATGPWTHRSELSWRCG

SEQ ID NO: 25329 - protein, 36 aa, Artificial Sequence
  Synthetic polypeptide
RAQGPHTSNLSALGGPAGKDCSRPGVQDQPGQHSFC

SEQ ID NO: 25330 - protein, 567 aa, Artificial Sequence
  Synthetic polypeptide
GRRGLTPLILVRWEAQQERIAQGREFKTSLASIVFVEMWLHHYSLEMYQKMQSPHAKESFTPTEEHVLVVRLLLKHLHAFANSLKPEQASPSAHSHATSPLEEFKRAAVPRFVQQKLYLFLQHCFGHWPLDASFRAVLEMWLSYLQPWRYAPDKQAPGSDSQPRCVSEKWAPFVQENLLMYTKLFVGFLNRALRTDLVSPKHALMVFRVAKVFAQPNLAEMIQKGEQLFLEPELVIPHRQHRLFTAPTFTGSFLSPWPPAVTDASFKVKSHVYSLEGQDCKYTPMFGPEARTLVLRLAQLITQAKHTAKSISDQCAESPAGHSFLSWLGFSSMDTNGSYTANDLDEMGQDSVRKTDEYLEKALEYLRQIFRLSEAQLRQFTLALGTTQDENGKKQLPDCIVGEDGLILTPLGRYQIINGLRRFEIEYQGDPELQPIRSYEIASLVRTLFRLSSAINHRFAGQMAALCSRDDFLGSFCRYHLTEPGLASRHLLSPVGRRQVAGHTRGPRLSLRFLGSYRTLVSLLLAFFVASLFCVGPLPCTLLLTLGYVLYASAMTLLTERGKLHQP

SEQ ID NO: 25331 - protein, 642 aa, Artificial Sequence
  Synthetic polypeptide
GRRGLTPLILVRWEAQQERIAQGREFKTSLASIVFVEMWLHHYSLEMYQKMQSPHAKLEVLHYRLSVSSALYSPAQPSLQALHAYQESFTPTEEHVLVVRLLLKHLHAFANSLKPEQASPSAHSHATSPLEEFKRMGLNLPEVPSALPRRSQPSLMGALGSSVSRASLLGKQQVTLPIPCRAAVPRFVQQKLYLFLQHCFGHWPLDASFRAVLEMWLSYLQPWRYAPDKQAPGSDSQPRCVSEKWAPFVQENLLMYTKLFVGFLNRALRTDLVSPKHALMVFRVAKVFAQPNLAEMIQKGEQLFLEPELVIPHRQHRLFTAPTFTGSFLSPWPPAVTDASFKVKSHVYSLEGQDCKYTPMFGPEARTLVLRLAQLITQAKHTAKSISDQCAESPAGHSFLSWLGFSSMDTNGSYTANDLDEMGQDSVRKTDEYLEKALEYLRQIFRLSEAQLRQFTLALGTTQDENGKKQLPDCIVGEDGLILTPLGRYQIINGLRRFEIEYQGDPELQPIRSYEIASLVRTLFRLSSAINHRFAGQMAALCSRDDFLGSFCRYHLTEPGLASRHLLSPVGRRQVAGHTRGPRLSLRFLGSYRTLVSLLLAFFVASLFCVGPLPCTLLLTLGYVLYASAMTLLTERGKLHQP

SEQ ID NO: 25332 - protein, 596 aa, Artificial Sequence
  Synthetic polypeptide
GRRGLTPLILVRWEAQQERIAQGREFKTSLASIVFVEMWLHHYSLEMYQKMQSPHAKLEVLHYRLSVSSALYSPAQPSLQALHAYQESFTPTEEHVLVVRLLLKHLHAFANSLKPEQASPSAHSHATSPLEEFKRAAVPRFVQQKLYLFLQHCFGHWPLDASFRAVLEMWLSYLQPWRYAPDKQAPGSDSQPRCVSEKWAPFVQENLLMYTKLFVGFLNRALRTDLVSPKHALMVFRVAKVFAQPNLAEMIQKGEQLFLEPELVIPHRQHRLFTAPTFTGSFLSPWPPAVTDASFKVKSHVYSLEGQDCKYTPMFGPEARTLVLRLAQLITQAKHTAKSISDQCAESPAGHSFLSWLGFSSMDTNGSYTANDLDEMGQDSVRKTDEYLEKALEYLRQIFRLSEAQLRQFTLALGTTQDENGKKQLPDCIVGEDGLILTPLGRYQIINGLRRFEIEYQGDPELQPIRSYEIASLVRTLFRLSSAINHRFAGQMAALCSRDDFLGSFCRYHLTEPGLASRHLLSPVGRRQVAGHTRGPRLSLRFLGSYRTLVSLLLAFFVASLFCVGPLPCTLLLTLGYVLYASAMTLLTERGKLHQP

SEQ ID NO: 25333 - protein, 93 aa, Artificial Sequence
  Synthetic polypeptide
GRRGLTPLILVRWEAQQERIAQGREFKTSLASIVFVEMWLHHYSLEMYQKMQSPHAKLEVLHYRLSVSSALYSPAQPSLQALHAYQVPGQQRK

SEQ ID NO: 25334 - protein, 103 aa, Artificial Sequence
  Synthetic polypeptide
GRRGLTPLILVRWEAQQERIAQGREFKTSLASIVFVEMWLHHYSLEMYQKMQSPHAKGCCPEVRPAETLPLLAALLWPLAPGRIVQSCPGDVAELPAAVAVRA

SEQ ID NO: 25335 - protein, 214 aa, Artificial Sequence
  Synthetic polypeptide
GRRGLTPLILVRWEAQQERIAQGREFKTSLASIVFVEMWLHHYSLEMYQKMQSPHAKVLEMWLSYLQPWRYAPDKQAPGSDSQPRCVSEKWAPFVQENLLMYTKLFVGFLNRALRTDLVSPKHALMVFRVAKVFAQPNLAEMIQKGEQLFLEPELVIPHRQHRLFTAPTFTGSFLSPWPPAVTDASFKVKSHVYSLEGQDCKYTPMFGPEARTL

SEQ ID NO: 25336 - protein, 218 aa, Artificial Sequence
  Synthetic polypeptide
GRRGLTPLILVRWEAQQERIAQGREFKTSLASIVFVEMWLHHYSLEMYQKMQSPHAKESFTPTEEHVLVVRLLLKHLHAFANSLKPEQASPSAHSHATSPLEEFKRAAVPRFVQQKLYLFLQHCFGHWPLDASFRAVLEMWLSYLQPWRYAPDKQAPGSDSQPRAPFVQENLLMYTKLFVGFLNRALRTDLVSPKHALMVFRVAKVFAQPNLAEMIQK

SEQ ID NO: 25337 - protein, 827 aa, Artificial Sequence
  Synthetic polypeptide
PAVIVHLYPSGCCEWFAKKAIFNSPLEAAMAFPHLQQPSFLLASLKADSINKPFAQQCQDLVKVIEDFPAKELHTIFPWLVESIFGSLDGVLVGWNLRCLQGRVNPVEYSIVMEFLDPGGPMMKLVYKLQAEDYKFDFPVSYLPGPVKASIQECILPDSPLYHNKVQFTPTGGLGLNLALNPFEYYIFFFALSLITQKPLPVSLHVRTSDCAYFILVDRYLSWFLPTEGSVPPPLSSSPGGTSPSPPPRTPAIPFASYGLHHTSLLKRHISHQTSVNADPASHEIWRSETLLQVFVEMWLHHYSLEMYQKMQSPHAKESFTPTEEHVLVVRLLLKHLHAFANSLKPEQASPSAHSHATSPLEEFKRAAVPRFVQQKLYLFLQHCFGHWPLDASFRAVLEMWLSYLQPWRYAPDKQAPGSDSQPRCVSEKWAPFVQENLLMYTKLFVGFLNRALRTDLVSPKHALMVFRVAKVFAQPNLAEMIQKGEQLFLEPELVIPHRQHRLFTAPTFTGSFLSPWPPAVTDASFKVKSHVYSLEGQDCKYTPMFGPEARTLVLRLAQLITQAKHTAKSISDQCAESPAGHSFLSWLGFSSMDTNGSYTANDLDEMGQDSVRKTDEYLEKALEYLRQIFRLSEAQLRQFTLALGTTQDENGKKQLPDCIVGEDGLILTPLGRYQIINGLRRFEIEYQGDPELQPIRSYEIASLVRTLFRLSSAINHRFAGQMAALCSRDDFLGSFCRYHLTEPGLASRHLLSPVGRRQVAGHTRGPRLSLRFLGSYRTLVSLLLAFFVASLFCVGPLPCTLLLTLGYVLYASAMTLLTERGKLHQP

SEQ ID NO: 25338 - protein, 40 aa, Artificial Sequence
  Synthetic polypeptide
YICTHRVVVSGLLRRPFSTLHWRLLWRSLTCSSPAFYWLA

SEQ ID NO: 25339 - protein, 605 aa, Artificial Sequence
  Synthetic polypeptide
PAVIVHLYPSGCCEWFAKKAIFNSPLEAAMAFPHLQQPSFLLASLKADSINKPFAQQCQDLVKVIEDFPAKVFVEMWLHHYSLEMYQKMQSPHAKESFTPTEEHVLVVRLLLKHLHAFANSLKPEQASPSAHSHATSPLEEFKRAAVPRFVQQKLYLFLQHCFGHWPLDASFRAVLEMWLSYLQPWRYAPDKQAPGSDSQPRCVSEKWAPFVQENLLMYTKLFVGFLNRALRTDLVSPKHALMVFRVAKVFAQPNLAEMIQKGEQLFLEPELVIPHRQHRLFTAPTFTGSFLSPWPPAVTDASFKVKSHVYSLEGQDCKYTPMFGPEARTLVLRLAQLITQAKHTAKSISDQCAESPAGHSFLSWLGFSSMDTNGSYTANDLDEMGQDSVRKTDEYLEKALEYLRQIFRLSEAQLRQFTLALGTTQDENGKKQLPDCIVGEDGLILTPLGRYQIINGLRRFEIEYQGDPELQPIRSYEIASLVRTLFRLSSAINHRFAGQMAALCSRDDFLGSFCRYHLTEPGLASRHLLSPVGRRQVAGHTRGPRLSLRFLGSYRTLVSLLLAFFVASLFCVGPLPCTLLLTLGYVLYASAMTLLTERGKLHQP

SEQ ID NO: 25340 - protein, 856 aa, Artificial Sequence
  Synthetic polypeptide
PAVIVHLYPSGCCEWFAKKAIFNSPLEAAMAFPHLQQPSFLLASLKADSINKPFAQQCQDLVKVIEDFPAKELHTIFPWLVESIFGSLDGVLVGWNLRCLQGRVNPVEYSIVMEFLDPGGPMMKLVYKLQAEDYKFDFPVSYLPGPVKASIQECILPDSPLYHNKVQFTPTGGLGLNLALNPFEYYIFFFALSLITQKPLPVSLHVRTSDCAYFILVDRYLSWFLPTEGSVPPPLSSSPGGTSPSPPPRTPAIPFASYGLHHTSLLKRHISHQTSVNADPASHEIWRSETLLQVFVEMWLHHYSLEMYQKMQSPHAKLEVLHYRLSVSSALYSPAQPSLQALHAYQESFTPTEEHVLVVRLLLKHLHAFANSLKPEQASPSAHSHATSPLEEFKRAAVPRFVQQKLYLFLQHCFGHWPLDASFRAVLEMWLSYLQPWRYAPDKQAPGSDSQPRCVSEKWAPFVQENLLMYTKLFVGFLNRALRTDLVSPKHALMVFRVAKVFAQPNLAEMIQKGEQLFLEPELVIPHRQHRLFTAPTFTGSFLSPWPPAVTDASFKVKSHVYSLEGQDCKYTPMFGPEARTLVLRLAQLITQAKHTAKSISDQCAESPAGHSFLSWLGFSSMDTNGSYTANDLDEMGQDSVRKTDEYLEKALEYLRQIFRLSEAQLRQFTLALGTTQDENGKKQLPDCIVGEDGLILTPLGRYQIINGLRRFEIEYQGDPELQPIRSYEIASLVRTLFRLSSAINHRFAGQMAALCSRDDFLGSFCRYHLTEPGLASRHLLSPVGRRQVAGHTRGPRLSLRFLGSYRTLVSLLLAFFVASLFCVGPLPCTLLLTLGYVLYASAMTLLTERGKLHQP

SEQ ID NO: 25341 - protein, 754 aa, Artificial Sequence
  Synthetic polypeptide
PAVIVHLYPSGCCEWFAKKAIFNSPLEAAMAFPHLQQPSFLLASLKADSINKPFAQQCQDLVKVIEDFPAKGPVKASIQECILPDSPLYHNKVQFTPTGGLGLNLALNPFEYYIFFFALSLITQKPLPVSLHVRTSDCAYFILVDRYLSWFLPTEGSVPPPLSSSPGGTSPSPPPRTPAIPFASYGLHHTSLLKRHISHQTSVNADPASHEIWRSETLLQVFVEMWLHHYSLEMYQKMQSPHAKESFTPTEEHVLVVRLLLKHLHAFANSLKPEQASPSAHSHATSPLEEFKRAAVPRFVQQKLYLFLQHCFGHWPLDASFRAVLEMWLSYLQPWRYAPDKQAPGSDSQPRCVSEKWAPFVQENLLMYTKLFVGFLNRALRTDLVSPKHALMVFRVAKVFAQPNLAEMIQKGEQLFLEPELVIPHRQHRLFTAPTFTGSFLSPWPPAVTDASFKVKSHVYSLEGQDCKYTPMFGPEARTLVLRLAQLITQAKHTAKSISDQCAESPAGHSFLSWLGFSSMDTNGSYTANDLDEMGQDSVRKTDEYLEKALEYLRQIFRLSEAQLRQFTLALGTTQDENGKKQLPDCIVGEDGLILTPLGRYQIINGLRRFEIEYQGDPELQPIRSYEIASLVRTLFRLSSAINHRFAGQMAALCSRDDFLGSFCRYHLTEPGLASRHLLSPVGRRQVAGHTRGPRLSLRFLGSYRTLVSLLLAFFVASLFCVGPLPCTLLLTLGYVLYASAMTLLTERGKLHQP

SEQ ID NO: 25342 - protein, 53 aa, Artificial Sequence
  Synthetic polypeptide
DCIGRARLGGSTQPSARHTLGARGLLRRPFSTLHWRLLWRSLTCSSPAFYWLA

SEQ ID NO: 25343 - protein, 17 aa, Artificial Sequence
  Synthetic polypeptide
VAAPSPVPGIHWALVVC

SEQ ID NO: 25344 - protein, 835 aa, Artificial Sequence
  Synthetic polypeptide
MHWSCSLRWQHPAQCQAYIGRSWFAKKAIFNSPLEAAMAFPHLQQPSFLLASLKADSINKPFAQQCQDLVKVIEDFPAKELHTIFPWLVESIFGSLDGVLVGWNLRCLQGRVNPVEYSIVMEFLDPGGPMMKLVYKLQAEDYKFDFPVSYLPGPVKASIQECILPDSPLYHNKVQFTPTGGLGLNLALNPFEYYIFFFALSLITQKPLPVSLHVRTSDCAYFILVDRYLSWFLPTEGSVPPPLSSSPGGTSPSPPPRTPAIPFASYGLHHTSLLKRHISHQTSVNADPASHEIWRSETLLQVFVEMWLHHYSLEMYQKMQSPHAKESFTPTEEHVLVVRLLLKHLHAFANSLKPEQASPSAHSHATSPLEEFKRAAVPRFVQQKLYLFLQHCFGHWPLDASFRAVLEMWLSYLQPWRYAPDKQAPGSDSQPRCVSEKWAPFVQENLLMYTKLFVGFLNRALRTDLVSPKHALMVFRVAKVFAQPNLAEMIQKGEQLFLEPELVIPHRQHRLFTAPTFTGSFLSPWPPAVTDASFKVKSHVYSLEGQDCKYTPMFGPEARTLVLRLAQLITQAKHTAKSISDQCAESPAGHSFLSWLGFSSMDTNGSYTANDLDEMGQDSVRKTDEYLEKALEYLRQIFRLSEAQLRQFTLALGTTQDENGKKQLPDCIVGEDGLILTPLGRYQIINGLRRFEIEYQGDPELQPIRSYEIASLVRTLFRLSSAINHRFAGQMAALCSRDDFLGSFCRYHLTEPGLASRHLLSPVGRRQVAGHTRGPRLSLRFLGSYRTLVSLLLAFFVASLFCVGPLPCTLLLTLGYVLYASAMTLLTERGKLHQP

SEQ ID NO: 25345 - protein, 613 aa, Artificial Sequence
  Synthetic polypeptide
MHWSCSLRWQHPAQCQAYIGRSWFAKKAIFNSPLEAAMAFPHLQQPSFLLASLKADSINKPFAQQCQDLVKVIEDFPAKVFVEMWLHHYSLEMYQKMQSPHAKESFTPTEEHVLVVRLLLKHLHAFANSLKPEQASPSAHSHATSPLEEFKRAAVPRFVQQKLYLFLQHCFGHWPLDASFRAVLEMWLSYLQPWRYAPDKQAPGSDSQPRCVSEKWAPFVQENLLMYTKLFVGFLNRALRTDLVSPKHALMVFRVAKVFAQPNLAEMIQKGEQLFLEPELVIPHRQHRLFTAPTFTGSFLSPWPPAVTDASFKVKSHVYSLEGQDCKYTPMFGPEARTLVLRLAQLITQAKHTAKSISDQCAESPAGHSFLSWLGFSSMDTNGSYTANDLDEMGQDSVRKTDEYLEKALEYLRQIFRLSEAQLRQFTLALGTTQDENGKKQLPDCIVGEDGLILTPLGRYQIINGLRRFEIEYQGDPELQPIRSYEIASLVRTLFRLSSAINHRFAGQMAALCSRDDFLGSFCRYHLTEPGLASRHLLSPVGRRQVAGHTRGPRLSLRFLGSYRTLVSLLLAFFVASLFCVGPLPCTLLLTLGYVLYASAMTLLTERGKLHQP

SEQ ID NO: 25346 - protein, 864 aa, Artificial Sequence
  Synthetic polypeptide
MHWSCSLRWQHPAQCQAYIGRSWFAKKAIFNSPLEAAMAFPHLQQPSFLLASLKADSINKPFAQQCQDLVKVIEDFPAKELHTIFPWLVESIFGSLDGVLVGWNLRCLQGRVNPVEYSIVMEFLDPGGPMMKLVYKLQAEDYKFDFPVSYLPGPVKASIQECILPDSPLYHNKVQFTPTGGLGLNLALNPFEYYIFFFALSLITQKPLPVSLHVRTSDCAYFILVDRYLSWFLPTEGSVPPPLSSSPGGTSPSPPPRTPAIPFASYGLHHTSLLKRHISHQTSVNADPASHEIWRSETLLQVFVEMWLHHYSLEMYQKMQSPHAKLEVLHYRLSVSSALYSPAQPSLQALHAYQESFTPTEEHVLVVRLLLKHLHAFANSLKPEQASPSAHSHATSPLEEFKRAAVPRFVQQKLYLFLQHCFGHWPLDASFRAVLEMWLSYLQPWRYAPDKQAPGSDSQPRCVSEKWAPFVQENLLMYTKLFVGFLNRALRTDLVSPKHALMVFRVAKVFAQPNLAEMIQKGEQLFLEPELVIPHRQHRLFTAPTFTGSFLSPWPPAVTDASFKVKSHVYSLEGQDCKYTPMFGPEARTLVLRLAQLITQAKHTAKSISDQCAESPAGHSFLSWLGFSSMDTNGSYTANDLDEMGQDSVRKTDEYLEKALEYLRQIFRLSEAQLRQFTLALGTTQDENGKKQLPDCIVGEDGLILTPLGRYQIINGLRRFEIEYQGDPELQPIRSYEIASLVRTLFRLSSAINHRFAGQMAALCSRDDFLGSFCRYHLTEPGLASRHLLSPVGRRQVAGHTRGPRLSLRFLGSYRTLVSLLLAFFVASLFCVGPLPCTLLLTLGYVLYASAMTLLTERGKLHQP

SEQ ID NO: 25347 - protein, 762 aa, Artificial Sequence
  Synthetic polypeptide
MHWSCSLRWQHPAQCQAYIGRSWFAKKAIFNSPLEAAMAFPHLQQPSFLLASLKADSINKPFAQQCQDLVKVIEDFPAKGPVKASIQECILPDSPLYHNKVQFTPTGGLGLNLALNPFEYYIFFFALSLITQKPLPVSLHVRTSDCAYFILVDRYLSWFLPTEGSVPPPLSSSPGGTSPSPPPRTPAIPFASYGLHHTSLLKRHISHQTSVNADPASHEIWRSETLLQVFVEMWLHHYSLEMYQKMQSPHAKESFTPTEEHVLVVRLLLKHLHAFANSLKPEQASPSAHSHATSPLEEFKRAAVPRFVQQKLYLFLQHCFGHWPLDASFRAVLEMWLSYLQPWRYAPDKQAPGSDSQPRCVSEKWAPFVQENLLMYTKLFVGFLNRALRTDLVSPKHALMVFRVAKVFAQPNLAEMIQKGEQLFLEPELVIPHRQHRLFTAPTFTGSFLSPWPPAVTDASFKVKSHVYSLEGQDCKYTPMFGPEARTLVLRLAQLITQAKHTAKSISDQCAESPAGHSFLSWLGFSSMDTNGSYTANDLDEMGQDSVRKTDEYLEKALEYLRQIFRLSEAQLRQFTLALGTTQDENGKKQLPDCIVGEDGLILTPLGRYQIINGLRRFEIEYQGDPELQPIRSYEIASLVRTLFRLSSAINHRFAGQMAALCSRDDFLGSFCRYHLTEPGLASRHLLSPVGRRQVAGHTRGPRLSLRFLGSYRTLVSLLLAFFVASLFCVGPLPCTLLLTLGYVLYASAMTLLTERGKLHQP

SEQ ID NO: 25348 - protein, 64 aa, Artificial Sequence
  Synthetic polypeptide
EGDGQWEFFLPGWRTRRRERHCRMLEAEACATEAPLAGVGGDVGHYSSARVVEMLWGRKPPDSH

SEQ ID NO: 25349 - protein, 259 aa, Artificial Sequence
  Synthetic polypeptide
KCCGVENRLIPTELRREALALQGSLEFDDAGGEGVTSHVDDEYRWAGVEDPKVMITTSRDPSSRLKMFAKELKLVFPGAQRMNRGRHEVGALVRACKANGVTDLLVVHEHRGTPVGLIVSHLPFGPTAYFTLCNVVMRHDIPDLGTMSEAKPHLITHGFSSRLGKRVSDILRYLFPVPKDDSHRVITFANQDDYISFRHHVYKKTDHRNVELTEVGPRFELKLYMIRLGTLEQEATADVEWRWHPYTNTARKRVFLSTE

SEQ ID NO: 25350 - protein, 216 aa, Artificial Sequence
  Synthetic polypeptide
KCCGVENRLIPTELRREALALQGSLEFDDAGGEGVTSHVDDEYRWAGVEDPKVMITTSRDPSSRLKMFAKELKLVFPGAQRMNRGRHEVGALVRACKANGVTDLLVVHEHRGTPVGLIVSHLPFGPTAYFTLCNVVMRHDIPDLGTMSEAKPHLITHGFSSRLGKRVSDILRYLFPVPKDDSHRVITFANQDDYISFRHHVYKKTDHRNVELTECT

SEQ ID NO: 25351 - protein, 44 aa, Artificial Sequence
  Synthetic polypeptide
KCCGVENRLIPTELRREALALQGSLEFDDAGGEGNYTRCDQPRG

SEQ ID NO: 25352 - protein, 90 aa, Artificial Sequence
  Synthetic polypeptide
VLTRADGFIRGSLRFTSLFSLSRRLMKKVPASPSPSTMVVKFPEASPAMRNCESINPLSFMNYLVSVTNKMILRSNFVKNRTLEYYTMRF

SEQ ID NO: 25353 - protein, 493 aa, Artificial Sequence
  Synthetic polypeptide
SSFLYELPSLSDEQNDTQKQFCEEQNTGILHDEILIHEEKQIEVVEKMNSELSLSCKKEKDFLHENSTLREEIAMLRLELDTMKHQSQLRKKKYLEDIESVKKKNDNLLKALQLNELTMDDDTAVLVIDNGSGMCKAGFAGDDAPRAVFPSIVGRPRQQGMMGGMHQKESYVGKEAQSKRGILTLKYPMEHGIITNWDDMEKIWHHTFYNELRVAPEEHPILLTEAPLNPKANREKMTQIMFETFNTPAMYVAIQAMLSLYTSGRTTGIVMDSGDGVTHTVPIYDGNALPHATLRLDLAGRELTDYLMKILTERGYRFTTMAEREIVRDIKEKLCYVALDFEQEMAMAASSSSLEKSYELPDGQVITIGNEWFRCPEALFQPCFLGMESCGIHETTFNSIMKSDVDIRKDLYTNTVLSGGTTMYPGMAHRMQKEIAALAPSMLKIRIIAPPKRKYSVWVGGSILASLSTFQQMWISKQEYDESGPSIVHRKCF

SEQ ID NO: 25354 - protein, 26 aa, Artificial Sequence
  Synthetic polypeptide
GRAWWLTPVITALWEAEAGGSREFAN

SEQ ID NO: 25355 - protein, 19 aa, Artificial Sequence
  Synthetic polypeptide
SQHFGRPRQADHENLRISF

SEQ ID NO: 25356 - protein, 627 aa, Artificial Sequence
  Synthetic polypeptide
SGMVAHTCNHSTLGGRGRRITRICELVSDYKEKQMPKYSSENSNPEQDLKLTSEEESQRLKGSENGQPEKRSQEPEINKDGDRELENFMAIEEMKKHGSTHVGFPENLTNGATAGNGDDGLIPPRKSRTPESQQFPDTENEEYHSDEQNDTQKQFCEEQNTGILHDEILIHEEKQIEVVEKMNSELSLSCKKEKDFLHENSTLREEIAMLRLELDTMKHQSQLRKKKYLEDIESVKKKNDNLLKALQLNELTMDDDTAVLVIDNGSGMCKAGFAGDDAPRAVFPSIVGRPRQQGMMGGMHQKESYVGKEAQSKRGILTLKYPMEHGIITNWDDMEKIWHHTFYNELRVAPEEHPILLTEAPLNPKANREKMTQIMFETFNTPAMYVAIQAMLSLYTSGRTTGIVMDSGDGVTHTVPIYDGNALPHATLRLDLAGRELTDYLMKILTERGYRFTTMAEREIVRDIKEKLCYVALDFEQEMAMAASSSSLEKSYELPDGQVITIGNEWFRCPEALFQPCFLGMESCGIHETTFNSIMKSDVDIRKDLYTNTVLSGGTTMYPGMAHRMQKEIAALAPSMLKIRIIAPPKRKYSVWVGGSILASLSTFQQMWISKQEYDESGPSIVHRKCF

SEQ ID NO: 25357 - protein, 180 aa, Artificial Sequence
  Synthetic polypeptide
ISLTRSDGFIKGSSPAHVCSSFAFHHDCEASPAMCNCYTPGTPYKVSCSPTSGAVPPYSSSPNPYQTAVYPVRSAYPQQSPYAQQGTYYTQPLYAAPPHVIHHTTVVQPNGMPATVYPAPIPPPRGNGVTMGMVAGTTMAMSAGTLLTAHSPTPVAPHPVTVPTYRAPGTPTYSYVPPQW

SEQ ID NO: 25358 - protein, 136 aa, Artificial Sequence
  Synthetic polypeptide
RAVPLHTFALPLPSTMIVRPPQPCVTVTLLAHLTKCPVPPPAGLCHRTPPPRTPTRLPCTLCEVPTPSRARMHSKARTTHSRCMQHLLTSSTTPRWCSPTACLQRCTLLPSPLLEATGSPWAWWLGPPWPCQQVPC

SEQ ID NO: 25359 - protein, 121 aa, Artificial Sequence
  Synthetic polypeptide
SPHVTGGTWWEVTLLAHLTKCPVPPPAGLCHRTPPPRTPTRLPCTLCEVPTPSRARMHSKARTTHSRCMQHLLTSSTTPRWCSPTACLQRCTLLPSPLLEATGSPWAWWLGPPWPCQQVPC

SEQ ID NO: 25360 - protein, 117 aa, Artificial Sequence
  Synthetic polypeptide
DMVWLCPHPNLILNCSSCNPHMSLEGPGGRLHSWHTLQSVLFPHQRGCATVLLLPEPLPDCRVPCAKCLPPAEPVCTARHVLHTAAVCSTSSRHPPHHGGAAQRHACNGVPCSHPPS

SEQ ID NO: 25361 - protein, 160 aa, Artificial Sequence
  Synthetic polypeptide
IVAPVIPTCHWRDLVGGYTPGTPYKVSCSPTSGAVPPYSSSPNPYQTAVYPVRSAYPQQSPYAQQGTYYTQPLYAAPPHVIHHTTVVQPNGMPATVYPAPIPPPRGNGVTMGMVAGTTMAMSAGTLLTAHSPTPVAPHPVTVPTYRAPGTPTYSYVPPQW

SEQ ID NO: 25362 - protein, 67 aa, Artificial Sequence
  Synthetic polypeptide
GRAWWLMPVISALWEADAGGLRGLYGQQPANQVIIRERYRDNDSDLALGMLAGAATGMALGSLFWVF

SEQ ID NO: 25363 - protein, 50 aa, Artificial Sequence
  Synthetic polypeptide
SQHFGRPTRVDYEDFMDSSLLTKSSFESAIETTTATWHWACWQEQPRAWP

SEQ ID NO: 25364 - protein, 29 aa, Artificial Sequence
  Synthetic polypeptide
PGVVAHACNLSTLGGRRGWITRTLWTAAC

SEQ ID NO: 25365 - protein, 60 aa, Artificial Sequence
  Synthetic polypeptide
GRAWWLMPVISALWEADAGGLRGLYGQQPANQVIIRERYRDNDSDLALGMLAGAATGMAL

SEQ ID NO: 25366 - protein, 70 aa, Artificial Sequence
  Synthetic polypeptide
GRAWWLMPVISALWEADAGGLRGQEIETILANTDFMDSSLLTKSSFESAIETTTATWHWACWQEQPRAWP

SEQ ID NO: 25367 - protein, 31 aa, Artificial Sequence
  Synthetic polypeptide
SQHFGRPTRVDYEVRRSRPSWLTRTLWTAAC

SEQ ID NO: 25368 - protein, 46 aa, Artificial Sequence
  Synthetic polypeptide
HGLYGQQPANQVIIRERYRDNDSDLALGMLAGAATGMALGSLFWVF

SEQ ID NO: 25369 - protein, 39 aa, Artificial Sequence
  Synthetic polypeptide
HGLYGQQPANQVIIRERYRDNDSDLALGMLAGAATGMAL

SEQ ID NO: 25370 - protein, 90 aa, Artificial Sequence; identical to SEQ ID NO: 25309
  Synthetic polypeptide

SEQ ID NO: 25371 - protein, 493 aa, Artificial Sequence
  Synthetic polypeptide
SSFLYELPSLSDEQNDTQKQFCEEQNTGILHDEILIHEEKQIEVVEKMNSELSLSCKKEKDVLHENSTLREEIAMLRLELDTMKHQSQLREKKYLEDIESVKKKNDNLLKALQLNELTMDDDTAVLVIDNGSGMCKAGFAGDDAPRAVFPSIVGRPRQQGMMGGMHQKESYVGKEAQSKRGILTLKYPMEHGIITNWDDMEKIWHHTFYNELRVAPEEHPILLTEAPLNPKANREKMTQIMFETFNTPAMYVAIQAVPSLYTSGRTTGIVMDSGDGVTHTVPIYEGNALPHATLRLDLAGRELPDYLMKILTERGYRFTTMAEREIVRDIKEKLCYVALDFEQEMATAASSSSLEKSYELPDGQVITIGNERFRCPEALFQPCFLGMESCGIHETTFNSIMKSDVDIRKDLYTNTVLSGGTTMYPGMAHRMQKEIAALAPSMMKIRIIAPPKRKYSVWVGGSILASLSTFQQMWISKQEYDESGPSIVHRKCF

SEQ ID NO: 25372 - protein, 27 aa, Artificial Sequence
  Synthetic polypeptide
HGVEELEAAWVAKEMPGFSFPLSHLLE

SEQ ID NO: 25373 - protein, 285 aa, Artificial Sequence
  Synthetic polypeptide
AIYWNKKIYLDIIHTYMEVHATVYGSSTKNIPSYVKNHGILSGRDLQFLLRETKLFVGLGFPYEGPAPLEAIANGCAFLNPKFNPPKSSKNTDFFIGKPTLRELTSQHPYAEVFIGRPHVWTVDLNNQEEVEDAVKAILNQKIEPYMPYEFTCEGMLQRINAFIEKQDFCHGQVMWPPLSALQVKLAEPGQSCKQVCQESQLICEPSFFQHLNKDKDMLKYKVTCQSSELAKDILVPSFDPKNKHCVFQGDLLLFSCAGAHPRHQRVCPCRDFIKGQVALCKDCL

SEQ ID NO: 25374 - protein, 56 aa, Artificial Sequence
  Synthetic polypeptide
WCRGVGGGLGGKGDARILISVEPFIGIRRSTWTLFTHTWKCMQLFMAPAQRIFPVT

SEQ ID NO: 25375 - protein, 44 aa, Artificial Sequence
  Synthetic polypeptide
LSLVTLLLLPLALARMASDMPSVPPQSVLLTLLLWKVLPQLSPL

SEQ ID NO: 25376 - protein, 25 aa, Artificial Sequence
  Synthetic polypeptide
LFFSGRSFPSCLRYEVQRLCFWVCI

SEQ ID NO: 25377 - protein, 221 aa, Artificial Sequence
  Synthetic polypeptide
ISRNSPPASFGFSQNGLRHAKCSTSERFTDSSSLEGPSPAVSVMRYSASAFGFAFDAILDVLSSAIVLWRYSNAAAVHSAHREYIACVILGVIFLLSSICIVVKAIHDLSTRLLPEVDDFLFSVSILSGILCSILAVLKFMLGKVLTSRALITDGFNSLVGGVMGFSILLSAEVFKHDSAVWYLDGSIGVLIGLTIFAYGVKLLIDMVPRVRQTRHYEMFE

SEQ ID NO: 25378 - protein, 34 aa, Artificial Sequence
  Synthetic polypeptide
FPSLSCSPGGYGKLLAGEICLRYEVQRLCFWVCI

SEQ ID NO: 25379 - protein, 200 aa, Artificial Sequence
  Synthetic polypeptide
SPAFPAVQVAMENFWQVKSVSVMRYSASAFGFAFDAILDVLSSAIVLWRYSNAAAVHSAHREYIACVILGVIFLLSSICIVVKAIHDLSTRLLPEVDDFLFSVSILSGILCSILAVLKFMLGKVLTSRALITDGFNSLVGGVMGFSILLSAEVFKHDSAVWYLDGSIGVLIGLTIFAYGVKLLIDMVPRVRQTRHYEMFE

SEQ ID NO: 25380 - protein, 5 aa, Artificial Sequence
  Synthetic polypeptide
NLSPL

SEQ ID NO: 25381 - protein, 85 aa, Artificial Sequence
  Synthetic polypeptide
GDEGRTLVMGLCTYKKRHQRACFFSASTLCTEERPCEDAVRRQPSGTHGEPSPDTNPPSPWILDFQPPKLCLRYEVQRLCFWVCI

SEQ ID NO: 25382 - protein, 211 aa, Artificial Sequence
  Synthetic polypeptide
GGSHLEPTGSPPQTPTLPAPGSWTSSLQSSVSVMRYSASAFGFAFDAILDVLSSAIVLWRYSNAAAVHSAHREYIACVILGVIFLLSSICIVVKAIHDLSTRLLPEVDDFLFSVSILSGILCSILAVLKFMLGKVLTSRALITDGFNSLVGGVMGFSILLSAEVFKHDSAVWYLDGSIGVLIGLTIFAYGVKLLIDMVPRVRQTRHYEMFE

SEQ ID NO: 25383 - protein, 37 aa, Artificial Sequence
  Synthetic polypeptide
GRSEEAAIWNPRGALPRHQPSQPLDLGLPASKALSPL

SEQ ID NO: 25384 - protein, 36 aa, Artificial Sequence
  Synthetic polypeptide
DQPLFLSLLCMETFMMIHFHLILVLRSPLNTHTQMW

SEQ ID NO: 25385 - protein, 83 aa, Artificial Sequence
  Synthetic polypeptide
TEIVVYFCKVTPGVACLSCLLFCVFQPETVRPTPLPQPTLYGDLYDDPLPLNTSFEITIEHPHTDVVKCTQLVRDLWGIARNI

SEQ ID NO: 25386 - protein, 573 aa, Artificial Sequence
  Synthetic polypeptide
TEIVVYFCKVTPGVACLSCLLFCVFQPETVRPTPLPQPTLYGDLYDDPLPLNTSFEITIEHPHTDVVKCTQLVRASKDLAQTSYFMATNSLHLTTFCLQYKPTVIACVCIHLACKWSNWEIPVSTDGKHWWEYVDPTVTLELLDELTHEFLQILEKTPNRLKKIRNWRANQAARKPKVDGQVSETPLLGSSLVQNSILVDSVTGVPTNPSFQKPSTSAFPAPVPLNSGNISVQDSHTSDNLSMLATGMPSTSYGLSSHQEWPQHQDSARTEQLYSQKQETSLSGSQYNINFQQGPSISLHSGLHHRPDKISDHSSVKQEYTHKAGSSKHHGPISTTPGIIPQKMSLDKYREKRKLETLDLDVRDHYIAAQVEQQHKQGQSQAASSSSVTSPIKMKIPIANTEKYMADKKEKSGSLKLRIPIPPTDKSASKEELKMKIKVSSSERHSSSDEGSGKSKHSSPHISRDHKEKHKEHPSSRHHTSSHKHSHSHSGSSSGGSKHSADGIPPTVLRSPVGLSSDGISSSSSSSRKRLHVNDASHNHHSKMSKSSKSSGGLRTSQHPRETGQEASGDQRS

SEQ ID NO: 25387 - protein, 640 aa, Artificial Sequence
  Synthetic polypeptide
TEIVVYFCKVTPGVACLSCLLFCVFQPETVRPTPLPQPTLYGDLYDDPLPLNTSFEITIEHPHTDVVKCTQLVRASKDLAQTSYFMATNSLHLTTFCLQYKPTVIACVCIHLACKWSNWEIPVSTDGKHWWEYVDPTVTLELLDELTHEFLQILEKTPNRLKKIRNWRANQAARKPKVDGQVSETPLLGSSLVQNSILVDSVTGVPTNPSFQKPSTSAFPAPVPLNSGNISVQDSHTSDNLSMLATGMPSTSYGLSSHQEWPQHQDSARTEQLYSQKQETSLSGSQYNINFQQGPSISLHSGLHHRPDKISDHSSVKQEYTHKAGSSKHHGPISTTPGIIPQKMSLDKYREKRKLETLDLDVRDHYIAAQVEQQHKQGQSQAASSSSVTSPIKMKIPIANTEKYMADKKEKSGSLKLRIPIPPTDKSASKEELKMKIKVSSSERHSSSDEGSGKSKHSSPHISRDHKEKHKEHPSSRHHTSSHKHSHSHSGSSSGGSKHSADGIPPTVLRSPVGLSSDGISSSSSSSRKRLHVNDASHNHHSKMSKSSKSSGSSSSSSSSVKQYISSHNSVFNHPLPPPPPVTYQVGYGHLSTLVKLDKKPVETNGPDANHEYSTSSQHMDYKDTFDMLDSLLSAQGMNM

SEQ ID NO: 25388 - protein, 83 aa, Artificial Sequence
  Synthetic polypeptide
TEIVVYFCKVTPGVACLSCLLFCVFQPETVRPTPLPQPTLYGDLYDDPLPLNTSFEITIEHPHTDVVKCTQLVRGECFIATFS

SEQ ID NO: 25389 - protein, 909 aa, Artificial Sequence
  Synthetic polypeptide
GREQWLTPVIPALWEAEAGRSRGQEIKTKLFMQIEALFPQKFGRWTDYAKRYCNAHIRYFGKRPQWDCRGASNLNELHQLLSDIMIRRLKTEVLTQLPPKVRQRIPFDLPSAAAKELNTSFEEWEKIMRTPNSGAMETVMGLITRMFKQTAIAKAGAVKDYIKMMLQNDSLKFLVFAHHLSMLQACTEAVIENKTRYIRIDGSVSSSERIHLVNQFQKDPDTRVAILSIQAAGQGLTFTAASHVVFAELYWDPGHIKQAEDRAHRIGQCSSVNIHYLIANGTLDTLMWGMLNRKAQVTGSTLNGRKEKIQAEEGDKEKWDFLQFAEAWTPNDSSEELRKEALFTHFEKEKQHDIRSFFVPQPKKRQLMTSCDESKRFREENTVVSSDPTKTAARDIIDYESDVEPETKRLKLAASEDHCSPSEETPSQSKQIRTPLVESVQEAKAQLTTPAFPVEGWQCSLCTYINNSELPYCEMCETPQGSAVMQIDSLNHIQDKNEKDDSQKDTSKKVQTISDCEKQALAQSEPGQLADSKEETPKIEKEDGLTSQPEQWKSSDTLPVYDTLMFCASRNTDRIHIYTKDGKQMSCNFIPLDIKLDLWEDLPASFQLKQYRSLILRFVREWSSLTAMKQRIIRKSGQLFCSPILALEEITKQQTKQNCTKRYITKEDVAVASMDKVKNVGGHVRLITKESRPRDPFTKKLLEDGACVPFLNPYTVQADLTVKPSTSKGYLQAVDNEGNPLCLRCQQPTCQTKQACKANSWDSRFCSLKCQEEFWIRSNNSYLRAKVFETEHGVCQLCNVNAQELFLRLRDAPKSQRKNLLYATWTSKLPLEQLNEMIRNPGEGHFWQVDHIKPVYGGGGQCSLDNLQTLCTVCHKERTARQAKERSQVRRQSLASKHGSDITRFLVKK

SEQ ID NO: 25390 - protein, 71 aa, Artificial Sequence
  Synthetic polypeptide
SQHFGRLRRADHEVRRSRPSFLCRLKLSFHKNLEDGPTMQKDTVMHTSDILVKDLSGIVEGHQILMNFTSY

SEQ ID NO: 25391 - protein, 17 aa, Artificial Sequence
  Synthetic polypeptide
GGQITRSGDQDQAFYAD

SEQ ID NO: 25392 - protein, 911 aa, Artificial Sequence
  Synthetic polypeptide
GREQWLTPVIPALWEAEAGRSRGQEIKTKLFMQIEALFPQKFGRWTDYAKRYCNAHIRYFGKRPQWDCRGASNLNELHQLLSDIMIRRLKTEVLTQLPPKVRQRIPFDLPSAAAKELNTSFEEWEKIMRTPNSGAMETVMGLITRMFKQTAIAKAGAVKDYIKMMLQNDSLKFLVFAHHLSMLQACTEAVIENKTRYIRIDGSVSSSERIHLVNQFQKDPDTRVAILSIQAAGQGLTFTAASHVVFAELYWDPGHIKQAEDRAHRIGQCSSVNIHYLIANGTLDTLMWGMLNRKAQVTGSTLNGRKEKIQAEEGDKEKWDFLQFAEAWTPNDSSEELRKEALFTHFEKEKQHDIRSFFVPQPKKRQLMTSCDESKRFREENTVVSSDPTKTAARDIIDYESDVEPETKRLKLAASEDHCSPSEETPSQSKQIRTPLVESVQEAKAQLTTPAFPVEGWQCSLCTYINNSELPYCEMCETPQGSAVMQIDSLNHIQDKNEKDDSQKDTSKKVQTISDCEKQALAQSEPGQLADSKEETPKIEKEDGLTSQPGNEQWKSSDTLPVYDTLMFCASRNTDRIHIYTKDGKQMSCNFIPLDIKLDLWEDLPASFQLKQYRSLILRFVREWSSLTAMKQRIIRKSGQLFCSPILALEEITKQQTKQNCTKRYITKEDVAVASMDKVKNVGGHVRLITKESRPRDPFTKKLLEDGACVPFLNPYTVQADLTVKPSTSKGYLQAVDNEGNPLCLRCQQPTCQTKQACKANSWDSRFCSLKCQEEFWIRSNNSYLRAKVFETEHGVCQLCNVNAQELFLRLRDAPKSQRKNLLYATWTSKLPLEQLNEMIRNPGEGHFWQVDHIKPVYGGGGQCSLDNLQTLCTVCHKERTARQAKERSQVRRQSLASKHGSDITRFLVKK

SEQ ID NO: 25393 - protein, 260 aa, Artificial Sequence
  Synthetic polypeptide
GREQWLTPVIPALWEAEAGRSRGQEIKTKLFMQIEALFPQKFGRWTDYAKRYCNAHIRYFGKRPQWDCRGASNLNELHQLLSDIMIRRLKTEVLTQLPPKVRQRIPFDLPSAAAKELNTSFEEWEKIMRTPNSGAMETVMGLITRMFKQTAIAKAGAVKDYIKMMLQNDSLKFLVFAHHLSMLQACTEAVIENKTRYIRIDGSVSSSERIHLVNQFQKDPDTRVAILSIQAAGQDLYDKVAWGKRTLVSGLFMECFCFVP

SEQ ID NO: 25394 - protein, 31 aa, Artificial Sequence
  Synthetic polypeptide
WLVHPNALVRICPISRSVILQEHQRHLCALQ

SEQ ID NO: 25395 - protein, 115 aa, Artificial Sequence
  Synthetic polypeptide
SAVSNRSANTLLDDGWFILMRWSEYAPSQDQSFSRSIRDIFVLFSRLPATSRIRTSTISSNHFTMQFPAASRPPMYSWTTTATWWGDGDDAAQCTKQSTILCPLTPAVETKQILL

SEQ ID NO: 25396 - protein, 337 aa, Artificial Sequence
  Synthetic polypeptide
CAGQNMPHLKISHSPGASETSLCSSVGYLQHPGSEQVQFPRTTSPCSSQQLQGHQCTAGPPPPPGGGMVMMQLSVPNNPQSCAHSPPQWKQNKYYCDHQRGQKCVEFSSVDNIVQHSPQLSSPIISPAQSPAPAQLSTLKTVRPSGPPLSIMPQFSRPFVPGQGDSRYPLLGQPLQYNPPAVLHGHIPNQQGQPGSRHGNRGRRQAKKAASTDLGAGETVVGKVLEITELPDGITRMEAEKLFGELFKIGAKIRWLRDPQSQPRRHPLCCGSGDNTANPERSKPSDLASTYTVLATFPSISAAQNALKKQINSVNKFKLRTSKKHYDFHILERASSQ

SEQ ID NO: 25397 - protein, 165 aa, Artificial Sequence
  Synthetic polypeptide
CAGQNMPHLKISHSPGASETSLCSSVGYLQHPGSEQVQFPRTTSPCSSQQLQGHQCTAGPPPPPGGGMVMMQLSVPNNPQSCAHSPPQWKQNKYYCDHQRGQKCVEFSSVDNIVQEIPGIHYLASHCSTILLLFCTDTFQTNRVSLAAGMETEEGDKLKKLHPQT

SEQ ID NO: 25398 - protein, 180 aa, Artificial Sequence
  Synthetic polypeptide
DQPGQHRDSRYPLLGQPLQYNPPAVLHGHIPNQQGQPGSRHGNRGRRQAKKAASTDLGAGETVVGKVLEITELPDGITRMEAEKLFGELFKIGAKIRWLRDPQSQPRRHPLCCGSGDNTANPERSKPSDLASTYTVLATFPSISAAQNALKKQINSVNKFKLRTSKKHYDFHILERASSQ

SEQ ID NO: 25399 - protein, 87 aa, Artificial Sequence
  Synthetic polypeptide
GGRIAGGQEFETSLVNIEIPGIHYLASHCSTILLLFCTDTFQTNRVSLAAGMETEEGDKLKKLHPQTLEQEKQLLGRSWKLLNYQME

SEQ ID NO: 25400 - protein, 57 aa, Artificial Sequence
  Synthetic polypeptide
DQPGQHRDSRYPLLGQPLQYNPPAVLHGHIPNQQGQPGSRHGNRGRRQAKKAASTDL

SEQ ID NO: 25401 - protein, 67 aa, Artificial Sequence
  Synthetic polypeptide
GGRIAGGQEFETSLVNIEIPGIHYLASHCSTILLLFCTDTFQTNRVSLAAGMETEEGDKLKKLHPQT

SEQ ID NO: 25402 - protein, 84 aa, Artificial Sequence
  Synthetic polypeptide
TLTFMNCLFLKRVPRLFSGKEESFQQKVLGQLNIYMQNNEFGPLPHTMYKINLMDHLPKTLLQEFNSVFLMVLPLQISSLLMLL

SEQ ID NO: 25403 - protein, 16 aa, Artificial Sequence
  Synthetic polypeptide
WIIYQKHCCKNSIPSS

SEQ ID NO: 25404 - protein, 199 aa, Artificial Sequence
  Synthetic polypeptide
LNGSSTKNTVARIQFRLPDGSSFTNQFPSDAPLEEARQFAAQTVGNTYGNFSLATMFPRREFTKEDYKKKLLDLELAPSASVVLLPAGRPTASIVHSSSGDIWTLLGTVLYPFLAIWRLISNFLFSNPPPTQTSVRVTSSEPPNPASSSKSEKREPVRKRVLEKRGDDFKKEGKIYRLRTQDDGEDENNTWNGNSTQQM

SEQ ID NO: 25405 - protein, 124 aa, Artificial Sequence
  Synthetic polypeptide
TLTFMNCLFLKRVPRLFSGKEESFQQKVLGQLNIYMQNNEFGPLPHTMYKINLMDHLPKSKTIKYIFLEEKRGIYFCDLGVANGLLDMALKAQEQNLKIALLQEFNSVFLMVLPLQISSLLMLL

SEQ ID NO: 25406 - protein, 213 aa, Artificial Sequence
  Synthetic polypeptide
SRSSQWIVRHGTKSTGTKFKNSTVARIQFRLPDGSSFTNQFPSDAPLEEARQFAAQTVGNTYGNFSLATMFPRREFTKEDYKKKLLDLELAPSASVVLLPAGRPTASIVHSSSGDIWTLLGTVLYPFLAIWRLISNFLFSNPPPTQTSVRVTSSEPPNPASSSKSEKREPVRKRVLEKRGDDFKKEGKIYRLRTQDDGEDENNTWNGNSTQQM

SEQ ID NO: 25407 - protein, 71 aa, Artificial Sequence
  Synthetic polypeptide
HLRSGVQNQPDQHGETLFLLKIQKLARRGGRCMQSQLLRRLRQENCLNPGDRGCSEPRSHHCTPTCVTKFM

SEQ ID NO: 25408 - protein, 8 aa, Artificial Sequence
  Synthetic polypeptide
LNLCDQFG

SEQ ID NO: 25409 - protein, 13 aa, Artificial Sequence
  Synthetic polypeptide
EKKASDDLCDQFG

SEQ ID NO: 25410 - protein, 369 aa, Artificial Sequence
  Synthetic polypeptide
QIERRRLQTIYVISLAEPRLPLQLDDAVRPEAEGEEEGRATVNQDTRLDNRVIDLRTSTSQAVFRLQSGICHLFRETLINKGFVEIQTPKIISAASEGGANVFTVSYFKNNAYLAQSPQLYKQMCICADFEKVFSIGPVFRAEDSNTHRHLTEFVGLDIEMAFNYHYHEVMEEIADTMVQIFKGLQERFQTEIQTVNKQFPCEPFKFLEPTLRLEYCEALAMLREAGVEMGDEDDLSTPNEKLLGHLVKEKYDTDFYILDKYPLAVRPFYTMPDPRNPKQSNSYDMFMRGEEILSGAQRIHDPQLLTERALHHGIDLEKIKAYIDSFRFGAPPHAGGGIGLERVTMLFLGLHNVRQTSMFPRDPKRLTP

SEQ ID NO: 25411 - protein, 45 aa, Artificial Sequence
  Synthetic polypeptide
RKAENSKNQSASYPPKERSSSPATQQSWTENDFDKLREEGFRRFM

SEQ ID NO: 25412 - protein, 83 aa, Artificial Sequence
  Synthetic polypeptide
QIERRRLQTIYVISLAEPRLPLQLDDAVRPEAEGEEEGRATVNQDTRLDNRVIDLRTSTSQAVFRLQSGICHLFRETLINKGF

SEQ ID NO: 25413 - protein, 76 aa, Artificial Sequence
  Synthetic polypeptide
QIERRRLQTIYVISLAEPRLPLQLDDAVRPEAEGEEEGRATVNQDTRLDNRVIDLRTSTSQAVFRLQSGICHLFRE

SEQ ID NO: 25414 - protein, 36 aa, Artificial Sequence
  Synthetic polypeptide
QIERRRLQTIYVISLAEPRLPLQLDDAVRPEAEGEE

SEQ ID NO: 25415 - protein, 265 aa, Artificial Sequence
  Synthetic polypeptide
GQARWLTPVIPALWEAEAGRSRGQEIETILANTVSVVQDSVNISGHTNTNTLKVPECRLAEDLGNLWENTRFTDCSFFVRGQEFKAHKSVLAARSPVFNAMFEHEMEESKKNRVEINDLDPEVFKEMMRFIYTGRAPNLDKMADNLLAAADKYALERLKVMCEEALCSNLSVENVADTLVLADLHSAEQLKAQAIDFINRCSVLRQLGCKDGKNWNSNQATDIMETSGWKSMIQSHPHLVAEAFRALASAQCPQFGIPRKRLKQS

SEQ ID NO: 25416 - protein, 24 aa, Artificial Sequence
  Synthetic polypeptide
SQHFGRLRRVDHEVKRSRPSWLTR

SEQ ID NO: 25417 - protein, 15 aa, Artificial Sequence
  Synthetic polypeptide
HGECGPRFSKHIRTY

SEQ ID NO: 25418 - protein, 216 aa, Artificial Sequence
  Synthetic polypeptide
VLTRSDGFIRGSSSLTGTSFFHLEKKVPCFPFAFHPYCKSSEASPAMLNCLDVDGIYRVSGNLATIQKLRFIVNQEEKLNLDDSQWEDIHVVTGALKMFFRELPEPLFPYSFFEQFVEAIKKQDNNTRIEAVKSLVQKLPPPNRDTMKVLFGHLTKIVAKASKNLMSTQSLGIVFGPTLLRAENETGNMAIHMVYQNQIAELMLSEYSKIFGSEED

SEQ ID NO: 25419 - protein, 2 aa, Artificial Sequence
  Synthetic polypeptide
TV

SEQ ID NO: 25420 - protein, 14 aa, Artificial Sequence
  Synthetic polypeptide
VFRGLSSHAELSRC

SEQ ID NO: 25421 - protein, 105 aa, Artificial Sequence
  Synthetic polypeptide
VLTRSDGFIRGSSSLTGTSFFHLEKKVPCFPFAFHPYCKSSEASPAMLNCLDVDGIYRVSGNLATIQKLRFIVNQVVSGIPALLSELDGDLWTPLVSCRFFTVVI

SEQ ID NO: 25422 - protein, 774 aa, Artificial Sequence
  Synthetic polypeptide
GLHVESDHPRWGASNTALARWLPPVYEDGFSQPRGWNPGFLYNGFPLPPVREVTRHVIQVSNEVVTDDDRYSDLLMAWGQYIDHDIAFTPQSTSKAAFGGGADCQMTCENQNPCFPIQLPEEARPAAGTACLPFYRSSAACGTGDQGALFGNLSTANPRQQMNGLTSFLDASTVYGSSPALERQLRNWTSAEGLLRVHARLRDSGRAYLPFVPPRAPAACAPEPGIPGETRGPCFLAGDGRASEVPSLTALHTLWLREHNRLAAALKALNAHWSADAVYQEARKVVGALHQIITLRDYIPRILGPEAFQQYVGPYEGYDSTANPTVSNVFSTAAFRFGHATIHPLVRRLDASFQEHPDLPGLWLHQAFFSPWTLLRGGGLDPLIRGLLARPAKLQVQDQLMNEELTERLFVLSNSSTLDLASINLQRGRDHGLPGYNEWREFCGLPRLETPADLSTAIASRSVADKILDLYKHPDNIDVWLGGLAENFLPRARTGPLFACLIGKQMKALRDGDWFWWENSHVFTDAQRRELEKHSLSRVICDNTGLTRVPMDAFQVGKFPEDFESCDSITGMNLEAWRETFPQDDKCGFPESVENGDFVHCEESGRRVLVYSCRHGYELQGREQLTCTQEGWDFQPPLCKDVNECADGAHPPCHASARCRNTKGGFQCLCADPYELGDDGRTCVDSGRLPRVTWISMSLAALLIGGFAGLTSTVICRWRVLGWKAGILTGCREPSEGKVAGHCRTASCSQNHRTTLFQTQANPKSAGRLFSQHG

SEQ ID NO: 25423 - protein, 93 aa, Artificial Sequence
  Synthetic polypeptide
ISLTRFDSFIRGSSPAQALFLPAAIHVRHDLLLLAFHHDCEASTWNQTTPDGAPPTRPWHDGSLQSMRTASVSPEAGTPASCTTGSHCPRSGR

SEQ ID NO: 25424 - protein, 39 aa, Artificial Sequence
  Synthetic polypeptide
DMTCSSLPSTMIVRPPRGIRPPQMGRLQHGPGTMAPSSL

SEQ ID NO: 25425 - protein, 778 aa, Artificial Sequence
  Synthetic polypeptide
GLHVESDHPRWGASNTALARWLPPVYEDGFSQPRGWNPGFLYNGFPLPPVREVTRHVIQVSNEVVTDDDRYSDLLMAWGQYIDHDIAFTPQSTSKAAFGGGADCQMTCENQNPCFPIQLPEEARPAAGTACLPFYRSSAACGTGDQGALFGNLSTANPRQQMNGLTSFLDASTVYGSSPALERQLRNWTSAEGLLRVHARLRDSGRAYLPFVPPRAPAACAPEPGIPGETRGPCFLAGDGRASEVPSLTALHTLWLREHNRLAAALKALNAHWSADAVYQEARKVVGALHQIITLRDYIPRILGPEAFQQYVGPYEGYDSTANPTVSNVFSTAAFRFGHATIHPLVRRLDASFQEHPDLPGLWLHQAFFSPWTLLRGGGLDPLIRGLLARPAKLQVQDQLMNEELTERLFVLSNSSTLDLASINLQRGRDHGLPGYNEWREFCGLPRLETPADLSTAIASRSVADKILDLYKHPDNIDVWLGGLAENFLPRARTGPLFACLIGKQMKALRDGDWFWWENSHVFTDAQRRELEKHSLSRVICDNTGLTRVPMDAFQVGKFPEDFESCDSITGMNLEAWRETFPQDDKCGFPESVENGDFVHCEESGRRVLVYSCRHGYELQGREQLTCTQEGWDFQPPLCKDVNECADGAHPPCHASARCRNTKGGFQCLCADPYELGDDGRTCVDSGRLPRVTWISMSLAALLIGGFAGLTSTVICRWTRTGTKSTLPISETGGGTPELRCGKHQAVGTSPQRAAAQDSEQESAGMEGRDTHRLPRAL

SEQ ID NO: 25426 - protein, 734 aa, Artificial Sequence
  Synthetic polypeptide
GLHVESDHPRWGASNTALARWLPPVYEDGFSQPRGWNPGFLYNGFPLPPVREVTRHVIQVSNEVVTDDDRYSDLLMAWGQYIDHDIAFTPQSTSKAAFGGGADCQMTCENQNPCFPIQLPEEARPAAGTACLPFYRSSAACGTGDQGALFGNLSTANPRQQMNGLTSFLDASTVYGSSPALERQLRNWTSAEGLLRVHARLRDSGRAYLPFVPPRAPAACAPEPGIPGETRGPCFLAGDGRASEVPSLTALHTLWLREHNRLAAALKALNAHWSADAVYQEARKVVGALHQIITLRDYIPRILGPEAFQQYVGPYEGYDSTANPTVSNVFSTAAFRFGHATIHPLVRRLDASFQEHPDLPGLWLHQAFFSPWTLLRGGGLDPLIRGLLARPAKLQVQDQLMNEELTERLFVLSNSSTLDLASINLQRGRDHGLPGYNEWREFCGLPRLETPADLSTAIASRSVADKILDLYKHPDNIDVWLGGLAENFLPRARTGPLFACLIGKQMKALRDGDWFWWENSHVFTDAQRRELEKHSLSRVICDNTGLTRVPMDAFQVGKFPEDFESCDSITGMNLEAWRETFPQDDKCGFPESVENGDFVHCEESGRRVLVYSCRHGYELQGREQLTCTQEGWDFQPPLCKDSGRLPRVTWISMSLAALLIGGFAGLTSTVICRWTRTGTKSTLPISETGGGTPELRCGKHQAVGTSPQRAAAQDSEQESAGMEGRDTHRLPRAL

SEQ ID NO: 25427 - protein, 605 aa, Artificial Sequence
  Synthetic polypeptide
GLHVESDHPRWGASNTALARWLPPVYEDGFSQPRGWNPGFLYNGFPLPPVREVTRHVIQVSNEVVTDDDRYSDLLMAWGQYIDHDIAFTPQSTSKAAFGGGADCQMTCENQNPCFPIQIITLRDYIPRILGPEAFQQYVGPYEGYDSTANPTVSNVFSTAAFRFGHATIHPLVRRLDASFQEHPDLPGLWLHQAFFSPWTLLRGGGLDPLIRGLLARPAKLQVQDQLMNEELTERLFVLSNSSTLDLASINLQRGRDHGLPGYNEWREFCGLPRLETPADLSTAIASRSVADKILDLYKHPDNIDVWLGGLAENFLPRARTGPLFACLIGKQMKALRDGDWFWWENSHVFTDAQRRELEKHSLSRVICDNTGLTRVPMDAFQVGKFPEDFESCDSITGMNLEAWRETFPQDDKCGFPESVENGDFVHCEESGRRVLVYSCRHGYELQGREQLTCTQEGWDFQPPLCKDVNECADGAHPPCHASARCRNTKGGFQCLCADPYELGDDGRTCVDSGRLPRVTWISMSLAALLIGGFAGLTSTVICRWTRTGTKSTLPISETGGGTPELRCGKHQAVGTSPQRAAAQDSEQESAGMEGRDTHRLPRAL

SEQ ID NO: 25428 - protein, 721 aa, Artificial Sequence
  Synthetic polypeptide
GLHVESDHPRWGASNTALARWLPPVYEDGFSQPRGWNPGFLYNGFPLPPVREVTRHVIQVSNEVVTDDDRYSDLLMAWGQYIDHDIAFTPQSTSKAAFGGGADCQMTCENQNPCFPIQLPEEARPAAGTACLPFYRSSAACGTGDQGALFGNLSTANPRQQMNGLTSFLDASTVYGSSPALERQLRNWTSAEGLLRVHARLRDSGRAYLPFVPPRAPAACAPEPGIPGETRGPCFLAGDGRASEVPSLTALHTLWLREHNRLAAALKALNAHWSADAVYQEARKVVGALHQIITLRDYIPRILGPEAFQQYVGPYEGYDSTANPTVSNVFSTAAFRFGHATIHPLVRRLDASFQEHPDLPGLWLHQAFFSPWTLLRGGYNEWREFCGLPRLETPADLSTAIASRSVADKILDLYKHPDNIDVWLGGLAENFLPRARTGPLFACLIGKQMKALRDGDWFWWENSHVFTDAQRRELEKHSLSRVICDNTGLTRVPMDAFQVGKFPEDFESCDSITGMNLEAWRETFPQDDKCGFPESVENGDFVHCEESGRRVLVYSCRHGYELQGREQLTCTQEGWDFQPPLCKDVNECADGAHPPCHASARCRNTKGGFQCLCADPYELGDDGRTCVDSGRLPRVTWISMSLAALLIGGFAGLTSTVICRWTRTGTKSTLPISETGGGTPELRCGKHQAVGTSPQRAAAQDSEQESAGMEGRDTHRLPRAL

SEQ ID NO: 25429 - protein, 16 aa, Artificial Sequence
  Synthetic polypeptide
GLHVESDHPRWGASNT

SEQ ID NO: 25430 - protein, 57 aa, Artificial Sequence
  Synthetic polypeptide
ISLTRFDSFIRGSSPAQALFLPAAIHVRHDLLLLAFHHDCEASTWNQTTPDGAPPTR

SEQ ID NO: 25431 - protein, 30 aa, Artificial Sequence
  Synthetic polypeptide
DMTCSSLPSTMIVRPPRGIRPPQMGRLQHG

SEQ ID NO: 25432 - protein, 780 aa, Artificial Sequence
  Synthetic polypeptide
GLHVESDHPRWGASNTALARWLPPVYEDGFSQPRGWNPGFLYNGFPLPPVREVTRHVIQVSNEVVTDDDRYSDLLMAWGQYIDHDIAFTPQSTSKAAFGGGADCQMTCENQNPCFPIQLPEEARPAAGTACLPFYRSSAACGTGDQGALFGNLSTANPRQQMNGLTSFLDASTVYGSSPALERQLRNWTSAEGLLRVHARLRDSGRAYLPFVPPRAPAACAPEPGIPGETRGPCFLAGDGRASEVPSLTALHTLWLREHNRLAAALKALNAHWSADAVYQEARKVVGALHQIITLRDYIPRILGPEAFQQYVGPYEGYDSTANPTVSNVFSTAAFRFGHATIHPLVRRLDASFQEHPDLPGLWLHQAFFSPWTLLRGGGLDPLIRGLLARPAKLQVQDQLMNEELTERLFVLSNSSTLDLASINLQRGRDHGLPGYNEWREFCGLPRLETPADLSTAIASRSVADKILDLYKHPDNIDVWLGGLAENFLPRARTGPLFACLIGKQMKALRDGDWFWWENSHVFTDAQRRELEKHSLSRVICDNTGLTRVPMDAFQVGKFPEDFESCDSITGMNLEAWRETFPQDDKCGFPESVENGDFVHCEESGRRVLVYSCRHGYELQGREQLTCTQEGWDFQPPLCKDSGRLPRVTWISMSLAALLIGGFAGLTSTVICRWTRTGTKSTLPISETGGGTPELRCGKHQAVGTSPQRAAAQDSEQVGHTMPHVSSCHRSGWTGSGCRSSSAGAPCIFLFTPCFLVRSAPSSGRFYLQANDSEPECEPA

SEQ ID NO: 25433 - protein, 116 aa, Artificial Sequence
  Synthetic polypeptide
IIEKEEGSLCRSIPANVNQAGMIKNYFVTPNELVHQAFNLDNEQPDYDMDSEDETLLNRLNRKMEIKPLQFEIMIDRLEKASSNQLVTLQEAKLLLNEDDYLIKAVYDYWVRKRKN

SEQ ID NO: 25434 - protein, 6 aa, Artificial Sequence
  Synthetic polypeptide
CIKLLI

SEQ ID NO: 25435 - protein, 6 aa, Artificial Sequence
  Synthetic polypeptide
ISASSF

SEQ ID NO: 25436 - protein, 739 aa, Artificial Sequence
  Synthetic polypeptide
IIEKEEGSLCRSIPANVNQAGMIKNYFVTPNELVHQAFNLDNEQPDYDMDSEDETLLNRLNRKMEIKPLQFEIMIDRLEKASSNQLVTLQEAKLLLNEDDYLIKAVYDYWVRKRKNCRGPSLIPQIKQEKRDGSTNNDPYVAFRRRTEKMQTRKNRKNDEASYEKMLKLRREFSRAITILEMIKRREKTKRELLHLTLEVVEKRYHLGDYGGEILNEVKISRSEKELYATPATLHNGNHHKVQECKTKHPHHLSLKEEASDVVRQKKKYPKKPKAEALITSQQPTPETLPVINKSDIKQYDFHSSDEDEFPQVLSPVSEPEEENDPDGPCAFRRRAGCQYYAPRLDQANHSCENSELADLDKLRYRHCLTTLTVPRRCIGFARRRIGRGGRVIMDRISTEHDPVLKQIDPEMLNSFSSSSQTIDFSSNFSRTNASSKHCENRLSLSEILSNIRSCRLQCFQPRLLNLQDSDSEECTSRKPGQTVNNKRVSAASVALLNTSKNGISVTGGITEEQFQTHQQQLVQMQRQQLAQLQQKQQSQHSSQQTHPKAQGSSTSDCMSKTLDSASAHFAASAVVSAPVPSRSEVAKEQNTGHNNINGVVQPSGTSKTLYSTNMALSSSPGISAVQLVRTVGHTTTNHLIPALCTSSPQTLPMNNSCLTNAVHLNNVSVVSPVNVHINTRTSAPSPTALKLATVAASMDRVPKVTPSSAISSIARENHEPERLGLNGIAETTVAMEVT

SEQ ID NO: 25437 - protein, 163 aa, Artificial Sequence
  Synthetic polypeptide
IIEKEEGSLCRSIPANVNQAGMIKNYFVTPNELVHQAFNLDNEQPDYDMDSEDETLLNRLNRKMEIKPLQFEIMIDRLEKASSNQLVTLQEAKLLLNEDDYLIKAVYDYWVRKRKNCRGPSLIPQIKQEKRDGSTNNDPYVAFRRRTEKMQTRKNRKNDEASY

SEQ ID NO: 25438 - protein, 28 aa, Artificial Sequence
  Synthetic polypeptide
FLHFHLRYRVHLTRQCQTVGAETIQGKL

SEQ ID NO: 25439 - protein, 6300 aa, Artificial Sequence
  Synthetic polypeptide
GTGFISLGSARQWAQKLYKENYEKTKAKSINYCETPKFKLDTVLQNFSSDKKYKDSYLKDILGHYVGSFEDPYHSHCMKVTAQNSDKNYKAEYEEDRGKGFFPQTITQEYEAIKKLDQCKDHTYKVHPDKTKFTQVTDSPVLLQAQVNSKQLSDLNYKAKHESEKFKCHIPPDTPAFIQHKVNAYNLSDNLYKQDWEKSKAKKFDIKVDAIPLLAAKANTKNTSDVMYKKDYEKNKGKMIGVLSINDDPKMLHSLKVAKNQSDRLYKENYEKTKAKSMNYCETPKYQLDTQLKNFSEARYKDLYVKDVLGHYVGSMEDPYHTHCMKVAAQNSDKSYKAEYEEDKGKCYFPQTITQEYEAIKKLDQCKDHTYKVHPDKTKFTAVTDSPVLLQAQLNTKQLSDLNYKAKHEGEKFKCHIPADAPQFIQHRVNAYNLSDNVYKQDWEKSKAKKFDIKVDAIPLLAAKANTKNTSDVMYKKDYEKSKGKMIGALSINDDPKMLHSLKTAKNQSDREYRKDYEKSKTIYTAPLDMLQVTQAKKSQAIASDVDYKHILHSYSYPPDSINVDLAKKAYALQSDVEYKADYNSWMKGCGWVPFGSLEMEKAKRASDILNEKKYRQHPDTLKFTSIEDAPITVQSKINQAQRSDIAYKAKGEEIIHKYNLPPDLPQFIQAKVNAYNISENMYKADLKDLSKKGYDLRTDAIPIRAAKAARQAASDVQYKKDYEKAKGKMVGFQSLQDDPKLVHYMNVAKIQSDREYKKDYEKTKSKYNTPHDMFNVVAAKKAQDVVSNVNYKHSLHHYTYLPDAMDLELSKNMMQIQSDNVYKEDYNNWMKGIGWIPIGSLDVEKVKKAGDALNEKKYRQHPDTLKFTSIVDSPVMVQAKQNTKQVSDILYKAKGEDVKHKYTMSPDLPQFLQAKCNAYNISDVCYKRDWYDLIAKGNNVLGDAIPITAAKASRNIASDYKYKEAYEKSKGKHVGFRSLQDDPKLVHYMNVAKLQSDREYKKNYENTKTSYHTPGDMVSITAAKMAQDVATNVNYKQPLHHYTYLPDAMSLEHTRNVNQIQSDNVYKDEYNSFLKGIGWIPIGSLEVEKVKKAGDALNERKYRQHPDTVKFTSVPDSMGMVLAQHNTKQLSDLNYKVEGEKLKHKYTIDPELPQFIQAKVNALNMSDAHYKADWKKTIAKGYDLRPDAIPIVAAKSSRNIASDCKYKEAYEKAKGKQVGFLSLQDDPKLVHYMNVAKIQSDREYKKGYEASKTKYHTPLDMVSVTAAKKSQEVATNANYRQSYHHYTLLPDALNVEHSRNAMQIQSDNLYKSDFTNWMKGIGWVPIESLEVEKAKKAGEILSEKKYRQHPEKLKFTYAMDTMEQALNKSNKLNMDKRLYTEKWNKDKTTIHVMPDTPDILLSRVNQITMSDKLYKAGWEEEKKKGYDLRPDAIAIKAARASRDIASDYKYKKAYEQAKGKHIGFRSLEDDPKLVHFMQVAKMQSDREYKKGYEKSKTSFHTPVDMLSVVAAKKSQEVATNANYRNVIHTYNMLPDAMSFELAKNMMQIQSDNQYKADYADFMKGIGWLPLGSLEAEKNKKAMEIISEKKYRQHPDTLKYSTLMDSMNMVLAQNNAKIMNEHLYKQAWEADKTKVHIMPDIPQIILAKANAINMSDKLYKLSLEESKKKGYDLRPDAIPIKAAKASRDIASDYKYKYNYEKGKGKMVGFRSLEDDPKLVHSMQVAKMQSDREYKKNYENTKTSYHTPADMLSVTAAKDAQANITNTNYKHLIHKYILLPDAMNIELTRNMNRIQSDNEYKQDYNEWYKGLGWSPAGSLEVEKAKKATEYASDQKYRQHPSNFQFKKLTDSMDMVLAKQNAHTMNKHLYTIDWNKDKTKIHVMPDTPDILQAKQNQTLYSQKLYKLGWEEALKKGYDLPVDAISVQLAKASRDIASDYKYKQGYRKQLGHHVGFRSLQDDPKLVLSMNVAKMQSEREYKKDFEKWKTKFSSPVDMLGVVLAKKCQELVSDVDYKNYLHQWTCLPDQNDVVQAKKVYELQSENLYKSDLEWLRGIGWSPLGSLEAEKNKRASEIISEKKYRQPPDRNKFTSIPDAMDIVLAKTNAKNRSDRLYREAWDKDKTQIHIMPDTPDIVLAKANLINTSDKLYRMGYEELKRKGYDLPVDAIPIKAAKASREIASEYKYKEGFRKQLGHHIGARNIEDDPKMMWSMHVAKIQSDREYKKDFEKWKTKFSSPVDMLGVVLAKKCQTLVSDVDYKNYLHQWTCLPDQSDVIHARQAYDLQSDNLYKSDLQWLKGIGWMTSGSLEDEKNKRATQILSDHVYRQHPDQFKFSSLMDSIPMVLAKNNAITMNHRLYTEAWDKDKTTVHIMPDTPEVLLAKQNKVNYSEKLYKLGLEEAKRKGYDMRVDAIPIKAAKASRDIASEFKYKEGYRKQLGHHIGARAIRDDPKMMWSMHVAKIQSDREYKKDFEKWKTKFSSPVDMLGVVLAKKCQTLVSDVDYKNYLHQWTCLPDQSDVIHARQAYDLQSDNMYKSDLQWMRGIGWVSIGSLDVEKCKRATEILSDKIYRQPPDRFKFTSVTDSLEQVLAKNNALNMNKRLYTEAWDKDKTQIHIMPDTPEIMLARQNKINYSETLYKLANEEAKKKGYDLRSDAIPIVAAKASRDVISDYKYKDGYRKQLGHHIGARNIEDDPKMMWSMHVAKIQSDREYKKDFEKWKTKFSSPVDMLGVVLAKKCQTLVSDVDYKNYLHEWTCLPDQNDVIHARQAYDLQSDNIYKSDLQWLRGIGWVPIGSMDVVKCKRAAEILSDNIYRQPPDKLKFTSVTDSLEQVLAKNNALNMNKRLYTEAWDKDKTQVHIMPDTPEIMLARQNKINYSESLYRQAMEEAKKEGYDLRSDAIPIVAAKASRDIASDYKYKEAYRKQLGHHIGARAVHDDPKIMWSLHIAKVQSDREYKKDFEKYKTRYSSPVDMLGIVLAKKCQTLVSDVDYKHPLHEWICLPDQNDIIHARKAYDLQSDNLYKSDLEWMKGIGWVPIDSLEVVRAKRAGELLSDTIYRQRPETLKFTSITDTPEQVLAKNNALNMNKRLYTEAWDNDKKTIHVMPDTPEIMLAKLNRINYSDKLYKLALEESKKEGYDLRLDAIPIQAAKASRDIASDYKYKEGYRKQLGHHIGARNIKDDPKMMWSIHVAKIQSDREYKKEFEKWKTKFSSPVDMLGVVLAKKCQILVSDIDYKHPLHEWTCLPDQNDVIQARKAYDLQSDAIYKSDLEWLRGIGWVPIGSVEVEKVKRAGEILSDRKYRQPADQLKFTCITDTPEIVLAKNNALTMSKHLYTEAWDADKTSIHVMPDTPDILLAKSNSANISQKLYTKGWDESKMKDYDLRADAISIKSAKASRDIASDYKYKEAYEKQKGHHIGAQSIEDDPKIMCAIHAGKIQSEREYKKEFQKWKTKFSSPVDMLSILLAKKCQTLVTDIDYRNYLHEWTCMPDQNDIIQAKKAYDLQSDALYKADLEWLRGIGWMPQGSPEVLRVKNAQNIFCDSVYRTPVVNLKYTSIVDTPEVVLAKSNAENISIPKYREVWDKDKTSIHIMPDTPEINLARANALNVSNKLYREGWDEMKAGCDVRLDAIPIQAAKASREIASDYKYKLDHEKQKGHYVGTLTARDDNKIRWALIADKLQNEREYRLDWAKWKAKIQSPVDMLSILHSKNSQALVSDMDYRNYLHQWTCMPDQNDVIQAKKAYELQSDNVYKADLEWLRGIGWMPNDSVSVNHAKHAADIFSEKKYRTKIETLNFTPVDDRVDYVTAKQSGEILDDIKYRKDWNATKSKYTLTETPLLHTAQEAARILDQYLYKEGWERQKATGYILPPDAVPFVHAHHCNDVQSELKYKAEHVKQKGHYVGVPTMRDDPKLVWFEHAGQIQNERLYKEDYHKTKAKINIPADMVSVLAAKQGQTLVSDIDYRNYLHQWMCHPDQNDVIQARKAYDLQSDNVYRADLEWLRGIGWIPLDSVDHVRVTKNQEMMSQIKYKKNALENYPNFRSVVDPPEIVLAKINSVNQSDVKYKETFNKAKGKYTFSPDTPHISHSKDMGKLYSTILYKGAWEGTKAYGYTLDERYIPIVGAKHADLVNSELKYKETYEKQKGHYLAGKVIGEFPGVVHCLDFQKMRSALNYRKHYEDTKANVHIPNDMMNHVLAKRCQYILSDLEYRHYFHQWTSLLEEPNVIRVRNAQEILSDNVYKDDLNWLKGIGCYVWDTPQILHAKKSYDLQSQLQYTAAGKENLQNYNLVTDTPLYVTAVQSGINASEVKYKENYHQIKDKYTTVLETVDYDRTRNLKNLYSSNLYKEAWDRVKATSYILPSSTLSLTHAKNQKHLASHIKYREEYEKFKALYTLPRSVDDDPNTARCLRVGKLNIDRLYRSVYEKNKMKIHIVPDMVEMVTAKDSQKKVSEIDYRLRLHEWICHPDLQVNDHVRKVTDQISDIVYKDDLNWLKGIGCYVWDTPEILHAKHAYDLRDDIKYKAHMLKTRNDYKLVTDTPVYVQAVKSGKQLSDAVYHYDYVHSVRGKVAPTTKTVDLDRALHAYKLQSSNLYKTSLRTLPTGYRLPGDTPHFKHIKDTRYMSSYFKYKEAYEHTKAYGYTLGPKDVPFVHVRRVNNVTSERLYRELYHKLKDKIHTTPDTPEIRQVKKTQEAVSELIYKSDFFKMQGHMISLPYTPQVIHCRYVGDITSDIKYKEDLQVLKGFGCFLYDTPDMVRSRHLRKLWSNYLYTDKARKMRDKYKVVLDTPEYRKVQELKTHLSELVYRAAGKKQKSIFTSVPDTPDLLRAKRGQKLQSQYLYVELATKERPHHHAGNQTTALKHAKDVKDMVSEKKYKIQYEKMKDKYTPVPDTPILIRAKRAYWNASDLRYKETFQKTKGKYHTVKDALDIVYHRKVTDDISKIKYKENYMSQLGIWRSIPDRPEHFHHRAVTDTVSDVKYKEDLTWLKGIGCYAYDTPDFTLAEKNKTLYSKYKYKEVFERTKSDFKYVADSPINRHFKYATQLMNEKKYRADYEQRKDKYHLVVDEPRHLLAKTAGDQISQIKYRKNYEKSKDKFTSIVDTPEHLRTTKVNKQISDILYKLEYNKAKPRGYTTIHDTPMLLHVRKVKDEVSDLKYKEVYQRNKSNCTIEPDAVHIKAAKDAYKVNTNLDYKKQYEANKAHWKWTPDRPDFLQAAKSSLQQSDFEYKLDREFLKGCKLSVTDDKNTVLALRNTLIESDLKYKEKHVKERGTCHAVPDTPQILLAKTVSNLVSENKYKDHVKKHLAQGSYTTLPETRDTVHVKEVTKHVSDTNYKKKFVKEKGKSNYSIMLEPPEVKHAMEVAKKQSDVAYRKDAKENLHYTTVADRPDIKKATQAAKQASEVEYRAKHRKEGSHGLSMLGRPDIEMAKKAAKLSSQVKYRENFDKEKGKTPKYNPKDSQLYKVMKDANNLASEVKYKADLKKLHKPVTDMKESLIMNHVLNTSQLASSYQYKKKYEKSKGHYHTIPDNLEQLHLKEATELQSIVKYKEKYEKERGKPMLDFETPTYITAKESQQMQSGKEYRKDYEESIKGRNLTGLEVTPALLHVKYATKIASEKEYRKDLEESIRGKGLTEMEDTPDMLRAKNATQILNEKEYKRDLELEVKGRGLNAMANETPDFMRARNATDIASQIKYKQSAEMEKANFTSVVDTPEIIHAQQVKNLSSQKKYKEDAEKSMSYYETVLDTPEIQRVRENQKNFSLLQYQCDLKNSKGKITVVQDTPEILRVKENQKNFSSVLYKEDVSPGTAIGKTPEMMRVKQTQDHISSVKYKEAIGQGTPIPDLPEVKRVKETQKHISSVMYKENLGTGIPTTVTPEIERVKRNQENFSSVLYKENLGKGIPTPITPEMERVKRNQENFSSVLYKENMGKGTPLAVTPEMERVKHNQENISSVLYKENVGKATATPVTPEMQRVKRNQENISSVLYKENLGKATPTPFTPEMERVKRNQENFSSVLYKENMRKATPTPVTPEMERAKRNQENISSVLYSDSFRKQIQGKAAYVLDTPEMRRVRETQRHISTVKYHEDFEKHKGCFTPVVTDPITERVKKNMQDFSDINYRGIQRKVVEMEQKRNDQDQETITGLRVWRTNPGSVFDYDPAEDNIQSRSLHMINVQAQRRSREQSRSASALSISGGEEKSEHSEAPDHHLSTYSDGGVFAVSTAYKHAKTTELPQQRSSSVATQQTTVSSIPSHPSTAGKIFRAMYDYMAADADEVSFKDGDAIINVQAIDEGWMYGTVQRTGRTGMLPANYVEAI

SEQ ID NO: 25440 - protein, 22 aa, Artificial Sequence
  Synthetic polypeptide
AVPDSGRRNYTRKTMKRQKQRA

SEQ ID NO: 25441 - protein, 8156 aa, Artificial Sequence
  Synthetic polypeptide
GTGFISLGSARQWAQKLYKENYEKTKAKSINYCETPKFKLDTVLQNFSSDKKYKDSYLKDILGHYVGSFEDPYHSHCMKVTAQNSDKNYKAEYEEDRGKGFFPQTITQEYEAIKKLDQCKDHTYKVHPDKTKFTQVTDSPVLLQAQVNSKQLSDLNYKAKHESEKFKCHIPPDTPAFIQHKVNAYNLSDNLYKQDWEKSKAKKFDIKVDAIPLLAAKANTKNTSDVMYKKDYEKNKGKMIGVLSINDDPKMLHSLKVAKNQSDRLYKENYEKTKAKSMNYCETPKYQLDTQLKNFSEARYKDLYVKDVLGHYVGSMEDPYHTHCMKVAAQNSDKSYKAEYEEDKGKCYFPQTITQEYEAIKKLDQCKDHTYKVHPDKTKFTAVTDSPVLLQAQLNTKQLSDLNYKAKHEGEKFKCHIPADAPQFIQHRVNAYNLSDNVYKQDWEKSKAKKFDIKVDAIPLLAAKANTKNTSDVMYKKDYEKSKGKMIGALSINDDPKMLHSLKTAKNQSDREYRKDYEKSKTIYTAPLDMLQVTQAKKSQAIASDVDYKHILHSYSYPPDSINVDLAKKAYALQSDVEYKADYNSWMKGCGWVPFGSLEMEKAKRASDILNEKKYRQHPDTLKFTSIEDAPITVQSKINQAQRSDIAYKAKGEEIIHKYNLPPDLPQFIQAKVNAYNISENMYKADLKDLSKKGYDLRTDAIPIRAAKAARQAASDVQYKKDYEKAKGKMVGFQSLQDDPKLVHYMNVAKIQSDREYKKDYEKTKSKYNTPHDMFNVVAAKKAQDVVSNVNYKHSLHHYTYLPDAMDLELSKNMMQIQSDNVYKEDYNNWMKGIGWIPIGSLDVEKVKKAGDALNEKKYRQHPDTLKFTSIVDSPVMVQAKQNTKQVSDILYKAKGEDVKHKYTMSPDLPQFLQAKCNAYNISDVCYKRDWYDLIAKGNNVLGDAIPITAAKASRNIASDYKYKEAYEKSKGKHVGFRSLQDDPKLVHYMNVAKLQSDREYKKNYENTKTSYHTPGDMVSITAAKMAQDVATNVNYKQPLHHYTYLPDAMSLEHTRNVNQIQSDNVYKDEYNSFLKGIGWIPIGSLEVEKVKKAGDALNERKYRQHPDTVKFTSVPDSMGMVLAQHNTKQLSDLNYKVEGEKLKHKYTIDPELPQFIQAKVNALNMSDAHYKADWKKTIAKGYDLRPDAIPIVAAKSSRNIASDCKYKEAYEKAKGKQVGFLSLQDDPKLVHYMNVAKIQSDREYKKGYEASKTKYHTPLDMVSVTAAKKSQEVATNANYRQSYHHYTLLPDALNVEHSRNAMQIQSDNLYKSDFTNWMKGIGWVPIESLEVEKAKKAGEILSEKKYRQHPEKLKFTYAMDTMEQALNKSNKLNMDKRLYTEKWNKDKTTIHVMPDTPDILLSRVNQITMSDKLYKAGWEEEKKKGYDLRPDAIAIKAARASRDIASDYKYKKAYEQAKGKHIGFRSLEDDPKLVHFMQVAKMQSDREYKKGYEKSKTSFHTPVDMLSVVAAKKSQEVATNANYRNVIHTYNMLPDAMSFELAKNMMQIQSDNQYKADYADFMKGIGWLPLGSLEAEKNKKAMEIISEKKYRQHPDTLKYSTLMDSMNMVLAQNNAKIMNEHLYKQAWEADKTKVHIMPDIPQIILAKANAINMSDKLYKLSLEESKKKGYDLRPDAIPIKAAKASRDIASDYKYKYNYEKGKGKMVGFRSLEDDPKLVHSMQVAKMQSDREYKKNYENTKTSYHTPADMLSVTAAKDAQANITNTNYKHLIHKYILLPDAMNIELTRNMNRIQSDNEYKQDYNEWYKGLGWSPAGSLEVEKAKKATEYASDQKYRQHPSNFQFKKLTDSMDMVLAKQNAHTMNKHLYTIDWNKDKTKIHVMPDTPDILQAKQNQTLYSQKLYKLGWEEALKKGYDLPVDAISVQLAKASRDIASDYKYKQGYRKQLGHHVGFRSLQDDPKLVLSMNVAKMQSEREYKKDFEKWKTKFSSPVDMLGVVLAKKCQELVSDVDYKNYLHQWTCLPDQNDVVQAKKVYELQSENLYKSDLEWLRGIGWSPLGSLEAEKNKRASEIISEKKYRQPPDRNKFTSIPDAMDIVLAKTNAKNRSDRLYREAWDKDKTQIHIMPDTPDIVLAKANLINTSDKLYRMGYEELKRKGYDLPVDAIPIKAAKASREIASEYKYKEGFRKQLGHHIGARNIEDDPKMMWSMHVAKIQSDREYKKDFEKWKTKFSSPVDMLGVVLAKKCQTLVSDVDYKNYLHQWTCLPDQSDVIHARQAYDLQSDNLYKSDLQWLKGIGWMTSGSLEDEKNKRATQILSDHVYRQHPDQFKFSSLMDSIPMVLAKNNAITMNHRLYTEAWDKDKTTVHIMPDTPEVLLAKQNKVNYSEKLYKLGLEEAKRKGYDMRVDAIPIKAAKASRDIASEFKYKEGYRKQLGHHIGARAIRDDPKMMWSMHVAKIQSDREYKKDFEKWKTKFSSPVDMLGVVLAKKCQTLVSDVDYKNYLHQWTCLPDQSDVIHARQAYDLQSDNMYKSDLQWMRGIGWVSIGSLDVEKCKRATEILSDKIYRQPPDRFKFTSVTDSLEQVLAKNNAITMNKRLYTEAWDKDKTQIHIMPDTPEIMLARMNKINYSESLYKLANEEAKKKGYDLRSDAIPIVAAKASRDIISDYKYKDGYCKQLGHHIGARNIEDDPKMMWSMHVAKIQSDREYKKDFEKWKTKFSSPVDMLGVVLAKKCQTLVSDVDYKNYLHEWTCLPDQSDVIHARQAYDLQSDNIYKSDLQWLRGIGWVPIGSMDVVKCKRATEILSDNIYRQPPDKLKFTSVTDSLEQVLAKNNALNMNKRLYTEAWDKDKTQIHIMPDTPEIMLARQNKINYSETLYKLANEEAKKKGYDLRSDAIPIVAAKASRDVISDYKYKDGYRKQLGHHIGARNIEDDPKMMWSMHVAKIQSDREYKKDFEKWKTKFSSPVDMLGVVLAKKCQTLVSDVDYKNYLHEWTCLPDQNDVIHARQAYDLQSDNIYKSDLQWLRGIGWVPIGSMDVVKCKRAAEILSDNIYRQPPDKLKFTSVTDSLEQVLAKNNALNMNKRLYTEAWDKDKTQVHIMPDTPEIMLARQNKINYSESLYRQAMEEAKKEGYDLRSDAIPIVAAKASRDIASDYKYKEAYRKQLGHHIGARAVHDDPKIMWSLHIAKVQSDREYKKDFEKYKTRYSSPVDMLGIVLAKKCQTLVSDVDYKHPLHEWICLPDQNDIIHARKAYDLQSDNLYKSDLEWMKGIGWVPIDSLEVVRAKRAGELLSDTIYRQRPETLKFTSITDTPEQVLAKNNALNMNKRLYTEAWDNDKKTIHVMPDTPEIMLAKLNRINYSDKLYKLALEESKKEGYDLRLDAIPIQAAKASRDIASDYKYKEGYRKQLGHHIGARNIKDDPKMMWSIHVAKIQSDREYKKEFEKWKTKFSSPVDMLGVVLAKKCQILVSDIDYKHPLHEWTCLPDQNDVIQARKAYDLQSDAIYKSDLEWLRGIGWVPIGSVEVEKVKRAGEILSDRKYRQPADQLKFTCITDTPEIVLAKNNALTMSKHLYTEAWDADKTSIHVMPDTPDILLAKSNSANISQKLYTKGWDESKMKDYDLRADAISIKSAKASRDIASDYKYKEAYEKQKGHHIGAQSIEDDPKIMCAIHAGKIQSEREYKKEFQKWKTKFSSPVDMLSILLAKKCQTLVTDIDYRNYLHEWTCMPDQNDIIQAKKAYDLQSDSVYKADLEWLRGIGWMPEGSVEMNRVKVAQDLVNERLYRTRPEALSFTSIVDTPEVVLAKANSLQISEKLYQEAWNKDKSNITIPSDTPEMLQAHINALQISNKLYQKDWNDAKQKGYDIRADAIEIKHAKASREIASEYKYKEGYRKQLGHHMGFRTLQDDPKSVWAIHAAKIQSDREYKKAYEKSKGIHNTPLDMMSIVQAKKCQVLVSDIDYRNYLHQWTCLPDQNDVIQAKKAYDLQSDNLYKSDLEWLKGIGWLPEGSVEVMRVKNAQNLLNERLYRIKPEALKFTSIVDTPEVIQAKINAVQISEPLYRDAWEKEKANVNVPADTPLMLQSKINALQISNKRYQQAWEDVKMTGYDLRADAIGIQHAKASRDIASDYLYKTAYEKQKGHYIGCRSAKEDPKLVWAANVLKMQNDRLYKKAYNDHKAKISIPVDMVSISAAKEGQALASDVDYRHYLHHWSCFPDQNDVIQARKAYDLQSDSVYKADLEWLRGIGWMPEGSVEMNRVKVAQDLVNERLYRTRPEALSFTSIVDTPEVVLAKANSLQISEKLYQEAWNKDKSNITIPSDTPEMLQAHINALQISNKLYQKDWNDTKQKGYDIRADAIEIKHAKASREIASEYKYKEGYRKQLGHHMGFRTLQDDPKSVWAIHAAKIQSDREYKKAYEKSKGIHNTPLDMMSIVQAKKCQVLVSDIDYRNYLHQWTCLPDQNDVIQAKKAYDLQSDNLYKSDLEWLKGIGWLPEGSVEVMRVKNAQNLLNERLYRIKPEALKFTSIVDTPEVIQAKINAVQISEPLYRNAWEKEKANVNVPADTPLMLQSKINALQISNKRYQQAWEDVKMTGYDLRADAIGIQHAKASRDIASDYLYKTAYEKQKGHYIGCRSAKEDPKLVWAANVLKMQNDRLYKKAYNDHKAKISIPVDMVSISAAKEGQALASDVDYRHYLHHWSCFPDQNDVIQARKAYDLQSDSVYKADLEWLRGIGWMPEGSVEMNRVKVAQDLVNERLYRTRPEALSFTSIVDTPEVVLAKANSLQISEKLYQEAWNKDKSNITIPSDTPEMLQAHINALQISNKLYQKDWNDTKQKGYDIRADAIEIKHAKASREIASEYKYKEGYRKQLGHHMGFRTLQDDPKSVWAIHAAKIQSDREYKKAYEKSKGIHNTPLDMMSIVQAKKCQVLVSDIDYRNYLHQWTCLPDQNDVIQAKKAYDLQSDNLYKSDLEWLKGIGWLPEGSVEVMRVKNAQNLLNERLYRIKPEALKFTSIVDTPEVIQAKINAVQISEPLYRDAWEKEKANVNVPADTPLMLQSKINALQISNKRYQQAWEDVKMTGYDLRADAIGIQHAKASRDIASDYLYKTAYEKQKGHYIGCRSAKEDPKLVWAANVLKMQNDRLYKKAYNDHKAKISIPVDMVSISAAKEGQALASDVDYRHYLHRWSCFPDQNDVIQARKAYDLQSDALYKADLEWLRGIGWMPQGSPEVLRVKNAQNIFCDSVYRTPVVNLKYTSIVDTPEVVLAKSNAENISIPKYREVWDKDKTSIHIMPDTPEINLARANALNVSNKLYREGWDEMKAGCDVRLDAIPIQAAKASREIASDYKYKLDHEKQKGHYVGTLTARDDNKIRWALIADKLQNEREYRLDWAKWKAKIQSPVDMLSILHSKNSQALVSDMDYRNYLHQWTCMPDQNDVIQAKKAYELQSDNVYKADLEWLRGIGWMPNDSVSVNHAKHAADIFSEKKYRTKIETLNFTPVDDRVDYVTAKQSGEILDDIKYRKDWNATKSKYTLTETPLLHTAQEAARILDQYLYKEGWERQKATGYILPPDAVPFVHAHHCNDVQSELKYKAEHVKQKGHYVGVPTMRDDPKLVWFEHAGQIQNERLYKEDYHKTKAKINIPADMVSVLAAKQGQTLVSDIDYRNYLHQWMCHPDQNDVIQARKAYDLQSDNVYRADLEWLRGIGWIPLDSVDHVRVTKNQEMMSQIKYKKNALENYPNFRSVVDPPEIVLAKINSVNQSDVKYKETFNKAKGKYTFSPDTPHISHSKDMGKLYSTILYKGAWEGTKAYGYTLDERYIPIVGAKHADLVNSELKYKETYEKQKGHYLAGKVIGEFPGVVHCLDFQKMRSALNYRKHYEDTKANVHIPNDMMNHVLAKRCQYILSDLEYRHYFHQWTSLLEEPNVIRVRNAQEILSDNVYKDDLNWLKGIGCYVWDTPQILHAKKSYDLQSQLQYTAAGKENLQNYNLVTDTPLYVTAVQSGINASEVKYKENYHQIKDKYTTVLETVDYDRTRNLKNLYSSNLYKEAWDRVKATSYILPSSTLSLTHAKNQKHLASHIKYREEYEKFKALYTLPRSVDDDPNTARCLRVGKLNIDRLYRSVYEKNKMKIHIVPDMVEMVTAKDSQKKVSEIDYRLRLHEWICHPDLQVNDHVRKVTDQISDIVYKDDLNWLKGIGCYVWDTPEILHAKHAYDLRDDIKYKAHMLKTRNDYKLVTDTPVYVQAVKSGKQLSDAVYHYDYVHSVRGKVAPTTKTVDLDRALHAYKLQSSNLYKTSLRTLPTGYRLPGDTPHFKHIKDTRYMSSYFKYKEAYEHTKAYGYTLGPKDVPFVHVRRVNNVTSERLYRELYHKLKDKIHTTPDTPEIRQVKKTQEAVSELIYKSDFFKMQGHMISLPYTPQVIHCRYVGDITSDIKYKEDLQVLKGFGCFLYDTPDMVRSRHLRKLWSNYLYTDKARKMRDKYKVVLDTPEYRKVQELKTHLSELVYRAAGKKQKSIFTSVPDTPDLLRAKRGQKLQSQYLYVELATKERPHHHAGNQTTALKHAKDVKDMVSEKKYKIQYEKMKDKYTPVPDTPILIRAKRAYWNASDLRYKETFQKTKGKYHTVKDALDIVYHRKVTDDISKIKYKENYMSQLGIWRSIPDRPEHFHHRAVTDTVSDVKYKEDLTWLKGIGCYAYDTPDFTLAEKNKTLYSKYKYKEVFERTKSDFKYVADSPINRHFKYATQLMNERKYKSSAKMFLQHGCNEILRPDMLTALYNSHMWSQIKYRKNYEKSKDKFTSIVDTPEHLRTTKVNKQISDILYKLEYNKAKPRGYTTIHDTPMLLHVRKVKDEVSDLKYKEVYQRNKSNCTIEPDAVHIKAAKDAYKVNTNLDYKKQYEANKAHWKWTPDRPDFLQAAKSSLQQSDFEYKLDREFLKGCKLSVTDDKNTVLALRNTLIESDLKYKEKHVKERGTCHAVPDTPQILLAKTVSNLVSENKYKDHVKKHLAQGSYTTLPETRDTVHVKEVTKHVSDTNYKKKFVKEKGKSNYSIMLEPPEVKHAMEVAKKQSDVAYRKDAKENLHYTTVADRPDIKKATQAAKQASEVEYRAKHRKEGSHGLSMLGRPDIEMAKKAAKLSSQVKYRENFDKEKGKTPKYNPKDSQLYKVMKDANNLASEVKYKADLKKLHKPVTDMKESLIMNHVLNTSQLASSYQYKKKYEKSKGHYHTIPDNLEQLHLKEATELQSIVKYKEKYEKERGKPMLDFETPTYITAKESQQMQSGKEYRKDYEESIKGRNLTGLEVTPALLHVKYATKIASEKEYRKDLEESIRGKGLTEMEDTPDMLRAKNATQILNEKEYKRDLELEVKGRGLNAMANETPDFMRARNATDIASQIKYKQSAEMEKANFTSVVDTPEIIHAQQVKNLSSQKKYKEDAEKSMSYYETVLDTPEIQRVRENQKNFSLLQYQCDLKNSKGKITVVQDTPEILRVKENQKNFSSVLYKEDVSPGTAIGKTPEMMRVKQTQDHISSVKYKEAIGQGTPIPDLPEVKRVKETQKHISSVMYKENLGTGIPTTVTPEIERVKRNQENFSSVLYKENLGKGIPTPITPEMERVKRNQENFSSILYKENLSKGTPLPVTPEMERVKLNQENFSSVLYKENVGKGIPIPITPEMERVKHNQENFSSVLYKENLGTGIPIPITPEMQRVKHNQENLSSVLYKENMGKGTPLPVTPEMERVKHNQENISSVLYKENMGKGTPLPVTPEMERVKHNQENISSVLYKENMGKGTPLAVTPEMERVKHNQENISSVLYKENVGKATATPVTPEMQRVKRNQENISSVLYKENLGKATPTPFTPEMERVKRNQENFSSVLYKENMRKATPTPVTPEMERAKRNQENISSVLYSDSFRKQIQGKAAYVLDTPEMRRVRETQRHISTVKYHEDFEKHKGCFTPVVTDPITERVKKNMQDFSDINYRGIQRKVVEMEQKRNDQDQETITGLRVWRTNPGSVFDYDPAEDNIQSRSLHMINVQAQRRSREQSRSASALSISGGEEKSEHSEAPDHHLSTYSDGGVFAVSTAYKHAKTTELPQQRSSSVATQQTTVSSIPSHPSTAGKIFRAMYDYMAADADEVSFKDGDAIINVQAIDEGWMYGTVQRTGRTGMLPANYVEAI

SEQ ID NO: 25442 - protein, 8156 aa, Artificial Sequence
  Synthetic polypeptide
GTGFISLGSARQWAQKLYKENYEKTKAKSINYCETPKFKLDTVLQNFSSDKKYKDSYLKDILGHYVGSFEDPYHSHCMKVTAQNSDKNYKAEYEEDRGKGFFPQTITQEYEAIKKLDQCKDHTYKVHPDKTKFTQVTDSPVLLQAQVNSKQLSDLNYKAKHESEKFKCHIPPDTPAFIQHKVNAYNLSDNLYKQDWEKSKAKKFDIKVDAIPLLAAKANTKNTSDVMYKKDYEKNKGKMIGVLSINDDPKMLHSLKVAKNQSDRLYKENYEKTKAKSMNYCETPKYQLDTQLKNFSEARYKDLYVKDVLGHYVGSMEDPYHTHCMKVAAQNSDKSYKAEYEEDKGKCYFPQTITQEYEAIKKLDQCKDHTYKVHPDKTKFTAVTDSPVLLQAQLNTKQLSDLNYKAKHEGEKFKCHIPADAPQFIQHRVNAYNLSDNVYKQDWEKSKAKKFDIKVDAIPLLAAKANTKNTSDVMYKKDYEKSKGKMIGALSINDDPKMLHSLKTAKNQSDREYRKDYEKSKTIYTAPLDMLQVTQAKKSQAIASDVDYKHILHSYSYPPDSINVDLAKKAYALQSDVEYKADYNSWMKGCGWVPFGSLEMEKAKRASDILNEKKYRQHPDTLKFTSIEDAPITVQSKINQAQRSDIAYKAKGEEIIHKYNLPPDLPQFIQAKVNAYNISENMYKADLKDLSKKGYDLRTDAIPIRAAKAARQAASDVQYKKDYEKAKGKMVGFQSLQDDPKLVHYMNVAKIQSDREYKKDYEKTKSKYNTPHDMFNVVAAKKAQDVVSNVNYKHSLHHYTYLPDAMDLELSKNMMQIQSDNVYKEDYNNWMKGIGWIPIGSLDVEKVKKAGDALNEKKYRQHPDTLKFTSIVDSPVMVQAKQNTKQVSDILYKAKGEDVKHKYTMSPDLPQFLQAKCNAYNISDVCYKRDWYDLIAKGNNVLGDAIPITAAKASRNIASDYKYKEAYEKSKGKHVGFRSLQDDPKLVHYMNVAKLQSDREYKKNYENTKTSYHTPGDMVSITAAKMAQDVATNVNYKQPLHHYTYLPDAMSLEHTRNVNQIQSDNVYKDEYNSFLKGIGWIPIGSLEVEKVKKAGDALNERKYRQHPDTVKFTSVPDSMGMVLAQHNTKQLSDLNYKVEGEKLKHKYTIDPELPQFIQAKVNALNMSDAHYKADWKKTIAKGYDLRPDAIPIVAAKSSRNIASDCKYKEAYEKAKGKQVGFLSLQDDPKLVHYMNVAKIQSDREYKKGYEASKTKYHTPLDMVSVTAAKKSQEVATNANYRQSYHHYTLLPDALNVEHSRNAMQIQSDNLYKSDFTNWMKGIGWVPIESLEVEKAKKAGEILSEKKYRQHPEKLKFTYAMDTMEQALNKSNKLNMDKRLYTEKWNKDKTTIHVMPDTPDILLSRVNQITMSDKLYKAGWEEEKKKGYDLRPDAIAIKAARASRDIASDYKYKKAYEQAKGKHIGFRSLEDDPKLVHFMQVAKMQSDREYKKGYEKSKTSFHTPVDMLSVVAAKKSQEVATNANYRNVIHTYNMLPDAMSFELAKNMMQIQSDNQYKADYADFMKGIGWLPLGSLEAEKNKKAMEIISEKKYRQHPDTLKYSTLMDSMNMVLAQNNAKIMNEHLYKQAWEADKTKVHIMPDIPQIILAKANAINMSDKLYKLSLEESKKKGYDLRPDAIPIKAAKASRDIASDYKYKYNYEKGKGKMVGFRSLEDDPKLVHSMQVAKMQSDREYKKNYENTKTSYHTPADMLSVTAAKDAQANITNTNYKHLIHKYILLPDAMNIELTRNMNRIQSDNEYKQDYNEWYKGLGWSPAGSLEVEKAKKATEYASDQKYRQHPSNFQFKKLTDSMDMVLAKQNAHTMNKHLYTIDWNKDKTKIHVMPDTPDILQAKQNQTLYSQKLYKLGWEEALKKGYDLPVDAISVQLAKASRDIASDYKYKQGYRKQLGHHVGFRSLQDDPKLVLSMNVAKMQSEREYKKDFEKWKTKFSSPVDMLGVVLAKKCQELVSDVDYKNYLHQWTCLPDQNDVVQAKKVYELQSENLYKSDLEWLRGIGWSPLGSLEAEKNKRASEIISEKKYRQPPDRNKFTSIPDAMDIVLAKTNAKNRSDRLYREAWDKDKTQIHIMPDTPDIVLAKANLINTSDKLYRMGYEELKRKGYDLPVDAIPIKAAKASREIASEYKYKEGFRKQLGHHIGARNIEDDPKMMWSMHVAKIQSDREYKKDFEKWKTKFSSPVDMLGVVLAKKCQTLVSDVDYKNYLHQWTCLPDQSDVIHARQAYDLQSDNLYKSDLQWLKGIGWMTSGSLEDEKNKRATQILSDHVYRQHPDQFKFSSLMDSIPMVLAKNNAITMNHRLYTEAWDKDKTTVHIMPDTPEVLLAKQNKVNYSEKLYKLGLEEAKRKGYDMRVDAIPIKAAKASRDIASEFKYKEGYRKQLGHHIGARAIRDDPKMMWSMHVAKIQSDREYKKDFEKWKTKFSSPVDMLGVVLAKKCQTLVSDVDYKNYLHQWTCLPDQSDVIHARQAYDLQSDNMYKSDLQWMRGIGWVSIGSLDVEKCKRATEILSDKIYRQPPDRFKFTSVTDSLEQVLAKNNAITMNKRLYTEAWDKDKTQIHIMPDTPEIMLARMNKINYSESLYKLANEEAKKKGYDLRSDAIPIVAAKASRDIISDYKYKDGYCKQLGHHIGARNIEDDPKMMWSMHVAKIQSDREYKKDFEKWKTKFSSPVDMLGVVLAKKCQTLVSDVDYKNYLHEWTCLPDQSDVIHARQAYDLQSDNIYKSDLQWLRGIGWVPIGSMDVVKCKRATEILSDNIYRQPPDKLKFTSVTDSLEQVLAKNNALNMNKRLYTEAWDKDKTQIHIMPDTPEIMLARQNKINYSETLYKLANEEAKKKGYDLRSDAIPIVAAKASRDVISDYKYKDGYRKQLGHHIGARNIEDDPKMMWSMHVAKIQSDREYKKDFEKWKTKFSSPVDMLGVVLAKKCQTLVSDVDYKNYLHEWTCLPDQNDVIHARQAYDLQSDNIYKSDLQWLRGIGWVPIGSMDVVKCKRAAEILSDNIYRQPPDKLKFTSVTDSLEQVLAKNNALNMNKRLYTEAWDKDKTQVHIMPDTPEIMLARQNKINYSESLYRQAMEEAKKEGYDLRSDAIPIVAAKASRDIASDYKYKEAYRKQLGHHIGARAVHDDPKIMWSLHIAKVQSDREYKKDFEKYKTRYSSPVDMLGIVLAKKCQTLVSDVDYKHPLHEWICLPDQNDIIHARKAYDLQSDNLYKSDLEWMKGIGWVPIDSLEVVRAKRAGELLSDTIYRQRPETLKFTSITDTPEQVLAKNNALNMNKRLYTEAWDNDKKTIHVMPDTPEIMLAKLNRINYSDKLYKLALEESKKEGYDLRLDAIPIQAAKASRDIASDYKYKEGYRKQLGHHIGARNIKDDPKMMWSIHVAKIQSDREYKKEFEKWKTKFSSPVDMLGVVLAKKCQILVSDIDYKHPLHEWTCLPDQNDVIQARKAYDLQSDAIYKSDLEWLRGIGWVPIGSVEVEKVKRAGEILSDRKYRQPADQLKFTCITDTPEIVLAKNNALTMSKHLYTEAWDADKTSIHVMPDTPDILLAKSNSANISQKLYTKGWDESKMKDYDLRADAISIKSAKASRDIASDYKYKEAYEKQKGHHIGAQSIEDDPKIMCAIHAGKIQSEREYKKEFQKWKTKFSSPVDMLSILLAKKCQTLVTDIDYRNYLHEWTCMPDQNDIIQAKKAYDLQSDSVYKADLEWLRGIGWMPEGSVEMNRVKVAQDLVNERLYRTRPEALSFTSIVDTPEVVLAKANSLQISEKLYQEAWNKDKSNITIPSDTPEMLQAHINALQISNKLYQKDWNDAKQKGYDIRADAIEIKHAKASREIASEYKYKEGYRKQLGHHMGFRTLQDDPKSVWAIHAAKIQSDREYKKAYEKSKGIHNTPLDMMSIVQAKKCQVLVSDIDYRNYLHQWTCLPDQNDVIQAKKAYDLQSDNLYKSDLEWLKGIGWLPEGSVEVMRVKNAQNLLNERLYRIKPEALKFTSIVDTPEVIQAKINAVQISEPLYRDAWEKEKANVNVPADTPLMLQSKINALQISNKRYQQAWEDVKMTGYDLRADAIGIQHAKASRDIASDYLYKTAYEKQKGHYIGCRSAKEDPKLVWAANVLKMQNDRLYKKAYNDHKAKISIPVDMVSISAAKEGQALASDVDYRHYLHHWSCFPDQNDVIQARKAYDLQSDSVYKADLEWLRGIGWMPEGSVEMNRVKVAQDLVNERLYRTRPEALSFTSIVDTPEVVLAKANSLQISEKLYQEAWNKDKSNITIPSDTPEMLQAHINALQISNKLYQKDWNDTKQKGYDIRADAIEIKHAKASREIASEYKYKEGYRKQLGHHMGFRTLQDDPKSVWAIHAAKIQSDREYKKAYEKSKGIHNTPLDMMSIVQAKKCQVLVSDIDYRNYLHQWTCLPDQNDVIQAKKAYDLQSDNLYKSDLEWLKGIGWLPEGSVEVMRVKNAQNLLNERLYRIKPEALKFTSIVDTPEVIQAKINAVQISEPLYRNAWEKEKANVNVPADTPLMLQSKINALQISNKRYQQAWEDVKMTGYDLRADAIGIQHAKASRDIASDYLYKTAYEKQKGHYIGCRSAKEDPKLVWAANVLKMQNDRLYKKAYNDHKAKISIPVDMVSISAAKEGQALASDVDYRHYLHHWSCFPDQNDVIQARKAYDLQSDSVYKADLEWLRGIGWMPEGSVEMNRVKVAQDLVNERLYRTRPEALSFTSIVDTPEVVLAKANSLQISEKLYQEAWNKDKSNITIPSDTPEMLQAHINALQISNKLYQKDWNDTKQKGYDIRADAIEIKHAKASREIASEYKYKEGYRKQLGHHMGFRTLQDDPKSVWAIHAAKIQSDREYKKAYEKSKGIHNTPLDMMSIVQAKKCQVLVSDIDYRNYLHQWTCLPDQNDVIQAKKAYDLQSDNLYKSDLEWLKGIGWLPEGSVEVMRVKNAQNLLNERLYRIKPEALKFTSIVDTPEVIQAKINAVQISEPLYRDAWEKEKANVNVPADTPLMLQSKINALQISNKRYQQAWEDVKMTGYDLRADAIGIQHAKASRDIASDYLYKTAYEKQKGHYIGCRSAKEDPKLVWAANVLKMQNDRLYKKAYNDHKAKISIPVDMVSISAAKEGQALASDVDYRHYLHRWSCFPDQNDVIQARKAYDLQSDALYKADLEWLRGIGWMPQGSPEVLRVKNAQNIFCDSVYRTPVVNLKYTSIVDTPEVVLAKSNAENISIPKYREVWDKDKTSIHIMPDTPEINLARANALNVSNKLYREGWDEMKAGCDVRLDAIPIQAAKASREIASDYKYKLDHEKQKGHYVGTLTARDDNKIRWALIADKLQNEREYRLDWAKWKAKIQSPVDMLSILHSKNSQALVSDMDYRNYLHQWTCMPDQNDVIQAKKAYELQSDNVYKADLEWLRGIGWMPNDSVSVNHAKHAADIFSEKKYRTKIETLNFTPVDDRVDYVTAKQSGEILDDIKYRKDWNATKSKYTLTETPLLHTAQEAARILDQYLYKEGWERQKATGYILPPDAVPFVHAHHCNDVQSELKYKAEHVKQKGHYVGVPTMRDDPKLVWFEHAGQIQNERLYKEDYHKTKAKINIPADMVSVLAAKQGQTLVSDIDYRNYLHQWMCHPDQNDVIQARKAYDLQSDNVYRADLEWLRGIGWIPLDSVDHVRVTKNQEMMSQIKYKKNALENYPNFRSVVDPPEIVLAKINSVNQSDVKYKETFNKAKGKYTFSPDTPHISHSKDMGKLYSTILYKGAWEGTKAYGYTLDERYIPIVGAKHADLVNSELKYKETYEKQKGHYLAGKVIGEFPGVVHCLDFQKMRSALNYRKHYEDTKANVHIPNDMMNHVLAKRCQYILSDLEYRHYFHQWTSLLEEPNVIRVRNAQEILSDNVYKDDLNWLKGIGCYVWDTPQILHAKKSYDLQSQLQYTAAGKENLQNYNLVTDTPLYVTAVQSGINASEVKYKENYHQIKDKYTTVLETVDYDRTRNLKNLYSSNLYKEAWDRVKATSYILPSSTLSLTHAKNQKHLASHIKYREEYEKFKALYTLPRSVDDDPNTARCLRVGKLNIDRLYRSVYEKNKMKIHIVPDMVEMVTAKDSQKKVSEIDYRLRLHEWICHPDLQVNDHVRKVTDQISDIVYKDDLNWLKGIGCYVWDTPEILHAKHAYDLRDDIKYKAHMLKTRNDYKLVTDTPVYVQAVKSGKQLSDAVYHYDYVHSVRGKVAPTTKTVDLDRALHAYKLQSSNLYKTSLRTLPTGYRLPGDTPHFKHIKDTRYMSSYFKYKEAYEHTKAYGYTLGPKDVPFVHVRRVNNVTSERLYRELYHKLKDKIHTTPDTPEIRQVKKTQEAVSELIYKSDFFKMQGHMISLPYTPQVIHCRYVGDITSDIKYKEDLQVLKGFGCFLYDTPDMVRSRHLRKLWSNYLYTDKARKMRDKYKVVLDTPEYRKVQELKTHLSELVYRAAGKKQKSIFTSVPDTPDLLRAKRGQKLQSQYLYVELATKERPHHHAGNQTTALKHAKDVKDMVSEKKYKIQYEKMKDKYTPVPDTPILIRAKRAYWNASDLRYKETFQKTKGKYHTVKDALDIVYHRKVTDDISKIKYKENYMSQLGIWRSIPDRPEHFHHRAVTDTVSDVKYKEDLTWLKGIGCYAYDTPDFTLAEKNKTLYSKYKYKEVFERTKSDFKYVADSPINRHFKYATQLMNEKKYRADYEQRKDKYHLVVDEPRHLLAKTAGDQISQIKYRKNYEKSKDKFTSIVDTPEHLRTTKVNKQISDILYKLEYNKAKPRGYTTIHDTPMLLHVRKVKDEVSDLKYKEVYQRNKSNCTIEPDAVHIKAAKDAYKVNTNLDYKKQYEANKAHWKWTPDRPDFLQAAKSSLQQSDFEYKLDREFLKGCKLSVTDDKNTVLALRNTLIESDLKYKEKHVKERGTCHAVPDTPQILLAKTVSNLVSENKYKDHVKKHLAQGSYTTLPETRDTVHVKEVTKHVSDTNYKKKFVKEKGKSNYSIMLEPPEVKHAMEVAKKQSDVAYRKDAKENLHYTTVADRPDIKKATQAAKQASEVEYRAKHRKEGSHGLSMLGRPDIEMAKKAAKLSSQVKYRENFDKEKGKTPKYNPKDSQLYKVMKDANNLASEVKYKADLKKLHKPVTDMKESLIMNHVLNTSQLASSYQYKKKYEKSKGHYHTIPDNLEQLHLKEATELQSIVKYKEKYEKERGKPMLDFETPTYITAKESQQMQSGKEYRKDYEESIKGRNLTGLEVTPALLHVKYATKIASEKEYRKDLEESIRGKGLTEMEDTPDMLRAKNATQILNEKEYKRDLELEVKGRGLNAMANETPDFMRARNATDIASQIKYKQSAEMEKANFTSVVDTPEIIHAQQVKNLSSQKKYKEDAEKSMSYYETVLDTPEIQRVRENQKNFSLLQYQCDLKNSKGKITVVQDTPEILRVKENQKNFSSVLYKEDVSPGTAIGKTPEMMRVKQTQDHISSVKYKEAIGQGTPIPDLPEVKRVKETQKHISSVMYKENLGTGIPTTVTPEIERVKRNQENFSSVLYKENLGKGIPTPITPEMERVKRNQENFSSILYKENLSKGTPLPVTPEMERVKLNQENFSSVLYKENVGKGIPIPITPEMERVKHNQENFSSVLYKENLGTGIPIPITPEMQRVKHNQENLSSVLYKENMGKGTPLPVTPEMERVKHNQENISSVLYKENMGKGTPLPVTPEMERVKHNQENISSVLYKENMGKGTPLAVTPEMERVKHNQENISSVLYKENVGKATATPVTPEMQRVKRNQENISSVLYKENLGKATPTPFTPEMERVKRNQENFSSVLYKENMRKATPTPVTPEMERAKRNQENISSVLYSDSFRKQIQGKAAYVLDTPEMRRVRETQRHISTVKYHEDFEKHKGCFTPVVTDPITERVKKNMQDFSDINYRGIQRKVVEMEQKRNDQDQETITGLRVWRTNPGSVFDYDPAEDNIQSRSLHMINVQAQRRSREQSRSASALSISGGEEKSEHSEAPDHHLSTYSDGGVFAVSTAYKHAKTTELPQQRSSSVATQQTTVSSIPSHPSTAGKIFRAMYDYMAADADEVSFKDGDAIINVQAIDEGWMYGTVQRTGRTGMLPANYVEAI

SEQ ID NO: 25443 - protein, 6300 aa, Artificial Sequence
  Synthetic polypeptide
GTGFISLGSARQWAQKLYKENYEKTKAKSINYCETPKFKLDTVLQNFSSDKKYKDSYLKDILGHYVGSFEDPYHSHCMKVTAQNSDKNYKAEYEEDRGKGFFPQTITQEYEAIKKLDQCKDHTYKVHPDKTKFTQVTDSPVLLQAQVNSKQLSDLNYKAKHESEKFKCHIPPDTPAFIQHKVNAYNLSDNLYKQDWEKSKAKKFDIKVDAIPLLAAKANTKNTSDVMYKKDYEKNKGKMIGVLSINDDPKMLHSLKVAKNQSDRLYKENYEKTKAKSMNYCETPKYQLDTQLKNFSEARYKDLYVKDVLGHYVGSMEDPYHTHCMKVAAQNSDKSYKAEYEEDKGKCYFPQTITQEYEAIKKLDQCKDHTYKVHPDKTKFTAVTDSPVLLQAQLNTKQLSDLNYKAKHEGEKFKCHIPADAPQFIQHRVNAYNLSDNVYKQDWEKSKAKKFDIKVDAIPLLAAKANTKNTSDVMYKKDYEKSKGKMIGALSINDDPKMLHSLKTAKNQSDREYRKDYEKSKTIYTAPLDMLQVTQAKKSQAIASDVDYKHILHSYSYPPDSINVDLAKKAYALQSDVEYKADYNSWMKGCGWVPFGSLEMEKAKRASDILNEKKYRQHPDTLKFTSIEDAPITVQSKINQAQRSDIAYKAKGEEIIHKYNLPPDLPQFIQAKVNAYNISENMYKADLKDLSKKGYDLRTDAIPIRAAKAARQAASDVQYKKDYEKAKGKMVGFQSLQDDPKLVHYMNVAKIQSDREYKKDYEKTKSKYNTPHDMFNVVAAKKAQDVVSNVNYKHSLHHYTYLPDAMDLELSKNMMQIQSDNVYKEDYNNWMKGIGWIPIGSLDVEKVKKAGDALNEKKYRQHPDTLKFTSIVDSPVMVQAKQNTKQVSDILYKAKGEDVKHKYTMSPDLPQFLQAKCNAYNISDVCYKRDWYDLIAKGNNVLGDAIPITAAKASRNIASDYKYKEAYEKSKGKHVGFRSLQDDPKLVHYMNVAKLQSDREYKKNYENTKTSYHTPGDMVSITAAKMAQDVATNVNYKQPLHHYTYLPDAMSLEHTRNVNQIQSDNVYKDEYNSFLKGIGWIPIGSLEVEKVKKAGDALNERKYRQHPDTVKFTSVPDSMGMVLAQHNTKQLSDLNYKVEGEKLKHKYTIDPELPQFIQAKVNALNMSDAHYKADWKKTIAKGYDLRPDAIPIVAAKSSRNIASDCKYKEAYEKAKGKQVGFLSLQDDPKLVHYMNVAKIQSDREYKKGYEASKTKYHTPLDMVSVTAAKKSQEVATNANYRQSYHHYTLLPDALNVEHSRNAMQIQSDNLYKSDFTNWMKGIGWVPIESLEVEKAKKAGEILSEKKYRQHPEKLKFTYAMDTMEQALNKSNKLNMDKRLYTEKWNKDKTTIHVMPDTPDILLSRVNQITMSDKLYKAGWEEEKKKGYDLRPDAIAIKAARASRDIASDYKYKKAYEQAKGKHIGFRSLEDDPKLVHFMQVAKMQSDREYKKGYEKSKTSFHTPVDMLSVVAAKKSQEVATNANYRNVIHTYNMLPDAMSFELAKNMMQIQSDNQYKADYADFMKGIGWLPLGSLEAEKNKKAMEIISEKKYRQHPDTLKYSTLMDSMNMVLAQNNAKIMNEHLYKQAWEADKTKVHIMPDIPQIILAKANAINMSDKLYKLSLEESKKKGYDLRPDAIPIKAAKASRDIASDYKYKYNYEKGKGKMVGFRSLEDDPKLVHSMQVAKMQSDREYKKNYENTKTSYHTPADMLSVTAAKDAQANITNTNYKHLIHKYILLPDAMNIELTRNMNRIQSDNEYKQDYNEWYKGLGWSPAGSLEVEKAKKATEYASDQKYRQHPSNFQFKKLTDSMDMVLAKQNAHTMNKHLYTIDWNKDKTKIHVMPDTPDILQAKQNQTLYSQKLYKLGWEEALKKGYDLPVDAISVQLAKASRDIASDYKYKQGYRKQLGHHVGFRSLQDDPKLVLSMNVAKMQSEREYKKDFEKWKTKFSSPVDMLGVVLAKKCQELVSDVDYKNYLHQWTCLPDQNDVVQAKKVYELQSENLYKSDLEWLRGIGWSPLGSLEAEKNKRASEIISEKKYRQPPDRNKFTSIPDAMDIVLAKTNAKNRSDRLYREAWDKDKTQIHIMPDTPDIVLAKANLINTSDKLYRMGYEELKRKGYDLPVDAIPIKAAKASREIASEYKYKEGFRKQLGHHIGARNIEDDPKMMWSMHVAKIQSDREYKKDFEKWKTKFSSPVDMLGVVLAKKCQTLVSDVDYKNYLHQWTCLPDQSDVIHARQAYDLQSDNLYKSDLQWLKGIGWMTSGSLEDEKNKRATQILSDHVYRQHPDQFKFSSLMDSIPMVLAKNNAITMNHRLYTEAWDKDKTTVHIMPDTPEVLLAKQNKVNYSEKLYKLGLEEAKRKGYDMRVDAIPIKAAKASRDIASEFKYKEGYRKQLGHHIGARAIRDDPKMMWSMHVAKIQSDREYKKDFEKWKTKFSSPVDMLGVVLAKKCQTLVSDVDYKNYLHQWTCLPDQSDVIHARQAYDLQSDNMYKSDLQWMRGIGWVSIGSLDVEKCKRATEILSDKIYRQPPDRFKFTSVTDSLEQVLAKNNAITMNKRLYTEAWDKDKTQIHIMPDTPEIMLARQNKINYSETLYKLANEEAKKKGYDLRSDAIPIVAAKASRDVISDYKYKDGYRKQLGHHIGARNIEDDPKMMWSMHVAKIQSDREYKKDFEKWKTKFSSPVDMLGVVLAKKCQTLVSDVDYKNYLHEWTCLPDQNDVIHARQAYDLQSDNIYKSDLQWLRGIGWVPIGSMDVVKCKRAAEILSDNIYRQPPDKLKFTSVTDSLEQVLAKNNALNMNKRLYTEAWDKDKTQVHIMPDTPEIMLARQNKINYSESLYRQAMEEAKKEGYDLRSDAIPIVAAKASRDIASDYKYKEAYRKQLGHHIGARAVHDDPKIMWSLHIAKVQSDREYKKDFEKYKTRYSSPVDMLGIVLAKKCQTLVSDVDYKHPLHEWICLPDQNDIIHARKAYDLQSDNLYKSDLEWMKGIGWVPIDSLEVVRAKRAGELLSDTIYRQRPETLKFTSITDTPEQVLAKNNALNMNKRLYTEAWDNDKKTIHVMPDTPEIMLAKLNRINYSDKLYKLALEESKKEGYDLRLDAIPIQAAKASRDIASDYKYKEGYRKQLGHHIGARNIKDDPKMMWSIHVAKIQSDREYKKEFEKWKTKFSSPVDMLGVVLAKKCQILVSDIDYKHPLHEWTCLPDQNDVIQARKAYDLQSDAIYKSDLEWLRGIGWVPIGSVEVEKVKRAGEILSDRKYRQPADQLKFTCITDTPEIVLAKNNALTMSKHLYTEAWDADKTSIHVMPDTPDILLAKSNSANISQKLYTKGWDESKMKDYDLRADAISIKSAKASRDIASDYKYKEAYEKQKGHHIGAQSIEDDPKIMCAIHAGKIQSEREYKKEFQKWKTKFSSPVDMLSILLAKKCQTLVTDIDYRNYLHEWTCMPDQNDIIQAKKAYDLQSDALYKADLEWLRGIGWMPQGSPEVLRVKNAQNIFCDSVYRTPVVNLKYTSIVDTPEVVLAKSNAENISIPKYREVWDKDKTSIHIMPDTPEINLARANALNVSNKLYREGWDEMKAGCDVRLDAIPIQAAKASREIASDYKYKLDHEKQKGHYVGTLTARDDNKIRWALIADKLQNEREYRLDWAKWKAKIQSPVDMLSILHSKNSQALVSDMDYRNYLHQWTCMPDQNDVIQAKKAYELQSDNVYKADLEWLRGIGWMPNDSVSVNHAKHAADIFSEKKYRTKIETLNFTPVDDRVDYVTAKQSGEILDDIKYRKDWNATKSKYTLTETPLLHTAQEAARILDQYLYKEGWERQKATGYILPPDAVPFVHAHHCNDVQSELKYKAEHVKQKGHYVGVPTMRDDPKLVWFEHAGQIQNERLYKEDYHKTKAKINIPADMVSVLAAKQGQTLVSDIDYRNYLHQWMCHPDQNDVIQARKAYDLQSDNVYRADLEWLRGIGWIPLDSVDHVRVTKNQEMMSQIKYKKNALENYPNFRSVVDPPEIVLAKINSVNQSDVKYKETFNKAKGKYTFSPDTPHISHSKDMGKLYSTILYKGAWEGTKAYGYTLDERYIPIVGAKHADLVNSELKYKETYEKQKGHYLAGKVIGEFPGVVHCLDFQKMRSALNYRKHYEDTKANVHIPNDMMNHVLAKRCQYILSDLEYRHYFHQWTSLLEEPNVIRVRNAQEILSDNVYKDDLNWLKGIGCYVWDTPQILHAKKSYDLQSQLQYTAAGKENLQNYNLVTDTPLYVTAVQSGINASEVKYKENYHQIKDKYTTVLETVDYDRTRNLKNLYSSNLYKEAWDRVKATSYILPSSTLSLTHAKNQKHLASHIKYREEYEKFKALYTLPRSVDDDPNTARCLRVGKLNIDRLYRSVYEKNKMKIHIVPDMVEMVTAKDSQKKVSEIDYRLRLHEWICHPDLQVNDHVRKVTDQISDIVYKDDLNWLKGIGCYVWDTPEILHAKHAYDLRDDIKYKAHMLKTRNDYKLVTDTPVYVQAVKSGKQLSDAVYHYDYVHSVRGKVAPTTKTVDLDRALHAYKLQSSNLYKTSLRTLPTGYRLPGDTPHFKHIKDTRYMSSYFKYKEAYEHTKAYGYTLGPKDVPFVHVRRVNNVTSERLYRELYHKLKDKIHTTPDTPEIRQVKKTQEAVSELIYKSDFFKMQGHMISLPYTPQVIHCRYVGDITSDIKYKEDLQVLKGFGCFLYDTPDMVRSRHLRKLWSNYLYTDKARKMRDKYKVVLDTPEYRKVQELKTHLSELVYRAAGKKQKSIFTSVPDTPDLLRAKRGQKLQSQYLYVELATKERPHHHAGNQTTALKHAKDVKDMVSEKKYKIQYEKMKDKYTPVPDTPILIRAKRAYWNASDLRYKETFQKTKGKYHTVKDALDIVYHRKVTDDISKIKYKENYMSQLGIWRSIPDRPEHFHHRAVTDTVSDVKYKEDLTWLKGIGCYAYDTPDFTLAEKNKTLYSKYKYKEVFERTKSDFKYVADSPINRHFKYATQLMNEKKYRADYEQRKDKYHLVVDEPRHLLAKTAGDQISQIKYRKNYEKSKDKFTSIVDTPEHLRTTKVNKQISDILYKLEYNKAKPRGYTTIHDTPMLLHVRKVKDEVSDLKYKEVYQRNKSNCTIEPDAVHIKAAKDAYKVNTNLDYKKQYEANKAHWKWTPDRPDFLQAAKSSLQQSDFEYKLDREFLKGCKLSVTDDKNTVLALRNTLIESDLKYKEKHVKERGTCHAVPDTPQILLAKTVSNLVSENKYKDHVKKHLAQGSYTTLPETRDTVHVKEVTKHVSDTNYKKKFVKEKGKSNYSIMLEPPEVKHAMEVAKKQSDVAYRKDAKENLHYTTVADRPDIKKATQAAKQASEVEYRAKHRKEGSHGLSMLGRPDIEMAKKAAKLSSQVKYRENFDKEKGKTPKYNPKDSQLYKVMKDANNLASEVKYKADLKKLHKPVTDMKESLIMNHVLNTSQLASSYQYKKKYEKSKGHYHTIPDNLEQLHLKEATELQSIVKYKEKYEKERGKPMLDFETPTYITAKESQQMQSGKEYRKDYEESIKGRNLTGLEVTPALLHVKYATKIASEKEYRKDLEESIRGKGLTEMEDTPDMLRAKNATQILNEKEYKRDLELEVKGRGLNAMANETPDFMRARNATDIASQIKYKQSAEMEKANFTSVVDTPEIIHAQQVKNLSSQKKYKEDAEKSMSYYETVLDTPEIQRVRENQKNFSLLQYQCDLKNSKGKITVVQDTPEILRVKENQKNFSSVLYKEDVSPGTAIGKTPEMMRVKQTQDHISSVKYKEAIGQGTPIPDLPEVKRVKETQKHISSVMYKENLGTGIPTTVTPEIERVKRNQENFSSVLYKENLGKGIPTPITPEMERVKRNQENFSSVLYKENMGKGTPLAVTPEMERVKHNQENISSVLYKENVGKATATPVTPEMQRVKRNQENISSVLYKENLGKATPTPFTPEMERVKRNQENFSSVLYKENMRKATPTPVTPEMERAKRNQENISSVLYSDSFRKQIQGKAAYVLDTPEMRRVRETQRHISTVKYHEDFEKHKGCFTPVVTDPITERVKKNMQDFSDINYRGIQRKVVEMEQKRNDQDQETITGLRVWRTNPGSVFDYDPAEDNIQSRSLHMINVQAQRRSREQSRSASALSISGGEEKSEHSEAPDHHLSTYSDGGVFAVSTAYKHAKTTELPQQRSSSVATQQTTVSSIPSHPSTAGKIFRAMYDYMAADADEVSFKDGDAIINVQAIDEGWMYGTVQRTGRTGMLPANYVEAI

SEQ ID NO: 25444 - protein, 21 aa, Artificial Sequence
  Synthetic polypeptide
FLHFHLRNYTRKTMKRQKQRA

SEQ ID NO: 25445 - protein, 6310 aa, Artificial Sequence
  Synthetic polypeptide
EQLRSTAPSVSERRRRRVISAFPSEKLYKENYEKTKAKSINYCETPKFKLDTVLQNFSSDKKYKDSYLKDILGHYVGSFEDPYHSHCMKVTAQNSDKNYKAEYEEDRGKGFFPQTITQEYEAIKKLDQCKDHTYKVHPDKTKFTQVTDSPVLLQAQVNSKQLSDLNYKAKHESEKFKCHIPPDTPAFIQHKVNAYNLSDNLYKQDWEKSKAKKFDIKVDAIPLLAAKANTKNTSDVMYKKDYEKNKGKMIGVLSINDDPKMLHSLKVAKNQSDRLYKENYEKTKAKSMNYCETPKYQLDTQLKNFSEARYKDLYVKDVLGHYVGSMEDPYHTHCMKVAAQNSDKSYKAEYEEDKGKCYFPQTITQEYEAIKKLDQCKDHTYKVHPDKTKFTAVTDSPVLLQAQLNTKQLSDLNYKAKHEGEKFKCHIPADAPQFIQHRVNAYNLSDNVYKQDWEKSKAKKFDIKVDAIPLLAAKANTKNTSDVMYKKDYEKSKGKMIGALSINDDPKMLHSLKTAKNQSDREYRKDYEKSKTIYTAPLDMLQVTQAKKSQAIASDVDYKHILHSYSYPPDSINVDLAKKAYALQSDVEYKADYNSWMKGCGWVPFGSLEMEKAKRASDILNEKKYRQHPDTLKFTSIEDAPITVQSKINQAQRSDIAYKAKGEEIIHKYNLPPDLPQFIQAKVNAYNISENMYKADLKDLSKKGYDLRTDAIPIRAAKAARQAASDVQYKKDYEKAKGKMVGFQSLQDDPKLVHYMNVAKIQSDREYKKDYEKTKSKYNTPHDMFNVVAAKKAQDVVSNVNYKHSLHHYTYLPDAMDLELSKNMMQIQSDNVYKEDYNNWMKGIGWIPIGSLDVEKVKKAGDALNEKKYRQHPDTLKFTSIVDSPVMVQAKQNTKQVSDILYKAKGEDVKHKYTMSPDLPQFLQAKCNAYNISDVCYKRDWYDLIAKGNNVLGDAIPITAAKASRNIASDYKYKEAYEKSKGKHVGFRSLQDDPKLVHYMNVAKLQSDREYKKNYENTKTSYHTPGDMVSITAAKMAQDVATNVNYKQPLHHYTYLPDAMSLEHTRNVNQIQSDNVYKDEYNSFLKGIGWIPIGSLEVEKVKKAGDALNERKYRQHPDTVKFTSVPDSMGMVLAQHNTKQLSDLNYKVEGEKLKHKYTIDPELPQFIQAKVNALNMSDAHYKADWKKTIAKGYDLRPDAIPIVAAKSSRNIASDCKYKEAYEKAKGKQVGFLSLQDDPKLVHYMNVAKIQSDREYKKGYEASKTKYHTPLDMVSVTAAKKSQEVATNANYRQSYHHYTLLPDALNVEHSRNAMQIQSDNLYKSDFTNWMKGIGWVPIESLEVEKAKKAGEILSEKKYRQHPEKLKFTYAMDTMEQALNKSNKLNMDKRLYTEKWNKDKTTIHVMPDTPDILLSRVNQITMSDKLYKAGWEEEKKKGYDLRPDAIAIKAARASRDIASDYKYKKAYEQAKGKHIGFRSLEDDPKLVHFMQVAKMQSDREYKKGYEKSKTSFHTPVDMLSVVAAKKSQEVATNANYRNVIHTYNMLPDAMSFELAKNMMQIQSDNQYKADYADFMKGIGWLPLGSLEAEKNKKAMEIISEKKYRQHPDTLKYSTLMDSMNMVLAQNNAKIMNEHLYKQAWEADKTKVHIMPDIPQIILAKANAINMSDKLYKLSLEESKKKGYDLRPDAIPIKAAKASRDIASDYKYKYNYEKGKGKMVGFRSLEDDPKLVHSMQVAKMQSDREYKKNYENTKTSYHTPADMLSVTAAKDAQANITNTNYKHLIHKYILLPDAMNIELTRNMNRIQSDNEYKQDYNEWYKGLGWSPAGSLEVEKAKKATEYASDQKYRQHPSNFQFKKLTDSMDMVLAKQNAHTMNKHLYTIDWNKDKTKIHVMPDTPDILQAKQNQTLYSQKLYKLGWEEALKKGYDLPVDAISVQLAKASRDIASDYKYKQGYRKQLGHHVGFRSLQDDPKLVLSMNVAKMQSEREYKKDFEKWKTKFSSPVDMLGVVLAKKCQELVSDVDYKNYLHQWTCLPDQNDVVQAKKVYELQSENLYKSDLEWLRGIGWSPLGSLEAEKNKRASEIISEKKYRQPPDRNKFTSIPDAMDIVLAKTNAKNRSDRLYREAWDKDKTQIHIMPDTPDIVLAKANLINTSDKLYRMGYEELKRKGYDLPVDAIPIKAAKASREIASEYKYKEGFRKQLGHHIGARNIEDDPKMMWSMHVAKIQSDREYKKDFEKWKTKFSSPVDMLGVVLAKKCQTLVSDVDYKNYLHQWTCLPDQSDVIHARQAYDLQSDNLYKSDLQWLKGIGWMTSGSLEDEKNKRATQILSDHVYRQHPDQFKFSSLMDSIPMVLAKNNAITMNHRLYTEAWDKDKTTVHIMPDTPEVLLAKQNKVNYSEKLYKLGLEEAKRKGYDMRVDAIPIKAAKASRDIASEFKYKEGYRKQLGHHIGARAIRDDPKMMWSMHVAKIQSDREYKKDFEKWKTKFSSPVDMLGVVLAKKCQTLVSDVDYKNYLHQWTCLPDQSDVIHARQAYDLQSDNMYKSDLQWMRGIGWVSIGSLDVEKCKRATEILSDKIYRQPPDRFKFTSVTDSLEQVLAKNNALNMNKRLYTEAWDKDKTQIHIMPDTPEIMLARQNKINYSETLYKLANEEAKKKGYDLRSDAIPIVAAKASRDVISDYKYKDGYRKQLGHHIGARNIEDDPKMMWSMHVAKIQSDREYKKDFEKWKTKFSSPVDMLGVVLAKKCQTLVSDVDYKNYLHEWTCLPDQNDVIHARQAYDLQSDNIYKSDLQWLRGIGWVPIGSMDVVKCKRAAEILSDNIYRQPPDKLKFTSVTDSLEQVLAKNNALNMNKRLYTEAWDKDKTQVHIMPDTPEIMLARQNKINYSESLYRQAMEEAKKEGYDLRSDAIPIVAAKASRDIASDYKYKEAYRKQLGHHIGARAVHDDPKIMWSLHIAKVQSDREYKKDFEKYKTRYSSPVDMLGIVLAKKCQTLVSDVDYKHPLHEWICLPDQNDIIHARKAYDLQSDNLYKSDLEWMKGIGWVPIDSLEVVRAKRAGELLSDTIYRQRPETLKFTSITDTPEQVLAKNNALNMNKRLYTEAWDNDKKTIHVMPDTPEIMLAKLNRINYSDKLYKLALEESKKEGYDLRLDAIPIQAAKASRDIASDYKYKEGYRKQLGHHIGARNIKDDPKMMWSIHVAKIQSDREYKKEFEKWKTKFSSPVDMLGVVLAKKCQILVSDIDYKHPLHEWTCLPDQNDVIQARKAYDLQSDAIYKSDLEWLRGIGWVPIGSVEVEKVKRAGEILSDRKYRQPADQLKFTCITDTPEIVLAKNNALTMSKHLYTEAWDADKTSIHVMPDTPDILLAKSNSANISQKLYTKGWDESKMKDYDLRADAISIKSAKASRDIASDYKYKEAYEKQKGHHIGAQSIEDDPKIMCAIHAGKIQSEREYKKEFQKWKTKFSSPVDMLSILLAKKCQTLVTDIDYRNYLHEWTCMPDQNDIIQAKKAYDLQSDALYKADLEWLRGIGWMPQGSPEVLRVKNAQNIFCDSVYRTPVVNLKYTSIVDTPEVVLAKSNAENISIPKYREVWDKDKTSIHIMPDTPEINLARANALNVSNKLYREGWDEMKAGCDVRLDAIPIQAAKASREIASDYKYKLDHEKQKGHYVGTLTARDDNKIRWALIADKLQNEREYRLDWAKWKAKIQSPVDMLSILHSKNSQALVSDMDYRNYLHQWTCMPDQNDVIQAKKAYELQSDNVYKADLEWLRGIGWMPNDSVSVNHAKHAADIFSEKKYRTKIETLNFTPVDDRVDYVTAKQSGEILDDIKYRKDWNATKSKYTLTETPLLHTAQEAARILDQYLYKEGWERQKATGYILPPDAVPFVHAHHCNDVQSELKYKAEHVKQKGHYVGVPTMRDDPKLVWFEHAGQIQNERLYKEDYHKTKAKINIPADMVSVLAAKQGQTLVSDIDYRNYLHQWMCHPDQNDVIQARKAYDLQSDNVYRADLEWLRGIGWIPLDSVDHVRVTKNQEMMSQIKYKKNALENYPNFRSVVDPPEIVLAKINSVNQSDVKYKETFNKAKGKYTFSPDTPHISHSKDMGKLYSTILYKGAWEGTKAYGYTLDERYIPIVGAKHADLVNSELKYKETYEKQKGHYLAGKVIGEFPGVVHCLDFQKMRSALNYRKHYEDTKANVHIPNDMMNHVLAKRCQYILSDLEYRHYFHQWTSLLEEPNVIRVRNAQEILSDNVYKDDLNWLKGIGCYVWDTPQILHAKKSYDLQSQLQYTAAGKENLQNYNLVTDTPLYVTAVQSGINASEVKYKENYHQIKDKYTTVLETVDYDRTRNLKNLYSSNLYKEAWDRVKATSYILPSSTLSLTHAKNQKHLASHIKYREEYEKFKALYTLPRSVDDDPNTARCLRVGKLNIDRLYRSVYEKNKMKIHIVPDMVEMVTAKDSQKKVSEIDYRLRLHEWICHPDLQVNDHVRKVTDQISDIVYKDDLNWLKGIGCYVWDTPEILHAKHAYDLRDDIKYKAHMLKTRNDYKLVTDTPVYVQAVKSGKQLSDAVYHYDYVHSVRGKVAPTTKTVDLDRALHAYKLQSSNLYKTSLRTLPTGYRLPGDTPHFKHIKDTRYMSSYFKYKEAYEHTKAYGYTLGPKDVPFVHVRRVNNVTSERLYRELYHKLKDKIHTTPDTPEIRQVKKTQEAVSELIYKSDFFKMQGHMISLPYTPQVIHCRYVGDITSDIKYKEDLQVLKGFGCFLYDTPDMVRSRHLRKLWSNYLYTDKARKMRDKYKVVLDTPEYRKVQELKTHLSELVYRAAGKKQKSIFTSVPDTPDLLRAKRGQKLQSQYLYVELATKERPHHHAGNQTTALKHAKDVKDMVSEKKYKIQYEKMKDKYTPVPDTPILIRAKRAYWNASDLRYKETFQKTKGKYHTVKDALDIVYHRKVTDDISKIKYKENYMSQLGIWRSIPDRPEHFHHRAVTDTVSDVKYKEDLTWLKGIGCYAYDTPDFTLAEKNKTLYSKYKYKEVFERTKSDFKYVADSPINRHFKYATQLMNEKKYRADYEQRKDKYHLVVDEPRHLLAKTAGDQISQIKYRKNYEKSKDKFTSIVDTPEHLRTTKVNKQISDILYKLEYNKAKPRGYTTIHDTPMLLHVRKVKDEVSDLKYKEVYQRNKSNCTIEPDAVHIKAAKDAYKVNTNLDYKKQYEANKAHWKWTPDRPDFLQAAKSSLQQSDFEYKLDREFLKGCKLSVTDDKNTVLALRNTLIESDLKYKEKHVKERGTCHAVPDTPQILLAKTVSNLVSENKYKDHVKKHLAQGSYTTLPETRDTVHVKEVTKHVSDTNYKKKFVKEKGKSNYSIMLEPPEVKHAMEVAKKQSDVAYRKDAKENLHYTTVADRPDIKKATQAAKQASEVEYRAKHRKEGSHGLSMLGRPDIEMAKKAAKLSSQVKYRENFDKEKGKTPKYNPKDSQLYKVMKDANNLASEVKYKADLKKLHKPVTDMKESLIMNHVLNTSQLASSYQYKKKYEKSKGHYHTIPDNLEQLHLKEATELQSIVKYKEKYEKERGKPMLDFETPTYITAKESQQMQSGKEYRKDYEESIKGRNLTGLEVTPALLHVKYATKIASEKEYRKDLEESIRGKGLTEMEDTPDMLRAKNATQILNEKEYKRDLELEVKGRGLNAMANETPDFMRARNATDIASQIKYKQSAEMEKANFTSVVDTPEIIHAQQVKNLSSQKKYKEDAEKSMSYYETVLDTPEIQRVRENQKNFSLLQYQCDLKNSKGKITVVQDTPEILRVKENQKNFSSVLYKEDVSPGTAIGKTPEMMRVKQTQDHISSVKYKEAIGQGTPIPDLPEVKRVKETQKHISSVMYKENLGTGIPTTVTPEIERVKRNQENFSSVLYKENLGKGIPTPITPEMERVKRNQENFSSVLYKENMGKGTPLAVTPEMERVKHNQENISSVLYKENVGKATATPVTPEMQRVKRNQENISSVLYKENLGKATPTPFTPEMERVKRNQENFSSVLYKENMRKATPTPVTPEMERAKRNQENISSVLYSDSFRKQIQGKAAYVLDTPEMRRVRETQRHISTVKYHEDFEKHKGCFTPVVTDPITERVKKNMQDFSDINYRGIQRKVVEMEQKRNDQDQETITGLRVWRTNPGSVFDYDPAEDNIQSRSLHMINVQAQRRSREQSRSASALSISGGEEKSEHSEAPDHHLSTYSDGGVFAVSTAYKHAKTTELPQQRSSSVATQQTTVSSIPSHPSTAGKIFRAMYDYMAADADEVSFKDGDAIINVQAIDEGWMYGTVQRTGRTGMLPANYVEAI

SEQ ID NO: 25446 - protein, 8166 aa, Artificial Sequence
  Synthetic polypeptide
EQLRSTAPSVSERRRRRVISAFPSEKLYKENYEKTKAKSINYCETPKFKLDTVLQNFSSDKKYKDSYLKDILGHYVGSFEDPYHSHCMKVTAQNSDKNYKAEYEEDRGKGFFPQTITQEYEAIKKLDQCKDHTYKVHPDKTKFTQVTDSPVLLQAQVNSKQLSDLNYKAKHESEKFKCHIPPDTPAFIQHKVNAYNLSDNLYKQDWEKSKAKKFDIKVDAIPLLAAKANTKNTSDVMYKKDYEKNKGKMIGVLSINDDPKMLHSLKVAKNQSDRLYKENYEKTKAKSMNYCETPKYQLDTQLKNFSEARYKDLYVKDVLGHYVGSMEDPYHTHCMKVAAQNSDKSYKAEYEEDKGKCYFPQTITQEYEAIKKLDQCKDHTYKVHPDKTKFTAVTDSPVLLQAQLNTKQLSDLNYKAKHEGEKFKCHIPADAPQFIQHRVNAYNLSDNVYKQDWEKSKAKKFDIKVDAIPLLAAKANTKNTSDVMYKKDYEKSKGKMIGALSINDDPKMLHSLKTAKNQSDREYRKDYEKSKTIYTAPLDMLQVTQAKKSQAIASDVDYKHILHSYSYPPDSINVDLAKKAYALQSDVEYKADYNSWMKGCGWVPFGSLEMEKAKRASDILNEKKYRQHPDTLKFTSIEDAPITVQSKINQAQRSDIAYKAKGEEIIHKYNLPPDLPQFIQAKVNAYNISENMYKADLKDLSKKGYDLRTDAIPIRAAKAARQAASDVQYKKDYEKAKGKMVGFQSLQDDPKLVHYMNVAKIQSDREYKKDYEKTKSKYNTPHDMFNVVAAKKAQDVVSNVNYKHSLHHYTYLPDAMDLELSKNMMQIQSDNVYKEDYNNWMKGIGWIPIGSLDVEKVKKAGDALNEKKYRQHPDTLKFTSIVDSPVMVQAKQNTKQVSDILYKAKGEDVKHKYTMSPDLPQFLQAKCNAYNISDVCYKRDWYDLIAKGNNVLGDAIPITAAKASRNIASDYKYKEAYEKSKGKHVGFRSLQDDPKLVHYMNVAKLQSDREYKKNYENTKTSYHTPGDMVSITAAKMAQDVATNVNYKQPLHHYTYLPDAMSLEHTRNVNQIQSDNVYKDEYNSFLKGIGWIPIGSLEVEKVKKAGDALNERKYRQHPDTVKFTSVPDSMGMVLAQHNTKQLSDLNYKVEGEKLKHKYTIDPELPQFIQAKVNALNMSDAHYKADWKKTIAKGYDLRPDAIPIVAAKSSRNIASDCKYKEAYEKAKGKQVGFLSLQDDPKLVHYMNVAKIQSDREYKKGYEASKTKYHTPLDMVSVTAAKKSQEVATNANYRQSYHHYTLLPDALNVEHSRNAMQIQSDNLYKSDFTNWMKGIGWVPIESLEVEKAKKAGEILSEKKYRQHPEKLKFTYAMDTMEQALNKSNKLNMDKRLYTEKWNKDKTTIHVMPDTPDILLSRVNQITMSDKLYKAGWEEEKKKGYDLRPDAIAIKAARASRDIASDYKYKKAYEQAKGKHIGFRSLEDDPKLVHFMQVAKMQSDREYKKGYEKSKTSFHTPVDMLSVVAAKKSQEVATNANYRNVIHTYNMLPDAMSFELAKNMMQIQSDNQYKADYADFMKGIGWLPLGSLEAEKNKKAMEIISEKKYRQHPDTLKYSTLMDSMNMVLAQNNAKIMNEHLYKQAWEADKTKVHIMPDIPQIILAKANAINMSDKLYKLSLEESKKKGYDLRPDAIPIKAAKASRDIASDYKYKYNYEKGKGKMVGFRSLEDDPKLVHSMQVAKMQSDREYKKNYENTKTSYHTPADMLSVTAAKDAQANITNTNYKHLIHKYILLPDAMNIELTRNMNRIQSDNEYKQDYNEWYKGLGWSPAGSLEVEKAKKATEYASDQKYRQHPSNFQFKKLTDSMDMVLAKQNAHTMNKHLYTIDWNKDKTKIHVMPDTPDILQAKQNQTLYSQKLYKLGWEEALKKGYDLPVDAISVQLAKASRDIASDYKYKQGYRKQLGHHVGFRSLQDDPKLVLSMNVAKMQSEREYKKDFEKWKTKFSSPVDMLGVVLAKKCQELVSDVDYKNYLHQWTCLPDQNDVVQAKKVYELQSENLYKSDLEWLRGIGWSPLGSLEAEKNKRASEIISEKKYRQPPDRNKFTSIPDAMDIVLAKTNAKNRSDRLYREAWDKDKTQIHIMPDTPDIVLAKANLINTSDKLYRMGYEELKRKGYDLPVDAIPIKAAKASREIASEYKYKEGFRKQLGHHIGARNIEDDPKMMWSMHVAKIQSDREYKKDFEKWKTKFSSPVDMLGVVLAKKCQTLVSDVDYKNYLHQWTCLPDQSDVIHARQAYDLQSDNLYKSDLQWLKGIGWMTSGSLEDEKNKRATQILSDHVYRQHPDQFKFSSLMDSIPMVLAKNNAITMNHRLYTEAWDKDKTTVHIMPDTPEVLLAKQNKVNYSEKLYKLGLEEAKRKGYDMRVDAIPIKAAKASRDIASEFKYKEGYRKQLGHHIGARAIRDDPKMMWSMHVAKIQSDREYKKDFEKWKTKFSSPVDMLGVVLAKKCQTLVSDVDYKNYLHQWTCLPDQSDVIHARQAYDLQSDNMYKSDLQWMRGIGWVSIGSLDVEKCKRATEILSDKIYRQPPDRFKFTSVTDSLEQVLAKNNAITMNKRLYTEAWDKDKTQIHIMPDTPEIMLARMNKINYSESLYKLANEEAKKKGYDLRSDAIPIVAAKASRDIISDYKYKDGYCKQLGHHIGARNIEDDPKMMWSMHVAKIQSDREYKKDFEKWKTKFSSPVDMLGVVLAKKCQTLVSDVDYKNYLHEWTCLPDQSDVIHARQAYDLQSDNIYKSDLQWLRGIGWVPIGSMDVVKCKRATEILSDNIYRQPPDKLKFTSVTDSLEQVLAKNNALNMNKRLYTEAWDKDKTQIHIMPDTPEIMLARQNKINYSETLYKLANEEAKKKGYDLRSDAIPIVAAKASRDVISDYKYKDGYRKQLGHHIGARNIEDDPKMMWSMHVAKIQSDREYKKDFEKWKTKFSSPVDMLGVVLAKKCQTLVSDVDYKNYLHEWTCLPDQNDVIHARQAYDLQSDNIYKSDLQWLRGIGWVPIGSMDVVKCKRAAEILSDNIYRQPPDKLKFTSVTDSLEQVLAKNNALNMNKRLYTEAWDKDKTQVHIMPDTPEIMLARQNKINYSESLYRQAMEEAKKEGYDLRSDAIPIVAAKASRDIASDYKYKEAYRKQLGHHIGARAVHDDPKIMWSLHIAKVQSDREYKKDFEKYKTRYSSPVDMLGIVLAKKCQTLVSDVDYKHPLHEWICLPDQNDIIHARKAYDLQSDNLYKSDLEWMKGIGWVPIDSLEVVRAKRAGELLSDTIYRQRPETLKFTSITDTPEQVLAKNNALNMNKRLYTEAWDNDKKTIHVMPDTPEIMLAKLNRINYSDKLYKLALEESKKEGYDLRLDAIPIQAAKASRDIASDYKYKEGYRKQLGHHIGARNIKDDPKMMWSIHVAKIQSDREYKKEFEKWKTKFSSPVDMLGVVLAKKCQILVSDIDYKHPLHEWTCLPDQNDVIQARKAYDLQSDAIYKSDLEWLRGIGWVPIGSVEVEKVKRAGEILSDRKYRQPADQLKFTCITDTPEIVLAKNNALTMSKHLYTEAWDADKTSIHVMPDTPDILLAKSNSANISQKLYTKGWDESKMKDYDLRADAISIKSAKASRDIASDYKYKEAYEKQKGHHIGAQSIEDDPKIMCAIHAGKIQSEREYKKEFQKWKTKFSSPVDMLSILLAKKCQTLVTDIDYRNYLHEWTCMPDQNDIIQAKKAYDLQSDSVYKADLEWLRGIGWMPEGSVEMNRVKVAQDLVNERLYRTRPEALSFTSIVDTPEVVLAKANSLQISEKLYQEAWNKDKSNITIPSDTPEMLQAHINALQISNKLYQKDWNDAKQKGYDIRADAIEIKHAKASREIASEYKYKEGYRKQLGHHMGFRTLQDDPKSVWAIHAAKIQSDREYKKAYEKSKGIHNTPLDMMSIVQAKKCQVLVSDIDYRNYLHQWTCLPDQNDVIQAKKAYDLQSDNLYKSDLEWLKGIGWLPEGSVEVMRVKNAQNLLNERLYRIKPEALKFTSIVDTPEVIQAKINAVQISEPLYRDAWEKEKANVNVPADTPLMLQSKINALQISNKRYQQAWEDVKMTGYDLRADAIGIQHAKASRDIASDYLYKTAYEKQKGHYIGCRSAKEDPKLVWAANVLKMQNDRLYKKAYNDHKAKISIPVDMVSISAAKEGQALASDVDYRHYLHHWSCFPDQNDVIQARKAYDLQSDSVYKADLEWLRGIGWMPEGSVEMNRVKVAQDLVNERLYRTRPEALSFTSIVDTPEVVLAKANSLQISEKLYQEAWNKDKSNITIPSDTPEMLQAHINALQISNKLYQKDWNDTKQKGYDIRADAIEIKHAKASREIASEYKYKEGYRKQLGHHMGFRTLQDDPKSVWAIHAAKIQSDREYKKAYEKSKGIHNTPLDMMSIVQAKKCQVLVSDIDYRNYLHQWTCLPDQNDVIQAKKAYDLQSDNLYKSDLEWLKGIGWLPEGSVEVMRVKNAQNLLNERLYRIKPEALKFTSIVDTPEVIQAKINAVQISEPLYRNAWEKEKANVNVPADTPLMLQSKINALQISNKRYQQAWEDVKMTGYDLRADAIGIQHAKASRDIASDYLYKTAYEKQKGHYIGCRSAKEDPKLVWAANVLKMQNDRLYKKAYNDHKAKISIPVDMVSISAAKEGQALASDVDYRHYLHHWSCFPDQNDVIQARKAYDLQSDSVYKADLEWLRGIGWMPEGSVEMNRVKVAQDLVNERLYRTRPEALSFTSIVDTPEVVLAKANSLQISEKLYQEAWNKDKSNITIPSDTPEMLQAHINALQISNKLYQKDWNDTKQKGYDIRADAIEIKHAKASREIASEYKYKEGYRKQLGHHMGFRTLQDDPKSVWAIHAAKIQSDREYKKAYEKSKGIHNTPLDMMSIVQAKKCQVLVSDIDYRNYLHQWTCLPDQNDVIQAKKAYDLQSDNLYKSDLEWLKGIGWLPEGSVEVMRVKNAQNLLNERLYRIKPEALKFTSIVDTPEVIQAKINAVQISEPLYRDAWEKEKANVNVPADTPLMLQSKINALQISNKRYQQAWEDVKMTGYDLRADAIGIQHAKASRDIASDYLYKTAYEKQKGHYIGCRSAKEDPKLVWAANVLKMQNDRLYKKAYNDHKAKISIPVDMVSISAAKEGQALASDVDYRHYLHRWSCFPDQNDVIQARKAYDLQSDALYKADLEWLRGIGWMPQGSPEVLRVKNAQNIFCDSVYRTPVVNLKYTSIVDTPEVVLAKSNAENISIPKYREVWDKDKTSIHIMPDTPEINLARANALNVSNKLYREGWDEMKAGCDVRLDAIPIQAAKASREIASDYKYKLDHEKQKGHYVGTLTARDDNKIRWALIADKLQNEREYRLDWAKWKAKIQSPVDMLSILHSKNSQALVSDMDYRNYLHQWTCMPDQNDVIQAKKAYELQSDNVYKADLEWLRGIGWMPNDSVSVNHAKHAADIFSEKKYRTKIETLNFTPVDDRVDYVTAKQSGEILDDIKYRKDWNATKSKYTLTETPLLHTAQEAARILDQYLYKEGWERQKATGYILPPDAVPFVHAHHCNDVQSELKYKAEHVKQKGHYVGVPTMRDDPKLVWFEHAGQIQNERLYKEDYHKTKAKINIPADMVSVLAAKQGQTLVSDIDYRNYLHQWMCHPDQNDVIQARKAYDLQSDNVYRADLEWLRGIGWIPLDSVDHVRVTKNQEMMSQIKYKKNALENYPNFRSVVDPPEIVLAKINSVNQSDVKYKETFNKAKGKYTFSPDTPHISHSKDMGKLYSTILYKGAWEGTKAYGYTLDERYIPIVGAKHADLVNSELKYKETYEKQKGHYLAGKVIGEFPGVVHCLDFQKMRSALNYRKHYEDTKANVHIPNDMMNHVLAKRCQYILSDLEYRHYFHQWTSLLEEPNVIRVRNAQEILSDNVYKDDLNWLKGIGCYVWDTPQILHAKKSYDLQSQLQYTAAGKENLQNYNLVTDTPLYVTAVQSGINASEVKYKENYHQIKDKYTTVLETVDYDRTRNLKNLYSSNLYKEAWDRVKATSYILPSSTLSLTHAKNQKHLASHIKYREEYEKFKALYTLPRSVDDDPNTARCLRVGKLNIDRLYRSVYEKNKMKIHIVPDMVEMVTAKDSQKKVSEIDYRLRLHEWICHPDLQVNDHVRKVTDQISDIVYKDDLNWLKGIGCYVWDTPEILHAKHAYDLRDDIKYKAHMLKTRNDYKLVTDTPVYVQAVKSGKQLSDAVYHYDYVHSVRGKVAPTTKTVDLDRALHAYKLQSSNLYKTSLRTLPTGYRLPGDTPHFKHIKDTRYMSSYFKYKEAYEHTKAYGYTLGPKDVPFVHVRRVNNVTSERLYRELYHKLKDKIHTTPDTPEIRQVKKTQEAVSELIYKSDFFKMQGHMISLPYTPQVIHCRYVGDITSDIKYKEDLQVLKGFGCFLYDTPDMVRSRHLRKLWSNYLYTDKARKMRDKYKVVLDTPEYRKVQELKTHLSELVYRAAGKKQKSIFTSVPDTPDLLRAKRGQKLQSQYLYVELATKERPHHHAGNQTTALKHAKDVKDMVSEKKYKIQYEKMKDKYTPVPDTPILIRAKRAYWNASDLRYKETFQKTKGKYHTVKDALDIVYHRKVTDDISKIKYKENYMSQLGIWRSIPDRPEHFHHRAVTDTVSDVKYKEDLTWLKGIGCYAYDTPDFTLAEKNKTLYSKYKYKEVFERTKSDFKYVADSPINRHFKYATQLMNERKYKSSAKMFLQHGCNEILRPDMLTALYNSHMWSQIKYRKNYEKSKDKFTSIVDTPEHLRTTKVNKQISDILYKLEYNKAKPRGYTTIHDTPMLLHVRKVKDEVSDLKYKEVYQRNKSNCTIEPDAVHIKAAKDAYKVNTNLDYKKQYEANKAHWKWTPDRPDFLQAAKSSLQQSDFEYKLDREFLKGCKLSVTDDKNTVLALRNTLIESDLKYKEKHVKERGTCHAVPDTPQILLAKTVSNLVSENKYKDHVKKHLAQGSYTTLPETRDTVHVKEVTKHVSDTNYKKKFVKEKGKSNYSIMLEPPEVKHAMEVAKKQSDVAYRKDAKENLHYTTVADRPDIKKATQAAKQASEVEYRAKHRKEGSHGLSMLGRPDIEMAKKAAKLSSQVKYRENFDKEKGKTPKYNPKDSQLYKVMKDANNLASEVKYKADLKKLHKPVTDMKESLIMNHVLNTSQLASSYQYKKKYEKSKGHYHTIPDNLEQLHLKEATELQSIVKYKEKYEKERGKPMLDFETPTYITAKESQQMQSGKEYRKDYEESIKGRNLTGLEVTPALLHVKYATKIASEKEYRKDLEESIRGKGLTEMEDTPDMLRAKNATQILNEKEYKRDLELEVKGRGLNAMANETPDFMRARNATDIASQIKYKQSAEMEKANFTSVVDTPEIIHAQQVKNLSSQKKYKEDAEKSMSYYETVLDTPEIQRVRENQKNFSLLQYQCDLKNSKGKITVVQDTPEILRVKENQKNFSSVLYKEDVSPGTAIGKTPEMMRVKQTQDHISSVKYKEAIGQGTPIPDLPEVKRVKETQKHISSVMYKENLGTGIPTTVTPEIERVKRNQENFSSVLYKENLGKGIPTPITPEMERVKRNQENFSSILYKENLSKGTPLPVTPEMERVKLNQENFSSVLYKENVGKGIPIPITPEMERVKHNQENFSSVLYKENLGTGIPIPITPEMQRVKHNQENLSSVLYKENMGKGTPLPVTPEMERVKHNQENISSVLYKENMGKGTPLPVTPEMERVKHNQENISSVLYKENMGKGTPLAVTPEMERVKHNQENISSVLYKENVGKATATPVTPEMQRVKRNQENISSVLYKENLGKATPTPFTPEMERVKRNQENFSSVLYKENMRKATPTPVTPEMERAKRNQENISSVLYSDSFRKQIQGKAAYVLDTPEMRRVRETQRHISTVKYHEDFEKHKGCFTPVVTDPITERVKKNMQDFSDINYRGIQRKVVEMEQKRNDQDQETITGLRVWRTNPGSVFDYDPAEDNIQSRSLHMINVQAQRRSREQSRSASALSISGGEEKSEHSEAPDHHLSTYSDGGVFAVSTAYKHAKTTELPQQRSSSVATQQTTVSSIPSHPSTAGKIFRAMYDYMAADADEVSFKDGDAIINVQAIDEGWMYGTVQRTGRTGMLPANYVEAI

SEQ ID NO: 25447 - protein, 8166 aa, Artificial Sequence
  Synthetic polypeptide
EQLRSTAPSVSERRRRRVISAFPSEKLYKENYEKTKAKSINYCETPKFKLDTVLQNFSSDKKYKDSYLKDILGHYVGSFEDPYHSHCMKVTAQNSDKNYKAEYEEDRGKGFFPQTITQEYEAIKKLDQCKDHTYKVHPDKTKFTQVTDSPVLLQAQVNSKQLSDLNYKAKHESEKFKCHIPPDTPAFIQHKVNAYNLSDNLYKQDWEKSKAKKFDIKVDAIPLLAAKANTKNTSDVMYKKDYEKNKGKMIGVLSINDDPKMLHSLKVAKNQSDRLYKENYEKTKAKSMNYCETPKYQLDTQLKNFSEARYKDLYVKDVLGHYVGSMEDPYHTHCMKVAAQNSDKSYKAEYEEDKGKCYFPQTITQEYEAIKKLDQCKDHTYKVHPDKTKFTAVTDSPVLLQAQLNTKQLSDLNYKAKHEGEKFKCHIPADAPQFIQHRVNAYNLSDNVYKQDWEKSKAKKFDIKVDAIPLLAAKANTKNTSDVMYKKDYEKSKGKMIGALSINDDPKMLHSLKTAKNQSDREYRKDYEKSKTIYTAPLDMLQVTQAKKSQAIASDVDYKHILHSYSYPPDSINVDLAKKAYALQSDVEYKADYNSWMKGCGWVPFGSLEMEKAKRASDILNEKKYRQHPDTLKFTSIEDAPITVQSKINQAQRSDIAYKAKGEEIIHKYNLPPDLPQFIQAKVNAYNISENMYKADLKDLSKKGYDLRTDAIPIRAAKAARQAASDVQYKKDYEKAKGKMVGFQSLQDDPKLVHYMNVAKIQSDREYKKDYEKTKSKYNTPHDMFNVVAAKKAQDVVSNVNYKHSLHHYTYLPDAMDLELSKNMMQIQSDNVYKEDYNNWMKGIGWIPIGSLDVEKVKKAGDALNEKKYRQHPDTLKFTSIVDSPVMVQAKQNTKQVSDILYKAKGEDVKHKYTMSPDLPQFLQAKCNAYNISDVCYKRDWYDLIAKGNNVLGDAIPITAAKASRNIASDYKYKEAYEKSKGKHVGFRSLQDDPKLVHYMNVAKLQSDREYKKNYENTKTSYHTPGDMVSITAAKMAQDVATNVNYKQPLHHYTYLPDAMSLEHTRNVNQIQSDNVYKDEYNSFLKGIGWIPIGSLEVEKVKKAGDALNERKYRQHPDTVKFTSVPDSMGMVLAQHNTKQLSDLNYKVEGEKLKHKYTIDPELPQFIQAKVNALNMSDAHYKADWKKTIAKGYDLRPDAIPIVAAKSSRNIASDCKYKEAYEKAKGKQVGFLSLQDDPKLVHYMNVAKIQSDREYKKGYEASKTKYHTPLDMVSVTAAKKSQEVATNANYRQSYHHYTLLPDALNVEHSRNAMQIQSDNLYKSDFTNWMKGIGWVPIESLEVEKAKKAGEILSEKKYRQHPEKLKFTYAMDTMEQALNKSNKLNMDKRLYTEKWNKDKTTIHVMPDTPDILLSRVNQITMSDKLYKAGWEEEKKKGYDLRPDAIAIKAARASRDIASDYKYKKAYEQAKGKHIGFRSLEDDPKLVHFMQVAKMQSDREYKKGYEKSKTSFHTPVDMLSVVAAKKSQEVATNANYRNVIHTYNMLPDAMSFELAKNMMQIQSDNQYKADYADFMKGIGWLPLGSLEAEKNKKAMEIISEKKYRQHPDTLKYSTLMDSMNMVLAQNNAKIMNEHLYKQAWEADKTKVHIMPDIPQIILAKANAINMSDKLYKLSLEESKKKGYDLRPDAIPIKAAKASRDIASDYKYKYNYEKGKGKMVGFRSLEDDPKLVHSMQVAKMQSDREYKKNYENTKTSYHTPADMLSVTAAKDAQANITNTNYKHLIHKYILLPDAMNIELTRNMNRIQSDNEYKQDYNEWYKGLGWSPAGSLEVEKAKKATEYASDQKYRQHPSNFQFKKLTDSMDMVLAKQNAHTMNKHLYTIDWNKDKTKIHVMPDTPDILQAKQNQTLYSQKLYKLGWEEALKKGYDLPVDAISVQLAKASRDIASDYKYKQGYRKQLGHHVGFRSLQDDPKLVLSMNVAKMQSEREYKKDFEKWKTKFSSPVDMLGVVLAKKCQELVSDVDYKNYLHQWTCLPDQNDVVQAKKVYELQSENLYKSDLEWLRGIGWSPLGSLEAEKNKRASEIISEKKYRQPPDRNKFTSIPDAMDIVLAKTNAKNRSDRLYREAWDKDKTQIHIMPDTPDIVLAKANLINTSDKLYRMGYEELKRKGYDLPVDAIPIKAAKASREIASEYKYKEGFRKQLGHHIGARNIEDDPKMMWSMHVAKIQSDREYKKDFEKWKTKFSSPVDMLGVVLAKKCQTLVSDVDYKNYLHQWTCLPDQSDVIHARQAYDLQSDNLYKSDLQWLKGIGWMTSGSLEDEKNKRATQILSDHVYRQHPDQFKFSSLMDSIPMVLAKNNAITMNHRLYTEAWDKDKTTVHIMPDTPEVLLAKQNKVNYSEKLYKLGLEEAKRKGYDMRVDAIPIKAAKASRDIASEFKYKEGYRKQLGHHIGARAIRDDPKMMWSMHVAKIQSDREYKKDFEKWKTKFSSPVDMLGVVLAKKCQTLVSDVDYKNYLHQWTCLPDQSDVIHARQAYDLQSDNMYKSDLQWMRGIGWVSIGSLDVEKCKRATEILSDKIYRQPPDRFKFTSVTDSLEQVLAKNNAITMNKRLYTEAWDKDKTQIHIMPDTPEIMLARMNKINYSESLYKLANEEAKKKGYDLRSDAIPIVAAKASRDIISDYKYKDGYCKQLGHHIGARNIEDDPKMMWSMHVAKIQSDREYKKDFEKWKTKFSSPVDMLGVVLAKKCQTLVSDVDYKNYLHEWTCLPDQSDVIHARQAYDLQSDNIYKSDLQWLRGIGWVPIGSMDVVKCKRATEILSDNIYRQPPDKLKFTSVTDSLEQVLAKNNALNMNKRLYTEAWDKDKTQIHIMPDTPEIMLARQNKINYSETLYKLANEEAKKKGYDLRSDAIPIVAAKASRDVISDYKYKDGYRKQLGHHIGARNIEDDPKMMWSMHVAKIQSDREYKKDFEKWKTKFSSPVDMLGVVLAKKCQTLVSDVDYKNYLHEWTCLPDQNDVIHARQAYDLQSDNIYKSDLQWLRGIGWVPIGSMDVVKCKRAAEILSDNIYRQPPDKLKFTSVTDSLEQVLAKNNALNMNKRLYTEAWDKDKTQVHIMPDTPEIMLARQNKINYSESLYRQAMEEAKKEGYDLRSDAIPIVAAKASRDIASDYKYKEAYRKQLGHHIGARAVHDDPKIMWSLHIAKVQSDREYKKDFEKYKTRYSSPVDMLGIVLAKKCQTLVSDVDYKHPLHEWICLPDQNDIIHARKAYDLQSDNLYKSDLEWMKGIGWVPIDSLEVVRAKRAGELLSDTIYRQRPETLKFTSITDTPEQVLAKNNALNMNKRLYTEAWDNDKKTIHVMPDTPEIMLAKLNRINYSDKLYKLALEESKKEGYDLRLDAIPIQAAKASRDIASDYKYKEGYRKQLGHHIGARNIKDDPKMMWSIHVAKIQSDREYKKEFEKWKTKFSSPVDMLGVVLAKKCQILVSDIDYKHPLHEWTCLPDQNDVIQARKAYDLQSDAIYKSDLEWLRGIGWVPIGSVEVEKVKRAGEILSDRKYRQPADQLKFTCITDTPEIVLAKNNALTMSKHLYTEAWDADKTSIHVMPDTPDILLAKSNSANISQKLYTKGWDESKMKDYDLRADAISIKSAKASRDIASDYKYKEAYEKQKGHHIGAQSIEDDPKIMCAIHAGKIQSEREYKKEFQKWKTKFSSPVDMLSILLAKKCQTLVTDIDYRNYLHEWTCMPDQNDIIQAKKAYDLQSDSVYKADLEWLRGIGWMPEGSVEMNRVKVAQDLVNERLYRTRPEALSFTSIVDTPEVVLAKANSLQISEKLYQEAWNKDKSNITIPSDTPEMLQAHINALQISNKLYQKDWNDAKQKGYDIRADAIEIKHAKASREIASEYKYKEGYRKQLGHHMGFRTLQDDPKSVWAIHAAKIQSDREYKKAYEKSKGIHNTPLDMMSIVQAKKCQVLVSDIDYRNYLHQWTCLPDQNDVIQAKKAYDLQSDNLYKSDLEWLKGIGWLPEGSVEVMRVKNAQNLLNERLYRIKPEALKFTSIVDTPEVIQAKINAVQISEPLYRDAWEKEKANVNVPADTPLMLQSKINALQISNKRYQQAWEDVKMTGYDLRADAIGIQHAKASRDIASDYLYKTAYEKQKGHYIGCRSAKEDPKLVWAANVLKMQNDRLYKKAYNDHKAKISIPVDMVSISAAKEGQALASDVDYRHYLHHWSCFPDQNDVIQARKAYDLQSDSVYKADLEWLRGIGWMPEGSVEMNRVKVAQDLVNERLYRTRPEALSFTSIVDTPEVVLAKANSLQISEKLYQEAWNKDKSNITIPSDTPEMLQAHINALQISNKLYQKDWNDTKQKGYDIRADAIEIKHAKASREIASEYKYKEGYRKQLGHHMGFRTLQDDPKSVWAIHAAKIQSDREYKKAYEKSKGIHNTPLDMMSIVQAKKCQVLVSDIDYRNYLHQWTCLPDQNDVIQAKKAYDLQSDNLYKSDLEWLKGIGWLPEGSVEVMRVKNAQNLLNERLYRIKPEALKFTSIVDTPEVIQAKINAVQISEPLYRNAWEKEKANVNVPADTPLMLQSKINALQISNKRYQQAWEDVKMTGYDLRADAIGIQHAKASRDIASDYLYKTAYEKQKGHYIGCRSAKEDPKLVWAANVLKMQNDRLYKKAYNDHKAKISIPVDMVSISAAKEGQALASDVDYRHYLHHWSCFPDQNDVIQARKAYDLQSDSVYKADLEWLRGIGWMPEGSVEMNRVKVAQDLVNERLYRTRPEALSFTSIVDTPEVVLAKANSLQISEKLYQEAWNKDKSNITIPSDTPEMLQAHINALQISNKLYQKDWNDTKQKGYDIRADAIEIKHAKASREIASEYKYKEGYRKQLGHHMGFRTLQDDPKSVWAIHAAKIQSDREYKKAYEKSKGIHNTPLDMMSIVQAKKCQVLVSDIDYRNYLHQWTCLPDQNDVIQAKKAYDLQSDNLYKSDLEWLKGIGWLPEGSVEVMRVKNAQNLLNERLYRIKPEALKFTSIVDTPEVIQAKINAVQISEPLYRDAWEKEKANVNVPADTPLMLQSKINALQISNKRYQQAWEDVKMTGYDLRADAIGIQHAKASRDIASDYLYKTAYEKQKGHYIGCRSAKEDPKLVWAANVLKMQNDRLYKKAYNDHKAKISIPVDMVSISAAKEGQALASDVDYRHYLHRWSCFPDQNDVIQARKAYDLQSDALYKADLEWLRGIGWMPQGSPEVLRVKNAQNIFCDSVYRTPVVNLKYTSIVDTPEVVLAKSNAENISIPKYREVWDKDKTSIHIMPDTPEINLARANALNVSNKLYREGWDEMKAGCDVRLDAIPIQAAKASREIASDYKYKLDHEKQKGHYVGTLTARDDNKIRWALIADKLQNEREYRLDWAKWKAKIQSPVDMLSILHSKNSQALVSDMDYRNYLHQWTCMPDQNDVIQAKKAYELQSDNVYKADLEWLRGIGWMPNDSVSVNHAKHAADIFSEKKYRTKIETLNFTPVDDRVDYVTAKQSGEILDDIKYRKDWNATKSKYTLTETPLLHTAQEAARILDQYLYKEGWERQKATGYILPPDAVPFVHAHHCNDVQSELKYKAEHVKQKGHYVGVPTMRDDPKLVWFEHAGQIQNERLYKEDYHKTKAKINIPADMVSVLAAKQGQTLVSDIDYRNYLHQWMCHPDQNDVIQARKAYDLQSDNVYRADLEWLRGIGWIPLDSVDHVRVTKNQEMMSQIKYKKNALENYPNFRSVVDPPEIVLAKINSVNQSDVKYKETFNKAKGKYTFSPDTPHISHSKDMGKLYSTILYKGAWEGTKAYGYTLDERYIPIVGAKHADLVNSELKYKETYEKQKGHYLAGKVIGEFPGVVHCLDFQKMRSALNYRKHYEDTKANVHIPNDMMNHVLAKRCQYILSDLEYRHYFHQWTSLLEEPNVIRVRNAQEILSDNVYKDDLNWLKGIGCYVWDTPQILHAKKSYDLQSQLQYTAAGKENLQNYNLVTDTPLYVTAVQSGINASEVKYKENYHQIKDKYTTVLETVDYDRTRNLKNLYSSNLYKEAWDRVKATSYILPSSTLSLTHAKNQKHLASHIKYREEYEKFKALYTLPRSVDDDPNTARCLRVGKLNIDRLYRSVYEKNKMKIHIVPDMVEMVTAKDSQKKVSEIDYRLRLHEWICHPDLQVNDHVRKVTDQISDIVYKDDLNWLKGIGCYVWDTPEILHAKHAYDLRDDIKYKAHMLKTRNDYKLVTDTPVYVQAVKSGKQLSDAVYHYDYVHSVRGKVAPTTKTVDLDRALHAYKLQSSNLYKTSLRTLPTGYRLPGDTPHFKHIKDTRYMSSYFKYKEAYEHTKAYGYTLGPKDVPFVHVRRVNNVTSERLYRELYHKLKDKIHTTPDTPEIRQVKKTQEAVSELIYKSDFFKMQGHMISLPYTPQVIHCRYVGDITSDIKYKEDLQVLKGFGCFLYDTPDMVRSRHLRKLWSNYLYTDKARKMRDKYKVVLDTPEYRKVQELKTHLSELVYRAAGKKQKSIFTSVPDTPDLLRAKRGQKLQSQYLYVELATKERPHHHAGNQTTALKHAKDVKDMVSEKKYKIQYEKMKDKYTPVPDTPILIRAKRAYWNASDLRYKETFQKTKGKYHTVKDALDIVYHRKVTDDISKIKYKENYMSQLGIWRSIPDRPEHFHHRAVTDTVSDVKYKEDLTWLKGIGCYAYDTPDFTLAEKNKTLYSKYKYKEVFERTKSDFKYVADSPINRHFKYATQLMNEKKYRADYEQRKDKYHLVVDEPRHLLAKTAGDQISQIKYRKNYEKSKDKFTSIVDTPEHLRTTKVNKQISDILYKLEYNKAKPRGYTTIHDTPMLLHVRKVKDEVSDLKYKEVYQRNKSNCTIEPDAVHIKAAKDAYKVNTNLDYKKQYEANKAHWKWTPDRPDFLQAAKSSLQQSDFEYKLDREFLKGCKLSVTDDKNTVLALRNTLIESDLKYKEKHVKERGTCHAVPDTPQILLAKTVSNLVSENKYKDHVKKHLAQGSYTTLPETRDTVHVKEVTKHVSDTNYKKKFVKEKGKSNYSIMLEPPEVKHAMEVAKKQSDVAYRKDAKENLHYTTVADRPDIKKATQAAKQASEVEYRAKHRKEGSHGLSMLGRPDIEMAKKAAKLSSQVKYRENFDKEKGKTPKYNPKDSQLYKVMKDANNLASEVKYKADLKKLHKPVTDMKESLIMNHVLNTSQLASSYQYKKKYEKSKGHYHTIPDNLEQLHLKEATELQSIVKYKEKYEKERGKPMLDFETPTYITAKESQQMQSGKEYRKDYEESIKGRNLTGLEVTPALLHVKYATKIASEKEYRKDLEESIRGKGLTEMEDTPDMLRAKNATQILNEKEYKRDLELEVKGRGLNAMANETPDFMRARNATDIASQIKYKQSAEMEKANFTSVVDTPEIIHAQQVKNLSSQKKYKEDAEKSMSYYETVLDTPEIQRVRENQKNFSLLQYQCDLKNSKGKITVVQDTPEILRVKENQKNFSSVLYKEDVSPGTAIGKTPEMMRVKQTQDHISSVKYKEAIGQGTPIPDLPEVKRVKETQKHISSVMYKENLGTGIPTTVTPEIERVKRNQENFSSVLYKENLGKGIPTPITPEMERVKRNQENFSSILYKENLSKGTPLPVTPEMERVKLNQENFSSVLYKENVGKGIPIPITPEMERVKHNQENFSSVLYKENLGTGIPIPITPEMQRVKHNQENLSSVLYKENMGKGTPLPVTPEMERVKHNQENISSVLYKENMGKGTPLPVTPEMERVKHNQENISSVLYKENMGKGTPLAVTPEMERVKHNQENISSVLYKENVGKATATPVTPEMQRVKRNQENISSVLYKENLGKATPTPFTPEMERVKRNQENFSSVLYKENMRKATPTPVTPEMERAKRNQENISSVLYSDSFRKQIQGKAAYVLDTPEMRRVRETQRHISTVKYHEDFEKHKGCFTPVVTDPITERVKKNMQDFSDINYRGIQRKVVEMEQKRNDQDQETITGLRVWRTNPGSVFDYDPAEDNIQSRSLHMINVQAQRRSREQSRSASALSISGGEEKSEHSEAPDHHLSTYSDGGVFAVSTAYKHAKTTELPQQRSSSVATQQTTVSSIPSHPSTAGKIFRAMYDYMAADADEVSFKDGDAIINVQAIDEGWMYGTVQRTGRTGMLPANYVEAI

SEQ ID NO: 25448 - protein, 6310 aa, Artificial Sequence
  Synthetic polypeptide
EQLRSTAPSVSERRRRRVISAFPSEKLYKENYEKTKAKSINYCETPKFKLDTVLQNFSSDKKYKDSYLKDILGHYVGSFEDPYHSHCMKVTAQNSDKNYKAEYEEDRGKGFFPQTITQEYEAIKKLDQCKDHTYKVHPDKTKFTQVTDSPVLLQAQVNSKQLSDLNYKAKHESEKFKCHIPPDTPAFIQHKVNAYNLSDNLYKQDWEKSKAKKFDIKVDAIPLLAAKANTKNTSDVMYKKDYEKNKGKMIGVLSINDDPKMLHSLKVAKNQSDRLYKENYEKTKAKSMNYCETPKYQLDTQLKNFSEARYKDLYVKDVLGHYVGSMEDPYHTHCMKVAAQNSDKSYKAEYEEDKGKCYFPQTITQEYEAIKKLDQCKDHTYKVHPDKTKFTAVTDSPVLLQAQLNTKQLSDLNYKAKHEGEKFKCHIPADAPQFIQHRVNAYNLSDNVYKQDWEKSKAKKFDIKVDAIPLLAAKANTKNTSDVMYKKDYEKSKGKMIGALSINDDPKMLHSLKTAKNQSDREYRKDYEKSKTIYTAPLDMLQVTQAKKSQAIASDVDYKHILHSYSYPPDSINVDLAKKAYALQSDVEYKADYNSWMKGCGWVPFGSLEMEKAKRASDILNEKKYRQHPDTLKFTSIEDAPITVQSKINQAQRSDIAYKAKGEEIIHKYNLPPDLPQFIQAKVNAYNISENMYKADLKDLSKKGYDLRTDAIPIRAAKAARQAASDVQYKKDYEKAKGKMVGFQSLQDDPKLVHYMNVAKIQSDREYKKDYEKTKSKYNTPHDMFNVVAAKKAQDVVSNVNYKHSLHHYTYLPDAMDLELSKNMMQIQSDNVYKEDYNNWMKGIGWIPIGSLDVEKVKKAGDALNEKKYRQHPDTLKFTSIVDSPVMVQAKQNTKQVSDILYKAKGEDVKHKYTMSPDLPQFLQAKCNAYNISDVCYKRDWYDLIAKGNNVLGDAIPITAAKASRNIASDYKYKEAYEKSKGKHVGFRSLQDDPKLVHYMNVAKLQSDREYKKNYENTKTSYHTPGDMVSITAAKMAQDVATNVNYKQPLHHYTYLPDAMSLEHTRNVNQIQSDNVYKDEYNSFLKGIGWIPIGSLEVEKVKKAGDALNERKYRQHPDTVKFTSVPDSMGMVLAQHNTKQLSDLNYKVEGEKLKHKYTIDPELPQFIQAKVNALNMSDAHYKADWKKTIAKGYDLRPDAIPIVAAKSSRNIASDCKYKEAYEKAKGKQVGFLSLQDDPKLVHYMNVAKIQSDREYKKGYEASKTKYHTPLDMVSVTAAKKSQEVATNANYRQSYHHYTLLPDALNVEHSRNAMQIQSDNLYKSDFTNWMKGIGWVPIESLEVEKAKKAGEILSEKKYRQHPEKLKFTYAMDTMEQALNKSNKLNMDKRLYTEKWNKDKTTIHVMPDTPDILLSRVNQITMSDKLYKAGWEEEKKKGYDLRPDAIAIKAARASRDIASDYKYKKAYEQAKGKHIGFRSLEDDPKLVHFMQVAKMQSDREYKKGYEKSKTSFHTPVDMLSVVAAKKSQEVATNANYRNVIHTYNMLPDAMSFELAKNMMQIQSDNQYKADYADFMKGIGWLPLGSLEAEKNKKAMEIISEKKYRQHPDTLKYSTLMDSMNMVLAQNNAKIMNEHLYKQAWEADKTKVHIMPDIPQIILAKANAINMSDKLYKLSLEESKKKGYDLRPDAIPIKAAKASRDIASDYKYKYNYEKGKGKMVGFRSLEDDPKLVHSMQVAKMQSDREYKKNYENTKTSYHTPADMLSVTAAKDAQANITNTNYKHLIHKYILLPDAMNIELTRNMNRIQSDNEYKQDYNEWYKGLGWSPAGSLEVEKAKKATEYASDQKYRQHPSNFQFKKLTDSMDMVLAKQNAHTMNKHLYTIDWNKDKTKIHVMPDTPDILQAKQNQTLYSQKLYKLGWEEALKKGYDLPVDAISVQLAKASRDIASDYKYKQGYRKQLGHHVGFRSLQDDPKLVLSMNVAKMQSEREYKKDFEKWKTKFSSPVDMLGVVLAKKCQELVSDVDYKNYLHQWTCLPDQNDVVQAKKVYELQSENLYKSDLEWLRGIGWSPLGSLEAEKNKRASEIISEKKYRQPPDRNKFTSIPDAMDIVLAKTNAKNRSDRLYREAWDKDKTQIHIMPDTPDIVLAKANLINTSDKLYRMGYEELKRKGYDLPVDAIPIKAAKASREIASEYKYKEGFRKQLGHHIGARNIEDDPKMMWSMHVAKIQSDREYKKDFEKWKTKFSSPVDMLGVVLAKKCQTLVSDVDYKNYLHQWTCLPDQSDVIHARQAYDLQSDNLYKSDLQWLKGIGWMTSGSLEDEKNKRATQILSDHVYRQHPDQFKFSSLMDSIPMVLAKNNAITMNHRLYTEAWDKDKTTVHIMPDTPEVLLAKQNKVNYSEKLYKLGLEEAKRKGYDMRVDAIPIKAAKASRDIASEFKYKEGYRKQLGHHIGARAIRDDPKMMWSMHVAKIQSDREYKKDFEKWKTKFSSPVDMLGVVLAKKCQTLVSDVDYKNYLHQWTCLPDQSDVIHARQAYDLQSDNMYKSDLQWMRGIGWVSIGSLDVEKCKRATEILSDKIYRQPPDRFKFTSVTDSLEQVLAKNNAITMNKRLYTEAWDKDKTQIHIMPDTPEIMLARQNKINYSETLYKLANEEAKKKGYDLRSDAIPIVAAKASRDVISDYKYKDGYRKQLGHHIGARNIEDDPKMMWSMHVAKIQSDREYKKDFEKWKTKFSSPVDMLGVVLAKKCQTLVSDVDYKNYLHEWTCLPDQNDVIHARQAYDLQSDNIYKSDLQWLRGIGWVPIGSMDVVKCKRAAEILSDNIYRQPPDKLKFTSVTDSLEQVLAKNNALNMNKRLYTEAWDKDKTQVHIMPDTPEIMLARQNKINYSESLYRQAMEEAKKEGYDLRSDAIPIVAAKASRDIASDYKYKEAYRKQLGHHIGARAVHDDPKIMWSLHIAKVQSDREYKKDFEKYKTRYSSPVDMLGIVLAKKCQTLVSDVDYKHPLHEWICLPDQNDIIHARKAYDLQSDNLYKSDLEWMKGIGWVPIDSLEVVRAKRAGELLSDTIYRQRPETLKFTSITDTPEQVLAKNNALNMNKRLYTEAWDNDKKTIHVMPDTPEIMLAKLNRINYSDKLYKLALEESKKEGYDLRLDAIPIQAAKASRDIASDYKYKEGYRKQLGHHIGARNIKDDPKMMWSIHVAKIQSDREYKKEFEKWKTKFSSPVDMLGVVLAKKCQILVSDIDYKHPLHEWTCLPDQNDVIQARKAYDLQSDAIYKSDLEWLRGIGWVPIGSVEVEKVKRAGEILSDRKYRQPADQLKFTCITDTPEIVLAKNNALTMSKHLYTEAWDADKTSIHVMPDTPDILLAKSNSANISQKLYTKGWDESKMKDYDLRADAISIKSAKASRDIASDYKYKEAYEKQKGHHIGAQSIEDDPKIMCAIHAGKIQSEREYKKEFQKWKTKFSSPVDMLSILLAKKCQTLVTDIDYRNYLHEWTCMPDQNDIIQAKKAYDLQSDALYKADLEWLRGIGWMPQGSPEVLRVKNAQNIFCDSVYRTPVVNLKYTSIVDTPEVVLAKSNAENISIPKYREVWDKDKTSIHIMPDTPEINLARANALNVSNKLYREGWDEMKAGCDVRLDAIPIQAAKASREIASDYKYKLDHEKQKGHYVGTLTARDDNKIRWALIADKLQNEREYRLDWAKWKAKIQSPVDMLSILHSKNSQALVSDMDYRNYLHQWTCMPDQNDVIQAKKAYELQSDNVYKADLEWLRGIGWMPNDSVSVNHAKHAADIFSEKKYRTKIETLNFTPVDDRVDYVTAKQSGEILDDIKYRKDWNATKSKYTLTETPLLHTAQEAARILDQYLYKEGWERQKATGYILPPDAVPFVHAHHCNDVQSELKYKAEHVKQKGHYVGVPTMRDDPKLVWFEHAGQIQNERLYKEDYHKTKAKINIPADMVSVLAAKQGQTLVSDIDYRNYLHQWMCHPDQNDVIQARKAYDLQSDNVYRADLEWLRGIGWIPLDSVDHVRVTKNQEMMSQIKYKKNALENYPNFRSVVDPPEIVLAKINSVNQSDVKYKETFNKAKGKYTFSPDTPHISHSKDMGKLYSTILYKGAWEGTKAYGYTLDERYIPIVGAKHADLVNSELKYKETYEKQKGHYLAGKVIGEFPGVVHCLDFQKMRSALNYRKHYEDTKANVHIPNDMMNHVLAKRCQYILSDLEYRHYFHQWTSLLEEPNVIRVRNAQEILSDNVYKDDLNWLKGIGCYVWDTPQILHAKKSYDLQSQLQYTAAGKENLQNYNLVTDTPLYVTAVQSGINASEVKYKENYHQIKDKYTTVLETVDYDRTRNLKNLYSSNLYKEAWDRVKATSYILPSSTLSLTHAKNQKHLASHIKYREEYEKFKALYTLPRSVDDDPNTARCLRVGKLNIDRLYRSVYEKNKMKIHIVPDMVEMVTAKDSQKKVSEIDYRLRLHEWICHPDLQVNDHVRKVTDQISDIVYKDDLNWLKGIGCYVWDTPEILHAKHAYDLRDDIKYKAHMLKTRNDYKLVTDTPVYVQAVKSGKQLSDAVYHYDYVHSVRGKVAPTTKTVDLDRALHAYKLQSSNLYKTSLRTLPTGYRLPGDTPHFKHIKDTRYMSSYFKYKEAYEHTKAYGYTLGPKDVPFVHVRRVNNVTSERLYRELYHKLKDKIHTTPDTPEIRQVKKTQEAVSELIYKSDFFKMQGHMISLPYTPQVIHCRYVGDITSDIKYKEDLQVLKGFGCFLYDTPDMVRSRHLRKLWSNYLYTDKARKMRDKYKVVLDTPEYRKVQELKTHLSELVYRAAGKKQKSIFTSVPDTPDLLRAKRGQKLQSQYLYVELATKERPHHHAGNQTTALKHAKDVKDMVSEKKYKIQYEKMKDKYTPVPDTPILIRAKRAYWNASDLRYKETFQKTKGKYHTVKDALDIVYHRKVTDDISKIKYKENYMSQLGIWRSIPDRPEHFHHRAVTDTVSDVKYKEDLTWLKGIGCYAYDTPDFTLAEKNKTLYSKYKYKEVFERTKSDFKYVADSPINRHFKYATQLMNEKKYRADYEQRKDKYHLVVDEPRHLLAKTAGDQISQIKYRKNYEKSKDKFTSIVDTPEHLRTTKVNKQISDILYKLEYNKAKPRGYTTIHDTPMLLHVRKVKDEVSDLKYKEVYQRNKSNCTIEPDAVHIKAAKDAYKVNTNLDYKKQYEANKAHWKWTPDRPDFLQAAKSSLQQSDFEYKLDREFLKGCKLSVTDDKNTVLALRNTLIESDLKYKEKHVKERGTCHAVPDTPQILLAKTVSNLVSENKYKDHVKKHLAQGSYTTLPETRDTVHVKEVTKHVSDTNYKKKFVKEKGKSNYSIMLEPPEVKHAMEVAKKQSDVAYRKDAKENLHYTTVADRPDIKKATQAAKQASEVEYRAKHRKEGSHGLSMLGRPDIEMAKKAAKLSSQVKYRENFDKEKGKTPKYNPKDSQLYKVMKDANNLASEVKYKADLKKLHKPVTDMKESLIMNHVLNTSQLASSYQYKKKYEKSKGHYHTIPDNLEQLHLKEATELQSIVKYKEKYEKERGKPMLDFETPTYITAKESQQMQSGKEYRKDYEESIKGRNLTGLEVTPALLHVKYATKIASEKEYRKDLEESIRGKGLTEMEDTPDMLRAKNATQILNEKEYKRDLELEVKGRGLNAMANETPDFMRARNATDIASQIKYKQSAEMEKANFTSVVDTPEIIHAQQVKNLSSQKKYKEDAEKSMSYYETVLDTPEIQRVRENQKNFSLLQYQCDLKNSKGKITVVQDTPEILRVKENQKNFSSVLYKEDVSPGTAIGKTPEMMRVKQTQDHISSVKYKEAIGQGTPIPDLPEVKRVKETQKHISSVMYKENLGTGIPTTVTPEIERVKRNQENFSSVLYKENLGKGIPTPITPEMERVKRNQENFSSVLYKENMGKGTPLAVTPEMERVKHNQENISSVLYKENVGKATATPVTPEMQRVKRNQENISSVLYKENLGKATPTPFTPEMERVKRNQENFSSVLYKENMRKATPTPVTPEMERAKRNQENISSVLYSDSFRKQIQGKAAYVLDTPEMRRVRETQRHISTVKYHEDFEKHKGCFTPVVTDPITERVKKNMQDFSDINYRGIQRKVVEMEQKRNDQDQETITGLRVWRTNPGSVFDYDPAEDNIQSRSLHMINVQAQRRSREQSRSASALSISGGEEKSEHSEAPDHHLSTYSDGGVFAVSTAYKHAKTTELPQQRSSSVATQQTTVSSIPSHPSTAGKIFRAMYDYMAADADEVSFKDGDAIINVQAIDEGWMYGTVQRTGRTGMLPANYVEAI

SEQ ID NO: 25449 - protein, 515 aa, Artificial Sequence
  Synthetic polypeptide
HLIEKATNEYNTTEDWSLIMDICDKVGSTPNGAKDCLKAIMKRVNHKVPHVALQALTLLGACVANCGKIFHLEVCSRDFATEVRAVIKNKAHPKVCEKLKSLMVEWSEEFQKDPQFSLISATIKSMKEEGITFPPAGSQTVSAAAKNGTSSNKNKEDEDIAKAIELSLQEQKQQHTETKSLYPSSEIQLNNKVARKVRALYDFEAVEDNELTFKHGEIIIVLDDSDANWWKGENHRGIGLFPSNFVTTNLNIETEAAAVDKLNVIDDDVEEIKKSEPEPVYIDEDKMDRALQVLQSIDPTDSKPDSQDLLDLEDICQQMGPMIDEKLEEIDRKHSELSELNVKVLEALELYNKLVNEAPVYSVYSKLHPPAHYPPASSGVPMQTYPVQSHGGNYMGQSIHQVTVAQSYSLGPDQIGPLRSLPPNVNSSVTAQPAQTSYLSTGQDTVSNPTYMNQNSNLQSATGTTAYTQQMGMSVDMSSYQNTTSNLPQLAGFPVTVPAHPVAQQHTNYHQQPLL

SEQ ID NO: 25450 - protein, 34 aa, Artificial Sequence
  Synthetic polypeptide
LKKPRMSTTLQKIGVLLWTYVTKLEVLLMERKIA

SEQ ID NO: 25451 - protein, 1015 aa, Artificial Sequence
  Synthetic polypeptide
GLAQWLTSVIPALWEAKKFRRRVQESTQVLRELEISLRTNHIGWVREFLNEENKGLDVLVEYLSFAQYAVTFDFESVESTVESSVDKSKPWSRSIEDLHRGSNLPSPVGNSVSRSGRHSALRYNTLPSRRTLKNSRLVSKKDDVHVCIMCLRAIMNYQYGFNMVMSHPHAVNEIALSLNNKNPRTKALVLELLAAVCLVRGGHEIILSAFDNFKEVCGEKQRFEKLMEHFRNEDNNIDFMVASMQFINIVVHSVEDMNFRVHLQYEFTKLGLDEYLDKLKHTESDKLQVQIQAYLDNVFDVGALLEDAETKNAALERVEELEENISHLSEKLQDTENEAMSKIVELEKQLMQRNKELDVVREIYKDANTQVHTLRKMVKEKEEAIQRQSTLEKKIHELEKQGTIKIQKKGDGDIAILPVVASGTLSMGSEVVAGNSVGPTMGAASSGPLPPPPPPLPPSSDTPETVQNGPVTPPMPPPPPPPPPPPPPPPPPPPPPLPGPAAETVPAPPLAPPLPSAPPLPGTSSPTVVFNSGLAAVKIKKPIKTKFRMPVFNWVALKPNQINGTVFNEIDDERILEDLNVDEFEEIFKTKAQGPAIDLSSSKQKIPQKGSNKVTLLEANRAKNLAITLRKAGKTADEICKAIHVFDLKTLPVDFVECLMRFLPTENEVKVLRLYERERKPLENLSDEDRFMMQFSKIERLMQKMTIMAFIGNFAESIQMLTPQLHAIIAASVSIKSSQKLKKILEIILALGNYMNSSKRGAVYGFKLQSLDLLLDTKSTDRKQTLLHYISNVVKEKYHQVSLFYNELHYVEKAAAVSLENVLLDVKELQRGMDLTKREYTMHDHNTLLKEFILNNEGKLKKLQDDAKIAQDAFDDVVKYFGENPKTTPPSVFFPVFVRFVKAYKQAEEENELRKKQEQALMEKLLEQEALMEQQDPKSPSHKSKRQQQELIAELRRRQVKDNRHVYEGKDGAIEDIITDLRNQPYRRADAVRRSVRRRFDDQNLRSVNGAEITM

SEQ ID NO: 25452 - protein, 20 aa, Artificial Sequence
  Synthetic polypeptide
SQHFGKLRNSDGVFKNLHKC

SEQ ID NO: 25453 - protein, 37 aa, Artificial Sequence
  Synthetic polypeptide
VIQQFLNAWNDVVSNAWNDDVSYVSGFHAACLTARSK

SEQ ID NO: 25454 - protein, 19 aa, Artificial Sequence
  Synthetic polypeptide
AQVVTLPCLGYSTVFECLE

SEQ ID NO: 25455 - protein, 36 aa, Artificial Sequence
  Synthetic polypeptide
VIQQFLNAWNDVVSNAWNDDVSYVSGFHAACLTAKL

SEQ ID NO: 25456 - protein, 37 aa, Artificial Sequence
  Synthetic polypeptide
VIQQFLNAWNDVVSNAWNDDVSYVSGFHAACLTATLI

SEQ ID NO: 25457 - protein, 48 aa, Artificial Sequence
  Synthetic polypeptide
DLSKRNKCRFPPPTEDVFIVPVCIGAPNWKHPSVVKWETDWTFFPHGL

SEQ ID NO: 25458 - protein, 32 aa, Artificial Sequence
  Synthetic polypeptide
NGKLTGHSFHMGYSMAILNGIVAALTVAWCLM

SEQ ID NO: 25459 - protein, 32 aa, Artificial Sequence
  Synthetic polypeptide
VQIPTTHRRRVHSTCMYRSPKLETPISSKMGN

SEQ ID NO: 25460 - protein, 8 aa, Artificial Sequence
  Synthetic polypeptide
SLFVFWMK

SEQ ID NO: 25461 - protein, 26 aa, Artificial Sequence
  Synthetic polypeptide
KITFSAKPSVIVPPGRGYNDLSSCSG

SEQ ID NO: 25462 - protein, 993 aa, Artificial Sequence
  Synthetic polypeptide
SCLQAEDIMISLRVLDEVGVPGSNSADLLRWTTATTMKVLSNTTTTTKAVLQAVSDGQWWKKSLTYLRPLQGQKCGGAYQIGTTANEDLEKQGCHPFYESVISNPFVAESEGTYDTYQHVPVESFAEVLLRTGKLAEAKNKGEVFPTTEVLLQLASEALPNDMTLALAYLLALPQVLDANRCFEKQSPSALSLQLAAYYYSLQIYARLAPCFRDKCHPLYRADPKELIKMVTRHVTRHEHEAWPEDLISLTKQLHCYNERLLDFTQAQILQGLRKGVDVQRFTADDQYKRETILGLAETLEESVYSIAISLAQRYSVSRWEVFMTHLEFLFTDSGLSTLEIENRAQDLHLFETLKTDPEAFHQHMVKYIYPTIGGFDHERLQYYFTLLENCGCADLGNCAIKPETHIRLLKKFKVVASGLNYKKLTDENMSPLEALEPVLSSQNILSISKLVPKIPEKDGQMLSPSSLYTIWLQKLFWTGDPHLIKQVPGSSPEWLHAYDVCMKYFDRLHPGDLITVVDAVTFSPKAVTKLSVEARKEMTRKAIKTVKHFIEKPRKRNSEDEAQEAKDSKVTYADTLNHLEKSLAHLETLSHSFILSLKNSEQETLQKYSHLYDLSRSEKEKLHDEAVAICLDGQPLAMIQQLLEVAVGPLDISPKDIVQSAIMKIISALSGGSADLGGPRDPLKVLEGVVAAVHASVDKGEELVSPEDLLEWLRPFCADDAWPVRPRIHVLQILGQSFHLTEEDSKLLVFFRTEAILKASWPQRQVDIADIENEENRYCLFMELLESSHHEAEFQHLVLLLQAWPPMKSEYVITNNPWVRLATVMLTRCTMENKEGLGNEVLKMCRSLYNTKQMLPAEGVKELCLLLLNQSLLLPSLKLLLESRDEHLHEMALEQITAVTTVNDSNCDQELLSLLLDAKLLVKCVSTPFYPRIVDHLLASLQQGRWDAEELGRHLREAGHEAEAGSLLLAVRGTHQAFRTFSTALRAAQHWV

SEQ ID NO: 25463 - protein, 463 aa, Artificial Sequence
  Synthetic polypeptide
CLPSHVELCAEQLVHNNLPTTSVIMCFVDEVWSTLLRSVHSVINRSPPHLIKEILLVDDFSTKDYLKDNLDKYMSQFPKVRILRLKERHGLIRARLAGAQNATGDVLTFLDSHVECNVGWLEPLLERVYLSRKKVACPVIEVINDKDMSYMTVDNFQRGIFVWPMNFGWRTIPPDVIAKNRIKETDTIRCPVMAGGLFSIDKSYFFELGTYDPGLDVWGGENMELSFKVWMCGGEIEIIPCSRVGHIFRNDNPYSFPKDRMKTVERNLVRVAEVWLDEYKELFYGHGDHLIDQGLDVGNLTQQRELRKKLKCKSFKWYLENVFPDLRAPIVRASGVLINVALGKCISIENTTVILEDCDGSKELQQFNYTWLRLIKCGEWCIAPIPDKGAVRLHPCDNRNKGLKWLHKSTSVFHPELVNHIVFENNQQLLCLEGNFSQKILKVAACDPVKPYQKWKFEKYYEA

SEQ ID NO: 25464 - protein, 49 aa, Artificial Sequence
  Synthetic polypeptide
WLDKGKSILLGSHSLSLPAAIHVRCDLLLLAFHHDCDVSPAMWNYVQSS

SEQ ID NO: 25465 - protein, 29 aa, Artificial Sequence
  Synthetic polypeptide
DVTCSSLPSTMIVMSPQPCGTMCRAASSQ

SEQ ID NO: 25466 - protein, 74 aa, Artificial Sequence
  Synthetic polypeptide
YVCSPSVHIRFGWLKVSETSPYCLLLALSCNMPAPTSSSAMGKSSLRPHQELSRWQSHASCTACRTMCRAASSQ

SEQ ID NO: 25467 - protein, 469 aa, Artificial Sequence
  Synthetic polypeptide
ADGRAMLPVQPAEPCAEQLVHNNLPTTSVIMCFVDEVWSTLLRSVHSVINRSPPHLIKEILLVDDFSTKDYLKDNLDKYMSQFPKVRILRLKERHGLIRARLAGAQNATGDVLTFLDSHVECNVGWLEPLLERVYLSRKKVACPVIEVINDKDMSYMTVDNFQRGIFVWPMNFGWRTIPPDVIAKNRIKETDTIRCPVMAGGLFSIDKSYFFELGTYDPGLDVWGGENMELSFKVWMCGGEIEIIPCSRVGHIFRNDNPYSFPKDRMKTVERNLVRVAEVWLDEYKELFYGHGDHLIDQGLDVGNLTQQRELRKKLKCKSFKWYLENVFPDLRAPIVRASGVLINVALGKCISIENTTVILEDCDGSKELQQFNYTWLRLIKCGEWCIAPIPDKGAVRLHPCDNRNKGLKWLHKSTSVFHPELVNHIVFENNQQLLCLEGNFSQKILKVAACDPVKPYQKWKFEKYYEA

SEQ ID NO: 25468 - protein, 28 aa, Artificial Sequence
  Synthetic polypeptide
KLPEASPRAEQMAEPCFLYSLQNHVQSS

SEQ ID NO: 25469 - protein, 44 aa, Artificial Sequence
  Synthetic polypeptide
RCLITSEASWTITDALGNSYSGGSLSRSDSTAHHDRCSGYIYPG

SEQ ID NO: 25470 - protein, 314 aa, Artificial Sequence
  Synthetic polypeptide
SPQKPPGPSQMLWVTLTVEALSPDRIQPHIMTDVPATFTQAECNGDKPPENGQQTITKISEELTDVDSPLPHYRVEPSLEGALTKGSQEERRKLQGNMLLNSSMEDKMLKENPEEKLFIVHKAITDLSLQETSADEMTFREGHQWEKIPLSGSNQEIRRQKERITEQPLKEEEDEDRKNKGHQAAEIEWLGFRKPSQADMLHSKHDEEQKVWDEEIDDDDDDNCNNDEDEVRVIEFKKKHEEVSQFKEEGDASEDSPLSSASSQAVTPDEQPTLGKKSDISRNAYSRYNTISYRKIRKGNTKQRIDEFESMMHL

SEQ ID NO: 25471 - protein, 16 aa, Artificial Sequence
  Synthetic polypeptide
LLQWRLSLQIGFNRTS

SEQ ID NO: 25472 - protein, 378 aa, Artificial Sequence
  Synthetic polypeptide
SQHFGRPRRVDYKVRRSRPSWLTRLLQHSSNGNLADFCAGPAYSSYSTLTGSLTMDDNRRIQMLADTVATLPRGRKQLALTRSSSLSDFSWSQRKLVTVEKQDNETFGFEIQSYRPQNQNACSSEMFTLICKIQEDSPAHCAGLQAGDVLANINGVSTEGFTYKQVVDLIRSSGNLLTIETLNGTMILKRTELEAKLQVLKQTLKQKWVEYRSLQLQEHRLLHGDAANCPSLENMDLDELSLFGPLPGPGPALVDRNRLSSESSCKSWLSSMTMDSEDGYQTCVSEDSSRGAFSRQTSTDDECFIPKEGDDFLRRSSSRRNRSISNTSSGSMSPLWEGNLSSMFGTLPRKSRKGSVRKQLLKFIPGLHRAVEEEESRF

SEQ ID NO: 25473 - protein, 41 aa, Artificial Sequence
  Synthetic polypeptide
QGSCNTAAMAIWRTSALGQRIALTPHSPAALRWTIIEGFKC

SEQ ID NO: 25474 - protein, 51 aa, Artificial Sequence
  Synthetic polypeptide
QAQWLTPVIPALWEAEAGGLQGQEIETILANKAPATQQQWQFGGLLRWASV

SEQ ID NO: 25475 - protein, 80 aa, Artificial Sequence
  Synthetic polypeptide
SQHFGRPRRVDYKVRRSRPSWLTRLLQHSSNGNLADFCAGPAYSSYSTLTGSLTMDDNRRIQMLADTVATLPRGRKQNDF

SEQ ID NO: 25476 - protein, 301 aa, Artificial Sequence
  Synthetic polypeptide
GVPLPGRPVWEVEHEKYCDQYRFAIEQQNILISNWNKNKKDFIQKAVLTLTEACATHEMESMLAKDKKKQQELCADLKAKVRQWRAHQEEVARLEMEISARRREKEEEKEKLWKKKELLQRAEKKKKIKKYWAKKKQKWQEMEMRDLQRLEELKKLIAEQSLKDRERVKYRQELLERRLMEKKEVALQEAHEDKERARRLEALRKQVAVVAQFDPVRMMSDTMASKARMGIEIEEEFILQKPLFTLNTYNEQQIISDPRLRFELALREAGLHRTLYAKEILPKISPQKPPRKDMESTVFKI

SEQ ID NO: 25477 - protein, 52 aa, Artificial Sequence
  Synthetic polypeptide
EVRSVSAWPPIVWDVGIASARPPCLGCEECLCPAAPSGRLNTRNIVTNIALL

SEQ ID NO: 25478 - protein, 37 aa, Artificial Sequence
  Synthetic polypeptide
GASLPGRLSSGMWGSPLPGRPVWDVRSASARPPRLGG

SEQ ID NO: 25479 - protein, 95 aa, Artificial Sequence
  Synthetic polypeptide
GVPLPGRPVWEVEHEKYCDQYRFAIEQQNILISNWNKNKKDFIQKAVLTLTEACATHEMESMLAKDKKKQQELCADLKAKSQVCLYQQHENGLIQ

SEQ ID NO: 25480 - protein, 32 aa, Artificial Sequence
  Synthetic polypeptide
YLDVGLGASRNEVTLVQRLLQSCTLTTVLTLL

SEQ ID NO: 25481 - protein, 28 aa, Artificial Sequence
  Synthetic polypeptide
TRFSPRAFREIMALPDTLMLDLEPPEMK

SEQ ID NO: 25482 - protein, 91 aa, Artificial Sequence
  Synthetic polypeptide
GRAQWLAPVIPALWEAEACGSRGQEMEIILANKLKSCPVLHIHQDVQQQKRMGHGGSSTRVTVTSLIRHCTVFQRPKNCVQNMITLQLSFP

SEQ ID NO: 25483 - protein, 24 aa, Artificial Sequence
  Synthetic polypeptide
SQHFGRPRRADHEVRRWRSSWLTS

SEQ ID NO: 25484 - protein, 302 aa, Artificial Sequence
  Synthetic polypeptide
QAKKLSRLTYSSRCPAAKENGSRWIQYKGHCYKSDQALHSFSEAKKLCSKHDHSATIVSIKDEDENKFVSRLMRENNNITMRVWLGLSQHSVDCPSSTWIQFQDSCYIFLQEAIKVESIEDVRNQCTDHGADMISIHNEEENAFILDTLKKQWKGPDDILLGMFYDTDDASFKWFDNSNMTFDKWTDQDDDEDLVDTCAFLHIKTGEWKKGNCEVSSVEGTLCKTAIPYKRKYLSDNHILISALVIASTVILTVLGAIIWFLYKKHSDSRFTTVFSTAPQSPYNEDCVLVVGEENEYPVQFD

SEQ ID NO: 25485 - protein, 358 aa, Artificial Sequence
  Synthetic polypeptide
QAKKLSRLTYSSRCPAAKENGSRWIQYKGHCYKSDQALHSFSEAKKLCSKHDHSATIVSIKDEDENKFVSRLMRENNNITMRVWLGLSQHSVDQSWSWLDGSEVTFVKWENKSKSGVGRCSMLIASNETWKKVECEHGFGRVVCKVPLDCPSSTWIQFQDSCYIFLQEAIKVESIEDVRNQCTDHGADMISIHNEEENAFILDTLKKQWKGPDDILLGMFYDTDDASFKWFDNSNMTFDKWTDQDDDEDLVDTCAFLHIKTGEWKKGNCEVSSVEGTLCKTAIPYKRKYLSDNHILISALVIASTVILTVLGAIIWFLYKKHSDSRFTTVFSTAPQSPYNEDCVLVVGEENEYPVQFD

SEQ ID NO: 25486 - protein, 207 aa, Artificial Sequence
  Synthetic polypeptide
QAKKLSRLTYSSRCPAAKENGSRWIQYKGHCYKSDQALHSFSEAKKLCSKHDHSATIVSIKDEDENKFVSRLMRENNNITMRVWLGLSQHSVDQSWSWLDGSEVTFVKWENKSKSGVGRCSMLIASNETWKKVECEHGFGRVVCKVPLGPDYTAIAIIVATLSILVLMGGLIWFLFQRHRLHLAGFSSVRYAQGVNEDEIMLPSFHD

SEQ ID NO: 25487 - protein, 8 aa, Artificial Sequence
  Synthetic polypeptide
GLPSHVEL

SEQ ID NO: 25488 - protein, 23 aa, Artificial Sequence
  Synthetic polypeptide
TIKEYLLSKVRVSRNAFKQVNRF

SEQ ID NO: 25489 - protein, 1445 aa, Artificial Sequence
  Synthetic polypeptide
EVPFASHHDSEDSPAMLNYKGIFVIQSESLKKCIQAGKSVLTLENCKQANKHMLWKWVSNHGLFNIGGSGCLGLNFSAPEQPLSLYECDSTLVSLRWRCNRKMITGPLQYSVQVAHDNTVVASRKYIHKWISYGSGGGDICEYLHKDLHTIKGNTHGMPCMFPFQYNHQWHHECTREGREDDLLWCATTSRYERDEKWGFCPDPTSAEVGCDTIWEKDLNSHICYQFNLLSSLSWSEAHSSCQMQGGTLLSITDETEENFIREHMSSKTVEVWMGLNQLDEHAGWQWSDGTPLNYLNWSPEVNFEPFVEDHCGTFSSFMPSAWRSRDCESTLPYICKKYLNHIDHEIVEKDAWKYYATHCEPGWNPYNRNCYKLQKEEKTWHEALRSCQADNSALIDITSLAEVEFLVTLLGDENASETWIGLSSNKIPVSFEWSNDSSVIFTNWHTLEPHIFPNRSQLCVSAEQSEGHWKVKNCEERLFYICKKAGHVLSDAESGCQEGWERHGGFCYKIDTVLRSFDQASSGYYCPPALVTITNRFEQAFITSLISSVVKMKDSYFWIALQDQNDTGEYTWKPVGQKPEPVQYTHWNTHQPRYSGGCVAMRGRHPLGRWEVKHCRHFKAMSLCKQPVENQEKAEYEERWPFHPCYLDWESEPGLASCFKVFHSEKVLMKRTWREAEAFCEEFGAHLASFAHIEEENFVNELLHSKFNWTEERQFWIGFNKRNPLNAGSWEWSDRTPVVSSFLDNTYFGEDARNCAVYKANKTLLPLHCGSKREWICKIPRDVKPKIPFWYQYDVPWLFYQDAEYLFHTFASEWLNFEFVCSWLHSDLLTIHSAHEQEFIHSKIKALSKYGASWWIGLQEERANDEFRWRDGTPVIYQNWDTGRERTVNNQSQRCGFISSITGLWGSEECSVSMPSICKRKKVWLIEKKKDTPKQHGTCPKGWLYFNYKCLLLNIPKDPSSWKNWTHAQHFCAEEGGTLVAIESEVEQAFITMNLFGQTTSVWIGLQNDDYETWLNGKPVVYSNWSPFDIINIPSHNTTEVQKHIPLCALLSSNPNFHFTGKWYFEDCGKEGYGFVCEKMQDTSGHGVNTSDMYPMPNTLEYGNRTYKIINANMTWYAAIKTCLMHKAQLVSITDQYHQSFLTVVLNRLGYAHWIGLFTTDNGLNFDWSDGTKSSFTFWKDEESSLLGDCVFADSNGRWHSTACESFLQGAICHVPPETRQSEHPELCSETSIPWIKFKSNCYSFSTVLDSMSFEAAHEFCKKEGSNLLTIKDEAENAFLLEELFAFGSSVQMVWLNAQFDGNNETIKWFDGTPTDQSNWGIRKPDTDYFKPHHCVALRIPEGLWQLSPCQEKKGFICKMEADIHTAEALPEKGPSHSIIPLAVVLTLIVIVAICTLSFCIYKHNGGFFRRLAGFRNPYYPATNFSTVYLEENILISDLEKSDQ

SEQ ID NO: 25490 - protein, 1306 aa, Artificial Sequence
  Synthetic polypeptide
EVPFASHHDSEDSPAMLNYKGIFVIQSESLKKCIQAGKSVLTLENCKQANKHMLWKWVSNHGLFNIGGSGCLGLNFSAPEQPLSLYECDSTLVSLRWRCNRKMITGPLQYSVQVAHDNTVVASRKYIHKWISYGSGGGDICEYLHKDLHTIKGNTHGMPCMFPFQYNHQWHHECTREGREDDLLWCATTSRYERDEKWGFCPDPTSAEVGCDTIWEKDLNSHICYQFNLLSSLSWSEAHSSCQMQGGTLLSITDETEENFIREHMSSKTVEVWMGLNQLDEHAGWQWSDGTPLNYLNWSPEVNFEPFVEDHCGTFSSFMPSAWRSRDCESTLPYICKKYLNHIDHEIVEKDAWKYYATHCEPGWNPYNRNCYKLQKEEKTWHEALRSCQADNSALIDITSLAEVEFLVTLLGDENASETWIGLSSNKIPVSFEWSNDSSVIFTNWHTLEPHIFPNRSQLCVSAEQSEGHWKVKNCEERLFYICKKAGHVLSDAESGCQEGWERHGGFCYKIDTVLRSFDQASSGYYCPPALVTITNRFEQAFITSLISSVVKMKDSYFWIALQDQNDTGEYTWKPVGQKPEPVQYTHWNTHQPRYSGGCVAMRGRHPLGRWEVKHCRHFKAMSLCKQPVENQEKAEYEERWPFHPCYLDWESEPGLASCFKVFHSEKVLMKRTWREAEAFCEEFGAHLASFAHIEEENFVNELLHSKFNWTEERQFWIGFNKRNPLNAGSWEWSDRTPVVSSFLDNTYFGEDARNCAVYKANKTLLPLHCGSKREWICKIPRDVKPKIPFWYQYDVPWLFYQDAEYLFHTFASEWLNFEFVCSWLHSDLLTIHSAHEQEFIHSKIKALSKYGASWWIGLQEERANDEFRWRDGTPVIYQNWDTGRERTVNNQSQRCGFISSITGLWGSEECSVSMPSICKRKKVWLIEKKKDTPKQHGTCPKGWLYFNYKCLLLNIPKDPSSWKNWTHAQHFCAEEGGTLVAIESEVEQAFITMNLFGQTTSVWIGLQNDDYETWLNGKPVVYSNWSPFDIINIPSHNTTEVQKHIPLCALLSSNPNFHFTGKWYFEDCGKEGYGFVCEKMQDTSGHGVNTSDMYPMPNTLEYGNRTYKIINANMTWYAAIKTCLMHKAQLVSITDQYHQSFLTVVLNRLGYAHWIGLFTTDNGLNFDWSDGTKSSFTFWKDEESSLLGDCVFADSNGRWHSTACESFLQGAICHVPPETRQSEHPELCSETSIPWIKFKSNCYSFSTVLDSMSFEAAHEFCKKEGSNLLTIKDEAENAFLLEELFAFGSSVQMVWLNAQFDGNSK

SEQ ID NO: 25491 - protein, 35 aa, Artificial Sequence
  Synthetic polypeptide
GRRENVAICKSRRESSSDIDPAVTLILDFQCPELD

SEQ ID NO: 25492 - protein, 60 aa, Artificial Sequence
  Synthetic polypeptide
PCCHLDLGLPVPRTRLRIYHKLMVLKWKSNFFQPQFSQIWRRRSGAWRITHQNHLLQILL

SEQ ID NO: 25493 - protein, 445 aa, Artificial Sequence
  Synthetic polypeptide
QVYEKVVNITNHQVIKVYSEDETSRALDVPSDITARDVCQLLILKNHYIDDHSWTLFEHLPHIGVERTIEDHELVIEVLSNWGIEEENKLYFRKNYAKYEFFKNPMYFFPEHMVSFATETNGEISPTQILQMFLSSSTYPEIHGFLHAKEQGKKSWKKIYFFLRRSGLYFSTKGTSKEPRHLQFFSEFGNSDIYVSLAGKKKHGAPTNYGFCFKPNKAGGPRDLKMLCAEEEQSRTCWVTAIRLLKYGMQLYQNYMHPYQGRSGCSSQSISPMRSISENSLVAMDFSGQKSRVIENPTEALSVAVEEGLAWRKKGCLRLGTHGSPTASSQSSATNMAIHRSQPWFHHKISRDEAQRLIIQQGLVDGVFLVRDSQSNPKTFVLSMSHGQKIKHFQIIPVEDDGEMFHTLDDGHTRFTDLIQLVEFYQLNKGVLPCKLKHYCARIAL

SEQ ID NO: 25494 - protein, 20 aa, Artificial Sequence
  Synthetic polypeptide
IDIKMANRYMKRWSTSPIIR

SEQ ID NO: 25495 - protein, 11 aa, Artificial Sequence
  Synthetic polypeptide
KGGQHHQSSGD

SEQ ID NO: 25496 - protein, 365 aa, Artificial Sequence
  Synthetic polypeptide
QVYEKVVNITNHQVIKVYSEDETSRALDVPSDITARDVCQLLILKNHYIDDHSWTLFEHLPHIGVERTIEDHELVIEVLSNWGIEEENKLYFRKNYAKYEFFKNPMYFFPEHMVSFATETNGEISPTQILQMFLSSSTYPEIHGFLHAKEQGKKSWKKIYFFLRRSGLYFSTKGTSKEPRHLQFFSEFGNSDIYVSLAGKKKHGAPTNYGFCFKPNKAGGPRDLKMLCAEEEQSRTCWVTAIRLLKYGMQLYQNYMHPYQGRSGCSSQSISPMRSISENSLVAMDFSGQKSRVIENPTEALSVAVEEGLAWRKKGCLRLGTHGSPTASSQSSATNMAIHRSQPWFHHKISRDEAQRLIIQQGLVD

SEQ ID NO: 25497 - protein, 118 aa, Artificial Sequence
  Synthetic polypeptide
QVYEKVVNITNHQVIKVYSEDETSRALDVPSDITARDVCQLLILKNHYIDDHSWTLFEHLPHIGVERTIEDHELVIEVLSNWGIEEENKLYFRKNYAKYEFFKNPMYFFPEHMVSFAT

SEQ ID NO: 25498 - protein, 809 aa, Artificial Sequence
  Synthetic polypeptide
AVISPLHSGLGDRSPCEAGRVRAGSLQLSSMSAGNSSLRRTKRKAPSPPSKIPPHQSDENSRVTALQPVDGVPPDSASEANSPEELSSPAGISSDYSLEEIDEKEELSEVPKVEAENISPKSQDIPFVSTDIINTLKNDPDSALGNGSGEFSQNSMEEKQETKSTDGQEPHSVVYDTSNGKKVVDSIRNLKSLGPNQENVVQNEIIVYPENTEDNMKNGVKKTEINVEGVAKNNNIDMEVERPSNSEAHETDTAISYKENHLAASSVPDQKLNQPSAEKTKDAAIQTTPSCNSFDGKHQDHNLSDSKVEECVQTSNNNISTQHSCLSSQDSVNTSREFRSQGTLIIHSEDPLTVKDPICAHGNDDLLPPVDRIDKNSTASYLKNYPLYRQDYNPKPKPSNEITREYIPKIGMTTYKIVPPKSLEISKDWQSETIEYKDDQDMHALGKKHTHENVKETAIQTEDSAISESPEEPLPNLKPKPNLRTEHQVPSSVSSPDDAMVSPLKPAPKMTRDTGTAPFAPNLEEINNILESKFKSRASNAQAKPSSFFLQMQKRVSGHYVTSAAAKSVHAAPNPAPKELTNKEAERDMLPSPEQTLSPLSKMPHSVPQPLVEKTDDDVIGQAPAEASPPPIAPKPVTIPASQVSTQNLKTLKTFGAPRPYSSSGPSPFALAVVKRSQSFSKERTESPSASALVQPPANTEEGKTHSVNKFVDIPQLGVSDKENNSAHNEQNSQIPTPTDGPSFTVMRQSSLTFQSSDPEQMRQSLLTAIRSGEAAAKLKRVTIPSNTISVNGRSRLSHSMSPDAQDGH

SEQ ID NO: 25499 - protein, 18 aa, Artificial Sequence
  Synthetic polypeptide
SHHCTPAWVTGVPVKQEE

SEQ ID NO: 25500 - protein, 4 aa, Artificial Sequence
  Synthetic polypeptide
QESL

SEQ ID NO: 25501 - protein, 847 aa, Artificial Sequence
  Synthetic polypeptide
AVISPLHSGLGDRSPCEAGRVRAGSLQLSSMSAGNSSLRRTKRKAPSPPSKIPPHQSDENSRVTALQPVDGVPPDSASEANSPEELSSPETFHPGLSSQEQCTAPKLMEETSVFECPGTPEAAITSLTSGISSDYSLEEIDEKEELSEVPKVEAENISPKSQDIPFVSTDIINTLKNDPDSALGNGSGEFSQNSMEEKQETKSTDGQEPHSVVYDTSNGKKVVDSIRNLKSLGPNQENVQNEIIVYPENTEDNMKNGVKKTEINVEGVAKNNNIDMEVERPSNSEAHETDTAISYKENHLAASSVPDQKLNQPSAEKTKDAAIQTTPSCNSFDGKHQDHNLSDSKVEECVQTSNNNISTQHSCLSSQDSVNTSREFRSQGTLIIHSEDPLTVKDPICAHGNDDLLPPVDRIDKNSTASYLKNYPLYRQDYNPKPKPSNEITREYIPKIGMTTYKIVPPKSLEISKDWQSETIEYKDDQDMHALGKKHTHENVKETAIQTEDSAISESPEEPLPNLKPKPNLRTEHQVPSSVSSPDDAMVSPLKPAPKMTRDTGTAPFAPNLEEINNILESKFKSRASNAQAKPSSFFLQMQKRVSGHYVTSAAAKSVHAAPNPAPKELTNKEAERDMLPSPEQTLSPLSKMPHSVPQPLVEKTDDDVIGQAPAEASPPPIAPKPVTIPASQVSTQNLKTLKTFGAPRPYSSSGPSPFALAVVKRSQSFSKERTESPSASALVQPPANTEEGKTHSVNKFVDIPQLGVSDKENNSAHNEQNSQIPTPTDGPSFTVMRQSSLTFQSSDPEQMRQSLLTAIRSGEAAAKLKRVTIPSNTISVNGRSRLSHSMSPDAQDGH

SEQ ID NO: 25502 - protein, 848 aa, Artificial Sequence
  Synthetic polypeptide
AVISPLHSGLGDRSPCEAGRVRAGSLQLSSMSAGNSSLRRTKRKAPSPPSKIPPHQSDENSRVTALQPVDGVPPDSASEANSPEELSSPETFHPGLSSQEQCTAPKLMEETSVFECPGTPEAAITSLTSGISSDYSLEEIDEKEELSEVPKVEAENISPKSQDIPFVSTDIINTLKNDPDSALGNGSGEFSQNSMEEKQETKSTDGQEPHSVVYDTSNGKKVVDSIRNLKSLGPNQENVVQNEIIVYPENTEDNMKNGVKKTEINVEGVAKNNNIDMEVERPSNSEAHETDTAISYKENHLAASSVPDQKLNQPSAEKTKDAAIQTTPSCNSFDGKHQDHNLSDSKVEECVQTSNNNISTQHSCLSSQDSVNTSREFRSQGTLIIHSEDPLTVKDPICAHGNDDLLPPVDRIDKNSTASYLKNYPLYRQDYNPKPKPSNEITREYIPKIGMTTYKIVPPKSLEISKDWQSETIEYKDDQDMHALGKKHTHENVKETAIQTEDSAISESPEEPLPNLKPKPNLRTEHQVPSSVSSPDDAMVSPLKPAPKMTRDTGTAPFAPNLEEINNILESKFKSRASNAQAKPSSFFLQMQKRVSGHYVTSAAAKSVHAAPNPAPKELTNKEAERDMLPSPEQTLSPLSKMPHSVPQPLVEKTDDDVIGQAPAEASPPPIAPKPVTIPASQVSTQNLKTLKTFGAPRPYSSSGPSPFALAVVKRSQSFSKERTESPSASALVQPPANTEEGKTHSVNKFVDIPQLGVSDKENNSAHNEQNSQIPTPTDGPSFTVMRQSSLTFQSSDPEQMRQSLLTAIRSGEAAAKLKRVTIPSNTISVNGRSRLSHSMSPDAQDGH

SEQ ID NO: 25503 - protein, 92 aa, Artificial Sequence
  Synthetic polypeptide
AVISPLHSGLGDRSPCEAGRVRAGSLQLSSMSAGNSSLRRTKRKAPSPPSKIPPHQSDENSRVTALQPVDGVPPDSASEANSPEELSSPGNI

SEQ ID NO: 25504 - protein, 14 aa, Artificial Sequence
  Synthetic polypeptide
KPGVQDQPGPQKSL

SEQ ID NO: 25505 - protein, 826 aa, Artificial Sequence
  Synthetic polypeptide
WLMPIIPALWEAEVGGSLKSREFKTNLGHKSPCEAGRVRAGSLQLSSMSAGNSSLRRTKRKAPSPPSKIPPHQSDENSRVTALQPVDGVPPDSASEANSPEELSSPAGISSDYSLEEIDEKEELSEVPKVEAENISPKSQDIPFVSTDIINTLKNDPDSALGNGSGEFSQNSMEEKQETKSTDGQEPHSVVYDTSNGKKVVDSIRNLKSLGPNQENVVQNEIIVYPENTEDNMKNGVKKTEINVEGVAKNNNIDMEVERPSNSEAHETDTAISYKENHLAASSVPDQKLNQPSAEKTKDAAIQTTPSCNSFDGKHQDHNLSDSKVEECVQTSNNNISTQHSCLSSQDSVNTSREFRSQGTLIIHSEDPLTVKDPICAHGNDDLLPPVDRIDKNSTASYLKNYPLYRQDYNPKPKPSNEITREYIPKIGMTTYKIVPPKSLEISKDWQSETIEYKDDQDMHALGKKHTHENVKETAIQTEDSAISESPEEPLPNLKPKPNLRTEHQVPSSVSSPDDAMVSPLKPAPKMTRDTGTAPFAPNLEEINNILESKFKSRASNAQAKPSSFFLQMQKRVSGHYVTSAAAKSVHAAPNPAPKELTNKEAERDMLPSPEQTLSPLSKMPHSVPQPLVEKTDDDVIGQAPAEASPPPIAPKPVTIPASQVSTQNLKTLKTFGAPRPYSSSGPSPFALAVVKRSQSFSKERTESPSASALVQPPANTEEGKTHSVNKFVDIPQLGVSDKENNSAHNEQNSQIPTPTDGPSFTVMRQSSLTFQSSDPEQMRQSLLTAIRSGEAAAKLKRVTIPSNTISVNGRSRLSHSMSPDAQDGH

SEQ ID NO: 25506 - protein, 23 aa, Artificial Sequence
  Synthetic polypeptide
EDHLKAGSSRPTWATKVPVKQEE

SEQ ID NO: 25507 - protein, 864 aa, Artificial Sequence
  Synthetic polypeptide
WLMPIIPALWEAEVGGSLKSREFKTNLGHKSPCEAGRVRAGSLQLSSMSAGNSSLRRTKRKAPSPPSKIPPHQSDENSRVTALQPVDGVPPDSASEANSPEELSSPETFHPGLSSQEQCTAPKLMEETSVFECPGTPEAAITSLTSGISSDYSLEEIDEKEELSEVPKVEAENISPKSQDIPFVSTDIINTLKNDPDSALGNGSGEFSQNSMEEKQETKSTDGQEPHSVVYDTSNGKKVVDSIRNLKSLGPNQENVQNEIIVYPENTEDNMKNGVKKTEINVEGVAKNNNIDMEVERPSNSEAHETDTAISYKENHLAASSVPDQKLNQPSAEKTKDAAIQTTPSCNSFDGKHQDHNLSDSKVEECVQTSNNNISTQHSCLSSQDSVNTSREFRSQGTLIIHSEDPLTVKDPICAHGNDDLLPPVDRIDKNSTASYLKNYPLYRQDYNPKPKPSNEITREYIPKIGMTTYKIVPPKSLEISKDWQSETIEYKDDQDMHALGKKHTHENVKETAIQTEDSAISESPEEPLPNLKPKPNLRTEHQVPSSVSSPDDAMVSPLKPAPKMTRDTGTAPFAPNLEEINNILESKFKSRASNAQAKPSSFFLQMQKRVSGHYVTSAAAKSVHAAPNPAPKELTNKEAERDMLPSPEQTLSPLSKMPHSVPQPLVEKTDDDVIGQAPAEASPPPIAPKPVTIPASQVSTQNLKTLKTFGAPRPYSSSGPSPFALAVVKRSQSFSKERTESPSASALVQPPANTEEGKTHSVNKFVDIPQLGVSDKENNSAHNEQNSQIPTPTDGPSFTVMRQSSLTFQSSDPEQMRQSLLTAIRSGEAAAKLKRVTIPSNTISVNGRSRLSHSMSPDAQDGH

SEQ ID NO: 25508 - protein, 865 aa, Artificial Sequence
  Synthetic polypeptide
WLMPIIPALWEAEVGGSLKSREFKTNLGHKSPCEAGRVRAGSLQLSSMSAGNSSLRRTKRKAPSPPSKIPPHQSDENSRVTALQPVDGVPPDSASEANSPEELSSPETFHPGLSSQEQCTAPKLMEETSVFECPGTPEAAITSLTSGISSDYSLEEIDEKEELSEVPKVEAENISPKSQDIPFVSTDIINTLKNDPDSALGNGSGEFSQNSMEEKQETKSTDGQEPHSVVYDTSNGKKVVDSIRNLKSLGPNQENVVQNEIIVYPENTEDNMKNGVKKTEINVEGVAKNNNIDMEVERPSNSEAHETDTAISYKENHLAASSVPDQKLNQPSAEKTKDAAIQTTPSCNSFDGKHQDHNLSDSKVEECVQTSNNNISTQHSCLSSQDSVNTSREFRSQGTLIIHSEDPLTVKDPICAHGNDDLLPPVDRIDKNSTASYLKNYPLYRQDYNPKPKPSNEITREYIPKIGMTTYKIVPPKSLEISKDWQSETIEYKDDQDMHALGKKHTHENVKETAIQTEDSAISESPEEPLPNLKPKPNLRTEHQVPSSVSSPDDAMVSPLKPAPKMTRDTGTAPFAPNLEEINNILESKFKSRASNAQAKPSSFFLQMQKRVSGHYVTSAAAKSVHAAPNPAPKELTNKEAERDMLPSPEQTLSPLSKMPHSVPQPLVEKTDDDVIGQAPAEASPPPIAPKPVTIPASQVSTQNLKTLKTFGAPRPYSSSGPSPFALAVVKRSQSFSKERTESPSASALVQPPANTEEGKTHSVNKFVDIPQLGVSDKENNSAHNEQNSQIPTPTDGPSFTVMRQSSLTFQSSDPEQMRQSLLTAIRSGEAAAKLKRVTIPSNTISVNGRSRLSHSMSPDAQDGH

SEQ ID NO: 25509 - protein, 109 aa, Artificial Sequence
  Synthetic polypeptide
WLMPIIPALWEAEVGGSLKSREFKTNLGHKSPCEAGRVRAGSLQLSSMSAGNSSLRRTKRKAPSPPSKIPPHQSDENSRVTALQPVDGVPPDSASEANSPEELSSPGNI

SEQ ID NO: 25510 - protein, 22 aa, Artificial Sequence
  Synthetic polypeptide
QMVSCLRWFDEKTKSQGTTSSS

SEQ ID NO: 25511 - protein, 1124 aa, Artificial Sequence
  Synthetic polypeptide
RWSPACDGLMRKPKAKAPLPPAETKYTDVSSAADSVESTAFIMEQKENMIDKDVELSVVLPGDIIKSTTVHGSKPMMDLLIFLCAQYHLNPSSYTIDLLSAEQNHIKFKPNTPIGMLEVEKVILKPKMLDKKKPTPIIPEKTVRVVINFKKTQKTIVRVSPHASLQELAPIICSKCEFDPLHTLLLKDYQSQEPLDLTKSLNDLGLRELYAMDVNRESCQISQNLDIMKEKENKGFFSFFQRSKKKRDQTASAPATPLVNKHRPTFTRSNTISKPYISNTLPSDAPKKRRAPLPPMPASQSVPQDLAHIQERPASCIVKSMSVDETDKSPCEAGRVRAGSLQLSSMSAGNSSLRRTKRKAPSPPSKIPPHQSDENSRVTALQPVDGVPPDSASEANSPEELSSPAGISSDYSLEEIDEKEELSEVPKVEAENISPKSQDIPFVSTDIINTLKNDPDSALGNGSGEFSQNSMEEKQETKSTDGQEPHSVVYDTSNGKKVVDSIRNLKSLGPNQENVVQNEIIVYPENTEDNMKNGVKKTEINVEGVAKNNNIDMEVERPSNSEAHETDTAISYKENHLAASSVPDQKLNQPSAEKTKDAAIQTTPSCNSFDGKHQDHNLSDSKVEECVQTSNNNISTQHSCLSSQDSVNTSREFRSQGTLIIHSEDPLTVKDPICAHGNDDLLPPVDRIDKNSTASYLKNYPLYRQDYNPKPKPSNEITREYIPKIGMTTYKIVPPKSLEISKDWQSETIEYKDDQDMHALGKKHTHENVKETAIQTEDSAISESPEEPLPNLKPKPNLRTEHQVPSSVSSPDDAMVSPLKPAPKMTRDTGTAPFAPNLEEINNILESKFKSRASNAQAKPSSFFLQMQKRVSGHYVTSAAAKSVHAAPNPAPKELTNKEAERDMLPSPEQTLSPLSKMPHSVPQPLVEKTDDDVIGQAPAEASPPPIAPKPVTIPASQVSTQNLKTLKTFGAPRPYSSSGPSPFALAVVKRSQSFSKERTESPSASALVQPPANTEEGKTHSVNKFVDIPQLGVSDKENNSAHNEQNSQIPTPTDGPSFTVMRQSSLTFQSSDPEQMRQSLLTAIRSGEAAAKLKRVTIPSNTISVNGRSRLSHSMSPDAQDGH

SEQ ID NO: 25512 - protein, 1162 aa, Artificial Sequence
  Synthetic polypeptide
RWSPACDGLMRKPKAKAPLPPAETKYTDVSSAADSVESTAFIMEQKENMIDKDVELSVVLPGDIIKSTTVHGSKPMMDLLIFLCAQYHLNPSSYTIDLLSAEQNHIKFKPNTPIGMLEVEKVILKPKMLDKKKPTPIIPEKTVRVVINFKKTQKTIVRVSPHASLQELAPIICSKCEFDPLHTLLLKDYQSQEPLDLTKSLNDLGLRELYAMDVNRESCQISQNLDIMKEKENKGFFSFFQRSKKKRDQTASAPATPLVNKHRPTFTRSNTISKPYISNTLPSDAPKKRRAPLPPMPASQSVPQDLAHIQERPASCIVKSMSVDETDKSPCEAGRVRAGSLQLSSMSAGNSSLRRTKRKAPSPPSKIPPHQSDENSRVTALQPVDGVPPDSASEANSPEELSSPETFHPGLSSQEQCTAPKLMEETSVFECPGTPEAAITSLTSGISSDYSLEEIDEKEELSEVPKVEAENISPKSQDIPFVSTDIINTLKNDPDSALGNGSGEFSQNSMEEKQETKSTDGQEPHSVVYDTSNGKKVVDSIRNLKSLGPNQENVQNEIIVYPENTEDNMKNGVKKTEINVEGVAKNNNIDMEVERPSNSEAHETDTAISYKENHLAASSVPDQKLNQPSAEKTKDAAIQTTPSCNSFDGKHQDHNLSDSKVEECVQTSNNNISTQHSCLSSQDSVNTSREFRSQGTLIIHSEDPLTVKDPICAHGNDDLLPPVDRIDKNSTASYLKNYPLYRQDYNPKPKPSNEITREYIPKIGMTTYKIVPPKSLEISKDWQSETIEYKDDQDMHALGKKHTHENVKETAIQTEDSAISESPEEPLPNLKPKPNLRTEHQVPSSVSSPDDAMVSPLKPAPKMTRDTGTAPFAPNLEEINNILESKFKSRASNAQAKPSSFFLQMQKRVSGHYVTSAAAKSVHAAPNPAPKELTNKEAERDMLPSPEQTLSPLSKMPHSVPQPLVEKTDDDVIGQAPAEASPPPIAPKPVTIPASQVSTQNLKTLKTFGAPRPYSSSGPSPFALAVVKRSQSFSKERTESPSASALVQPPANTEEGKTHSVNKFVDIPQLGVSDKENNSAHNEQNSQIPTPTDGPSFTVMRQSSLTFQSSDPEQMRQSLLTAIRSGEAAAKLKRVTIPSNTISVNGRSRLSHSMSPDAQDGH

SEQ ID NO: 25513 - protein, 1176 aa, Artificial Sequence
  Synthetic polypeptide
RWSPACDGLMRKPKAKAPLPPAETKYTDVSSAADSVESTAFIMEQKENMIDKDVELSVVLPGDIIKSTTVHGSKPMMDLLIFLCAQYHLNPSSYTIDLLSAEQNHIKFKPNTPIGMLEVEKVILKPKMLDKKKPTPIIPEKTVRVVINFKKTQKTIVRVSPHASLQELAPIICSKCEFDPLHTLLLKDYQSQEPLDLTKSLNDLGLRELYAMDVNRATSVTVFSKSSLQESCQISQNLDIMKEKENKGFFSFFQRSKKKRDQTASAPATPLVNKHRPTFTRSNTISKPYISNTLPSDAPKKRRAPLPPMPASQSVPQDLAHIQERPASCIVKSMSVDETDKSPCEAGRVRAGSLQLSSMSAGNSSLRRTKRKAPSPPSKIPPHQSDENSRVTALQPVDGVPPDSASEANSPEELSSPETFHPGLSSQEQCTAPKLMEETSVFECPGTPEAAITSLTSGISSDYSLEEIDEKEELSEVPKVEAENISPKSQDIPFVSTDIINTLKNDPDSALGNGSGEFSQNSMEEKQETKSTDGQEPHSVVYDTSNGKKVVDSIRNLKSLGPNQENVVQNEIIVYPENTEDNMKNGVKKTEINVEGVAKNNNIDMEVERPSNSEAHETDTAISYKENHLAASSVPDQKLNQPSAEKTKDAAIQTTPSCNSFDGKHQDHNLSDSKVEECVQTSNNNISTQHSCLSSQDSVNTSREFRSQGTLIIHSEDPLTVKDPICAHGNDDLLPPVDRIDKNSTASYLKNYPLYRQDYNPKPKPSNEITREYIPKIGMTTYKIVPPKSLEISKDWQSETIEYKDDQDMHALGKKHTHENVKETAIQTEDSAISESPEEPLPNLKPKPNLRTEHQVPSSVSSPDDAMVSPLKPAPKMTRDTGTAPFAPNLEEINNILESKFKSRASNAQAKPSSFFLQMQKRVSGHYVTSAAAKSVHAAPNPAPKELTNKEAERDMLPSPEQTLSPLSKMPHSVPQPLVEKTDDDVIGQAPAEASPPPIAPKPVTIPASQVSTQNLKTLKTFGAPRPYSSSGPSPFALAVVKRSQSFSKERTESPSASALVQPPANTEEGKTHSVNKFVDIPQLGVSDKENNSAHNEQNSQIPTPTDGPSFTVMRQSSLTFQSSDPEQMRQSLLTAIRSGEAAAKLKRVTIPSNTISVNGRSRLSHSMSPDAQDGH

SEQ ID NO: 25514 - protein, 420 aa, Artificial Sequence
  Synthetic polypeptide
RWSPACDGLMRKPKAKAPLPPAETKYTDVSSAADSVESTAFIMEQKENMIDKDVELSVVLPGDIIKSTTVHGSKPMMDLLIFLCAQYHLNPSSYTIDLLSAEQNHIKFKPNTPIGMLEVEKVILKPKMLDKKKPTPIIPEKTVRVVINFKKTQKTIVRVSPHASLQELAPIICSKCEFDPLHTLLLKDYQSQEPLDLTKSLNDLGLRELYAMDVNRATSVTVFSKSSLQESCQISQNLDIMKEKENKGFFSFFQRSKKKRDQTASAPATPLVNKHRPTFTRSNTISKPYISNTLPSDAPKKRRAPLPPMPASQSVPQDLAHIQERPASCIVKSMSVDETDKSPCEAGRVRAGSLQLSSMSAGNSSLRRTKRKAPSPPSKIPPHQSDENSRVTALQPVDGVPPDSASEANSPEELSSPGNI

SEQ ID NO: 25515 - protein, 251 aa, Artificial Sequence
  Synthetic polypeptide
RWSPACDGLMRKPKAKAPLPPAETKYTDVSSAADSVESTAFIMEQKENMIDKDVELSVVLPGDIIKSTTVHGSKPMMDLLIFLCAQYHLNPSSYTIDLLSAEQNHIKFKPNTPIGMLEVEKVILKPKMLDKKKPTPIIPEKTVRVVINFKKTQKTIVRVSPHASLQELAPIICSKCEFDPLHTLLLKDYQSQEPLDLTKSLNDLGLRELYAMDVNRESCQISQNLDIMKEKENKGFFSFFQRSKKKRDQTA

SEQ ID NO: 25516 - protein, 153 aa, Artificial Sequence
  Synthetic polypeptide
RWSPACDGLMRKPKAKAPLPPAETKYTDVSSAADSVESTAFIMEQKENMIDKDVELSVVLPGDIIKSTTVHGSKPMMDLLIFLCAQYHLNPSSYTIDLLSAEQNHIKFKPNTPIGMLEVEKVILKPKMLDKKKPTPIIPEKTVRVVINFKKTQ

SEQ ID NO: 25517 - protein, 152 aa, Artificial Sequence
  Synthetic polypeptide
RWSPACDGLMRKPKAKAPLPPAETKYTDVSSAADSVESTAFIMEQKENMIDKDVELSVVLPGDIIKSTTVHGSKPMMDLLIFLCAQYHLNPSSYTIDLLSAEQNHIKFKPNTPIGMLEVEKVILKPKMLDKKKPTPIIPEKTVRVVINFKKT

SEQ ID NO: 25518 - protein, 144 aa, Artificial Sequence
  Synthetic polypeptide
RWSPACDGLMRKPKAKAPLPPAETKYTDVSSAADSVESTAFIMEQKENMIDKDVELSVVLPGDIIKSTTVHGSKPMMDLLIFLCAQYHLNPSSYTIDLLSAEQNHIKFKPNTPIGMLEVEKVILKPKMLDKKKPTPIIPEKTVR

SEQ ID NO: 25519 - protein, 134 aa, Artificial Sequence
  Synthetic polypeptide
RWSPACDGLMRKPKAKAPLPPAETKYTDVSSAADSVESTAFIMEQKENMIDKDVELSVVLPGDIIKSTTVHGSKPMMDLLIFLCAQYHLNPSSYTIDLLSAEQNHIKFKPNTPIGMLEVEKVILKPKMLDKKKP

SEQ ID NO: 25520 - protein, 91 aa, Artificial Sequence
  Synthetic polypeptide
RWSPACDGLMRKPKAKAPLPPAETKYTDVSSAADSVESTAFIMEQKENMIDKDVELSVVLPGDIIKSTTVHGSKPMMDLLIFLCAQYHLNP

SEQ ID NO: 25521 - protein, 15 aa, Artificial Sequence
  Synthetic polypeptide
SYRSCQRLQGIPCCY

SEQ ID NO: 25522 - protein, 496 aa, Artificial Sequence
  Synthetic polypeptide
ESRATEAVRDFRESLAAIEQRIAEEKAKRPKQERKDEDDENGPKPNSDLEAGKSLPFIYGDIPPEMVSVPLEDLDPYYINKKTFIVLNKGKAISRFSATPALYILTPFNPIRKLAIKILVHSLFNMLIMCTILTNCVFMTMSNPPDWTKNVEYTFTGIYTFESLIKILARGFCLEDFTFLRDPWNWLDFTVITFAYVTEFVDLGNVSALRTFRVLRALKTISVIPGLKTIVGALIQSVKKLSDVMILTVFCLSVFALIGLQLFMGNLRNKCLQWPPDNSSFEINITSFFNNSLDGNGTTFNRTVSIFNWDEYIEDKSHFYFLEGQNDALLCGNSSDAGQCPEGYICVKAGRNPNYGYTSFDTFSWAFLSLFRLMTQDFWENLYQLTLRAAGKTYMIFFVLVIFLGSFYLINLILAVVAMAYEEQNQATLEEAEQKEAEFQQMLEQLKKQQEEAQAAAAAASAESRDFSGAGGIGVFSESSSVASKLSSKSEKELKN

SEQ ID NO: 25523 - protein, 105 aa, Artificial Sequence
  Synthetic polypeptide
SATPHPPEWLQLKKAYHTVCENLELQKLSETSGNPLLLLNNALQKRKLRDPNRNARMRMMKMAQSQTVTWKQENLFHLFMETFLQRWCQCPWRIWTPTISIRKRL

SEQ ID NO: 25524 - protein, 1998 aa, Artificial Sequence
  Synthetic polypeptide
ESRATEAVRDFRESLAAIEQRIAEEKAKRPKQERKDEDDENGPKPNSDLEAGKSLPFIYGDIPPEMVSVPLEDLDPYYINKKTFIVLNKGKAISRFSATPALYILTPFNPIRKLAIKILVHSLFNMLIMCTILTNCVFMTMSNPPDWTKNVEYTFTGIYTFESLIKILARGFCLEDFTFLRDPWNWLDFTVITFAYVTEFVNLGNVSALRTFRVLRALKTISVIPGLKTIVGALIQSVKKLSDVMILTVFCLSVFALIGLQLFMGNLRNKCLQWPPDNSSFEINITSFFNNSLDGNGTTFNRTVSIFNWDEYIEDKSHFYFLEGQNDALLCGNSSDAGQCPEGYICVKAGRNPNYGYTSFDTFSWAFLSLFRLMTQDFWENLYQLTLRAAGKTYMIFFVLVIFLGSFYLINLILAVVAMAYEEQNQATLEEAEQKEAEFQQMLEQLKKQQEEAQAAAAAASAESRDFSGAGGIGVFSESSSVASKLSSKSEKELKNRRKKKKQKEQSGEEEKNDRVRKSESEDSIRRKGFRFSLEGSRLTYEKRFSSPHQSLLSIRGSLFSPRRNSRASLFSFRGRAKDIGSENDFADDEHSTFEDNDSRRDSLFVPHRHGERRHSNVSQASRASRVLPILPMNGKMHSAVDCNGVVSLVGGPSTLTSAGQLLPEGTTTETEIRKRRSSSYHVSMDLLEDPTSRQRAMSIASILTNTMEELEESRQKCPPCWYKFANMCLIWDCCKPWLKVKHLVNLVVMDPFVDLAITICIVLNTLFMAMEHYPMTEQFSSVLSVGNLVFTGIFTAEMFLKIIAMDPYYYFQEGWNIFDGFIVSLSLMELGLANVEGLSVLRSFRLLRVFKLAKSWPTLNMLIKIIGNSVGALGNLTLVLAIIVFIFAVVGMQLFGKSYKECVCKISNDCELPRWHMHDFFHSFLIVFRVLCGEWIETMWDCMEVAGQTMCLTVFMMVMVIGNLVVLNLFLALLLSSFSSDNLAATDDDNEMNNLQIAVGRMQKGIDFVKRKIREFIQKAFVRKQKALDEIKPLEDLNNKKDSCISNHTTIEIGKDLNYLKDGNGTTSGIGSSVEKYVVDESDYMSFINNPSLTVTVPIAVGESDFENLNTEEFSSESDMEESKEKLNATSSSEGSTVDIGAPAEGEQPEVEPEESLEPEACFTEDCVRKFKCCQISIEEGKGKLWWNLRKTCYKIVEHNWFETFIVFMILLSSGALAFEDIYIEQRKTIKTMLEYADKVFTYIFILEMLLKWVAYGFQVYFTNAWCWLDFLIVDVSLVSLTANALGYSELGAIKSLRTLRALRPLRALSRFEGMRVVVNALLGAIPSIMNVLLVCLIFWLIFSIMGVNLFAGKFYHCINYTTGEMFDVSVVNNYSECKALIESNQTARWKNVKVNFDNVGLGYLSLLQVATFKGWMDIMYAAVDSRNVELQPKYEDNLYMYLYFVIFIIFGSFFTLNLFIGVIIDNFNQQKKKFGGQDIFMTEEQKKYYNAMKKLGSKKPQKPIPRPANKFQGMVFDFVTKQVFDISIMILICLNMVTMMVETDDQSQEMTNILYWINLVFIVLFTGECVLKLISLRYYYFTIGWNIFDFVVVILSIVGMFLAELIEKYFVSPTLFRVIRLARIGRILRLIKGAKGIRTLLFALMMSLPALFNIGLLLFLVMFIYAIFGMSNFAYVKREVGIDDMFNFETFGNSMICLFQITTSAGWDGLLAPILNSGPPDCDPDKDHPGSSVKGDCGNPSVGIFFFVSYIIISFLVVVNMYIAVILENFSVATEESAEPLSEDDFEMFYEVWEKFDPDATQFIEFAKLSDFADALDPPLLIAKPNKVQLIAMDLPMVSGDRIHCLDILFAFTKRVLGESGEMDALRIQMEERFMASNPSKVSYEPITTTLKRKQEEVSAIIIQRAYRRYLLKQKVKKVSSIYKKDKGKECDGTPIKEDTLIDKLNENSTPEKTDMTPSTTSPPSYDSVTKPEKEKFEKDKSEKEDKGKDIRESKK

SEQ ID NO: 25525 - protein, 1998 aa, Artificial Sequence
  Synthetic polypeptide
ESRATEAVRDFRESLAAIEQRIAEEKAKRPKQERKDEDDENGPKPNSDLEAGKSLPFIYGDIPPEMVSVPLEDLDPYYINKKTFIVLNKGKAISRFSATPALYILTPFNPIRKLAIKILVHSLFNMLIMCTILTNCVFMTMSNPPDWTKNVEYTFTGIYTFESLIKILARGFCLEDFTFLRDPWNWLDFTVITFAYVTEFVDLGNVSALRTFRVLRALKTISVIPGLKTIVGALIQSVKKLSDVMILTVFCLSVFALIGLQLFMGNLRNKCLQWPPDNSSFEINITSFFNNSLDGNGTTFNRTVSIFNWDEYIEDKSHFYFLEGQNDALLCGNSSDAGQCPEGYICVKAGRNPNYGYTSFDTFSWAFLSLFRLMTQDFWENLYQLTLRAAGKTYMIFFVLVIFLGSFYLINLILAVVAMAYEEQNQATLEEAEQKEAEFQQMLEQLKKQQEEAQAAAAAASAESRDFSGAGGIGVFSESSSVASKLSSKSEKELKNRRKKKKQKEQSGEEEKNDRVRKSESEDSIRRKGFRFSLEGSRLTYEKRFSSPHQSLLSIRGSLFSPRRNSRASLFSFRGRAKDIGSENDFADDEHSTFEDNDSRRDSLFVPHRHGERRHSNVSQASRASRVLPILPMNGKMHSAVDCNGVVSLVGGPSTLTSAGQLLPEGTTTETEIRKRRSSSYHVSMDLLEDPTSRQRAMSIASILTNTMEELEESRQKCPPCWYKFANMCLIWDCCKPWLKVKHLVNLVVMDPFVDLAITICIVLNTLFMAMEHYPMTEQFSSVLSVGNLVFTGIFTAEMFLKIIAMDPYYYFQEGWNIFDGFIVSLSLMELGLANVEGLSVLRSFRLLRVFKLAKSWPTLNMLIKIIGNSVGALGNLTLVLAIIVFIFAVVGMQLFGKSYKECVCKISNDCELPRWHMHDFFHSFLIVFRVLCGEWIETMWDCMEVAGQTMCLTVFMMVMVIGNLVVLNLFLALLLSSFSSDNLAATDDDNEMNNLQIAVGRMQKGIDFVKRKIREFIQKAFVRKQKALDEIKPLEDLNNKKDSCISNHTTIEIGKDLNYLKDGNGTTSGIGSSVEKYVVDESDYMSFINNPSLTVTVPIAVGESDFENLNTEEFSSESDMEESKEKLNATSSSEGSTVDIGAPAEGEQPEVEPEESLEPEACFTEDCVRKFKCCQISIEEGKGKLWWNLRKTCYKIVEHNWFETFIVFMILLSSGALAFEDIYIEQRKTIKTMLEYADKVFTYIFILEMLLKWVAYGFQVYFTNAWCWLDFLIVDVSLVSLTANALGYSELGAIKSLRTLRALRPLRALSRFEGMRVVVNALLGAIPSIMNVLLVCLIFWLIFSIMGVNLFAGKFYHCINYTTGEMFDVSVVNNYSECKALIESNQTARWKNVKVNFDNVGLGYLSLLQVATFKGWMDIMYAAVDSRNVELQPKYEDNLYMYLYFVIFIIFGSFFTLNLFIGVIIDNFNQQKKKFGGQDIFMTEEQKKYYNAMKKLGSKKPQKPIPRPANKFQGMVFDFVTKQVFDISIMILICLNMVTMMVETDDQSQEMTNILYWINLVFIVLFTGECVLKLISLRYYYFTIGWNIFDFVVVILSIVGMFLAELIEKYFVSPTLFRVIRLARIGRILRLIKGAKGIRTLLFALMMSLPALFNIGLLLFLVMFIYAIFGMSNFAYVKREVGIDDMFNFETFGNSMICLFQITTSAGWDGLLAPILNSGPPDCDPDKDHPGSSVKGDCGNPSVGIFFFVSYIIISFLVVVNMYIAVILENFSVATEESAEPLSEDDFEMFYEVWEKFDPDATQFIEFAKLSDFADALDPPLLIAKPNKVQLIAMDLPMVSGDRIHCLDILFAFTKRVLGESGEMDALRIQMEERFMASNPSKVSYEPITTTLKRKQEEVSAIIIQRAYRRYLLKQKVKKVSSIYKKDKGKECDGTPIKEDTLIDKLNENSTPEKTDMTPSTTSPPSYDSVTKPEKEKFEKDKSEKEDKGKDIRESKK

SEQ ID NO: 25526 - protein, 856 aa, Artificial Sequence
  Synthetic polypeptide
SQHFGRPRQADHLRSGVQDQPGKHDCVRKFKCCQISIEEGKGKLWWNLRKTCYKIVEHNWFETFIVFMILLSSGALAFEDIYIEQRKTIKTMLEYADKVFTYIFILEMLLKWVAYGFQVYFTNAWCWLDFLIVDVSLVSLTANALGYSELGAIKSLRTLRALRPLRALSRFEGMRVVVNALLGAIPSIMNVLLVCLIFWLIFSIMGVNLFAGKFYHCINYTTGEMFDVSVVNNYSECKALIESNQTARWKNVKVNFDNVGLGYLSLLQVATFKGWMDIMYAAVDSRNVELQPKYEDNLYMYLYFVIFIIFGSFFTLNLFIGVIIDNFNQQKKKFGGQDIFMTEEQKKYYNAMKKLGSKKPQKPIPRPANKFQGMVFDFVTKQVFDISIMILICLNMVTMMVETDDQSQEMTNILYWINLVFIVLFTGECVLKLISLRYYYFTIGWNIFDFVVVILSIVGMFLAELIEKYFVSPTLFRVIRLARIGRILRLIKGAKGIRTLLFALMMSLPALFNIGLLLFLVMFIYAIFGMSNFAYVKREVGIDDMFNFETFGNSMICLFQITTSAGWDGLLAPILNSGPPDCDPDKDHPGSSVKGDCGNPSVGIFFFVSYIIISFLVVVNMYIAVILENFSVATEESAEPLSEDDFEMFYEVWEKFDPDATQFIEFAKLSDFADALDPPLLIAKPNKVQLIAMDLPMVSGDRIHCLDILFAFTKRVLGESGEMDALRIQMEERFMASNPSKVSYEPITTTLKRKQEEVSAIIIQRAYRRYLLKQKVKKVSSIYKKDKGKECDGTPIKEDTLIDKLNENSTPEKTDMTPSTTSPPSYDSVTKPEKEKFEKDKSEKEDKGKDIRESKK

SEQ ID NO: 25527 - protein, 21 aa, Artificial Sequence
  Synthetic polypeptide
GQEFKTSQANMTVYGSSSVVR

SEQ ID NO: 25528 - protein, 378 aa, Artificial Sequence
  Synthetic polypeptide
SQHFGRPALVNHLRSGVQDQPGQQGECFYGWLEPLLARIAENYTAVVSPDIASIDLNTFEFNKPSPYGSNHNRGNFDWSLSFGWESLPDHEKQRRKDETYPIKTPTFAGGLFSISKEYFEYIGSYDEEMEIWGGENIEMSFRVWQCGGQLEIMPCSVVGHVFRSKSPHSFPKGTQVIARNQVRLAEVWMDEYKEIFYRRNTDAAKIVKQKAFGDLSKRFEIKHRLQCKNFTWYLNNIYPEVYVPDLNPVISGYIKSVGQPLCLDVGENNQGGKPLIMYTCHGLGGNQYFEYSAQHEIRHNIQKELCLHAAQGLVQLKACTYKGHKTVVTGEQIWEIQKDQLLYNPFLKMCLSANGEHPSLVSCNPSDPLQKWILSQND

SEQ ID NO: 25529 - protein, 18 aa, Artificial Sequence
  Synthetic polypeptide
GQEFKISLANKVSVSMVG

SEQ ID NO: 25530 - protein, 33 aa, Artificial Sequence
  Synthetic polypeptide
RAWWLIPVIPALWEAGVGESFEVRSSRSAWPTR

SEQ ID NO: 25531 - protein, 209 aa, Artificial Sequence
  Synthetic polypeptide
SQHFGRPALVNHLRSGVQDQPGQQGECFYGWLEPLLARIAENYTAVVSPDIASIDLNTFEFNKPSPYGSNHNRGNFDWSLSFGWESLPDHEKQRRKDETYPIKTPTFAGGLFSISKEYFEYIGSYDEEMEIWGGENIEMSFRVWQCGGQLEIMPCSVVGHVFRSKSPHSFPKGTQVIARNQVRLAEVWMDEYKEIFYRRNTDAAKIVKQ

SEQ ID NO: 25532 - protein, 25 aa, Artificial Sequence
  Synthetic polypeptide
SQHFGRPALVNHLRSGVQDQPGQQG

SEQ ID NO: 25533 - protein, 12 aa, Artificial Sequence
  Synthetic polypeptide
GQEFKISLANKV

SEQ ID NO: 25534 - protein, 844 aa, Artificial Sequence
  Synthetic polypeptide
EASTDLSFSRNKPGCVWRFSCCQVNIESGKGKIWWNIRKTCYKIVEHSWFESFIVLMILLSSGALAFEDIYIERKKTIKIILEYADKIFTYIFILEMLLKWIAYGYKTYFTNAWCWLDFLIVDVSLVTLVANTLGYSDLGPIKSLRTLRALRPLRALSRFEGMRVVVNALIGAIPSIMNVLLVCLIFWLIFSIMGVNLFAGKFYECINTTDGSRFPASQVPNRSECFALMNVSQNVRWKNLKVNFDNVGLGYLSLLQVATFKGWTIIMYAAVDSVNVDKQPKYEYSLYMYIYFVVFIIFGSFFTLNLFIGVIIDNFNQQKKKLGGQDIFMTEEQKKYYNAMKKLGSKKPQKPIPRPGNKIQGCIFDLVTNQAFDISIMVLICLNMVTMMVEKEGQSQHMTEVLYWINVVFIILFTGECVLKLISLRHYYFTVGWNIFDFVVVIISIVGMFLADLIETYFVSPTLFRVIRLARIGRILRLVKGAKGIRTLLFALMMSLPALFNIGLLLFLVMFIYAIFGMSNFAYVKKEDGINDMFNFETFGNSMICLFQITTSAGWDGLLAPILNSKPPDCDPKKVHPGSSVEGDCGNPSVGIFYFVSYIIISFLVVVNMYIAVILENFSVATEESTEPLSEDDFEMFYEVWEKFDPDATQFIEFSKLSDFAAALDPPLLIAKPNKVQLIAMDLPMVSGDRIHCLDILFAFTKRVLGESGEMDSLRSQMEERFMSANPSKVSYEPITTTLKRKQEDVSATVIQRAYRRYRLRQNVKNISSIYIKDGDRDDDLLNKKDMAFDNVNENSSPEKTDATSSTTSPPSYDSVTKPDKEKYEQDRTEKEDKGKDSKESKK

SEQ ID NO: 25535 - protein, 34 aa, Artificial Sequence
  Synthetic polypeptide
FNPGSISSRKPLLISLSQEISQVVYGGSHAAKLT

SEQ ID NO: 25536 - protein, 12 aa, Artificial Sequence
  Synthetic polypeptide
ARLCMEVLMLPS

SEQ ID NO: 25537 - protein, 8 aa, Artificial Sequence
  Synthetic polypeptide
GLPSHVKL

SEQ ID NO: 25538 - protein, 13 aa, Artificial Sequence
  Synthetic polypeptide
NCKKSSWVKWSPS

SEQ ID NO: 25539 - protein, 186 aa, Artificial Sequence
  Synthetic polypeptide
PCETVRRVPGSSGHLHKTEDGDWEWSDDEMDEKSEEGKAAFSQEKSRRVKEENPEIAVSASTIPEQIQSLSVHDSQGPPNANEDYREASSCAVNLVLRLRNSRKELNDIRFEFTPGRDTADGVSQELFSAGLVDGHDVVIVAANLQKIVDDPKALKTLTFKLASGCDGSEIPDEVKLIGFAQLSVS

SEQ ID NO: 25540 - protein, 6 aa, Artificial Sequence
  Synthetic polypeptide
KSQDGC

SEQ ID NO: 25541 - protein, 22 aa, Artificial Sequence
  Synthetic polypeptide
MYLKPVNRTLKKVKMGVKYHII

SEQ ID NO: 25542 - protein, 111 aa, Artificial Sequence
  Synthetic polypeptide
TVHLKKSRWVLNTTLFESWEIVGPYPSWWVFNLLLLLVQGLNCFWSYLIVKIACKAVSRGKVSKDDRSDIESSSDEEDSEPPGKNPHTATTTNGTSGTNGYLLTGSCSMDD

SEQ ID NO: 25543 - protein, 119 aa, Artificial Sequence
  Synthetic polypeptide
TVHLKKSRWVLNTTLFESWEIVGPYPSWWVFNLLLLLVQGLNCFWSYLIVKIACKAVSRGKAGKWNPLHVSKDDRSDIESSSDEEDSEPPGKNPHTATTTNGTSGTNGYLLTGSCSMDD

SEQ ID NO: 25544 - protein, 12 aa, Artificial Sequence
  Synthetic polypeptide
GQEIETILANKV

SEQ ID NO: 25545 - protein, 722 aa, Artificial Sequence
  Synthetic polypeptide
SQHFGRTRRADHEVRRSRPSWLTRFDIKLLSEFSSCLADQHLYFSPLMGKIADIVHRNLETTQDLSSLSVLMVNISSLISRHFQQQLVNKTELLFDTIDSSEVNVAKSIAKFLRNVRYRYQPLLERCNNVFLSNVDHLDLDSISKILSVYKFLQFNSFEFIIMAKKKLTEMIPLCNHPASFVKLFVALGPIAGPEEKKQLKSTMLLMSEDLTGEQALAVLGAMGDMESRNSCLIKRVTSVLHKHLDGYKPLELLKITQELTFLHFQRKEFFAKLRELLLSYLKNSFIPTEVSVLVRAISLLPSPHLDEVGISRIEAVLPQCDLNNLSSFATSVLRWIQHDHMYLDNMTAKQLKLLQKLDHYGRQRLQHSNSLDLLRKELKSLKGNTFPESLLEEMIATLQHFMDDINYINVGEIASFISSTDYLSTLLLDRIASVAVQQIEKIHPFTIPAIIRPFSVLNYDPPQRDEFLGTCVQHLNSYLGILDPFILVFLGFSLATLEYFPEDLLKAIFNIKFLARLDSQLEILSPSRSARVQFHLMELNRSVCLECPEFQIPWFHDRFCQQYNKGIGGMDGTQQQIFKMLAEVLGGINCVKASVLTPYYHKVDFECILDKRKKPLPYGSHNIALGQLPEMPWESNIEIVGSRLPPGAERIALEFLDSKALCRNIPHMKGKSAMKKRHLEILGYRVIQISQFEWNSMALSTKDARMDYLRECIFGEVKSCL

SEQ ID NO: 25546 - protein, 14 aa, Artificial Sequence
  Synthetic polypeptide
QGLILNCSQNFPLA

SEQ ID NO: 25547 - protein, 679 aa, Artificial Sequence
  Synthetic polypeptide
SQHFGRTRRADHEVRRSRPSWLTRFDIKLLSEFSSCLADQHLYFSPLMGKIADIVHRNLETTQDLSSLSVLMVNISSLISRHFQQQLVNKTELLFDTIDSSEVNVAKSIAKFLRNVRYRYQPLLERCNNVFLSNVDHLDLDSISKILSVYKFLQFNSFEFIIMAKKKLTEMIPLCNHPASFVKLFVALGPIAGPEEKKQLKSTMLLMSEDLTGEQALAVLGAMGDMESRNSCLIKRVTSVLHKHLDGYKPLELLKITQELTFLHFQRKEFFAKLRELLLSYLKNSFIPTEVSVLVRAISLLPSPHLDEVGISRIEAVLPQCDLNNLSSFATSVLRWIQHDHMYLDNMTAKQLKLLQKLDHYGRQRLQHSNSLDLLRKELKSLKGNTFPESLLEEMIATLQHFMDDINYINVGEIASFISSTDYLSTLLLDRIASVAVQQIEKIHPFTIPAIIRPFSVLNYDPPQRDEFLGTCVQHLNSYLGILDPFILVFLGFSLATLEYFPEDLLKAIFNIKFLARLDSQLESIGGMDGTQQQIFKMLAEVLGGINCVKASVLTPYYHKVDFECILDKRKKPLPYGSHNIALGQLPEMPWESNIEIVGSRLPPGAERIALEFLDSKALCRNIPHMKGKSAMKKRHLEILGYRVIQISQFEWNSMALSTKDARMDYLRECIFGEVKSCL

SEQ ID NO: 25548 - protein, 151 aa, Artificial Sequence
  Synthetic polypeptide
SQHFGRTRRADHEVRRSRPSWLTRFDIKLLSEFSSCLADQHLYFSPLMGKIADIVHRNLETTQDLSSLSVLMVNISSLISRHFQQQLVNKTELLFDTIDSSEVNVAKSIAKFLRNVRYRYQPLLERCNNVFLSNVDHLDLDSISKILSVYK

SEQ ID NO: 25549 - protein, 37 aa, Artificial Sequence
  Synthetic polypeptide
FQTPPRPTELESAFQQDPQNFDMTCQHHTSFTKRNQS

SEQ ID NO: 25550 - protein, 12 aa, Artificial Sequence
  Synthetic polypeptide
NLHFNKIPRTSI

SEQ ID NO: 25551 - protein, 28 aa, Artificial Sequence
  Synthetic polypeptide
TRICISTRSPELRYDLPASYKFHKKKSV

SEQ ID NO: 25552 - protein, 42 aa, Artificial Sequence
  Synthetic polypeptide
FQTPPRPTELESAFQQDPQNFDMTCQHHTSFTKRNQWTLKWT

SEQ ID NO: 25553 - protein, 39 aa, Artificial Sequence
  Synthetic polypeptide
TRICISTRSPELRYDLPASYKFHKKKSVDIEVDLIRFSF

SEQ ID NO: 25554 - protein, 36 aa, Artificial Sequence
  Synthetic polypeptide
FQTPPRPTELESAFQQDPQNFDMTCQHHTSFTKRNQ

SEQ ID NO: 25555 - protein, 74 aa, Artificial Sequence
  Synthetic polypeptide
TRICISTRSPELRYDLPASYKFHKKKSVSLLILAGLHSVLKSFLGRMWWFMPVIPATREAEARESLELRRQRLQ

SEQ ID NO: 25556 - protein, 31 aa, Artificial Sequence
  Synthetic polypeptide
FQTPPRPTELESAFQQDPQNFDMTCQHHTSF

SEQ ID NO: 25557 - protein, 22 aa, Artificial Sequence
  Synthetic polypeptide
TRICISTRSPELRYDLPASYKF

SEQ ID NO: 25558 - protein, 42 aa, Artificial Sequence
  Synthetic polypeptide
GRAWWLTPIIPALWRLRDRYGFSKDCFGNGKNSSIFLTQILN

SEQ ID NO: 25559 - protein, 22 aa, Artificial Sequence
  Synthetic polypeptide
PGVVAHAYNPSTLEAEGQIWLF

SEQ ID NO: 25560 - protein, 45 aa, Artificial Sequence
  Synthetic polypeptide
PSETILLRMIFLWRSPRQNHRFPRQYMTVLFVDRVAPPLKIDLLD

SEQ ID NO: 25561 - protein, 27 aa, Artificial Sequence
  Synthetic polypeptide
QQFQESSLDRTIPLSCSQMPDPQKRFS

SEQ ID NO: 25562 - protein, 687 aa, Artificial Sequence
  Synthetic polypeptide
AAPRCLTLRNDSPENDIPMEITTAEPQVSEAVYDCVICGQSGPSSEDRPTGLVVLLQASSVLGQCRDNVEPKKLPISEEEQIYPWDTCAAVHDVRLSLLQRYFKDSSCLLAVSIGWEGGVYVQTCGHTLHIDCHKSYMESLRNDQVLQGFSVDKGEFTCPLCRQFANSVLPCYPGSNVENNPWQRPSNKSIQDLIKEVEELQGRPGAFPSETNLSKEMESVMKDIKNTTQKKYRDYSKTPGSPDNDFLFMYSVARTNLELELIHRGGNLCSGGASTAGKRSCLNQLFHVLALHMRLYSIDSEYNPWRKLTQLEEMNPQLGYEEQQPEVPILYHDVTSLLLIQILMMPQPLRKDHFTCIVKVLFTLLYTQALAALSVKCSEEDRSAWKHAGALKKSTCDAEKSYEVLLSFVISELFKGKLYHEEGTQECAMVNPIAWSPESMEKCLQDFCLPFLRITSLLQHHLFGEDLPSCQEEEEFSVLASCLGLLPTFYQTEHPFISASCLDWPVPAFDIITQWCFEIKSFTERHAEQGKALLIQESKWKLPHLLQLPENYNTIFQYYHRKTCSVCTKVPKDPAVCLVCGTFVCLKGLCCKQQSYCECVLHSQNCGAGTGIFLLINASVIIIIRGHRFCLWGSVYLDAHGEEDRDLRRGKPLYICKERYKVLEQQWISHTFDHINKRWGPHYNGL

SEQ ID NO: 25563 - protein, 691 aa, Artificial Sequence
  Synthetic polypeptide
AAPRCLTLRNDSPENDIPMEITTAEPQVSEAVYDCVICGQSGPSSEDRPTGLVVLLQASSVLGQCRDNVEPKKLPISEEEQIYPWDTCAAVHDVRLSLLQRYFKDSSCLLAVSIGWEGGVYVQTCGHTLHIDCHKSYMESLRNDQVLQGFSVDKGEFTCPLCRQFANSVLPCYPGSNVENNPWQRPSNKSIQDLIKEVEELQGRPGAFPVSISSETNLSKEMESVMKDIKNTTQKKYRDYSKTPGSPDNDFLFMYSVARTNLELELIHRGGNLCSGGASTAGKRSCLNQLFHVLALHMRLYSIDSEYNPWRKLTQLEEMNPQLGYEEQQPEVPILYHDVTSLLLIQILMMPQPLRKDHFTCIVKVLFTLLYTQALAALSVKCSEEDRSAWKHAGALKKSTCDAEKSYEVLLSFVISELFKGKLYHEEGTQECAMVNPIAWSPESMEKCLQDFCLPFLRITSLLQHHLFGEDLPSCQEEEEFSVLASCLGLLPTFYQTEHPFISASCLDWPVPAFDIITQWCFEIKSFTERHAEQGKALLIQESKWKLPHLLQLPENYNTIFQYYHRKTCSVCTKVPKDPAVCLVCGTFVCLKGLCCKQQSYCECVLHSQNCGAGTGIFLLINASVIIIIRGHRFCLWGSVYLDAHGEEDRDLRRGKPLYICKERYKVLEQQWISHTFDHINKRWGPHYNGL

SEQ ID NO: 25564 - protein, 26 aa, Artificial Sequence
  Synthetic polypeptide
ETQMVQKMVLHRSIEHLADDVSSPKC

SEQ ID NO: 25565 - protein, 27 aa, Artificial Sequence
  Synthetic polypeptide
KHKWFRKWSCTEASNTSPTMSAAQNAE

SEQ ID NO: 25566 - protein, 27 aa, Artificial Sequence
  Synthetic polypeptide
NTNGSENGLAQKHRTPRRRCQQPKMLS

SEQ ID NO: 25567 - protein, 100 aa, Artificial Sequence
  Synthetic polypeptide
NTNGSENGLAQKHRTPRRRCQQPKMLSSPEDTMYYNQLNGTLEYQGSKRKPRKLGQIKVLDGEDEYYKSLSPVDCIPEENNSAHPSFFSSSSKGDSFAQH

SEQ ID NO: 25568 - protein, 26 aa, Artificial Sequence
  Synthetic polypeptide
GRAQWLMPVIPALWEAEAGGSRGLNK

SEQ ID NO: 25569 - protein, 714 aa, Artificial Sequence
  Synthetic polypeptide
SQHFGRLRLADHEASTNNESSNHSFGSLGSLSDKESETPEKKQSESSRGRKRKAENQNESSQGFPNLPVFQSLAYWEMGRTAGGKSIGGRGHKISDYFEYQGGNGSSPVRGIPPAIRSPQNSHSHSTPSSSVRPNSPSPTALAFGDHPIVQPKQLSFKIIQTDLTMLKLAALESNKIQDLEKKEGRIDDLLRANCDLRRQIDEQQKLLEKYKERLNKCISMSKKLLIEKSTQEKLSSREKSMQDRLRLGHFTTVRHGASFTEQWTDGFAFQNLVKQQEWVNQQREDIERQRKLLAKRKPPTANNSQAPSTNSEPKQRKNKAVNGAENDPFVRPNLPQLLTLAEYHEQEEIFKLRLGHLKKEEAEIQAELERLERVRNLHIRELKRINNEDNSQFKDHPTLNERYLLLHLLGRGGFSEVYKAFDLYEQRYAAVKIHQLNKSWRDEKKENYHKHACREYRIHKELDHPRIVKLYDYFSLDTDTFCTVLEYCEGNDLDFYLKQHKLMSEKEARSIVMQIVNALRYLNEIKPPIIHYDLKPGNILLVDGTACGEIKITDFGLSKIMDDDSYGVDGMDLTSQGAGTYWYLPPECFVVGKEPPKISNKVDVWSVGVIFFQCLYGRKPFGHNQSQQDILQENTILKATEVQFPVKPVVSSEAKAFIRRCLAYRKEDRFDVHQLANDPYLLPHMRRSNSSGNLHMAGLTASPTPPSSSIITY

SEQ ID NO: 25570 - protein, 23 aa, Artificial Sequence
  Synthetic polypeptide
GWRITRPQQITKALITVLEAWDL

SEQ ID NO: 25571 - protein, 693 aa, Artificial Sequence
  Synthetic polypeptide
SQHFGRLRLADHEASTNNESSNHSFGSLGSLSDKESETPEKKQSESSRGRKRKAENQNESSQGKSIGGRGHKISDYFEYQGGNGSSPVRGIPPAIRSPQNSHSHSTPSSSVRPNSPSPTALAFGDHPIVQPKQLSFKIIQTDLTMLKLAALESNKIQDLEKKEGRIDDLLRANCDLRRQIDEQQKLLEKYKERLNKCISMSKKLLIEKSTQEKLSSREKSMQDRLRLGHFTTVRHGASFTEQWTDGFAFQNLVKQQEWVNQQREDIERQRKLLAKRKPPTANNSQAPSTNSEPKQRKNKAVNGAENDPFVRPNLPQLLTLAEYHEQEEIFKLRLGHLKKEEAEIQAELERLERVRNLHIRELKRINNEDNSQFKDHPTLNERYLLLHLLGRGGFSEVYKAFDLYEQRYAAVKIHQLNKSWRDEKKENYHKHACREYRIHKELDHPRIVKLYDYFSLDTDTFCTVLEYCEGNDLDFYLKQHKLMSEKEARSIVMQIVNALRYLNEIKPPIIHYDLKPGNILLVDGTACGEIKITDFGLSKIMDDDSYGVDGMDLTSQGAGTYWYLPPECFVVGKEPPKISNKVDVWSVGVIFFQCLYGRKPFGHNQSQQDILQENTILKATEVQFPVKPVVSSEAKAFIRRCLAYRKEDRFDVHQLANDPYLLPHMRRSNSSGNLHMAGLTASPTPPSSSIITY

SEQ ID NO: 25572 - protein, 43 aa, Artificial Sequence
  Synthetic polypeptide
SQHFGRLRLADHEASTNNESSNHSFGSLGSLSDKESEKQLAGS

SEQ ID NO: 25573 - protein, 340 aa, Artificial Sequence
  Synthetic polypeptide
SQHFGRLRLADHEASTNNESSNHSFGSLGSLSDKESETPEKKQSESSRGRKRKAENQNESSQGKSIGGRGHKISDYFEYQGGNGSSPVRGIPPAIRSPQNSHSHSTPSSSVRPNSPSPTALAFGDHPIVQPKQLSFKIIQTDLTMLKLAALESNKIQDLEKKEGRIDDLLRANCDLRRQIDEQQKLLEKYKERLNKCISMSKKLLIEKSTQEKLSSREKSMQDRLRLGHFTTVRHGASFTEQWTDGFAFQNLVKQQEWVNQQREDIERQRKLLAKRKPPTANNSQAPSTNSEPKQRKNKAVNGAENDPFVRPNLPQLLTLAEYHEQEEIFKLRLGHLKKR

SEQ ID NO: 25574 - protein, 335 aa, Artificial Sequence
  Synthetic polypeptide
TGIIRDHMQWSKEEEAAARKKVKENSAVRVLLEEQVKYEREASKYWDTFYKIHKNKFFKDRNWLLREFPEILPVDQKPEEKARESSWDHVKTSATNRFSRMHCPTVPDEKNHYEKSSGSSEGQSKTESDFSNLDSEKHKKGPMETGLFPGSNATFRILEVGCGAGNSVFPILNTLENSPESFLYCCDFASGAVELVKSHSSYRATQCFAFVHDVCDDGLPYPFPDGILDVILLVFVLSSIHPDRMQGVVNRLSKLLKPGGMLLFRDYGRYDKTQLRFKKGHCLSENFYVRGDGTRAYFFTKGEVHSMFCKASLDEKQNLVDRRLQVNRKKQVKMH

SEQ ID NO: 25575 - protein, 18 aa, Artificial Sequence
  Synthetic polypeptide
LGITCSGLRKKKQQPEKK

SEQ ID NO: 25576 - protein, 248 aa, Artificial Sequence
  Synthetic polypeptide
TGIIRDHMQWSKEEEAAARKKVKENSAVRVLLEEQVKYEREASKYWDTFYKIHKNKFFKDRNWLLREFPEILPVDQKPEEKARESSWDHVKTSATNRFSRMHCPTVPDEKNHYEKSSGSSEGQSKTESDFSNLDSEKHKKGPMETGLFPGSNATFRILEVGCGAGNSVFPILNTLENSPESFLYCCDFASGAVELVKSHSSYRATQCFAFVHDVCDDGLPYPFPDGILDVILLVFVLSSIHPDRTLFI

SEQ ID NO: 25577 - protein, 183 aa, Artificial Sequence
  Synthetic polypeptide
TGIIRDHMQWSKEEEAAARKKVKENSAVRVLLEEQVKYEREASKYWDTFYKIHKNKFFKDRNWLLREFPEILPVDQKPEEKARESSWDHVKTSATNRFSRMHCPTVPDEKNHYEKSSGSSEGQSKTESDFSNLDSEKHKKGPMETGLFPGSNATFRILESHSSYRATQCFAFVHDVCDDGLPY

SEQ ID NO: 25578 - protein, 110 aa, Artificial Sequence
  Synthetic polypeptide
TGIIRDHMQWSKEEEAAARKKVKENSAVRVLLEEQVKYEREASKYWDTFYKIHKNKFFKDRNWLLREFPEILPVDQKPEEKARESSWDHVKTSATNRFSRMHCPTVPDEK

SEQ ID NO: 25579 - protein, 62 aa, Artificial Sequence
  Synthetic polypeptide
TGIIRDHMQWSKEEEAAARKKVKENSAVRVLLEEQVKYEREASKYWDTFYKIHKNKFFKDRN

SEQ ID NO: 25580 - protein, 40 aa, Artificial Sequence
  Synthetic polypeptide
TGIIRDHMQWSKEEEAAARKKVKENSAVRVLLEEQVKYER

SEQ ID NO: 25581 - protein, 188 aa, Artificial Sequence
  Synthetic polypeptide
KEDWIWDQNFSLLTNMPPLLFEVSSLENAFQIGGHPWHYIVTPNKKKQKGVFHICALKDNSLNENVLTVTASGRVVKKSFNLLDDDPEQETFKIVDYEDELDLLSVVAVTQIDAEGKAHLDFHCNEYGTLLKSIPLVESWDVTYSHEVYFDRDLVLHIEQKPNRVFSCYVYQMICDTGEEEETINRSC

SEQ ID NO: 25582 - protein, 43 aa, Artificial Sequence
  Synthetic polypeptide
LTCHHCSLRCHPWRMLFRLEAILGTTSSHLIRRNRKEFSIFVP

SEQ ID NO: 25583 - protein, 255 aa, Artificial Sequence
  Synthetic polypeptide
KEDWIWDQNFSLLTNMPPLLFEVSSLENAFQIGGHPWHYIVTPNKKKQKGVFHICALKDNSLAKNGIQEMDCCSLESDWIYFHPDASGRIIHVGPNQVKVLKLTEIENNSSQHQISEDFVILANRENHKNENVLTVTASGRVVKKSFNLLDDDPEQETFKIVDYEDELDLLSVVAVTQIDAEGKAHLDFHCNEYGTLLKSIPLVESWDVTYSHEVYFDRDLVLHIEQKPNRVFSCYVYQMICDTGEEEETINRSC

SEQ ID NO: 25584 - protein, 198 aa, Artificial Sequence
  Synthetic polypeptide
KEDWIWDQNFSLLTSKGDTLLLIGDMPPLLFEVSSLENAFQIGGHPWHYIVTPNKKKQKGVFHICALKDNSLNENVLTVTASGRVVKKSFNLLDDDPEQETFKIVDYEDELDLLSVVAVTQIDAEGKAHLDFHCNEYGTLLKSIPLVESWDVTYSHEVYFDRDLVLHIEQKPNRVFSCYVYQMICDTGEEEETINRSC

SEQ ID NO: 25585 - protein, 44 aa, Artificial Sequence
  Synthetic polypeptide
LVTCHHCSLRCHPWRMLFRLEAILGTTSSHLIRRNRKEFSIFVP

SEQ ID NO: 25586 - protein, 265 aa, Artificial Sequence
  Synthetic polypeptide
KEDWIWDQNFSLLTSKGDTLLLIGDMPPLLFEVSSLENAFQIGGHPWHYIVTPNKKKQKGVFHICALKDNSLAKNGIQEMDCCSLESDWIYFHPDASGRIIHVGPNQVKVLKLTEIENNSSQHQISEDFVILANRENHKNENVLTVTASGRVVKKSFNLLDDDPEQETFKIVDYEDELDLLSVVAVTQIDAEGKAHLDFHCNEYGTLLKSIPLVESWDVTYSHEVYFDRDLVLHIEQKPNRVFSCYVYQMICDTGEEEETINRSC

SEQ ID NO: 25587 - protein, 40 aa, Artificial Sequence
  Synthetic polypeptide
GRAWWLIPVIPALWEAKAGRSRGQEIETILANTVSQLHLW

SEQ ID NO: 25588 - protein, 34 aa, Artificial Sequence
  Synthetic polypeptide
SQHFGRPRRADHEVRRSRPSWLTRCPSCISGDPC

SEQ ID NO: 25589 - protein, 151 aa, Artificial Sequence
  Synthetic polypeptide
HGVPAASLVTPADVIKTRLQVAARAGQTTYSGVIDCFRKILREEGPSAFWKGTAARVFRSSPQFGVTLVTYELLQRWFYIDFGGLKPAGSEPTPKSRIADLPPANPDHIGGYRLATATFAGIENKFGLYLPKFKSPSVAVVQPKAAVAATQ

SEQ ID NO: 25590 - protein, 151 aa, Artificial Sequence
  Synthetic polypeptide
QSVPAASLVTPADVIKTRLQVAARAGQTTYSGVIDCFRKILREEGPSAFWKGTAARVFRSSPQFGVTLVTYELLQRWFYIDFGGLKPAGSEPTPKSRIADLPPANPDHIGGYRLATATFAGIENKFGLYLPKFKSPSVAVVQPKAAVAATQ

SEQ ID NO: 25591 - protein, 20 aa, Artificial Sequence
  Synthetic polypeptide
AEMTPLYSSLGDRVSQLHLW

SEQ ID NO: 25592 - protein, 20 aa, Artificial Sequence
  Synthetic polypeptide
HHCTPAWVTECPSCISGDPC

SEQ ID NO: 25593 - protein, 14 aa, Artificial Sequence
  Synthetic polypeptide
AWEVKAAVSQLHLW

SEQ ID NO: 25594 - protein, 32 aa, Artificial Sequence
  Synthetic polypeptide
SQPATREAEVGGSPEPGRSRLRCPSCISGDPC

SEQ ID NO: 25595 - protein, 180 aa, Artificial Sequence
  Synthetic polypeptide
PGVVVRACSPSQLPGRLRWEDHLSLGGQGCGVPAASLVTPADVIKTRLQVAARAGQTTYSGVIDCFRKILREEGPSAFWKGTAARVFRSSPQFGVTLVTYELLQRWFYIDFGGLKPAGSEPTPKSRIADLPPANPDHIGGYRLATATFAGIENKFGLYLPKFKSPSVAVVQPKAAVAATQ

SEQ ID NO: 25596 - protein, 14 aa, Artificial Sequence
  Synthetic polypeptide
GASPPGSHPVREGG

SEQ ID NO: 25597 - protein, 39 aa, Artificial Sequence
  Synthetic polypeptide
EVRSPSARQPPRLGSEERLRPAATPSGREVDLLSRVFGI

SEQ ID NO: 25598 - protein, 635 aa, Artificial Sequence
  Synthetic polypeptide
GAPPPGSRPVWEVRSVSARQPPRPGGRLISYQEFLAFESVLCAPDSMFIVAFQLFDKSGNGEVTFENVKEIFGQTIIHHHIPFNWDCEFIRLHFGHNRKKHLNYTEFTQFLQELQLEHARQAFALKDKSKSGMISGLDFSDIMVTIRSHMLTPFVEENLVSAAGGSISHQVSFSYFNAFNSLLNNMELVRKIYSTLAGTRKDVEVTKEEFAQSAIRYGQVTPLEIDILYQLADLYNASGRLTLADIERIAPLAEGALPYNLAELQRQQSPGLGRPIWLQIAESAYRFTLGSVAGAVGATAVYPIDLVKTRMQNQRGSGSVVGELMYKNSFDCFKKVLRYEGFFGLYRGLIPQLIGVAPEKAIKLTVNDFVRDKFTRRDGSVPLPAEVLAGGCAGGSQVIFTNPLEIVKIRLQVAGEITTGPRVSALNVLRDLGIFGLYKGAKACFLRDIPFSAIYFPVYAHCKLLLADENGHVGGLNLLAAGAMAGVPAASLVTPADVIKTRLQVAARAGQTTYSGVIDCFRKILREEGPSAFWKGTAARVFRSSPQFGVTLVTYELLQRWFYIDFGGLKPAGSEPTPKSRIADLPPANPDHIGGYRLATATFAGIENKFGLYLPKFKSPSVAVVQPKAAVAATQ

SEQ ID NO: 25599 - protein, 167 aa, Artificial Sequence
  Synthetic polypeptide
GAPPPGSRPVWEVRSVSARQPPRPGGRLISYQEFLAFESVLCAPDSMFIVAFQLFDKSGNGEVTFGGVLWPHRWYSSSFQAHSWNRHGGSLGEECQPRSEKMSKKFLDRLLFIIISLLTGIVNLSDCILGITGRSILTTQNSRSFSRSCNWNMQDKPLHSKTKAKVA

SEQ ID NO: 25600 - protein, 136 aa, Artificial Sequence
  Synthetic polypeptide
GAPPPGSRPVWEVRSVSARQPPRPGGRLISYQEFLAFESVLCAPDSMFIVAFQLFDKSGNGEVTFGFWIWGKGGVLWPHRWYSSSFQAHSWNRHGGSLGEECQPRSEGRNESCIPFQRKDENPISPVTSNAFFQLC

SEQ ID NO: 25601 - protein, 25 aa, Artificial Sequence
  Synthetic polypeptide
GASLPGRPIREVRRPSAWQLPRLRS

SEQ ID NO: 25602 - protein, 11 aa, Artificial Sequence
  Synthetic polypeptide
EVDLLSRVFGI

SEQ ID NO: 25603 - protein, 646 aa, Artificial Sequence
  Synthetic polypeptide
GAPLPSRDPVWEVRSVSAWPPHQRSEETLRLATAPSEKLISYQEFLAFESVLCAPDSMFIVAFQLFDKSGNGEVTFENVKEIFGQTIIHHHIPFNWDCEFIRLHFGHNRKKHLNYTEFTQFLQELQLEHARQAFALKDKSKSGMISGLDFSDIMVTIRSHMLTPFVEENLVSAAGGSISHQVSFSYFNAFNSLLNNMELVRKIYSTLAGTRKDVEVTKEEFAQSAIRYGQVTPLEIDILYQLADLYNASGRLTLADIERIAPLAEGALPYNLAELQRQQSPGLGRPIWLQIAESAYRFTLGSVAGAVGATAVYPIDLVKTRMQNQRGSGSVVGELMYKNSFDCFKKVLRYEGFFGLYRGLIPQLIGVAPEKAIKLTVNDFVRDKFTRRDGSVPLPAEVLAGGCAGGSQVIFTNPLEIVKIRLQVAGEITTGPRVSALNVLRDLGIFGLYKGAKACFLRDIPFSAIYFPVYAHCKLLLADENGHVGGLNLLAAGAMAGVPAASLVTPADVIKTRLQVAARAGQTTYSGVIDCFRKILREEGPSAFWKGTAARVFRSSPQFGVTLVTYELLQRWFYIDFGGLKPAGSEPTPKSRIADLPPANPDHIGGYRLATATFAGIENKFGLYLPKFKSPSVAVVQPKAAVAATQ

SEQ ID NO: 25604 - protein, 178 aa, Artificial Sequence
  Synthetic polypeptide
GAPLPSRDPVWEVRSVSAWPPHQRSEETLRLATAPSEKLISYQEFLAFESVLCAPDSMFIVAFQLFDKSGNGEVTFGGVLWPHRWYSSSFQAHSWNRHGGSLGEECQPRSEKMSKKFLDRLLFIIISLLTGIVNLSDCILGITGRSILTTQNSRSFSRSCNWNMQDKPLHSKTKAKVA

SEQ ID NO: 25605 - protein, 147 aa, Artificial Sequence
  Synthetic polypeptide
GAPLPSRDPVWEVRSVSAWPPHQRSEETLRLATAPSEKLISYQEFLAFESVLCAPDSMFIVAFQLFDKSGNGEVTFGFWIWGKGGVLWPHRWYSSSFQAHSWNRHGGSLGEECQPRSEGRNESCIPFQRKDENPISPVTSNAFFQLC

SEQ ID NO: 25606 - protein, 43 aa, Artificial Sequence
  Synthetic polypeptide
GRTLRITSKFEFWAHHLVVGCPSTKPLSKPELLNDLVLWRNFW

SEQ ID NO: 25607 - protein, 8 aa, Artificial Sequence
  Synthetic polypeptide
DSCISWFS

SEQ ID NO: 25608 - protein, 370 aa, Artificial Sequence
  Synthetic polypeptide
GEGKDLLGREERTSWKVDNSLYLDRCWLHQYMHSSGLIEWYLKIRAYHGSHRIFSSPLNHIYLHKQSSSQQRRNFFFRRQRDISHSIVLPAAVSSAHPVPKHIKKPDYVTTGIVPDWGDSIEVKNEDQIQGLHQACQLARHVLLLAGKSLKVDMTTEEIDALVHREIISHNAYPSPLGYGGFPKSVCTSVNNVLCHGIPDSRPLQDGDIINIDVTVYYNGYHGDTSETFLVGNVDECGKKLVEVARRCRDEAIAACRAGAPFSVIGNTISHITHQNGFQVCPHFVGHGIGSYFHGHPEIWHHANDSDLPMEEGMAFTIEPIITEGSPEFKVLEDAWTVVSLDNQRSAQFEHTVLITSRGAQILTKLPHEA

SEQ ID NO: 25609 - protein, 86 aa, Artificial Sequence
  Synthetic polypeptide
VRAKICLEGRREPPGRLIIVCILIDVGYTSTCIRQDSSNGTLRFVHIMVLIEFSLHHSIISTYTSSQAVNKEEISFFGDKEIFHTV

SEQ ID NO: 25610 - protein, 1415 aa, Artificial Sequence
  Synthetic polypeptide
RLRDLRFNRIREIQPGAFRRLRNLNTLLLNNNQIKRIPSGAFEDLENLKYLYLYKNEIQSIDRQAFKGLASLEQLYLHFNQIETLDPDSFQHLPKLERLFLHNNRITHLVPGTFNHLESMKRLRLDSNTLHCDCEILWLADLLKTYAESGNAQAAAICEYPRRIQGRSVATITPEELNCERPRITSEPQDADVTSGNTVYFTCRAEGNPKPEIIWLRNNNELSMKTDSRLNLLDDGTLMIQNTQETDQGIYQCMAKNVAGEVKTQEVTLRYFGSPARPTFVIQPQNTEVLVGESVTLECSATGHPPPRISWTRGDRTPLPVDPRVNITPSGGLYIQNVVQGDSGEYACSATNNIDSVHATAFIIVQALPQFTVTPQDRVVIEGQTVDFQCEAKGNPPPVIAWTKGGSQLSVDRRHLVLSSGTLRISGVALHDQGQYECQAVNIIGSQKVVAHLTVQPRVTPVFASIPSDTTVEVGANVQLPCSSQGEPEPAITWNKDGVQVTESGKFHISPEGFLTINDVGPADAGRYECVARNTIGSASVSMVLSVNVPDVSRNGDPFVATSIVEAIATVDRAINSTRTHLFDSRPRSPNDLLALFRYPRDPYTVEQARAGEIFERTLQLIQEHVQHGLMVDLNGTSYHYNDLVSPQYLNLIANLSGCTAHRRVNNCSDMCFHQKYRTHDGTCNNLQHPMWGASLTAFERLLKSVYENGFNTPRGINPHRLYNGHALPMPRLVSTTLIGTETVTPDEQFTHMLMQWGQFLDHDLDSTVVALSQARFSDGQHCSNVCSNDPPCFSVMIPPNDSRARSGARCMFFVRSSPVCGSGMTSLLMNSVYPREQINQLTSYIDASNVYGSTEHEARSIRDLASHRGLLRQGIVQRSGKPLLPFATGPPTECMRDENESPIPCFLAGDHRANEQLGLTSMHTLWFREHNRIATELLKLNPHWDGDTIYYETRKIVGAEIQHITYQHWLPKILGEVGMRTLGEYHGYDPGINAGIFNAFATAAFRFGHTLVNPLLYRLDENFQPIAQDHLPLHKAFFSPFRIVNEGGIDPLLRGLFGVAGKMRVPSQLLNTELTERLFSMAHTVALDLAAINIQRGRDHGIPPYHDYRVYCNLSAAHTFEDLKNEIKNPEIREKLKRLYGSTLNIDLFPALVVEDLVPGSRLGPTLMCLLSTQFKRLRDGDRLWYENPGVFSPAQLTQIKQTSLARILCDNADNITRVQSDVFRVAEFPHGYGSCDEIPRVDLRVWQDCCEDCRTRGQFNAFSYHFRGRRSLEFSYQEDKPTKKTRPRKIPSVGRQGEHLSNSTSAFSTRSDASGTNDFREFVLEMQKTITDLRTQIKKLESRLSTTECVDAGGESHANNTKWKKDACTICECKDGQVTCFVEACPPATCAVPVNIPGACCPVCLQKRAEEKP

SEQ ID NO: 25611 - protein, 34 aa, Artificial Sequence
  Synthetic polypeptide
KQGSLPAKRRKLSEGSEIFALTESERSNLGHSGG

SEQ ID NO: 25612 - protein, 28 aa, Artificial Sequence
  Synthetic polypeptide
SVSSQQHKSKVLYQPKEENSLKAQRSSL

SEQ ID NO: 25613 - protein, 663 aa, Artificial Sequence
  Synthetic polypeptide
RLRDLRFNRIREIQPGAFRRLRNLNTLLLNNNQIKRIPSGAFEDLENLKYLYLYKNEIQSIDRQAFKGLASLEQLYLHFNQIETLDPDSFQHLPKLERLFLHNNRITHLVPGTFNHLESMKRLRLDSNTLHCDCEILWLADLLKTYAESGNAQAAAICEYPRRIQGRSVATITPEELNCERPRITSEPQDADVTSGNTVYFTCRAEGNPKPEIIWLRNNNELSMKTDSRLNLLDDGTLMIQNTQETDQGIYQCMAKNVAGEVKTQEVTLRYFGSPARPTFVIQPQNTEVLVGESVTLECSATGHPPPRISWTRGDRTPLPVDPRVNITPSGGLYIQNVVQGDSGEYACSATNNIDSVHATAFIIVQALPQFTVTPQDRVVIEGQTVDFQCEAKGNPPPVIAWTKGGSQLSVDRRHLVLSSGTLRISGVALHDQGQYECQAVNIIGSQKVVAHLTVQPRVTPVFASIPSDTTVEVGANVQLPCSSQGEPEPAITWNKDGVQVTESGKFHISPEGFLTINDVGPADAGRYECVARNTIGSASVSMVLSVNVPDVSRNGDPFVATSIVEAIATVDRAINSTRTHLFDSRPRSPNDLLALFRYPRDPYTVEQARAGEIFERTLQLIQEHVQHGLMVDLNGTSQCQSLFFLLHGLSNGVEHASVKSHS

SEQ ID NO: 25614 - protein, 160 aa, Artificial Sequence
  Synthetic polypeptide
RLRDLRFNRIREIQPGAFRRLRNLNTLLLNNNQIKRIPSGAFEDLENLKYLYLHFNQIETLDPDSFQHLPKLERLFLHNNRITHLVPGTFNHLESMKRLRLDSNTLHCDCEILWLADLLKTYAESGNAQAAAICEYPRRIQGRSVATITPEELNCERPRI

SEQ ID NO: 25615 - protein, 17 aa, Artificial Sequence
  Synthetic polypeptide
ITQSQWGLGTQVARIEC

SEQ ID NO: 25616 - protein, 143 aa, Artificial Sequence
  Synthetic polypeptide
TSFLYKLPSLSGALELKLQELSAEERQKYLEANMTQSALPKIIKAGFAALQLEYFFTAGPDEVRAWTIRKGTKAPQAAGKIHTDFEKGFIMAEVMKYEDFKEEGSENAVKAAGKYRQQGRNYIVEDGDIIFFKFNTPQQPKKK

SEQ ID NO: 25617 - protein, 75 aa, Artificial Sequence
  Synthetic polypeptide
VLMRSGCLKVCSTYTFALFLLLRLCLLPVYLCHDWKFPEASPAVPHSLQNCEPVRPLFFINYPVSVGPWNSSCKN

SEQ ID NO: 25618 - protein, 2 aa, Artificial Sequence
  Synthetic polypeptide
AS

SEQ ID NO: 25619 - protein, 198 aa, Artificial Sequence
  Synthetic polypeptide
KCVAPTPLLSSSFSGCACFLFTFAMIGSFLRPPQPCLTACRTVSQLIKIKEWVDKYDPGALVIPFSGALELKLQELSAEERQKYLEANMTQSALPKIIKAGFAALQLEYFFTAGPDEVRAWTIRKGTKAPQAAGKIHTDFEKGFIMAEVMKYEDFKEEGSENAVKAAGKYRQQGRNYIVEDGDIIFFKFNTPQQPKKK

SEQ ID NO: 25620 - protein, 57 aa, Artificial Sequence
  Synthetic polypeptide
VLMRSGCLKVCSTYTFALFLLLRLCLLPVYLCHDWKFPEASPAVPHSLQNCEPVDKN

SEQ ID NO: 25621 - protein, 63 aa, Artificial Sequence
  Synthetic polypeptide
KCVAPTPLLSSSFSGCACFLFTFAMIGSFLRPPQPCLTACRTVSQLIKIKEWVDKYDPGALVI

SEQ ID NO: 25622 - protein, 54 aa, Artificial Sequence
  Synthetic polypeptide
KCVAPTPLLSSSFSGCACFLFTFAMIGSFLRPPQPCLTACRTWGLGTQVARIEC

SEQ ID NO: 25623 - protein, 144 aa, Artificial Sequence
  Synthetic polypeptide
GLPSRASQPAELGALELKLQELSAEERQKYLEANMTQSALPKIIKAGFAALQLEYFFTAGPDEVRAWTIRKGTKAPQAAGKIHTDFEKGFIMAEVMKYEDFKEEGSENAVKAAGKYRQQGRNYIVEDGDIIFFKFNTPQQPKKK

SEQ ID NO: 25624 - protein, 60 aa, Artificial Sequence
  Synthetic polypeptide
VLMRSGCLKVCSTYTFALFLLLRLCLLPVYLCHDWKFPEASPAVPHSLQNLGPWNSSCKN

SEQ ID NO: 25625 - protein, 31 aa, Artificial Sequence
  Synthetic polypeptide
GWAWWLMPVIPALWRAEVLLKMMISRTLKEV

SEQ ID NO: 25626 - protein, 10 aa, Artificial Sequence
  Synthetic polypeptide
SQHFGGLRCF

SEQ ID NO: 25627 - protein, 62 aa, Artificial Sequence
  Synthetic polypeptide
LLKRKVNCKTASGRSFRSYPEEAIVIIGDDSSMGVIAPEDLPVGQDVEVEDSDTDDPHPVCF

SEQ ID NO: 25628 - protein, 304 aa, Artificial Sequence
  Synthetic polypeptide
EMTAPWVLLPLKTFQWDKMWRWKTVTLMILTLCAFEDDDITHVEGSVDPIRDIEIIHEELQLKDEEMIGPIIDKLEKVAVRGGDKKLKPEYDIMCKVKSWVIDQKKPVRFYHDWNDKEIEVLNKHLFLTSKPMVYLVNLSEKDYIRKKNKWLIKIKEWVDKYDPGALVIPFSGALELKLQELSAEERQKYLEANMTQSALPKIIKAGFAALQLEYFFTAGPDEVRAWTIRKGTKAPQAAGKIHTDFEKGFIMAEVMKYEDFKEEGSENAVKAAGKYRQQGRNYIVEDGDIIFFKFNTPQQPKKK

SEQ ID NO: 25629 - protein, 18 aa, Artificial Sequence
  Synthetic polypeptide
SSPCVLLKMMISRTLKEV

SEQ ID NO: 25630 - protein, 186 aa, Artificial Sequence
  Synthetic polypeptide
EMTAPWVLLPLKTFQWDKMWRWKTVTLMILTLCAFEDDDITHVEGSVDPIRDIEIIHEELQLKDEEMIGPIIDKLEKVAVRGGDKKLKPEYDIMCKVKSWVIDQKKPVRFYHDWNDKEIEVLNKHLFLTSKPMVYLVNLSEKDYIRKKNKWLLESTDNKAEIILLKMEILSSSNLTHLNNRRRNKI

SEQ ID NO: 25631 - protein, 275 aa, Artificial Sequence
  Synthetic polypeptide
YIAGAFEDDDITHVEGSVDPIRDIEIIHEELQLKDEEMIGPIIDKLEKVAVRGGDKKLKPEYDIMCKVKSWVIDQKKPVRFYHDWNDKEIEVLNKHLFLTSKPMVYLVNLSEKDYIRKKNKWLIKIKEWVDKYDPGALVIPFSGALELKLQELSAEERQKYLEANMTQSALPKIIKAGFAALQLEYFFTAGPDEVRAWTIRKGTKAPQAAGKIHTDFEKGFIMAEVMKYEDFKEEGSENAVKAAGKYRQQGRNYIVEDGDIIFFKFNTPQQPKKK

SEQ ID NO: 25632 - protein, 15 aa, Artificial Sequence
  Synthetic polypeptide
QVLLKMMISRTLKEV

SEQ ID NO: 25633 - protein, 5 aa, Artificial Sequence
  Synthetic polypeptide
YSRCF

SEQ ID NO: 25634 - protein, 157 aa, Artificial Sequence
  Synthetic polypeptide
YIAGAFEDDDITHVEGSVDPIRDIEIIHEELQLKDEEMIGPIIDKLEKVAVRGGDKKLKPEYDIMCKVKSWVIDQKKPVRFYHDWNDKEIEVLNKHLFLTSKPMVYLVNLSEKDYIRKKNKWLLESTDNKAEIILLKMEILSSSNLTHLNNRRRNKI

SEQ ID NO: 25635 - protein, 376 aa, Artificial Sequence
  Synthetic polypeptide
LTQSTFQACKLHSWKSTFFNVLTNSQASAENFPFCTIDPNESRVPVPDERFDFLCQYHKPASKIPAFLNVVDIAGLVKGAHNGQGLGNAFLSHISACDGIFHLTRAFEDDDITHVEGSVDPIRDIEIIHEELQLKDEEMIGPIIDKLEKVAVRGGDKKLKPEYDIMCKVKSWVIDQKKPVRFYHDWNDKEIEVLNKHLFLTSKPMVYLVNLSEKDYIRKKNKWLIKIKEWVDKYDPGALVIPFSGALELKLQELSAEERQKYLEANMTQSALPKIIKAGFAALQLEYFFTAGPDEVRAWTIRKGTKAPQAAGKIHTDFEKGFIMAEVMKYEDFKEEGSENAVKAAGKYRQQGRNYIVEDGDIIFFKFNTPQQPKKK

SEQ ID NO: 25636 - protein, 55 aa, Artificial Sequence
  Synthetic polypeptide
KIILVYPECTMFIKSTVVCSNVLGPHIHSPSLIDSPRAPSRPASSTHGNLLSSMC

SEQ ID NO: 25637 - protein, 34 aa, Artificial Sequence
  Synthetic polypeptide
ALTFTHHHSLTHPEHLPGLQAPLMEIYFLQCVNQ

SEQ ID NO: 25638 - protein, 258 aa, Artificial Sequence
  Synthetic polypeptide
LTQSTFQACKLHSWKSTFFNVLTNSQASAENFPFCTIDPNESRVPVPDERFDFLCQYHKPASKIPAFLNVVDIAGLVKGAHNGQGLGNAFLSHISACDGIFHLTRAFEDDDITHVEGSVDPIRDIEIIHEELQLKDEEMIGPIIDKLEKVAVRGGDKKLKPEYDIMCKVKSWVIDQKKPVRFYHDWNDKEIEVLNKHLFLTSKPMVYLVNLSEKDYIRKKNKWLLESTDNKAEIILLKMEILSSSNLTHLNNRRRNKI

SEQ ID NO: 25639 - protein, 96 aa, Artificial Sequence
  Synthetic polypeptide
LTQSTFQACKLHSWKSTFFNVLTNSQASAENFPFCTIDPNESRVPVPDERFDFLCQYHKPASKIPAFLNVVDIAGLVKGAHNGQGLGNAFLSHISA

SEQ ID NO: 25640 - protein, 24 aa, Artificial Sequence
  Synthetic polypeptide
FLHFHLRYGWQNRKYHMIRRNKKN

SEQ ID NO: 25641 - protein, 457 aa, Artificial Sequence
  Synthetic polypeptide
RSQDGRIGTALVYSSQRERRRRGVISAFPSEVWMAEQKISYDKKKQEELMQQYLKEQESYDNRLLMGDERVKNGLNFMYEAPPGAKKENKEKEETEGETEYKFEWQKGAPREKYAKDDMNIRDQPFGIQVRNVRCIKCHKWGHVNTDRECPLFGLSGINASSVPTDGSGPSMHPSELIAEMRNSGFALKRNVLGRNLTANDPSQEYVASEGEEDPEVEFLKSLTTKQKQKLLRKLDRLEKKKKKKDRKKKKFQKSRSKHKKHKSSSSSSSSSSSSSSTETSESSSESESNNKEKKIQRKKRKKNKCSGHNNSDSEEKDKSKKRKLHEELSSSHHNREKAKEKPRFLKHESSREDSKWSHSDSDKKSRTHKHSPEKRGSERKEGSSRSHGREERSRRSRSRSPGSYKQRETRKRAQRNPGEEQSRRNDSRSHGTDLYRGEKMYREHPGGTHTKVTQRE

SEQ ID NO: 25642 - protein, 209 aa, Artificial Sequence
  Synthetic polypeptide
RSQDGRIGTALVYSSQRERRRRGVISAFPSEVWMAEQKISYDKKKQEELMQQYLKEQESYDNRLLMGDERVKNGLNFMYEAPPGAKKENKEKEETEGETEYKFEWQKGAPREKYAKDDMNIRDQPFGIQVRNVRCIKCHKWGHVNTDRECPLFGLSGINASSVPTDGSDAVLQIEGFWAIDAPLGANSGDEKQWVCTETKCTGEKLDRK

SEQ ID NO: 25643 - protein, 29 aa, Artificial Sequence
  Synthetic polypeptide
LQENKLRAPTDSTLWWKTDQSIMEESFMA

SEQ ID NO: 25644 - protein, 425 aa, Artificial Sequence
  Synthetic polypeptide
FYIMVENRPKYYGREFHGMISREAADQLLIVAEGSYLIRESQRQPGTYTLALRFGSQTRNFRLYYDGKHFVGEKRFESIHDLVTDGLITLYIETKAAEYIAKMTINPIYEHVGYTTLNREPAYKKHMPVLKETHDERDSTGQDGVSEKRLTSLVRRATLKENEQIPKYEKIHNFKVHTFRGPHWCEYCANFMWGLIAQGVKCADCGLNVHKQCSKMVPNDCKPDLKHVKKVYSCDLTTLVKAHTTKRPMVVDMCIREIESRGLNSEGLYRVSGFSDLIEDVKMAFDRDGEKADISVNMYEDINIITGALKLYFRDLPIPLITYDAYPKFIESAKIMDPDEQLETLHEALKLLPPAHCETLRYLMAHLKRVTLHEKENLMNAENLGIVFGPTLMRSPELDAMAALNDIRYQRLVVELLIKNEDILF

SEQ ID NO: 25645 - protein, 399 aa, Artificial Sequence
  Synthetic polypeptide
FYIMVENRPKYYGREFHGMISREAADQLLIVAEGSYLIRESQRQPGTYTLALRFGSQTRNFRLYYDGKHFVGEKRFESIHDLVTDGLITLYIETKAAEYIAKMTINPIYEHVGYTTLNREPAYKKHMPVLKETHDERDSTGQDGVSEKRVHTFRGPHWCEYCANFMWGLIAQGVKCADCGLNVHKQCSKMVPNDCKPDLKHVKKVYSCDLTTLVKAHTTKRPMVVDMCIREIESRGLNSEGLYRVSGFSDLIEDVKMAFDRDGEKADISVNMYEDINIITGALKLYFRDLPIPLITYDAYPKFIESAKIMDPDEQLETLHEALKLLPPAHCETLRYLMAHLKRVTLHEKENLMNAENLGIVFGPTLMRSPELDAMAALNDIRYQRLVVELLIKNEDILF

SEQ ID NO: 25646 - protein, 56 aa, Artificial Sequence
  Synthetic polypeptide
SVTVSHHPQMGPSSCRKTSSGLLLILHYGGKQTKVLWKRVSWHDLQRSSRPALDCG

SEQ ID NO: 25647 - protein, 29 aa, Artificial Sequence
  Synthetic polypeptide
LQENKLRAPTDSTLWWKTDQSIMEESFMA

SEQ ID NO: 25648 - protein, 56 aa, Artificial Sequence
  Synthetic polypeptide
SVTVSHYPQMRLSSCKKTSSGLPLILHYGGKQTKVLWKRVSWHDLQRSSRPALDCG

SEQ ID NO: 25649 - protein, 425 aa, Artificial Sequence; identical to SEQ ID NO: 25644
  Synthetic polypeptide

SEQ ID NO: 25650 - protein, 399 aa, Artificial Sequence; identical to SEQ ID NO: 25645
  Synthetic polypeptide

SEQ ID NO: 25651 - protein, 35 aa, Artificial Sequence
  Synthetic polypeptide
CIYLKILNSLLKTTQKRNLQAQIASLAIQGPVEYE

SEQ ID NO: 25652 - protein, 497 aa, Artificial Sequence
  Synthetic polypeptide
LHWQYKDLWNMSDDKPFLCTAPGCGQRFTNEDHLAVHKHKHEMTLKFGPARNDSVIVADQTPTPTRFLKNCEEVGLFNELASPFENEFKKASEDDIKKMPLDLSPLATPIIRSKIEEPSVVETTHQDSPLPHPESTTSDEKEVPLAQTAQPTSAIVRPASLQVPNVLLTSSDSSVIIQQAVPSPTSSTVITQAPSSNRPIVPVPGPFPLLLHLPNGQTMPVAIPASITSSNVHVPAAVPLVRPVTMVPSVPGIPGPSSPQPVQSEAKMRLKAALTQQHPPVTNGDTVKGHGSGLVRTQSEESRPQSLQQPATSTTETPASPAHTTPQTQSTSGRRRRAANEDPDEKRRKFLERNRAAASRCRQKRKVWVQSLEKKAEDLSSLNGQLQSEVTLLRNEVAQLKQLLLAHKDCPVTAMQKKSGYHTADKDDSSEDISVPSSPHTEAIQHSSVSTSNGVSSTSKAEAVATSVLTQMADQSTEPALSQIVMAPSSQSQPSGS

SEQ ID NO: 25653 - protein, 22 aa, Artificial Sequence
  Synthetic polypeptide
NHPEEKPPGSDSFTGNTRTCGI

SEQ ID NO: 25654 - protein, 387 aa, Artificial Sequence
  Synthetic polypeptide
LHWQYKDLWNMSDDKPFLCTAPGCGQRFTNEDHLAVHKHKHEMTLKFGPARNDSVIVADQTPTPTRFLKNCEEVGLFNELASPFENEFKKASEDDIKKMPLDLSPLATPIIRSKIEEPSVVETTHQDSPLPHPESTTSDEKEVPLAQTAQPTSAIVRPASLQVPNVLLTSSDSSVIIQQAVPSPTSSTVITQAPSSNRPIVPVPGPFPLLLHLPNGQTMPVAIPASITSSNVHVPAAVPLVRPVTMVPSVPGIPGPSSPQPVQSEAKMRLKAALTQQHPPVTNGDTVKGHGSGLVRTQSEESRPQSLQQPATSTTETPASPAHTTPQTQSTSGRRRRAANEDPDEKRRKFLERNRAAASRCRQKRKVWVQSLEKKAEDLSSLNGQLQ

SEQ ID NO: 25655 - protein, 136 aa, Artificial Sequence
  Synthetic polypeptide
LHWQYKDLWNMSDDKPFLCTAPGCGQSEVTLLRNEVAQLKQLLLAHKDCPVTAMQKKSGYHTADKDDSSEDISVPSSPHTEAIQHSSVSTSNGVSSTSKAEAVATSVLTQMADQSTEPALSQIVMAPSSQSQPSGS

SEQ ID NO: 25656 - protein, 35 aa, Artificial Sequence
  Synthetic polypeptide
LHWQYKDLWNMSDDKPFLCTAPGCGQIRPQHQQDS

SEQ ID NO: 25657 - protein, 229 aa, Artificial Sequence
  Synthetic polypeptide
LHWQYKDLWNMSDDKPFLCTAPGCGQRFTNEDHLAVHKHKHEMTLKFGPARNDSVIVADQTPTPTRFLKNCEEVGLFNELASPFENEFKKASEDDIKKMPLDLSPLATPIIRSKIEEPSVVETTHQDSPLPHPESTTSDEKEVPLAQTAQPTSAIVRPASLQVPNVLLTSSDSSVIIQQAVPSPTSSTVITQAPSSNRPIVSFDQSPWCLVFQESQVLPLPNQYSQKQK

SEQ ID NO: 25658 - protein, 201 aa, Artificial Sequence
  Synthetic polypeptide
LHWQYKDLWNMSDDKPFLCTAPGCGQRFTNEDHLAVHKHKHEMTLKFGPARNDSVIVADQTPTPTRFLKNCEEVGLFNELASPFENEFKKASEDDIKKMPLDLSPLATPIIRSKIEEPSVVETTHQDSPLPHPESTTSDEKEVPLAQTAQPTSAIVRPASLQVPNVLLTSSDSSVIIQQAVPSPTSSTVITQAPSSNRPIV

SEQ ID NO: 25659 - protein, 22 aa, Artificial Sequence
  Synthetic polypeptide
ELLEPGRQRLWPFCKCVTCLSK

SEQ ID NO: 25660 - protein, 26 aa, Artificial Sequence
  Synthetic polypeptide
SHLLGRLRHENCLSLGGRDYGLFANV

SEQ ID NO: 25661 - protein, 225 aa, Artificial Sequence
  Synthetic polypeptide
AWEAEIMAFLQMCNLPIKVVCRANAEYMSPSGKVPFIHVGNQVVSELGPIVQFVKAKGHSLSDGLEEVQKAEMKAYMELVNNMLLTAELYLQWCDEATVGEITHARYGSPYPWPLNHILAYQKQWEVKRKMKAIGWGKKTLDQVLEDVDQCCQALSQRLGTQPYFFNKQPTELDALVFGHLYTILTTQLTNDELSEKVKNYSNLLAFCRRIEQHYFEDRGKGRLS

SEQ ID NO: 25662 - protein, 191 aa, Artificial Sequence
  Synthetic polypeptide
AWEAEIMAFLQMCNLPIKVVCRANAEYMSPSGKVPFIHVGNQVVSELGPIVQFVKAKGHSLSDGLEEVQKAEMKAYMELVNNMLLTAELYLQWCDEATVGEWEVKRKMKAIGWGKKTLDQVLEDVDQCCQALSQRLGTQPYFFNKQPTELDALVFGHLYTILTTQLTNDELSEKVKNYSNLLAFCRRIEQH

SEQ ID NO: 25663 - protein, 29 aa, Artificial Sequence
  Synthetic polypeptide
GGGGGGSRGSYGGGDGGYNGFGGDGSRRF

SEQ ID NO: 25664 - protein, 29 aa, Artificial Sequence
  Synthetic polypeptide
VVEVVAAEVVMEEVMVDIMDLEVMVAEGS

SEQ ID NO: 25665 - protein, 42 aa, Artificial Sequence
  Synthetic polypeptide
VGHGDSHPIIPALWEAKAGKSLEPRNSRPAWARSYEMEWMGI

SEQ ID NO: 25666 - protein, 593 aa, Artificial Sequence
  Synthetic polypeptide
SQHFGRPRQANHLSPGIQDQPGQEVMKWNGWGYNDSKFIFNKKGQIELTGKRYPLSGMGLPTFKEWIQNTLGVNVEHKTTSKASLNPSDTPPSVVNEDFLHDLKETNISYSQEADDRVFRAHGHCLHEIFLLREGMFERIPDIVLWPTCHDDVVKIVNLACKYNLCIIPIGGGTSVSYGLMCPADETRTIISLDTSQMNRILWVDENNLTAHVEAGITGQELERQLKESGYCTGHEPDSLEFSTVGGWVSTRASGMKKNIYGNIEDLVVHIKMVTPRGIIEKSCQGPRMSTGPDIHHFIMGSEGTLGVITEATIKIRPVPEYQKYGSVAFPNFEQGVACLREIAKQRCAPASIRLMDNKQFQFGHALKPQVSSIFTSFLDGLKKFYITKFKGFDPNQLSVATLLFEGDREKVLQHEKQVYDIAAKFGGLAAGEDNGQRGYLLTYVIAYIRDLALEYYVLGESFETSAPWDRVVDLCRNVKERITRECKEKGVQFAPFSTCRVTQTYDAGACIYFYFAFNYRGISDPLTVFEQTEAAAREEILANGGSLSHHHGVGKLRKQWLKESISDVGFGMLKSVKEYVDPNNIFGNRNLL

SEQ ID NO: 25667 - protein, 12 aa, Artificial Sequence
  Synthetic polypeptide
AQEFKTSLGKKL

SEQ ID NO: 25668 - protein, 124 aa, Artificial Sequence
  Synthetic polypeptide
SQHFGRPRQANHLSPGIQDQPGQEVMKWNGWGYNDSKFIFNKKGQIELTGKRGISDPLTVFEQTEAAAREEILANGGSLSHHHGVGKLRKQWLKESISDVGFGMLKSVKEYVDPNNIFGNRNLL

SEQ ID NO: 25669 - protein, 544 aa, Artificial Sequence
  Synthetic polypeptide
ITEYPLSGMGLPTFKEWIQNTLGVNVEHKTTSKASLNPSDTPPSVVNEDFLHDLKETNISYSQEADDRVFRAHGHCLHEIFLLREGMFERIPDIVLWPTCHDDVVKIVNLACKYNLCIIPIGGGTSVSYGLMCPADETRTIISLDTSQMNRILWVDENNLTAHVEAGITGQELERQLKESGYCTGHEPDSLEFSTVGGWVSTRASGMKKNIYGNIEDLVVHIKMVTPRGIIEKSCQGPRMSTGPDIHHFIMGSEGTLGVITEATIKIRPVPEYQKYGSVAFPNFEQGVACLREIAKQRCAPASIRLMDNKQFQFGHALKPQVSSIFTSFLDGLKKFYITKFKGFDPNQLSVATLLFEGDREKVLQHEKQVYDIAAKFGGLAAGEDNGQRGYLLTYVIAYIRDLALEYYVLGESFETSAPWDRVVDLCRNVKERITRECKEKGVQFAPFSTCRVTQTYDAGACIYFYFAFNYRGISDPLTVFEQTEAAAREEILANGGSLSHHHGVGKLRKQWLKESISDVGFGMLKSVKEYVDPNNIFGNRNLL

SEQ ID NO: 25670 - protein, 26 aa, Artificial Sequence
  Synthetic polypeptide
KDKSQSTLLVAWVYQHLKNGSKIPLE

SEQ ID NO: 25671 - protein, 11 aa, Artificial Sequence
  Synthetic polypeptide
ESERINHRVPS

SEQ ID NO: 25672 - protein, 23 aa, Artificial Sequence
  Synthetic polypeptide
QRSSLFTSEGGPSCRRYILELLV

SEQ ID NO: 25673 - protein, 45 aa, Artificial Sequence
  Synthetic polypeptide
IKINKCFYINRGAHYSLQKVVQAAEDIFWNSWCNNRSYNKNQTSP

SEQ ID NO: 25674 - protein, 315 aa, Artificial Sequence
  Synthetic polypeptide
TSVSTLTEELIIHFRRWSKLQKIYFGTLGVITEATIKIRPVPEYQKYGSVAFPNFEQGVACLREIAKQRCAPASIRLMDNKQFQFGHALKPQVSSIFTSFLDGLKKFYITKFKGFDPNQLSVATLLFEGDREKVLQHEKQVYDIAAKFGGLAAGEDNGQRGYLLTYVIAYIRDLALEYYVLGESFETSAPWDRVVDLCRNVKERITRECKEKGVQFAPFSTCRVTQTYDAGACIYFYFAFNYRGISDPLTVFEQTEAAAREEILANGGSLSHHHGVGKLRKQWLKESISDVGFGMLKSVKEYVDPNNIFGNRNLL

SEQ ID NO: 25675 - protein, 147 aa, Artificial Sequence
  Synthetic polypeptide
RTSSDERKMVTDGNMEMQKEQRGMQKVQPGEGNKAAFNDMRALSGGERSFSTVCFILSLWSIAESPFRCLDEFDVYMDMVNRRIAMDLILKMADSQRFRQFILLTPQSMSSLPSSKLIRILRMSDPERGQTTLPFRPVTQEEDDDQR

SEQ ID NO: 25676 - protein, 64 aa, Artificial Sequence
  Synthetic polypeptide
NILVFRQTKAEIIILQYAWPTRNTKEHLQMKEKWSQMETWKCRRNREECKRFSLEKEIKLLSMT

SEQ ID NO: 25677 - protein, 27 aa, Artificial Sequence
  Synthetic polypeptide
KKNGHRWKHGNAEGTERNAKGSAWRRK

SEQ ID NO: 25678 - protein, 577 aa, Artificial Sequence
  Synthetic polypeptide
KVMQMYLPFCGIAISNAQLFAASRKEYERSRALLEVVNDLFEEQTDLEKIVKKIMHRAQTLLKCERCSVLLLEDIESPVVKFTKSFELMSPKCSADAENSFKESMEKSSYSDWLINNSIAELVASTGLPVNISDAYQDPRFDAEADQISGFHIRSVLCVPIWNSNHQIIGVAQVLNRLDGKPFDDADQRLFEAFVIFCGLGINNTIMYDQVKKSWAKQSVALDVLSYHATCSKAEVDKFKAANIPLVSELAIDDIHFDDFSLDVDAMITAALRMFMELGMVQKFKIDYETLCRWLLTVRKNYRMVLYHNWRHAFNVCQLMFAMLTTAGFQDILTEVEILAVIVGCLCHDLDHRGTNNAFQAKSGSALAQLYGTSATLEHHHFNHAVMILQSEGHNIFANLSSKEYSDLMQLLKQSILATDLTLYFERRTEFFELVSKGEYDWNIKNHRDIFRSMLMTACDLGAVTKPWEISRQVAELVTSEFFEQGDRERLELKLTPSAIFDRNRKDELPRLQLEWIDSICMPLYQALVKVNVKLKPMLDSVATNRSKWEELHQKRLLASTASSSPASVMVAKEDRN

SEQ ID NO: 25679 - protein, 37 aa, Artificial Sequence
  Synthetic polypeptide
SFGRRLCRCIFHFVESPYLTLSSLLPQGKNMKEAELC

SEQ ID NO: 25680 - protein, 18 aa, Artificial Sequence
  Synthetic polypeptide
ALVEGYADVSSILWNRHI

SEQ ID NO: 25681 - protein, 41 aa, Artificial Sequence
  Synthetic polypeptide
GQARWLTPVIPALWEAEAGGSQGQEIETILANKVWRLLCVE

SEQ ID NO: 25682 - protein, 239 aa, Artificial Sequence
  Synthetic polypeptide
FQHFGRLRRADHKVRRLRPSWLTRYGDYYVWNKVTTCIHNILSGRRWIEHYGEVTIRNTKSSVCICKLTFVKVNYWNSNMNEVQGVVIDQEGKAVYRLFGKWHEGLYCGVAPSAKCIWRPGSMPTNYELYYGFTRFAIELNELDPVLKDLLPPTDARFRPDQRFLEEGNLEAAASEKQRVEELQRSRRRYMEENNLEHIPKFFKKVIDANQREAWVSNDTYWELRKDPGFSKVDSPVLW

SEQ ID NO: 25683 - protein, 25 aa, Artificial Sequence
  Synthetic polypeptide
QGMEITMCGIKSPLAYTTSSVGEDG

SEQ ID NO: 25684 - protein, 110 aa, Artificial Sequence
  Synthetic polypeptide
YQLLRRLRQADCLKPGVQDQPGYKKGQKLSADGHLQVLHKETRHSVFIPKVCKADAGLYVARAQNSSGALSSNVILHVTGNCRLPITRVNWITLCVVYVSVSLMYWLLTQ

SEQ ID NO: 25685 - protein, 64 aa, Artificial Sequence
  Synthetic polypeptide
NQEFKTSLGTRRARNCLQMGTYRFYTRRQGIRCSFQRYARQTQASMWLGPKTLAALSLPMSSST

SEQ ID NO: 25686 - protein, 66 aa, Artificial Sequence
  Synthetic polypeptide
IPATQEAEAGRLLETRSSRPAWVQEGPEIVCRWALTGFTQGDKAFGVHSKGMQGRRRPLCGSGPKL

SEQ ID NO: 25687 - protein, 66 aa, Artificial Sequence
  Synthetic polypeptide
SQQFGRPKRADHKVRRWRPSWLTRTEQYFGSPSDMASTAENIRDRMKLVNLKRQQLRHPEMVTTES

SEQ ID NO: 25688 - protein, 23 aa, Artificial Sequence
  Synthetic polypeptide
HEPNNILGVQVTWLLLQKTSETG

SEQ ID NO: 25689 - protein, 41 aa, Artificial Sequence
  Synthetic polypeptide
RAWWLTPVIPAVWEAKAGGSQGQEMETILANTNRTIFWESK

SEQ ID NO: 25690 - protein, 44 aa, Artificial Sequence
  Synthetic polypeptide
VYPFSRNSEERGRCHMTPWKPISKIQNAVHATLLPFLLLCAHLP

SEQ ID NO: 25691 - protein, 46 aa, Artificial Sequence
  Synthetic polypeptide
HHGNQSAKSKMQYMPHYYPSCSCAHTYPDDAAFTGYQTIYVFSSGQ

SEQ ID NO: 25692 - protein, 422 aa, Artificial Sequence
  Synthetic polypeptide
DMYLFKPLGLPIFKKLRRKRKMSHDTMETNQQNPKCSTCHTTTLPALVRTPTLMMQPSLDIKPFMSFPVDSSSAVGLFPNFNTMDPVQKAVINHTFGVSIPPKKKQVISCNVCQLRFNSDSQAEAHYKGSKHAKKVKALDATKNKPKMVPSKDSAKANPSCSITPITGNNSDKSEDKGKLKASSSSQPSSSESGSFLLKSGTTPLPPGAATSPSKSTNGAPGTVVESEEEKAKKLLYCSLCKVAVNSLSQLEAHNTGSKHKTMVEARNGAGPIKSYPRPGSRLKMQNGSKGSGLQNKTFHCEICDVHVNSEIQLKQHISSRRHKDRVAGKPLKPKYSPYNKLQRSPSILAAKLAFQKDMMKPLAPAFLSSPLAAAAAVSSALSLPPRPSASLFQAPAIPPALLRPGHGPIRATPASILFAPY

SEQ ID NO: 25693 - protein, 171 aa, Artificial Sequence
  Synthetic polypeptide
DMYLFKPLGLPIFKKLRRKRKMSHDTMETNQQNPKCSTCHTTTLPALVRTPTLMMQPSLDIKPFMSFPVDSSSAVGLFPNFNTKRRGLFETNKFCQMDPVQKAVINHTFGVSIPPKKKQVISCNVCQLRFNSDSQAEAHYKGSKHAKKVKALDATKNKPKMVPSKDSAKAN

SEQ ID NO: 25694 - protein, 151 aa, Artificial Sequence
  Synthetic polypeptide
EIVFRKCTLTCLWGKGRVQLSGDSEKSMSLCMLAGLEGCVFREREEQMGQSRMLMETGAGPKGDNIYEWRSTILGPPGSVYEGGVFFLDITFSSDYPFKPPKVTFRTRIYHCNINSQGVICLDILKDNWSPALTISKVLLSICSLLTDCNP

SEQ ID NO: 25695 - protein, 78 aa, Artificial Sequence
  Synthetic polypeptide
WRLVLGLKEITFMNGDQLYLVHRVLYMKVVCFFWISHFHQIIHLSHQRLLSAPESITATSTVRESSVWTSLKTTGVPL

SEQ ID NO: 25696 - protein, 38 aa, Artificial Sequence
  Synthetic polypeptide
LRKKYVSMHACRFRGVCVSGERGANGAEQNANGDWCWA

SEQ ID NO: 25697 - protein, 183 aa, Artificial Sequence
  Synthetic polypeptide
EIVFRKCTLTCLWGKGRVQLSGDSEKSMSLCMLAGLEGCVFREREEQMGQSRMLMETGAGPKGDNIYEWRSTILGPPGSVYEGGVFFLDITFSSDYPFKPPKVTFRTRIYHCNINSQGVICLDILKDNWSPALTISKVLLSICSLLTDCNPADPLVGSIATQYLTNRAEHDRIARQWTKRYAT

SEQ ID NO: 25698 - protein, 150 aa, Artificial Sequence
  Synthetic polypeptide
EIVFRKCTLTCLWGKGRVQLSGDSEKSMSLCMLAGLEGCVFREREEQMGQSRMLMETGAGPKGDNIYEWRSTILGPPGSVYEGGVFFLDITFSSDYPFKPPKVTFRTRIYHCNINSQGVICLDILKDNWSPALTISKVLLSICSLLTDCN

SEQ ID NO: 25699 - protein, 99 aa, Artificial Sequence
  Synthetic polypeptide
EIVFRKCTLTCLWGKGRVQLSGDSEKSMSLCMLAGLEGCVFREREEQMGQSRMLMETGAGPKGDNIYEWRSTILGPPGSVYEGGVFFLDITFSSDYPFK

SEQ ID NO: 25700 - protein, 44 aa, Artificial Sequence
  Synthetic polypeptide
WRLVLGLKEITFMNGDQLYLVHRVLYMKVVCFFWISHFHQIIHL

SEQ ID NO: 25701 - protein, 26 aa, Artificial Sequence
  Synthetic polypeptide
MPCGERLSVLFTVVSSGLGRVLDKEQ

SEQ ID NO: 25702 - protein, 15 aa, Artificial Sequence
  Synthetic polypeptide
TRSSNECNGNKPRWK

SEQ ID NO: 25703 - protein, 728 aa, Artificial Sequence
  Synthetic polypeptide
VAFIYIDLIWYCVFFYCSIDALWREIVCLVYRGFIRAWKSPRQGAVMNAMETNLVGSDKYAARFGESIVNLGDIDNDGFEDVAIGAPQEDDLQGAIYIYNGRADGISSTFSQRIEGLQISKSLSMFGQSISGQIDADNNGYVDVAVGAFRSDSAVLLRTRPVVIVDASLSHPESVNRTKFDCVENGWPSVCIDLTLCFSYKGKEVPGYIVLFYNMSLDVNRKAESPPRFYFSSNGTSDVITGSIQVSSREANCRTHQAFMRKDVRDILTPIQIEAAYHLGPHVISKRSTEEFPPLQPILQQKKEKDIMKKTINFARFCAHENCSADLQVSAKIGFLKPHENKTYLAVGSMKTLMLNVSLFNAGDDAYETTLHVKLPVGLYFIKILELEEKQINCEVTDNSGVVQLDCSIGYIYVDHLSRIDISFLLDVSSLSRAEEDLSITVHATCENEEEMDNLKHSRVTVAIPLKYEVKLTVHGFVNPTSFVYGSNDENEPETCMVEKMNLTFHVINTGNSMAPNVSVEIMVPNSFSPQTDKLFNILDVQTTTGECHFENYQRVCALEQQKSAMQTLKGIVRFLSKTDKRLLYCIKADPHCLNFLCNFGKMESGKEASVHIQLEGRPSILEMDETSALKFEIRATGFPEPNPRVIELNKDENVAHVLLEGLHHQRPKRYFTIVIISSSLLLGLIVLLLISYVMWKAGFFKRQYKSILQEENRRDSWSYINSKSNDD

SEQ ID NO: 25704 - protein, 310 aa, Artificial Sequence
  Synthetic polypeptide
VAFIYIDLIWYCVFFYCSIDALWREIVCLVYRGFIRAWKSPRQGAVMNAMETNLVGSDKYAARFGESIVNLGDIDNDGFEDVAIGAPQEDDLQGAIYIYNGRADGISSTFSQRIEGLQISKSLSMFGQSISGQIDADNNGYVDVAVGAFRSDSAVLLRTRPVVIVDASLSHPESVNRTKFDCVENGWPSVCIDLTLCFSYKGKEVPGYIVLFYNMSLDVNRKAESPPRFYFSSNGTSDVITGSIQVSSREANCRTHQAFMRKDVRDILTPIQIEAAYHLGPHVISKRSTEEFPPLQPILQQKKEKDIMKK

SEQ ID NO: 25705 - protein, 12 aa, Artificial Sequence
  Synthetic polypeptide
GKQYLNKFSYGF

SEQ ID NO: 25706 - protein, 167 aa, Artificial Sequence
  Synthetic polypeptide
TNFPMDSSNGNCRGASSERCKCKPIRATQKTYFRNNYNYVIRAKVKEIKTKCHDVTAVVEVKEILKSSLVNIPRDTVNLYTSSGCLCPPLNVNEEYIIMGYEDEERSRLLLVEGSIAEKWKDRLGKKVKRWDMKLRHLGLSKSDSSNSDSTQSQKSGRNSNPRQARN

SEQ ID NO: 25707 - protein, 61 aa, Artificial Sequence
  Synthetic polypeptide
QWCQDNEIRETIFEQIFLWILVTETVEGQAVNAVNVSLLELHRRPISGTITTMSFGLKLKR

SEQ ID NO: 25708 - protein, 22 aa, Artificial Sequence
  Synthetic polypeptide
HWHVETPRQNHPILSTKTWNLL

SEQ ID NO: 25709 - protein, 72 aa, Artificial Sequence
  Synthetic polypeptide
EFSNIGMWRPQGKTILSYRQKPGICCEIHSQKIPCCRNPQQQSTACTTTERKIRDSEKSGIILLHICRCYGI

SEQ ID NO: 25710 - protein, 1121 aa, Artificial Sequence
  Synthetic polypeptide
VVVGLRALGQKLRDLHSNLHSVTESSLTLACGDPKAKPSYLIDKNLESAVKFIVRKFPAVETRNNNQQLAQLQKEKSEILKNLALYYFTFVDVMEFKDHVCELLNTIDVCQVFFDITVNFDLTKNYLDLIITYTTLMILLSRIEERKAIIGLYNYAHEMTHGASDREYPRLGQMIVDYENPLKKMMEEFVPHSKSLSDALISLQMVYPRRNLSADQWRNAQLLSLISAPSTMLNPAQSDTMPCEYLSLDAMEKWIIFGFILCHGILNTDATALNLWKLALQSSSCLSLFRDEVFHIHKAAEDLFVNIRGYNKRINDIRECKEAAVSHAGSMHRERRKFLRSALKELATVLSDQPGLLGPKALFVFMALSFARDEIIWLLRHADNMPKKSADDFIDKHIAELIFYMEELRAHVRKYGPVMQRYYVQYLSGFDAVVLNELVQNLSVCPEDESIIMSSFVNTMTSLSVKQVEDGEVFDFRGMRLDWFRLQAYTSVSKASLGLADHRELGKMMNTIIFHTKMVDSLVEMLVETSDLSIFCFYSRAFEKMFQQCLELPSQSRYSIAFPLLCTHFMSCTHELCPEERHHIGDRSLSLCNMFLDEMAKQARNLITDICTEQCTLSDQLLPKHCAKTISQAVNKKSKKQTGKKGEPEREKPGVESMRKNRLVVTNLDKLHTALSELCFSINYVPNMVVWEHTFTPREYLTSHLEIRFTKSIVGMTMYNQATQEIAKPSELLTSVRAYMTVLQSIENYVQIDITRVFNNVLLQQTQHLDSHGEPTITSLYTNWYLETLLRQVSNGHIAYFPAMKAFVNLPTENELTFNAEEYSDISEMRSLSELLGPYGMKFLSESLMWHISSQVAELKKLVVENVDVLTQMRTSFDKPDQMAALFKRLSSVDSVLKRMTIIGVILSFRSLAQEALRDVLSYHIPFLVSSIEDFKDHIPRETDMKVAMNVYELSSAAGLPCEIDPALVVALSSQKSENISPEEEYKIACLLMVFVAVSLPTLASNVMSQYSPAIEGHCNNIHCLAKAINQIAAALFTIHKGSIEDRLKEFLALASSSLLKIGQETDKTTTRNRESVYLLLDMIVQESPFLTMDLLESCFPYVLLRNAYHAVYKQSVTSSA

SEQ ID NO: 25711 - protein, 40 aa, Artificial Sequence
  Synthetic polypeptide
LQENKFRAPTDSTLWACTKPTLQGLDRLSYWTYLSGSSCL

SEQ ID NO: 25712 - protein, 68 aa, Artificial Sequence
  Synthetic polypeptide
SVTVSFHPQIGPSSCRKTSSGLPLILHYGRAQNPLCRGWTGSATGPTSRGQAACDPRKQCCILYYEFR

SEQ ID NO: 25713 - protein, 6878 aa, Artificial Sequence
  Synthetic polypeptide
FYIMGVHKTHFAGVGPAQLLDLPLGVKLPVIPGSNAVFYTTNFGEKLFRPSYGFNLTDPYCRLLENQYKSLHDPHLKAYYKRKDILKRLKKGGYITSNNKVVCTLRELNKYRQYLTSLKLDFERNYIKEQRILAKQLHNIPENNQIPQHCDVAQVQNWLLKEGTESIKDQERLMRHRYLDMISRKLEQLERTAEEQRLFLMDREERRQREHTRRKLTLRRKIEEEWKTKEMLLLTRMAEDVKREERIEEQQHRNREESDRKKQDLLEKKMAYHLQKMQDTGFNGEDIGKNTFKYRGQDGTHASPKNKKKTSEDIMLVYPAGDQNTYKETHGHTANAAHQRQNSSNNFTKKNSASVVYQADVQDNGINQKRDGMVSKNSSIFDDRGGINISGQGSIISAQVSPTRNFSRVSQAFLDPSKEEKETNADWDGRPTKRSSYLCESGPQAHATDPGIFSSPVYTNMQQNLLQNCLQEKVTSEELNIIIQNVMTWVVATVTSILYPAITKYEKRLQNNTYPVSDDSILSSDSSSFCSTCSEDFTYRSYTSATTKTFQAEPCAFVVDTSVRRPTTPIKPPPAHVEKTVVGKTCHIKGQSIISKHKYNKTNLLYSYPKLRSCKSDSHLLASFETGTKKSKDATTETDSLGSSLHCDKTAKAMDEMKNLKNVFVNFKCYLKGETEVILESILREIMSDLTQAIPSLSSVTAEVFVEQCEREKEILLSNAHIPSVASEIVENMLEKLESAVEKKCVEMFSQDLSVDIKPSLAASDELLTSSNGKPLKNSMPHTLDPMCDIAEDMVHAILEKLMTLVSFKQNEFLHLKDTNKLSCQQHKTDPICMFLQRAGKNKSSLESDEASLIVNEEVQNLISNIFSQSSLVAYIEEAINAILGYIQTELNNERIIASEETVVLLQLLEDILFQLHQEPVNESFQKSRQPRISSPSDTKEKYRLTGTRLSNSPRSGRPFPPINVPGMVLYSDDENEEIDNIVKNVLDSTFKDEKVKSQEQIPNHWFTKGNTCFECKRNIKPPTKPGSRSKAAFHDWELKTEPPSTNHEDILKKKLSSNKDISTFSQDQKHQIEKASENIVTSILKEMLKDISSVPFGHLDSKTGSEASVLVSEKPQGLSHQEWIDQMFSVSEISTVAQEITDSVLNILHKASNYISNTTKSSISSSVHQISLHNSDTEHIVKEAPNKYPLKTWFDSEKKMKYLSLFDVDPEKPPWLKSGKSEPKPVDDINDKIIRTIFKRLKSFICPKLHMGFKSSLRSQLSKYTAKIVNIVLCAIQNELELHKENLNLREIDHTKSLTDKGFFANTDKKLESLVTSIDDDILASPLLTCIYDMLLSSENAHQRSISLSSRKPKSATDSVDVQSILPNRQDKKSFHKYLATPCTHHSVNGGNHIKENAKLQVLERIGETLHEMLSKLLGTHLHSQLSCSQQSREMTNKNQKMAAALQSNIQLISKAILDYILAKLCGVDMDTSFASCGLKAISESLDIDNPSFASIIEKMAKSTKIISSIVSRRVQEDNKEETKSKAKPVAPVSSKTPSTKEMHPNKLKAVASDILNMVFAKLEGFANGHLEILGAINDGNKKSNKIGWEYESTNISRDTHEASFLSALYMHAKKVSSAILKVIQTELNVTSSDLKTSVENPPPETQILKYVVKLILDAVSSDMFNEMESEGGGIETYRYRPTYGSLPGGAESDSFLEDDAYTAKKIIDERSPQREEVKTRSLKQWALEKTLNKIEVKLKEPHISPIAPIIRNILNEIFQSTLINQLNVLSLSHSNFNGMPHNVDEPTPQTSVQFMDKMMDPLLSEADITIVTDNIVRTVFHKLYSAAMTERNVRENRYKTITFSANVSSHEHTYKGKSSVTALDENPCTFQSRFSVADKETKVNLAEDIVQAILTNLETFATSKVKSLFYSQVNFTVPVALPIQQDHSTLSKALSAKDSYSDEQFSCCSVDHTKSGKTNLCQLSLSKLNTYALQVARRNLQGIKQELDKERENPFLTHDIGISESIASQIVNALLDIISRKGKCDKNSSDKEIDLDQQKGVIEKLLNETKYRKVLQLQIQDTIEGILCDIYEKTLFQNNLSFATPTLKCSIADKHSEENSEMFMEGANKIIPKLSVPKSDVILISNDIVNIVLHNLSSAATLVINAKNPTSARLPLTFCDTFPKIDCQQPLKGSKTERKTERFSYSRNQKSAYADDNQITVVEKEDTQKSATDSCEENANFITKTIFKRLESFATERIDSLITLAFQSKEKSFVIPELENCKQNDSIFYDSSQVESDVNVLKISATETILSQELTDFTFVGRREKLGSTIHLSQARLKTYADVIASAILKLIKNDLDLEIQKIYPYQNNILFQENIIVSEIVDSMLKMLDDKRSVKEICFNSKENSNFSQLALSNEILLGHKEKERSTKQSLFTKYPLEQNQMILENKRQIIVLEEIFMRNGESKNKEKGELLIAVEELLNKLYQRVREVTGHLPPLNETANFISNSKIKTSDTTQKNSFQSHINSVANDIVESVLGKMYLVVVTSLYENNKSRTEVEISDHNDSLLMKPLRFRETKQAGKISNSPRYAISQAYSYVDSQNISVMENTLLPYLPLQVKKDLIQMVLNKITNFVSLPLKVSPKDNPKPCFKAHLKTRSKITTLPKFTKKTHLGLSAAKAKSKTKLGPGEKTLKDSRSKTAIGLSHIMSAGDAKNLLDTKLPTSELKIYAKDIIINILETIVKEFGKVKQTKALPSDQIIAAGKIVNTVLQELYVTNNCNLAYPMKSSHLRLSQGNIGTGSLPKQQACFYLENVSSQLEHIFPREGIFKKLFDKWQTESNDKENEKCKLLMIAENVLTEISIKAKELEYSLSLLNLPPLENCESRFYNHFKGASTRAEDTKAQINMFGREIVEMLLEKLQLCFLSQIPTPDSEETLSNSKEHITAKSKYGFPNKHSLSSLPIYNTKTKDQISVGSSNQIVQEIVETVLNMLESFVDLQFKHISKYEFSEIVKMPIENLSSIQQKLLNKKMLPKLQPLKMFSDKSESNTINFKENIQNILLRVHSFHSQLLTYAVNIISDMLAVIKNKLDNEISQMEPSSISILKENIVASEIIGTLMDQCTYFNESLIQNLSRESLFQGAENAYTVNQVELATNMKMFTSKLKEGSLGINPSQVSKTGFVFCSDEDMKEKYRVSSDLPTSVRSSVEDTVKNSEPTKRPDSETMPSCSTRNKVQDHRPRESNFGSFDQTMKGNSYLPEGSFLQKLLRKASDSTEAALKQVLSFIEMGKGENLRVFHYENLKPVVEPNQIQTTISPLKICLAAENIVNTVLSSCGFPSQPHTNENREIMKPFFISKQSSLSEVSGGQKDNEKSLLRMQDKKINYIPEEENENLEASREDSSFLQKLKKKEYPKIETVKEVEAFTFADHEMGSNEVHLIARHVTTSVVTYLKNFETTVFSEEKMSVSTWSRKKYESKQFLRNIYDDSSIYQCCEHLTESVLYHLTSSISDGTKKGREKEKAWEIQEATFSKIISIHSQVFESRSISIGELALCISEIIIKILFNNKIIQADIAQKMVAIPTKYTYCPGIVSGGFDDLFQDLLVGVIHVLSKEIEVDYHFESNVRNKSFSMHRNNSVPLCNKINRQASPRDWQFSTQQIGQLFQKNKLSYLACKLNSLVGNLKTSESKEVVNKVFNIVSDLFSPDECLDTGMDSGKIQRTYFYSSNNEQPNSILTNNLQLSSKSVFLLNVVCEKLIRILLEECTSTAFPDKGSVSEETSAEECQLLKMLQSVEDGKSDYRKGGMDCECLQVDYMSDLLENVAEIDQDLLTSDSMLTIISHSLVKSLMDKLSHSIQQAPESLPFANKHLNYRTREIQSSFIKARKSELIELGQSKSSLELRSYDSNSLTVSLNNPSVVSSKIQAPFNKHCAVKSSSVSPFERQRTKEMDKVAIHNKLHQEGIYAGVYSATFLEGIISELFFNLSMSLWGKNKNITVSWLNEMNTLFVNNVVNEFNNAQVTVLRNAEERLCFPPVHTETVSKIVDSVYYDVLQQYELKVACGNNPVYDNASIAEQITNGILLEILDYKLPSCFKEHLIPHSYYPLKPEIILQKLQSNLTEFTSLPRSSSDYSTMLSHSFLEDVIRRLLSQLIPPPITCSSLGKKYLMSSDFNEMSTCIINKVMSAISKHKIWFTIYDNQYLYTGKNLQKMVDSVYCNILQMSDSLVSIQKSIVSRSPIMIDQIASFIIQEIIENHLQPFLSGEVLCHPRTPLDPVSTIVTQVLSEVIESHRPQKQSPLDIHLDSFVREIVARLLSKIFSPKHNTEIELKNMTQRIVNSINRHFNKAKIHILYDDKEQAFFSFNTDIVDELATSVYRNALKQHGLDLAVDKESEDSGIFVENITNLIVAAISDYLLHPLFSGDFSASTYSNSVAENIVQDILSNISKSTEPSQSVPLYNTLLPYTFLEDMIRVLLSKLFSSASSLVLNRDTQKDISRVNFNDIASNLVSDIRMKVSQHEIRFSKEEEETKFIYSEDDIQHLVDSVFANVVQTSGSQESAVQNITSSNDILIDRIAGFIIKHICQKHLQPFVSGKSLSSSDTYFDDERRQLFYTSVYSSTFLEDVISGVLRKIFHRVVGIVQTKSIRDSEDELFEKAEELIHLITGEFSKAQVSIIDNTEERLCLPPVERDVVKTIVDMVYSKVLQEYEMEVVPNKDFLNDTKTLAARITNIILAEIFDFQIHPDLIANLPFKSHSKLSANVLIQRVQYDISKSRFQRQASTMYTTMLSHSHLEKIVTQLTSQISPLNTSAEQSDTTKSDLSNTVIKLINEIMSIISKHEICIIKYGNKKQSMISAKDIQSMVDSIYADLSHSNIYQSITKDKKSISDIPVSKIASFIIKEIFNHHIQSFLSEDKTLLLAAVDQTYKLKAIDPKQRELSFIVNSSVFLEEVISELLCKILYAFSHNMLVTENPDRVKLKLTRIVTTLVNSIVLEFTTSEILVADNFDKNLCFSERYKEMVQKIVNSVYGKVLDQYKSLIQIHRVIQSDTICFGRKIYYLLLEEIYDYQVQSLVSGELESSSYSYPQADNIIRNVLNIITKDSHALPPYITVLPHSLLEDMVYRLLGHVFPSTHTENELKEKKFPPDDEFVEAASKLTDEIIKEISEHEIRLSMAEDNAESMQLEPIENLVDSICNNILKTSEFQAEVQKDADKKGCSFLSKLAGFIMKEIMYHHLQPFLHGEESSFSDLSDYDHVSELAKSGKEKTQPSLYSATFLEDIIIDLVHKFCSLLIITEDSKKNEMAELDIMGLALKLANSLIREFKKSDIKVLPNAEKMFSFPPIDKETVDKISNFVYEQFIEKCTSHDIQKGDESNIAIGMIAALTQKAISAFRIQPLFSGDWSSTFFSFLNPDNITQRVQHLPQNTFTQISRCAKENQLSLPDQSYKDTSSTPDCKNMMSTLEINRGTMNRKKSFKTKDTSVKKGDIQNPVLSSINAIMKSGMINLTSGLATGVTNKKEVDENKVGICTQKHSENVSKVTSTTTVKSKDTQEPNLSETFNNNEIEKKRNLIPTDKKGKDDEIYTHFSLIIDDTEYEKEVLGSDSEIGYKKKIDNARESSFKKDDKLFQLSSLKSKRNLGTTTDTLEIRIRTSSNEGRRDSPTQTCRDEEHHSDYEHVQNVIENIFEDVLELSSSPEPAYYSKLSYDQSPPGDNVLNVIQEISRDSAQSVTTKKVSSSTNKNISAKEKEEEEREKEKVREEIKSEPSKPDDPQNQRESKPGIFPAKFLEDVITEMVKQLIFSSIPETQIQDRCQNVSDKQNQAKLYDTAMKLINSLLKEFSDAQIKVFRPDKGNQFPGGKVSSVPKVPPRYKEPTTDEAPSSIKIKSADKMPPMHKMMRKPSSDKIPSIDKTLVNKVVHSSVCNILNDYGSQDSIWKNINSNGENLARRLTSAVINEIFQRQVNLIFCDEVSVSACLPLESKDVVKKVQKLAQTASKECQTSSPYTIILPHKFLENVISALFSKIFSTISSTKTKEPEDNLSTELNFLQMKLVSAVATEISQDKYMTIQYVETLQSDDDEIIQLVVQSVYNNLLPQFGSQEIIQNCVTSGCKILSENIVDLVLREVASNQLQSYFCGELTPHQCVEVENIVEKILKDVFQTTDVPLPKPSHADKLSYNIIEEIAVKFLSKLLSIFPKVHKERTKSLETDMQKITSKVLNSVQEFISKSKIKLVPPTKESPTVPVADNATIENIVNSIYTSVLKHSGSYTSVFKDLMGKSNVLSDTIGFLMVNAISNSEFQPQVEEEVSNSELVLEAVKIMEKVIKIIDELKSKEKSSSRKGLTLDAKLLEEVLALFLAKLIRLPSSSSKDEKNLSKTELNKIASQLSKLVTAEISRSSISLIASDPEEHCLNPENTERIYQVVDSVYSNILQQSGTNKEFYYDIKDTNTAFPKKVASLIIDGVSSFPLDTINSTISNADLSGELDVNRIVQKAQEHAFNVIPELEQEKLDQNLSEEESPIKIVPHVGKKPVKIDPKIISEHLAVISIKTQPLEKLKQECLKRTGHSIAELRRASISGRNYSLGSPDLEKRKTERRTSLDKTGRLDVKPLEAVARNSFQNIRKPDITKVELLKDVQSKNDLIVRLVAHDIDQVYLENYIKEERDSDEDEVVLTQTFAKEEGIKVFEDQVKEVKKPIQSKLSPKSTLSTSSLKKFLSLSKCCQTTASANIESTEAISNQVIESKETHVKRAVAELDMATPKTMPETASSSWEEKPQCKKEEKNLVTEPTHYFIHRIMSSSSYNQEDLISSTGEAEDCHSDPSAKILEESSQEQKPEHGNSVKFITIFERSKDVLGSANPSKEVISETPKPDVSKQGSKMLTKMSSTLSKVFSQCNTNISRSSSPAHQDEH

SEQ ID NO: 25714 - protein, 6886 aa, Artificial Sequence
  Synthetic polypeptide
DSLWITNLHHCKGVHKTHFAGVGPAQLLDLPLGVKLPVIPGSNAVFYTTNFGEKLFRPSYGFNLTDPYCRLLENQYKSLHDPHLKAYYKRKDILKRLKKGGYITSNNKVVCTLRELNKYRQYLTSLKLDFERNYIKEQRILAKQLHNIPENNQIPQHCDVAQVQNWLLKEGTESIKDQERLMRHRYLDMISRKLEQLERTAEEQRLFLMDREERRQREHTRRKLTLRRKIEEEWKTKEMLLLTRMAEDVKREERIEEQQHRNREESDRKKQDLLEKKMAYHLQKMQDTGFNGEDIGKNTFKYRGQDGTHASPKNKKKTSEDIMLVYPAGDQNTYKETHGHTANAAHQRQNSSNNFTKKNSASVVYQADVQDNGINQKRDGMVSKNSSIFDDRGGINISGQGSIISAQVSPTRNFSRVSQAFLDPSKEEKETNADWDGRPTKRSSYLCESGPQAHATDPGIFSSPVYTNMQQNLLQNCLQEKVTSEELNIIIQNVMTWVVATVTSILYPAITKYEKRLQNNTYPVSDDSILSSDSSSFCSTCSEDFTYRSYTSATTKTFQAEPCAFVVDTSVRRPTTPIKPPPAHVEKTVVGKTCHIKGQSIISKHKYNKTNLLYSYPKLRSCKSDSHLLASFETGTKKSKDATTETDSLGSSLHCDKTAKAMDEMKNLKNVFVNFKCYLKGETEVILESILREIMSDLTQAIPSLSSVTAEVFVEQCEREKEILLSNAHIPSVASEIVENMLEKLESAVEKKCVEMFSQDLSVDIKPSLAASDELLTSSNGKPLKNSMPHTLDPMCDIAEDMVHAILEKLMTLVSFKQNEFLHLKDTNKLSCQQHKTDPICMFLQRAGKNKSSLESDEASLIVNEEVQNLISNIFSQSSLVAYIEEAINAILGYIQTELNNERIIASEETVVLLQLLEDILFQLHQEPVNESFQKSRQPRISSPSDTKEKYRLTGTRLSNSPRSGRPFPPINVPGMVLYSDDENEEIDNIVKNVLDSTFKDEKVKSQEQIPNHWFTKGNTCFECKRNIKPPTKPGSRSKAAFHDWELKTEPPSTNHEDILKKKLSSNKDISTFSQDQKHQIEKASENIVTSILKEMLKDISSVPFGHLDSKTGSEASVLVSEKPQGLSHQEWIDQMFSVSEISTVAQEITDSVLNILHKASNYISNTTKSSISSSVHQISLHNSDTEHIVKEAPNKYPLKTWFDSEKKMKYLSLFDVDPEKPPWLKSGKSEPKPVDDINDKIIRTIFKRLKSFICPKLHMGFKSSLRSQLSKYTAKIVNIVLCAIQNELELHKENLNLREIDHTKSLTDKGFFANTDKKLESLVTSIDDDILASPLLTCIYDMLLSSENAHQRSISLSSRKPKSATDSVDVQSILPNRQDKKSFHKYLATPCTHHSVNGGNHIKENAKLQVLERIGETLHEMLSKLLGTHLHSQLSCSQQSREMTNKNQKMAAALQSNIQLISKAILDYILAKLCGVDMDTSFASCGLKAISESLDIDNPSFASIIEKMAKSTKIISSIVSRRVQEDNKEETKSKAKPVAPVSSKTPSTKEMHPNKLKAVASDILNMVFAKLEGFANGHLEILGAINDGNKKSNKIGWEYESTNISRDTHEASFLSALYMHAKKVSSAILKVIQTELNVTSSDLKTSVENPPPETQILKYVVKLILDAVSSDMFNEMESEGGGIETYRYRPTYGSLPGGAESDSFLEDDAYTAKKIIDERSPQREEVKTRSLKQWALEKTLNKIEVKLKEPHISPIAPIIRNILNEIFQSTLINQLNVLSLSHSNFNGMPHNVDEPTPQTSVQFMDKMMDPLLSEADITIVTDNIVRTVFHKLYSAAMTERNVRENRYKTITFSANVSSHEHTYKGKSSVTALDENPCTFQSRFSVADKETKVNLAEDIVQAILTNLETFATSKVKSLFYSQVNFTVPVALPIQQDHSTLSKALSAKDSYSDEQFSCCSVDHTKSGKTNLCQLSLSKLNTYALQVARRNLQGIKQELDKERENPFLTHDIGISESIASQIVNALLDIISRKGKCDKNSSDKEIDLDQQKGVIEKLLNETKYRKVLQLQIQDTIEGILCDIYEKTLFQNNLSFATPTLKCSIADKHSEENSEMFMEGANKIIPKLSVPKSDVILISNDIVNIVLHNLSSAATLVINAKNPTSARLPLTFCDTFPKIDCQQPLKGSKTERKTERFSYSRNQKSAYADDNQITVVEKEDTQKSATDSCEENANFITKTIFKRLESFATERIDSLITLAFQSKEKSFVIPELENCKQNDSIFYDSSQVESDVNVLKISATETILSQELTDFTFVGRREKLGSTIHLSQARLKTYADVIASAILKLIKNDLDLEIQKIYPYQNNILFQENIIVSEIVDSMLKMLDDKRSVKEICFNSKENSNFSQLALSNEILLGHKEKERSTKQSLFTKYPLEQNQMILENKRQIIVLEEIFMRNGESKNKEKGELLIAVEELLNKLYQRVREVTGHLPPLNETANFISNSKIKTSDTTQKNSFQSHINSVANDIVESVLGKMYLVVVTSLYENNKSRTEVEISDHNDSLLMKPLRFRETKQAGKISNSPRYAISQAYSYVDSQNISVMENTLLPYLPLQVKKDLIQMVLNKITNFVSLPLKVSPKDNPKPCFKAHLKTRSKITTLPKFTKKTHLGLSAAKAKSKTKLGPGEKTLKDSRSKTAIGLSHIMSAGDAKNLLDTKLPTSELKIYAKDIIINILETIVKEFGKVKQTKALPSDQIIAAGKIVNTVLQELYVTNNCNLAYPMKSSHLRLSQGNIGTGSLPKQQACFYLENVSSQLEHIFPREGIFKKLFDKWQTESNDKENEKCKLLMIAENVLTEISIKAKELEYSLSLLNLPPLENCESRFYNHFKGASTRAEDTKAQINMFGREIVEMLLEKLQLCFLSQIPTPDSEETLSNSKEHITAKSKYGFPNKHSLSSLPIYNTKTKDQISVGSSNQIVQEIVETVLNMLESFVDLQFKHISKYEFSEIVKMPIENLSSIQQKLLNKKMLPKLQPLKMFSDKSESNTINFKENIQNILLRVHSFHSQLLTYAVNIISDMLAVIKNKLDNEISQMEPSSISILKENIVASEIIGTLMDQCTYFNESLIQNLSRESLFQGAENAYTVNQVELATNMKMFTSKLKEGSLGINPSQVSKTGFVFCSDEDMKEKYRVSSDLPTSVRSSVEDTVKNSEPTKRPDSETMPSCSTRNKVQDHRPRESNFGSFDQTMKGNSYLPEGSFLQKLLRKASDSTEAALKQVLSFIEMGKGENLRVFHYENLKPVVEPNQIQTTISPLKICLAAENIVNTVLSSCGFPSQPHTNENREIMKPFFISKQSSLSEVSGGQKDNEKSLLRMQDKKINYIPEEENENLEASREDSSFLQKLKKKEYPKIETVKEVEAFTFADHEMGSNEVHLIARHVTTSVVTYLKNFETTVFSEEKMSVSTWSRKKYESKQFLRNIYDDSSIYQCCEHLTESVLYHLTSSISDGTKKGREKEKAWEIQEATFSKIISIHSQVFESRSISIGELALCISEIIIKILFNNKIIQADIAQKMVAIPTKYTYCPGIVSGGFDDLFQDLLVGVIHVLSKEIEVDYHFESNVRNKSFSMHRNNSVPLCNKINRQASPRDWQFSTQQIGQLFQKNKLSYLACKLNSLVGNLKTSESKEVVNKVFNIVSDLFSPDECLDTGMDSGKIQRTYFYSSNNEQPNSILTNNLQLSSKSVFLLNVVCEKLIRILLEECTSTAFPDKGSVSEETSAEECQLLKMLQSVEDGKSDYRKGGMDCECLQVDYMSDLLENVAEIDQDLLTSDSMLTIISHSLVKSLMDKLSHSIQQAPESLPFANKHLNYRTREIQSSFIKARKSELIELGQSKSSLELRSYDSNSLTVSLNNPSVVSSKIQAPFNKHCAVKSSSVSPFERQRTKEMDKVAIHNKLHQEGIYAGVYSATFLEGIISELFFNLSMSLWGKNKNITVSWLNEMNTLFVNNVVNEFNNAQVTVLRNAEERLCFPPVHTETVSKIVDSVYYDVLQQYELKVACGNNPVYDNASIAEQITNGILLEILDYKLPSCFKEHLIPHSYYPLKPEIILQKLQSNLTEFTSLPRSSSDYSTMLSHSFLEDVIRRLLSQLIPPPITCSSLGKKYLMSSDFNEMSTCIINKVMSAISKHKIWFTIYDNQYLYTGKNLQKMVDSVYCNILQMSDSLVSIQKSIVSRSPIMIDQIASFIIQEIIENHLQPFLSGEVLCHPRTPLDPVSTIVTQVLSEVIESHRPQKQSPLDIHLDSFVREIVARLLSKIFSPKHNTEIELKNMTQRIVNSINRHFNKAKIHILYDDKEQAFFSFNTDIVDELATSVYRNALKQHGLDLAVDKESEDSGIFVENITNLIVAAISDYLLHPLFSGDFSASTYSNSVAENIVQDILSNISKSTEPSQSVPLYNTLLPYTFLEDMIRVLLSKLFSSASSLVLNRDTQKDISRVNFNDIASNLVSDIRMKVSQHEIRFSKEEEETKFIYSEDDIQHLVDSVFANVVQTSGSQESAVQNITSSNDILIDRIAGFIIKHICQKHLQPFVSGKSLSSSDTYFDDERRQLFYTSVYSSTFLEDVISGVLRKIFHRVVGIVQTKSIRDSEDELFEKAEELIHLITGEFSKAQVSIIDNTEERLCLPPVERDVVKTIVDMVYSKVLQEYEMEVVPNKDFLNDTKTLAARITNIILAEIFDFQIHPDLIANLPFKSHSKLSANVLIQRVQYDISKSRFQRQASTMYTTMLSHSHLEKIVTQLTSQISPLNTSAEQSDTTKSDLSNTVIKLINEIMSIISKHEICIIKYGNKKQSMISAKDIQSMVDSIYADLSHSNIYQSITKDKKSISDIPVSKIASFIIKEIFNHHIQSFLSEDKTLLLAAVDQTYKLKAIDPKQRELSFIVNSSVFLEEVISELLCKILYAFSHNMLVTENPDRVKLKLTRIVTTLVNSIVLEFTTSEILVADNFDKNLCFSERYKEMVQKIVNSVYGKVLDQYKSLIQIHRVIQSDTICFGRKIYYLLLEEIYDYQVQSLVSGELESSSYSYPQADNIIRNVLNIITKDSHALPPYITVLPHSLLEDMVYRLLGHVFPSTHTENELKEKKFPPDDEFVEAASKLTDEIIKEISEHEIRLSMAEDNAESMQLEPIENLVDSICNNILKTSEFQAEVQKDADKKGCSFLSKLAGFIMKEIMYHHLQPFLHGEESSFSDLSDYDHVSELAKSGKEKTQPSLYSATFLEDIIIDLVHKFCSLLIITEDSKKNEMAELDIMGLALKLANSLIREFKKSDIKVLPNAEKMFSFPPIDKETVDKISNFVYEQFIEKCTSHDIQKGDESNIAIGMIAALTQKAISAFRIQPLFSGDWSSTFFSFLNPDNITQRVQHLPQNTFTQISRCAKENQLSLPDQSYKDTSSTPDCKNMMSTLEINRGTMNRKKSFKTKDTSVKKGDIQNPVLSSINAIMKSGMINLTSGLATGVTNKKEVDENKVGICTQKHSENVSKVTSTTTVKSKDTQEPNLSETFNNNEIEKKRNLIPTDKKGKDDEIYTHFSLIIDDTEYEKEVLGSDSEIGYKKKIDNARESSFKKDDKLFQLSSLKSKRNLGTTTDTLEIRIRTSSNEGRRDSPTQTCRDEEHHSDYEHVQNVIENIFEDVLELSSSPEPAYYSKLSYDQSPPGDNVLNVIQEISRDSAQSVTTKKVSSSTNKNISAKEKEEEEREKEKVREEIKSEPSKPDDPQNQRESKPGIFPAKFLEDVITEMVKQLIFSSIPETQIQDRCQNVSDKQNQAKLYDTAMKLINSLLKEFSDAQIKVFRPDKGNQFPGGKVSSVPKVPPRYKEPTTDEAPSSIKIKSADKMPPMHKMMRKPSSDKIPSIDKTLVNKVVHSSVCNILNDYGSQDSIWKNINSNGENLARRLTSAVINEIFQRQVNLIFCDEVSVSACLPLESKDVVKKVQKLAQTASKECQTSSPYTIILPHKFLENVISALFSKIFSTISSTKTKEPEDNLSTELNFLQMKLVSAVATEISQDKYMTIQYVETLQSDDDEIIQLVVQSVYNNLLPQFGSQEIIQNCVTSGCKILSENIVDLVLREVASNQLQSYFCGELTPHQCVEVENIVEKILKDVFQTTDVPLPKPSHADKLSYNIIEEIAVKFLSKLLSIFPKVHKERTKSLETDMQKITSKVLNSVQEFISKSKIKLVPPTKESPTVPVADNATIENIVNSIYTSVLKHSGSYTSVFKDLMGKSNVLSDTIGFLMVNAISNSEFQPQVEEEVSNSELVLEAVKIMEKVIKIIDELKSKEKSSSRKGLTLDAKLLEEVLALFLAKLIRLPSSSSKDEKNLSKTELNKIASQLSKLVTAEISRSSISLIASDPEEHCLNPENTERIYQVVDSVYSNILQQSGTNKEFYYDIKDTNTAFPKKVASLIIDGVSSFPLDTINSTISNADLSGELDVNRIVQKAQEHAFNVIPELEQEKLDQNLSEEESPIKIVPHVGKKPVKIDPKIISEHLAVISIKTQPLEKLKQECLKRTGHSIAELRRASISGRNYSLGSPDLEKRKTERRTSLDKTGRLDVKPLEAVARNSFQNIRKPDITKVELLKDVQSKNDLIVRLVAHDIDQVYLENYIKEERDSDEDEVVLTQTFAKEEGIKVFEDQVKEVKKPIQSKLSPKSTLSTSSLKKFLSLSKCCQTTASANIESTEAISNQVIESKETHVKRAVAELDMATPKTMPETASSSWEEKPQCKKEEKNLVTEPTHYFIHRIMSSSSYNQEDLISSTGEAEDCHSDPSAKILEESSQEQKPEHGNSVKFITIFERSKDVLGSANPSKEVISETPKPDVSKQGSKMLTKMSSTLSKVFSQCNTNISRSSSPAHQDEH

SEQ ID NO: 25715 - protein, 56 aa, Artificial Sequence
  Synthetic polypeptide
SRASRKNTALPIHWFLPSEILFGLLTSITVRACTKPTLQGLDRLSYWTYLSGSSCL

SEQ ID NO: 25716 - protein, 25 aa, Artificial Sequence
  Synthetic polypeptide
MFKAIEIMPRMIHWNLSPISGLEHL

SEQ ID NO: 25717 - protein, 23 aa, Artificial Sequence
  Synthetic polypeptide
FQIGRRKESNVPNTKKRAKCSRQ

SEQ ID NO: 25718 - protein, 961 aa, Artificial Sequence
  Synthetic polypeptide
VEGRNRMFPTQKNVLNVQGNRDYAKDDPLEFKSHQWFGASVRSKQDKILACAPLYHWRTEMKQEREPVGTCFLQDGTKTVEYAPCRSQDIDADGQGFCQGGFSIDFTKADRVLLGGPGSFYWQGQLISDQVAEIVSKYDPNVYSIKYNNQLATRTAQAIFDDSYLGYSVAVGDFNGDGIDDFVSGVPRAARTLGMVYIYDGKNMSSLYNFTGEQMAAYFGFSVAATDINGDDYADVFIGAPLFMDRGSDGKLQEVGQVSVSLQRASGDFQTTKLNGFEVFARFGSAIAPLGDLDQDGFNDIAIAAPYGGEDKKGIVYIFNGRSTGLNAVPSQILEGQWAARSMPPSFGYSMKGATDIDKNGYPDLIVGAFGVDRAILYRARPVITVNAGLEVYPSILNQDNKTCSLPGTALKVSCFNVRFCLKADGKGVLPRKLNFQVELLLDKLKQKGAIRRALFLYSRSPSHSKNMTISRGGLMQCEELIAYLRDESEFRDKLTPITIFMEYRLDYRTAADTTGLQPILNQFTPANISRQAHILLDCGEDNVCKPKLEVSVDSDQKKIYIGDDNPLTLIVKAQNQGEGAYEAELIVSIPLQADFIGVVRNNEALARLSCAFKTENQTRQVVCDLGNPMKAGTQLLAGLRFSVHQQSEMDTSVKFDLQIQSSNLFDKVSPVVSHKVDLAVLAAVEIRGVSSPDHVFLPIPNWEHKENPETEEDVGPVVQHIYELRNNGPSSFSKAMLHLQWPYKYNNNTLLYILHYDIDGPMNCTSDMEINPLRIKISSLQTTEKNDTVAGQGERDHLITKRDLALSEGDIHTLGCGVAQCLKIVCQVGRLDRGKSAILYVKSLLWTETFMNKENQNHSYSLKSSASFNVIEFPYKNLPIEDITNSTLVTTNVTWGIQPAPMPVPVWVIILAVLAGLLLLAVLVFVMYRMGFFKRVRPPQEEQEREQLQPHENGEGNSET

SEQ ID NO: 25719 - protein, 925 aa, Artificial Sequence
  Synthetic polypeptide
VEGRNRMFPTQKNVLNVQGNRDYAKDDPLEFKSHQWFGASVRSKQDKILACAPLYHWRTEMKQEREPVGTCFLQDGTKTVEYAPCRSRQLISDQVAEIVSKYDPNVYSIKYNNQLATRTAQAIFDDSYLGYSVAVGDFNGDGIDDFVSGVPRAARTLGMVYIYDGKNMSSLYNFTGEQMAAYFGFSVAATDINGDDYADVFIGAPLFMDRGSDGKLQEVGQVSVSLQRASGDFQTTKLNGFEVFARFGSAIAPLGDLDQDGFNDIAIAAPYGGEDKKGIVYIFNGRSTGLNAVPSQILEGQWAARSMPPSFGYSMKGATDIDKNGYPDLIVGAFGVDRAILYRARPVITVNAGLEVYPSILNQDNKTCSLPGTALKVSCFNVRFCLKADGKGVLPRKLNFQVELLLDKLKQKGAIRRALFLYSRSPSHSKNMTISRGGLMQCEELIAYLRDESEFRDKLTPITIFMEYRLDYRTAADTTGLQPILNQFTPANISRQAHILLDCGEDNVCKPKLEVSVDSDQKKIYIGDDNPLTLIVKAQNQGEGAYEAELIVSIPLQADFIGVVRNNEALARLSCAFKTENQTRQVVCDLGNPMKAGTQLLAGLRFSVHQQSEMDTSVKFDLQIQSSNLFDKVSPVVSHKVDLAVLAAVEIRGVSSPDHVFLPIPNWEHKENPETEEDVGPVVQHIYELRNNGPSSFSKAMLHLQWPYKYNNNTLLYILHYDIDGPMNCTSDMEINPLRIKISSLQTTEKNDTVAGQGERDHLITKRDLALSEGDIHTLGCGVAQCLKIVCQVGRLDRGKSAILYVKSLLWTETFMNKENQNHSYSLKSSASFNVIEFPYKNLPIEDITNSTLVTTNVTWGIQPAPMPVPVWVIILAVLAGLLLLAVLVFVMYRMGFFKRVRPPQEEQEREQLQPHENGEGNSET

SEQ ID NO: 25720 - protein, 50 aa, Artificial Sequence
  Synthetic polypeptide
LGIIKRDIENKTIKLCSKILYSPKILQLLLHMGVKIKKELFISSMEDQQA

SEQ ID NO: 25721 - protein, 20 aa, Artificial Sequence
  Synthetic polypeptide
SYVPKFYIAPRYCNCCSIWG

SEQ ID NO: 25722 - protein, 664 aa, Artificial Sequence
  Synthetic polypeptide
PQDIAIAAPYGGEDKKGIVYIFNGRSTGLNAVPSQILEGQWAARSMPPSFGYSMKGATDIDKNGYPDLIVGAFGVDRAILYRARPVITVNAGLEVYPSILNQDNKTCSLPGTALKVSCFNVRFCLKADGKGVLPRKLNFQVELLLDKLKQKGAIRRALFLYSRSPSHSKNMTISRGGLMQCEELIAYLRDESEFRDKLTPITIFMEYRLDYRTAADTTGLQPILNQFTPANISRQAHILLDCGEDNVCKPKLEVSVDSDQKKIYIGDDNPLTLIVKAQNQGEGAYEAELIVSIPLQADFIGVVRNNEALARLSCAFKTENQTRQVVCDLGNPMKAGTQLLAGLRFSVHQQSEMDTSVKFDLQIQSSNLFDKVSPVVSHKVDLAVLAAVEIRGVSSPDHVFLPIPNWEHKENPETEEDVGPVVQHIYELRNNGPSSFSKAMLHLQWPYKYNNNTLLYILHYDIDGPMNCTSDMEINPLRIKISSLQTTEKNDTVAGQGERDHLITKRDLALSEGDIHTLGCGVAQCLKIVCQVGRLDRGKSAILYVKSLLWTETFMNKENQNHSYSLKSSASFNVIEFPYKNLPIEDITNSTLVTTNVTWGIQPAPMPVPVWVIILAVLAGLLLLAVLVFVMYRMGFFKRVRPPQEEQEREQLQPHENGEGNSET

SEQ ID NO: 25723 - protein, 61 aa, Artificial Sequence
  Synthetic polypeptide
KCDTFLSLSFFLLPPCKTCLAPPFAFCHDFSWQYRSGTAKRNRSCERCCKETKVCKTYQEI

SEQ ID NO: 25724 - protein, 293 aa, Artificial Sequence
  Synthetic polypeptide
WLKSVTLSSLSRSFSCLHVRLAWPHLLPSAMIFLGSTEVEQPKGTEVVRDAVRKLKFARHIKKSEGQKIPKVELQISIYGVKILEPKTKEVQHNCQLHRISFCADDKTDKRIFTFICKDSESNKHLCYVFDSEKCAEEITLTIGQAFDLAYRKFLESGGKDVETRKQIAGLQKRIQDLETENMELKNKVQDLENQLRITQVSAPPAGSMTPKSPSTDIFDMIPFSPISHQSSMPTRNGTQPPPVPSRSTEIKRDLFGAEPFDPFNCGAADFPPDIQSKLDEMQRQRWRGSKWD

SEQ ID NO: 25725 - protein, 306 aa, Artificial Sequence
  Synthetic polypeptide
WLKSVTLSSLSRSFSCLHVRLAWPHLLPSAMIFLGSTEVEQPKGTEVVRDAVRKLKFARHIKKSEGQKIPKVELQISIYGVKILEPKTKEVQHNCQLHRISFCADDKTDKRIFTFICKDSESNKHLCYVFDSEKCAEEITLTIGQAFDLAYRKFLESGGKDVETRKQIAGLQKRIQDLETENMELKNKVQDLENQLRITQVSAPPAGSMTPKSPSTDIFDMIPFSPISHQSSMPTRNGTQPPPVPSRSTEIKRDLFGAEPFDPFNCGAADFPPDIQSKLDEMQEGFKMGLTLEGTVFCLDPLDSRC

SEQ ID NO: 25726 - protein, 169 aa, Artificial Sequence
  Synthetic polypeptide
WLKSVTLSSLSRSFSCLHVRLAWPHLLPSAMIFLGSTEVEQPKGTEVVRDAVRKLKFARHIKKSEGQKIPKVELQISIYGVKILEPKTKEVQHNCQLHRISFCADDKTDKRIFTFICKDSESNKHLCYVFDSEKCVSIPDVVGWFVLFYKPGIVLLLALAKYLKMNNFL

SEQ ID NO: 25727 - protein, 70 aa, Artificial Sequence
  Synthetic polypeptide
WLKSVTLSSLSRSFSCLHVRLAWPHLLPSAMIFLGSTEVEQPKGTEVVRDAVRKLKFARHIKKSEGQKIP

SEQ ID NO: 25728 - protein, 9 aa, Artificial Sequence
  Synthetic polypeptide
GRTKDMVKK

SEQ ID NO: 25729 - protein, 6 aa, Artificial Sequence
  Synthetic polypeptide
EELRIW

SEQ ID NO: 25730 - protein, 29 aa, Artificial Sequence
  Synthetic polypeptide
METKPLPGFKIHFLHYETFVYLLCLWRLC

SEQ ID NO: 25731 - protein, 820 aa, Artificial Sequence
  Synthetic polypeptide
WKPNHSLASKSTSYIMKPLYIFCVSGDFVKVYSTVTEECVHILHGHRNLVTGIQLNPNNHLQLYSCSLDGTIKLWDYIDGILIKTFIVGCKLHALFTLAQAEDSVFVIVNKEKPDIFQLVSVKLPKSSSQEVEAKELSFVLDYINQSPKCIAFGNEGVYVAAVREFYLSVYFFKKKTTSRFTLSSSRNKKHAKNNFTCVACHPTEDCIASGHMDGKIRLWRNFYDDKKYTYTCLHWHHDMVMDLAFSVTGTSLLSGGRESVLVEWRDATEKNKEFLPRLGATIEHISVSPAGDLFCTSHSDNKIIIIHRNLEASAVIQGLVKDRSIFTGLMIDPRTKALVLNGKPGHLQFYSLQSDKQLYNLDIIQQEYINDYGLIQIELTKAAFGCFGNWLATVEQRQEKETELELQMKLWMYNKKTQGFILNTKINMPHEDCITALCFCNAEKSEQPTLVTASKDGYFKVWILTDDSDIYKKAVGWTCDFVGSYHKYQATNCCFSEDGSLLAVSFEEIVTIWDSVTWELKCTFCQRAGKIRHLCFGRLTCSKYLLGATENGILCCWNLLSCALEWNAKLNVRVMEPDPNSENIAAISQSSVGSDLFVFKPSEPRPLYIQKGISREKVQWGVFVPRDVPESFTSEAYQWLNRSQFYFLTKSQSLLTFSTKSPEEKLTPTSKQLLAEESLPTTPFYFILGKHRQQQDEKLNETLENELVQLPLTENIPAISELLHTPAHVLPSAAFLCSMFVNSLLLSKETKSAKEIPEDVDMEEEKESEDSDEENDFTEKVQDTSNTGLGEDIIHQLSKSEEKELRKFRKIDYSWIAAL

SEQ ID NO: 25732 - protein, 33 aa, Artificial Sequence
  Synthetic polypeptide
NLCISSVSLETLLKFTAQLQKSVYTYCMDTEIW

SEQ ID NO: 25733 - protein, 79 aa, Artificial Sequence
  Synthetic polypeptide
WKPNHSLASKSTSYIMKPLYIFCVSGDFVKVYSTVTEECVHILHGHRNLVTGIQLNPNNHLQVPLHALRISKRAVFLFP

SEQ ID NO: 25734 - protein, 87 aa, Artificial Sequence
  Synthetic polypeptide
WKPNHSLASKSTSYIMKPLYIFCVSGDFVKVYSTVTEECVHILHGHRNLVTGIQLNPNNHLQSQPTWKLLIKDGFALPFTFIPKEIK

SEQ ID NO: 25735 - protein, 452 aa, Artificial Sequence
  Synthetic polypeptide
MAEETEDAWPTSCYILIITIANIANLASTATAITIQRDWIVVVAGEDRSKLANMNATIRRIDQLTNILAPMAVGQIMTFGSPVIGCGFISGWNLVSMCVEYVLLWKVYQKTPALAVKAGLKEEETELKQLNLHKDTEPKPLEGTHLMGVKDSNIHELEHEQEPTCASQMAEPFRTFRDGWVSYYNQPVFLAGMGLAFLYMTVLGFDCITTGYAYTQGLSGSILSILMGASAITGIMGTVAFTWLRRKCGLVRTGLISGLAQLSCLILCVISVFMPGSPLDLSVSPFEDIRSRFIQGESITPTKIPEITTEIYMSNGSNSANIVPETSPESVPIISVSLLFAGVIAARIGLWSFDLTVTQLLQENVIESERGIINGVQNSMNYLLDLLHFIMVILAPNPEAFGLLVLISVSFVAMGHIMYFRFAQNTLGNKLFACGPDAKEVRKENQANTSVV

SEQ ID NO: 25736 - protein, 15 aa, Artificial Sequence
  Synthetic polypeptide
WQRKLRMPGRLPAIS

SEQ ID NO: 25737 - protein, 55 aa, Artificial Sequence
  Synthetic polypeptide
GCLADFLLYPDHHYCKYCKFGQYCYCNHNPKGLDCCCCRRRQKQTSKYECHNTKD

SEQ ID NO: 25738 - protein, 81 aa, Artificial Sequence
  Synthetic polypeptide
MAEETEDAWPTSCYILIITIANIANLASTATAITIQRDWIVVVAGEDRSKLANMNATIRRIDQLTNILAPMAVGQIMTFGS

SEQ ID NO: 25739 - protein, 16 aa, Artificial Sequence
  Synthetic polypeptide
MAEETEDAWPDPWPTT

SEQ ID NO: 25740 - protein, 75 aa, Artificial Sequence
  Synthetic polypeptide
WQRKLRMPGRILGRLPDLCKIPSLPWSFSLYLGRSDVALCGVCVSGRALWKQPPFDSSLRAGGGRVCSGPGSHHR

SEQ ID NO: 25741 - protein, 561 aa, Artificial Sequence
  Synthetic polypeptide
GCLAGSLADYLTSAKFLLYLGHSLSTWGDRMWHFAVSVFLVELYGNSLLLTAVYGLVVAGSVLVLGAIIGDWVDKNARLKVAQTSLVVQNVSVILCGIILMMVFLHKHELLTMYHGWVLTSCYILIITIANIANLASTATAITIQRDWIVVVAGEDRSKLANMNATIRRIDQLTNILAPMAVGQIMTFGSPVIGCGFISGWNLVSMCVEYVLLWKVYQKTPALAVKAGLKEEETELKQLNLHKDTEPKPLEGTHLMGVKDSNIHELEHEQEPTCASQMAEPFRTFRDGWVSYYNQPVFLAGMGLAFLYMTVLGFDCITTGYAYTQGLSGSILSILMGASAITGIMGTVAFTWLRRKCGLVRTGLISGLAQLSCLILCVISVFMPGSPLDLSVSPFEDIRSRFIQGESITPTKIPEITTEIYMSNGSNSANIVPETSPESVPIISVSLLFAGVIAARIGLWSFDLTVTQLLQENVIESERGIINGVQNSMNYLLDLLHFIMVILAPNPEAFGLLVLISVSFVAMGHIMYFRFAQNTLGNKLFACGPDAKEVRKENQANTSVV

SEQ ID NO: 25742 - protein, 190 aa, Artificial Sequence
  Synthetic polypeptide
GCLAGSLADYLTSAKFLLYLGHSLSTWGDRMWHFAVSVFLVELYGNSLLLTAVYGLVVAGSVLVLGAIIGDWVDKNARLKVAQTSLVVQNVSVILCGIILMMVFLHKHELLTMYHGWVLTSCYILIITIANIANLASTATAITIQRDWIVVVAGEDRSKLANMNATIRRIDQLTNILAPMAVGQIMTFGS

SEQ ID NO: 25743 - protein, 50 aa, Artificial Sequence
  Synthetic polypeptide
WQRKLRMPGRILGRLPDLCKIPSLPWSFSLYLGRSDVALCGVCVSGRALW

SEQ ID NO: 25744 - protein, 45 aa, Artificial Sequence
  Synthetic polypeptide
GCLAGSLADYLTSAKFLLYLGHSLSTWGDRMWHFAVSVFLVELYG

SEQ ID NO: 25745 - protein, 20 aa, Artificial Sequence
  Synthetic polypeptide
WQRKLRMPGRILGRLPDLCK

SEQ ID NO: 25746 - protein, 15 aa, Artificial Sequence
  Synthetic polypeptide
GCLAGSLADYLTSAK

SEQ ID NO: 25747 - protein, 11 aa, Artificial Sequence
  Synthetic polypeptide
YQPGQQRELWI

SEQ ID NO: 25748 - protein, 905 aa, Artificial Sequence
  Synthetic polypeptide
GRRIAWSQEFDTSLDNKENYGFDKIEVRDNGEGIKAVDAPVMAMKYYTSKINSHEDLENLTTYGFRGEALGSICCIAEVLITTRTAADNFSTQYVLDGSGHILSQKPSHLGQGTTVTALRLFKNLPVRKQFYSTAKKCKDEIKKIQDLLMSFGILKPDLRIVFVHNKAVIWQKSRVSDHKMALMSVLGTAVMNNMESFQYHSEESQIYLSGFLPKCDADHSFTSLSTPERSFIFINSRPVHQKDILKLIRHHYNLKCLKESTRLYPVFFLKIDVPTADVDVNLTPDKSQVLLQNKESVLIALENLMTTCYGPLPSTNSYENNKTDVSAADIVLSKTAETDVLFNKVESSGKNYSNVDTSVIPFQNDMHNDESGKNTDDCLNHQISIGDFGYGHCSSEISNIDKNTKNAFQDISMSNVSWENSQTEYSKTCFISSVKHTQSENGNKDHIDESGENEEEAGLENSSEISADEWSRGNILKNSVGENIEPVKILVPEKSLPCKVSNNNYPIPEQMNLNEDSCNKKSNVIDNKSGKVTAYDLLSNRVIKKPMSASALFVQDHRPQFLIENPKTSLEDATLQIEELWKTLSEEEKLKYEEKATKDLERYNSQMKRAIEQESQMSLKDGRKKIKPTSAWNLAQKHKLKTSLSNQPKLDELLQSQIEKRRSQNIKMVQIPFSMKNLKINFKKQNKVDLEEKDEPCLIHNLRFPDAWLMTSKTEVMLLNPYRVEEALLFKRLLENHKLPAEPLEKPIMLTESLFNGSHYLDVLYKMTADDQRYSGSTYLSDPRLTANGFKIKLIPGVSITENYLEIEGMANCLPFYGVADLKEILNAILNRNAKEVYECRPRKVISYLEGEAVRLSRQLPMYLSKEDIQDIIYRMKHQFGNEIKECVHGRPFFHHLTYLPETT

SEQ ID NO: 25749 - protein, 53 aa, Artificial Sequence
  Synthetic polypeptide
WLTPVIPALWEAEAGGSLGARSLIPAWTTKRTMDLIKLRCEITGRVSRLLMHL

SEQ ID NO: 25750 - protein, 154 aa, Artificial Sequence
  Synthetic polypeptide
GRRIAWSQEFDTSLDNKENYGFDKIEVRDNGEGIKAVDAPVMAMKYYTSKINSHEDLENLTTYGFRGEALGSICCIAEVLITTRTAADNFSTQYVLDGSGHILSQKPSHLGQGKKVALYTNILYLFCLNCWFKKKKLLGEYKYIALGLVLIKAS

SEQ ID NO: 25751 - protein, 81 aa, Artificial Sequence
  Synthetic polypeptide
GRRIAWSQEFDTSLDNKENYGFDKIEVRDNGEGIKAVDAPVMAMKYYTSKINSHEDLENLTTYGFRGEALGSICCIAEVQL

SEQ ID NO: 25752 - protein, 866 aa, Artificial Sequence
  Synthetic polypeptide
GRRIAWSQEFDTSLDNKENYGFDKIEVRDNGEGIKAVDAPVMAMKYYTSKINSHEDLENLTTYGFRGEALGSICCIAEVLITTRTAADNFSTQYVLDGSGHILSQKPSHLGQGTTVTALRLFKNLPVRKQFYSTAKKCKDEIKKIQDLLMSFGILKPDLRIVFVHNKIYLSGFLPKCDADHSFTSLSTPERSFIFINSRPVHQKDILKLIRHHYNLKCLKESTRLYPVFFLKIDVPTADVDVNLTPDKSQVLLQNKESVLIALENLMTTCYGPLPSTNSYENNKTDVSAADIVLSKTAETDVLFNKVESSGKNYSNVDTSVIPFQNDMHNDESGKNTDDCLNHQISIGDFGYGHCSSEISNIDKNTKNAFQDISMSNVSWENSQTEYSKTCFISSVKHTQSENGNKDHIDESGENEEEAGLENSSEISADEWSRGNILKNSVGENIEPVKILVPEKSLPCKVSNNNYPIPEQMNLNEDSCNKKSNVIDNKSGKVTAYDLLSNRVIKKPMSASALFVQDHRPQFLIENPKTSLEDATLQIEELWKTLSEEEKLKYEEKATKDLERYNSQMKRAIEQESQMSLKDGRKKIKPTSAWNLAQKHKLKTSLSNQPKLDELLQSQIEKRRSQNIKMVQIPFSMKNLKINFKKQNKVDLEEKDEPCLIHNLRFPDAWLMTSKTEVMLLNPYRVEEALLFKRLLENHKLPAEPLEKPIMLTESLFNGSHYLDVLYKMTADDQRYSGSTYLSDPRLTANGFKIKLIPGVSITENYLEIEGMANCLPFYGVADLKEILNAILNRNAKEVYECRPRKVISYLEGEAVRLSRQLPMYLSKEDIQDIIYRMKHQFGNEIKECVHGRPFFHHLTYLPETT

SEQ ID NO: 25753 - protein, 138 aa, Artificial Sequence
  Synthetic polypeptide
GRRIAWSQEFDTSLDNKENYGFDKIEVRDNGEGIKAVDAPVMAMKYYTSKINSHEDLENLTTYGFRGEALGSICCIAEVLITTRTAADNFSTQYVLDGSGHILSQKPSHLGQGSHSVTQAGLQWHHLGSLQPLPPRLK

SEQ ID NO: 25754 - protein, 632 aa, Artificial Sequence
  Synthetic polypeptide
GRRIAWSQEFDTSLDNKENYGFDKIEVRDNGEGIKAVDAPVMAMKYYTSKINSHEDLENLTTYGFRGEALGSICCIAEVLITTRTAADNFSTQYVLDGSGHILSQKPSHLGQGTTVTALRLFKNLPVRKQFYSTAKKCKDEIKKIQDLLMSFGILKPDLRIVFVHNKIYLSGFLPKCDADHSFTSLSTPERSFIFINSRPVHQKDILKLIRHHYNLKCLKESTRLYPVFFLKIDVPTADVDVNLTPDKSQVLLQNKESVLIALENLMTTCYGPLPSTNSYENNKTDVSAADIVLSKTAETDVLFNKVESSGKNYSNVDTSVIPFQNDMHNDESGKNTDDCLNHQISIGDFGYGHCSSEISNIDKNTKNAFQDISMSNVSWENSQTEYSKTCFISSVKHTQSENGNKDHIDESGENEEEAGLENSSEISADEWSRGNILKNSVGENIEPVKILVPEKSLPCKVSNNNYPIPEQMNLNEDSCNKKSNVIDNKSGKVTAYDLLSNRVIKKPMSASALFVQDHRPQFLIENPKTSLEDATLQIEELWKTLSEEEKLKYEEKATKDLERYNSQMKRAIEQESQMSLKDGRKKIKPTSAWNLAQKHKLKTSLSNQPKLDELLQSQIEKRRSQNIKMSF

SEQ ID NO: 25755 - protein, 167 aa, Artificial Sequence
  Synthetic polypeptide
GRRIAWSQEFDTSLDNKENYGFDKIEVRDNGEGIKAVDAPVMAMKYYTSKINSHEDLENLTTYGFRGEALGSICCIAEVLITTRTAADNFSTQYVLDGSGHILSQKPSHLGQGTTVTALRLFKNLPVRKQFYSTAKKCKDEIKKIQDLLMSFGILKPDLRIVFVHNK

SEQ ID NO: 25756 - protein, 743 aa, Artificial Sequence
  Synthetic polypeptide
GRRIAWSQEFDTSLDNKENYGFDKIEVRDNGEGIKAVDAPVMAMKYYTSKINSHEDLENLTTYGFRGEALGSICCIAEVLITTRTAADNFSTQYVLDGSGHILSQKPSHLGQGTTVTALRLFKNLPVRKQFYSTAKKCKDEIKKIQDLLMSFGILKPDLRIVFVHNKAVIWQKSRVSDHKMALMSVLGTAVMNNMESFQYHSEESQIYLSGFLPKCDADHSFTSLSTPERSFIFINSRPVHQKDILKLIRHHYNLKCLKESTRLYPVFFLKIDVPTADVDVNLTPDKSQVLLQNKESVLIALENLMTTCYGPLPSTNSYENNKTDVSAADIVLSKTAETDVLFNKVESSGKNYSNVDTSVIPFQNDMHNDESGKNTDDCLNHQISIGDFGYGHCSSEISNIDKNTKNAFQDISMSNVSWENSQTEYSKTCFISSVKHTQSENGNKDHIDESGENEEEAGLENSSEISADEWSRGNILKNSVGENIEPVKILVPEKSLPCKVSNNNYPIPEQMNLNEDSCNKKSNVIDNKSGKVTAYDLLSNRVIKKPMSASALFVQDHRPQFLIENPKTSLEDATLQIEELWKTLSEEEKLNLFNGSHYLDVLYKMTADDQRYSGSTYLSDPRLTANGFKIKLIPGVSITENYLEIEGMANCLPFYGVADLKEILNAILNRNAKEVYECRPRKVISYLEGEAVRLSRQLPMYLSKEDIQDIIYRMKHQFGNEIKECVHGRPFFHHLTYLPETT

SEQ ID NO: 25757 - protein, 46 aa, Artificial Sequence
  Synthetic polypeptide
GRRIAWSQEFDTSLDNKENYGFDKIEVRDNGEGIKAVDAPVMAMKY

SEQ ID NO: 25758 - protein, 53 aa, Artificial Sequence
  Synthetic polypeptide
ICKKERKALENVWKKWKDEYFKNLFYKNKISILWSLSHRKVKRMTKTLQKVQL

SEQ ID NO: 25759 - protein, 15 aa, Artificial Sequence
  Synthetic polypeptide
QKLYKRYNCNCFKII

SEQ ID NO: 25760 - protein, 821 aa, Artificial Sequence
  Synthetic polypeptide
KLILQKQNQYIVEFITQKSKTHDKNFTKGTTVTALRLFKNLPVRKQFYSTAKKCKDEIKKIQDLLMSFGILKPDLRIVFVHNKAVIWQKSRVSDHKMALMSVLGTAVMNNMESFQYHSEESQIYLSGFLPKCDADHSFTSLSTPERSFIFINSRPVHQKDILKLIRHHYNLKCLKESTRLYPVFFLKIDVPTADVDVNLTPDKSQVLLQNKESVLIALENLMTTCYGPLPSTNSYENNKTDVSAADIVLSKTAETDVLFNKVESSGKNYSNVDTSVIPFQNDMHNDESGKNTDDCLNHQISIGDFGYGHCSSEISNIDKNTKNAFQDISMSNVSWENSQTEYSKTCFISSVKHTQSENGNKDHIDESGENEEEAGLENSSEISADEWSRGNILKNSVGENIEPVKILVPEKSLPCKVSNNNYPIPEQMNLNEDSCNKKSNVIDNKSGKVTAYDLLSNRVIKKPMSASALFVQDHRPQFLIENPKTSLEDATLQIEELWKTLSEEEKLKYEEKATKDLERYNSQMKRAIEQESQMSLKDGRKKIKPTSAWNLAQKHKLKTSLSNQPKLDELLQSQIEKRRSQNIKMVQIPFSMKNLKINFKKQNKVDLEEKDEPCLIHNLRFPDAWLMTSKTEVMLLNPYRVEEALLFKRLLENHKLPAEPLEKPIMLTESLFNGSHYLDVLYKMTADDQRYSGSTYLSDPRLTANGFKIKLIPGVSITENYLEIEGMANCLPFYGVADLKEILNAILNRNAKEVYECRPRKVISYLEGEAVRLSRQLPMYLSKEDIQDIIYRMKHQFGNEIKECVHGRPFFHHLTYLPETT

SEQ ID NO: 25761 - protein, 9 aa, Artificial Sequence
  Synthetic polypeptide
QKLYKRYNC

SEQ ID NO: 25762 - protein, 32 aa, Artificial Sequence
  Synthetic polypeptide
KLILQKQNQYIVEFITQKSKTHDKNFTKGTTV

SEQ ID NO: 25763 - protein, 782 aa, Artificial Sequence
  Synthetic polypeptide
KLILQKQNQYIVEFITQKSKTHDKNFTKGTTVTALRLFKNLPVRKQFYSTAKKCKDEIKKIQDLLMSFGILKPDLRIVFVHNKIYLSGFLPKCDADHSFTSLSTPERSFIFINSRPVHQKDILKLIRHHYNLKCLKESTRLYPVFFLKIDVPTADVDVNLTPDKSQVLLQNKESVLIALENLMTTCYGPLPSTNSYENNKTDVSAADIVLSKTAETDVLFNKVESSGKNYSNVDTSVIPFQNDMHNDESGKNTDDCLNHQISIGDFGYGHCSSEISNIDKNTKNAFQDISMSNVSWENSQTEYSKTCFISSVKHTQSENGNKDHIDESGENEEEAGLENSSEISADEWSRGNILKNSVGENIEPVKILVPEKSLPCKVSNNNYPIPEQMNLNEDSCNKKSNVIDNKSGKVTAYDLLSNRVIKKPMSASALFVQDHRPQFLIENPKTSLEDATLQIEELWKTLSEEEKLKYEEKATKDLERYNSQMKRAIEQESQMSLKDGRKKIKPTSAWNLAQKHKLKTSLSNQPKLDELLQSQIEKRRSQNIKMVQIPFSMKNLKINFKKQNKVDLEEKDEPCLIHNLRFPDAWLMTSKTEVMLLNPYRVEEALLFKRLLENHKLPAEPLEKPIMLTESLFNGSHYLDVLYKMTADDQRYSGSTYLSDPRLTANGFKIKLIPGVSITENYLEIEGMANCLPFYGVADLKEILNAILNRNAKEVYECRPRKVISYLEGEAVRLSRQLPMYLSKEDIQDIIYRMKHQFGNEIKECVHGRPFFHHLTYLPETT

SEQ ID NO: 25764 - protein, 548 aa, Artificial Sequence
  Synthetic polypeptide
KLILQKQNQYIVEFITQKSKTHDKNFTKGTTVTALRLFKNLPVRKQFYSTAKKCKDEIKKIQDLLMSFGILKPDLRIVFVHNKIYLSGFLPKCDADHSFTSLSTPERSFIFINSRPVHQKDILKLIRHHYNLKCLKESTRLYPVFFLKIDVPTADVDVNLTPDKSQVLLQNKESVLIALENLMTTCYGPLPSTNSYENNKTDVSAADIVLSKTAETDVLFNKVESSGKNYSNVDTSVIPFQNDMHNDESGKNTDDCLNHQISIGDFGYGHCSSEISNIDKNTKNAFQDISMSNVSWENSQTEYSKTCFISSVKHTQSENGNKDHIDESGENEEEAGLENSSEISADEWSRGNILKNSVGENIEPVKILVPEKSLPCKVSNNNYPIPEQMNLNEDSCNKKSNVIDNKSGKVTAYDLLSNRVIKKPMSASALFVQDHRPQFLIENPKTSLEDATLQIEELWKTLSEEEKLKYEEKATKDLERYNSQMKRAIEQESQMSLKDGRKKIKPTSAWNLAQKHKLKTSLSNQPKLDELLQSQIEKRRSQNIKMSF

SEQ ID NO: 25765 - protein, 83 aa, Artificial Sequence
  Synthetic polypeptide
KLILQKQNQYIVEFITQKSKTHDKNFTKGTTVTALRLFKNLPVRKQFYSTAKKCKDEIKKIQDLLMSFGILKPDLRIVFVHNK

SEQ ID NO: 25766 - protein, 659 aa, Artificial Sequence
  Synthetic polypeptide
KLILQKQNQYIVEFITQKSKTHDKNFTKGTTVTALRLFKNLPVRKQFYSTAKKCKDEIKKIQDLLMSFGILKPDLRIVFVHNKAVIWQKSRVSDHKMALMSVLGTAVMNNMESFQYHSEESQIYLSGFLPKCDADHSFTSLSTPERSFIFINSRPVHQKDILKLIRHHYNLKCLKESTRLYPVFFLKIDVPTADVDVNLTPDKSQVLLQNKESVLIALENLMTTCYGPLPSTNSYENNKTDVSAADIVLSKTAETDVLFNKVESSGKNYSNVDTSVIPFQNDMHNDESGKNTDDCLNHQISIGDFGYGHCSSEISNIDKNTKNAFQDISMSNVSWENSQTEYSKTCFISSVKHTQSENGNKDHIDESGENEEEAGLENSSEISADEWSRGNILKNSVGENIEPVKILVPEKSLPCKVSNNNYPIPEQMNLNEDSCNKKSNVIDNKSGKVTAYDLLSNRVIKKPMSASALFVQDHRPQFLIENPKTSLEDATLQIEELWKTLSEEEKLNLFNGSHYLDVLYKMTADDQRYSGSTYLSDPRLTANGFKIKLIPGVSITENYLEIEGMANCLPFYGVADLKEILNAILNRNAKEVYECRPRKVISYLEGEAVRLSRQLPMYLSKEDIQDIIYRMKHQFGNEIKECVHGRPFFHHLTYLPETT

SEQ ID NO: 25767 - protein, 661 aa, Artificial Sequence
  Synthetic polypeptide
KLILQKQNQYIVEFITQKSKTHDKNFTKGTTVTALRLFKNLPVRKQFYSTAKKCKDEIKKIQDLLMSFGILKPDLRIVFVHNKAVIWQKSRVSDHKMALMSVLGTAVMNNMESFQYHSEESQIYLSGFLPKCDADHSFTSLSTPERSFIFINSRPVHQKDILKLIRHHYNLKCLKESTRLYPVFFLKIDVPTADVDVNLTPDKSQVLLQNKESVLIALENLMTTCYGPLPSTNSYENNKTDVSAADIVLSKTAETDVLFNKVESSGKNYSNVDTSVIPFQNDMHNDESGKNTDDCLNHQISIGDFGYGHCSSEISNIDKNTKNAFQDISMSNVSWENSQTEYSKTCFISSVKHTQSENGNKDHIDESGENEEEAGLENSSEISADEWSRGNILKNSVGENIEPVKILVPEKSLPCKVSNNNYPIPEQMNLNEDSCNKKSNVIDNKSGKVTAYDLLSNRVIKKPMSASALFVQDHRPQFLIENPKTSLEDATLQIEELWKTLSEEEKLKYEEKATKDLERYNSQMKRAIEQESQMSLKDGRKKIKPTSAWNLAQKHKLKTSLSNQPKLDELLQSQIEKRRSQNIKMVQIPFSMKNLKINFKKQNKVDLEEKDEPCLIHNLRFPDAWLMTSKTEVMLLNPYRVEEALLFKRLLENHKLPAEPL

SEQ ID NO: 25768 - protein, 22 aa, Artificial Sequence
  Synthetic polypeptide
LSQLRRMLLASSGYNCNCFKII

SEQ ID NO: 25769 - protein, 801 aa, Artificial Sequence
  Synthetic polypeptide
GGCYWHLVGTTVTALRLFKNLPVRKQFYSTAKKCKDEIKKIQDLLMSFGILKPDLRIVFVHNKAVIWQKSRVSDHKMALMSVLGTAVMNNMESFQYHSEESQIYLSGFLPKCDADHSFTSLSTPERSFIFINSRPVHQKDILKLIRHHYNLKCLKESTRLYPVFFLKIDVPTADVDVNLTPDKSQVLLQNKESVLIALENLMTTCYGPLPSTNSYENNKTDVSAADIVLSKTAETDVLFNKVESSGKNYSNVDTSVIPFQNDMHNDESGKNTDDCLNHQISIGDFGYGHCSSEISNIDKNTKNAFQDISMSNVSWENSQTEYSKTCFISSVKHTQSENGNKDHIDESGENEEEAGLENSSEISADEWSRGNILKNSVGENIEPVKILVPEKSLPCKVSNNNYPIPEQMNLNEDSCNKKSNVIDNKSGKVTAYDLLSNRVIKKPMSASALFVQDHRPQFLIENPKTSLEDATLQIEELWKTLSEEEKLKYEEKATKDLERYNSQMKRAIEQESQMSLKDGRKKIKPTSAWNLAQKHKLKTSLSNQPKLDELLQSQIEKRRSQNIKMVQIPFSMKNLKINFKKQNKVDLEEKDEPCLIHNLRFPDAWLMTSKTEVMLLNPYRVEEALLFKRLLENHKLPAEPLEKPIMLTESLFNGSHYLDVLYKMTADDQRYSGSTYLSDPRLTANGFKIKLIPGVSITENYLEIEGMANCLPFYGVADLKEILNAILNRNAKEVYECRPRKVISYLEGEAVRLSRQLPMYLSKEDIQDIIYRMKHQFGNEIKECVHGRPFFHHLTYLPETT

SEQ ID NO: 25770 - protein, 4 aa, Artificial Sequence
  Synthetic polypeptide
WVQL

SEQ ID NO: 25771 - protein, 16 aa, Artificial Sequence
  Synthetic polypeptide
LSQLRRMLLASSGYNC

SEQ ID NO: 25772 - protein, 12 aa, Artificial Sequence
  Synthetic polypeptide
GGCYWHLVGTTV

SEQ ID NO: 25773 - protein, 762 aa, Artificial Sequence
  Synthetic polypeptide
GGCYWHLVGTTVTALRLFKNLPVRKQFYSTAKKCKDEIKKIQDLLMSFGILKPDLRIVFVHNKIYLSGFLPKCDADHSFTSLSTPERSFIFINSRPVHQKDILKLIRHHYNLKCLKESTRLYPVFFLKIDVPTADVDVNLTPDKSQVLLQNKESVLIALENLMTTCYGPLPSTNSYENNKTDVSAADIVLSKTAETDVLFNKVESSGKNYSNVDTSVIPFQNDMHNDESGKNTDDCLNHQISIGDFGYGHCSSEISNIDKNTKNAFQDISMSNVSWENSQTEYSKTCFISSVKHTQSENGNKDHIDESGENEEEAGLENSSEISADEWSRGNILKNSVGENIEPVKILVPEKSLPCKVSNNNYPIPEQMNLNEDSCNKKSNVIDNKSGKVTAYDLLSNRVIKKPMSASALFVQDHRPQFLIENPKTSLEDATLQIEELWKTLSEEEKLKYEEKATKDLERYNSQMKRAIEQESQMSLKDGRKKIKPTSAWNLAQKHKLKTSLSNQPKLDELLQSQIEKRRSQNIKMVQIPFSMKNLKINFKKQNKVDLEEKDEPCLIHNLRFPDAWLMTSKTEVMLLNPYRVEEALLFKRLLENHKLPAEPLEKPIMLTESLFNGSHYLDVLYKMTADDQRYSGSTYLSDPRLTANGFKIKLIPGVSITENYLEIEGMANCLPFYGVADLKEILNAILNRNAKEVYECRPRKVISYLEGEAVRLSRQLPMYLSKEDIQDIIYRMKHQFGNEIKECVHGRPFFHHLTYLPETT

SEQ ID NO: 25774 - protein, 528 aa, Artificial Sequence
  Synthetic polypeptide
GGCYWHLVGTTVTALRLFKNLPVRKQFYSTAKKCKDEIKKIQDLLMSFGILKPDLRIVFVHNKIYLSGFLPKCDADHSFTSLSTPERSFIFINSRPVHQKDILKLIRHHYNLKCLKESTRLYPVFFLKIDVPTADVDVNLTPDKSQVLLQNKESVLIALENLMTTCYGPLPSTNSYENNKTDVSAADIVLSKTAETDVLFNKVESSGKNYSNVDTSVIPFQNDMHNDESGKNTDDCLNHQISIGDFGYGHCSSEISNIDKNTKNAFQDISMSNVSWENSQTEYSKTCFISSVKHTQSENGNKDHIDESGENEEEAGLENSSEISADEWSRGNILKNSVGENIEPVKILVPEKSLPCKVSNNNYPIPEQMNLNEDSCNKKSNVIDNKSGKVTAYDLLSNRVIKKPMSASALFVQDHRPQFLIENPKTSLEDATLQIEELWKTLSEEEKLKYEEKATKDLERYNSQMKRAIEQESQMSLKDGRKKIKPTSAWNLAQKHKLKTSLSNQPKLDELLQSQIEKRRSQNIKMSF

SEQ ID NO: 25775 - protein, 63 aa, Artificial Sequence
  Synthetic polypeptide
GGCYWHLVGTTVTALRLFKNLPVRKQFYSTAKKCKDEIKKIQDLLMSFGILKPDLRIVFVHNK

SEQ ID NO: 25776 - protein, 639 aa, Artificial Sequence
  Synthetic polypeptide
GGCYWHLVGTTVTALRLFKNLPVRKQFYSTAKKCKDEIKKIQDLLMSFGILKPDLRIVFVHNKAVIWQKSRVSDHKMALMSVLGTAVMNNMESFQYHSEESQIYLSGFLPKCDADHSFTSLSTPERSFIFINSRPVHQKDILKLIRHHYNLKCLKESTRLYPVFFLKIDVPTADVDVNLTPDKSQVLLQNKESVLIALENLMTTCYGPLPSTNSYENNKTDVSAADIVLSKTAETDVLFNKVESSGKNYSNVDTSVIPFQNDMHNDESGKNTDDCLNHQISIGDFGYGHCSSEISNIDKNTKNAFQDISMSNVSWENSQTEYSKTCFISSVKHTQSENGNKDHIDESGENEEEAGLENSSEISADEWSRGNILKNSVGENIEPVKILVPEKSLPCKVSNNNYPIPEQMNLNEDSCNKKSNVIDNKSGKVTAYDLLSNRVIKKPMSASALFVQDHRPQFLIENPKTSLEDATLQIEELWKTLSEEEKLNLFNGSHYLDVLYKMTADDQRYSGSTYLSDPRLTANGFKIKLIPGVSITENYLEIEGMANCLPFYGVADLKEILNAILNRNAKEVYECRPRKVISYLEGEAVRLSRQLPMYLSKEDIQDIIYRMKHQFGNEIKECVHGRPFFHHLTYLPETT

SEQ ID NO: 25777 - protein, 641 aa, Artificial Sequence
  Synthetic polypeptide
GGCYWHLVGTTVTALRLFKNLPVRKQFYSTAKKCKDEIKKIQDLLMSFGILKPDLRIVFVHNKAVIWQKSRVSDHKMALMSVLGTAVMNNMESFQYHSEESQIYLSGFLPKCDADHSFTSLSTPERSFIFINSRPVHQKDILKLIRHHYNLKCLKESTRLYPVFFLKIDVPTADVDVNLTPDKSQVLLQNKESVLIALENLMTTCYGPLPSTNSYENNKTDVSAADIVLSKTAETDVLFNKVESSGKNYSNVDTSVIPFQNDMHNDESGKNTDDCLNHQISIGDFGYGHCSSEISNIDKNTKNAFQDISMSNVSWENSQTEYSKTCFISSVKHTQSENGNKDHIDESGENEEEAGLENSSEISADEWSRGNILKNSVGENIEPVKILVPEKSLPCKVSNNNYPIPEQMNLNEDSCNKKSNVIDNKSGKVTAYDLLSNRVIKKPMSASALFVQDHRPQFLIENPKTSLEDATLQIEELWKTLSEEEKLKYEEKATKDLERYNSQMKRAIEQESQMSLKDGRKKIKPTSAWNLAQKHKLKTSLSNQPKLDELLQSQIEKRRSQNIKMVQIPFSMKNLKINFKKQNKVDLEEKDEPCLIHNLRFPDAWLMTSKTEVMLLNPYRVEEALLFKRLLENHKLPAEPL

SEQ ID NO: 25778 - protein, 19 aa, Artificial Sequence
  Synthetic polypeptide
GRAQWLMPVIPALWEAKSF

SEQ ID NO: 25779 - protein, 159 aa, Artificial Sequence
  Synthetic polypeptide
SQHFGRPSLFNGSHYLDVLYKMTADDQRYSGSTYLSDPRLTANGFKIKLIPGVSITENYLEIEGMANCLPFYGVADLKEILNAILNRNAKEVYECRPRKVISYLEGEAVRLSRQLPMYLSKEDIQDIIYRMKHQFGNEIKECVHGRPFFHHLTYLPETT

SEQ ID NO: 25780 - protein, 24 aa, Artificial Sequence
  Synthetic polypeptide
PGAVAHACNPSTLGGQVFLMDLII

SEQ ID NO: 25781 - protein, 10 aa, Artificial Sequence
  Synthetic polypeptide
SQHFGRPSLF

SEQ ID NO: 25782 - protein, 19 aa, Artificial Sequence
  Synthetic polypeptide
PGAVAHACNPSTLGGQVFL

SEQ ID NO: 25783 - protein, 105 aa, Artificial Sequence
  Synthetic polypeptide
SQHFGRPSLFNGSHYLDVLYKMTADDQRYSGSTYLSDPRLTANGFKIKLIPGVSITENYLEIEGMANCLPFYGVADLKEILNAILNRNAKEVYECRPRKVISYLE

SEQ ID NO: 25784 - protein, 22 aa, Artificial Sequence
  Synthetic polypeptide
GRAQWLMPVIPALWEAKTFYIK

SEQ ID NO: 25785 - protein, 11 aa, Artificial Sequence
  Synthetic polypeptide
SQHFGRPRRFI

SEQ ID NO: 25786 - protein, 159 aa, Artificial Sequence
  Synthetic polypeptide
PGAVAHACNPSTLGGQDVLYKMTADDQRYSGSTYLSDPRLTANGFKIKLIPGVSITENYLEIEGMANCLPFYGVADLKEILNAILNRNAKEVYECRPRKVISYLEGEAVRLSRQLPMYLSKEDIQDIIYRMKHQFGNEIKECVHGRPFFHHLTYLPETT

SEQ ID NO: 25787 - protein, 105 aa, Artificial Sequence
  Synthetic polypeptide
PGAVAHACNPSTLGGQDVLYKMTADDQRYSGSTYLSDPRLTANGFKIKLIPGVSITENYLEIEGMANCLPFYGVADLKEILNAILNRNAKEVYECRPRKVISYLE

SEQ ID NO: 25788 - protein, 338 aa, Artificial Sequence
  Synthetic polypeptide
RRFTHLFTSWHRFNAFKRTNTILHHLRMSKHTDAAEEVLLEKKGCTGVITLNRPKFLNALTLNMIRQIYPQLKKWEQDPETFLIIIKGAGGKAFCAGGDIRVISEAEKAKQKIAPVFFREEYMLNNAVGSCQKPYVALIHGITMGGGVGLSVHGQFRVATEKCLFAMPETAIGLFPDVGGGYFLPRLQGKLGYFLALTGFRLKGRDVYRAGIATHFVDSEKLAMLEEDLLALKSPSKENIASVLENYHTESKIDRDKSFILEEHMDKINSCFSANTVEEIIENLQQDGSSFALEQLKVINKMSPTSLKITLRQLMEGSSKTLQEVLTMEYRLSQACMF

SEQ ID NO: 25789 - protein, 25 aa, Artificial Sequence
  Synthetic polypeptide
GASHTFSLLGTGLMHSKGLIPYCTI

SEQ ID NO: 25790 - protein, 12 aa, Artificial Sequence
  Synthetic polypeptide
ALHTPFHFLAQV

SEQ ID NO: 25791 - protein, 386 aa, Artificial Sequence
  Synthetic polypeptide
RRFTHLFTSWHRFNAFKRTNTILHHLRMSKHTDAAEEVLLEKKGCTGVITLNRPKFLNALTLNMIRQIYPQLKKWEQDPETFLIIIKGAGGKAFCAGGDIRVISEAEKAKQKIAPVFFREEYMLNNAVGSCQKPYVALIHGITMGGGVGLSVHGQFRVATEKCLFAMPETAIGLFPDVGGGYFLPRLQGKLGYFLALTGFRLKGRDVYRAGIATHFVDSEKLAMLEEDLLALKSPSKENIASVLENYHTESKIDRDKSFILEEHMDKINSCFSANTVEEIIENLQQDGSSFALEQLKVINKMSPTSLKITLRQLMEGSSKTLQEVLTMEYRLSQACMRGHDFHEGVRAVLIDKDQSPKWKPADLKEVTEEDLNNHFKSLGSSDLKF

SEQ ID NO: 25792 - protein, 219 aa, Artificial Sequence
  Synthetic polypeptide
RRFTHLFTSWHRFNAFKRTNTILHHLRMSKHTDAAEEVLLEKKGCTGVITLNRPKFLNALTLNMIRQIYPQLKKWEQDPETFLIIIKGAGGKAFCAGGDIRVISEAEKAKQKIAPVFFREEYMLNNAVGSCQKPYVALIHGITMGGGVGLSVHGQFRVATEKCLFAMPETAIGLFPDVGGGYFLPRLQGKLGYFLALTGFRLKGRDVYRAGIATHFVDS

SEQ ID NO: 25793 - protein, 10 aa, Artificial Sequence
  Synthetic polypeptide
EQLQSTGLSE

SEQ ID NO: 25794 - protein, 38 aa, Artificial Sequence
  Synthetic polypeptide
RVEPRWPNRNSSSLQVSASDTRGHLGSMHFLPQCSRSP

SEQ ID NO: 25795 - protein, 265 aa, Artificial Sequence
  Synthetic polypeptide
GWSQDGRIGTAPVYRSQRVTHAAIWAACISYLSAAVPPELRTSAQGILQGLHLGLGRGCGAMIGGVLVNYFGAAATFRGIGMACLVILLLFALIQWLAVPDEEEDKTMLAERIPVPSSPVPIATIDLVQQQTEDVMPRIEPRLPPKKTKHQEEQEDVNKPAWGVSSSPWVTFVYALYQIKEMMQLTRDNRASEIQPLQGTNENRENSPAGRAQPVPCETHSDPSRNQPSPDAAASQTQTSPAHPSVDPCTEESEEQQAQLAAGGH

SEQ ID NO: 25796 - protein, 209 aa, Artificial Sequence
  Synthetic polypeptide
GWSQDGRIGTAPVYRSQRVTHAAIWAACISYLSAAVPPELRTSAQGILQGLHLGLGRGCGAMIGGVLVNYFGAAATFRGIGMACLVILLLFALIQWLAVPDEEEDKTMLAERIPVPSSPVPIATIDLVQQQTEDVMPRIEPRLPPKKTKHQEEQEDVNKPAWGVSSSPWVTFVYALYQIKEMMQLTRDNRASEIQPLQLHIGKEMKGDQ

SEQ ID NO: 25797 - protein, 191 aa, Artificial Sequence
  Synthetic polypeptide
GWSQDGRIGTAPVYRSQRVTHAAIWAACISYLSAAVPPELRTSAQGILQGLHLGLGRGCGAMIGGVLVNYFGAAATFRGIGMACLVILLLFALIQWLAVPDEEEDKTMLAERIPVPSSPVPIATIDLVQQQTEDVMPRIEPRLPPKKTKHQEEQEDVNKPAWGVSSSPWVTFVYALYQIKEMMQLTRDNRA

SEQ ID NO: 25798 - protein, 17 aa, Artificial Sequence
  Synthetic polypeptide
HPDLGLLASGSFVGVKL

SEQ ID NO: 25799 - protein, 5 aa, Artificial Sequence
  Synthetic polypeptide
PLEVS

SEQ ID NO: 25800 - protein, 393 aa, Artificial Sequence
  Synthetic polypeptide
SWTSSLWKFRRCKALKEKDLIRTSESDCYCYNQNSQVEWKYIWSTMQVKITSPGLFRIVYIAERHNCQYPENILSFIKCVIHNFWIPKESNEITIIINPYRETVCFSVEPVKKIFNYMIHVNRNIMDFKLFLVFVAGVFLFFYARTLSQSPTFYYSSGTVLGVLMTLVFVLLLVKRFIPKYSTFWALMVGCWFASVYIVCQLMEDLKWLWYENRIYVLGYVLIVGFFSFVVCYKHGPLADDRSRSLLMWMLRLLSLVLVYAGVAVPQFAYAAIILLMSSWSLHYPLRACSYMRWKMEQWFTSKELVVKYLTEDEYREQADAETNSALEELRRACRKPDFPSWLVVSRLHTPSKFADFVLGGSHLSPEEISLHEEQYGLGGAFLEEQLFNPSTA

SEQ ID NO: 25801 - protein, 61 aa, Artificial Sequence
  Synthetic polypeptide
SWTSSLWKFRRCKALKEKDLIRTSESDCYCYNQNSQVEWKYIWSTMQGDCVLLCGACQEDI

SEQ ID NO: 25802 - protein, 42 aa, Artificial Sequence
  Synthetic polypeptide
ALWEAEAGGSQGWSSCKIWSCWGHSFSCPQCYGYDVLVSSSG

SEQ ID NO: 25803 - protein, 205 aa, Artificial Sequence
  Synthetic polypeptide
HFGRLRRADHKVGLPAKSGVAGGILLVVPNVMGMMCWSPPLDKMGNSVKGIHFCHDLVSLCNFHNYDNLRHFAKKLDPRREGGDQRVKSVINLLFAAYTGDVSALRRFALSAMDMEQRDYDSRTALHVAAAEGHVEVVKFLLEACKVNPFPKDRWNNTPMDEALHFGHHDVFKILQEYQVQYTPQGDSDNGKENQTVHKNLDGLL

SEQ ID NO: 25804 - protein, 20 aa, Artificial Sequence
  Synthetic polypeptide
GGRITRLVFLQNLELLGAFF

SEQ ID NO: 25805 - protein, 134 aa, Artificial Sequence
  Synthetic polypeptide
HFGRLRRADHKVGLPAKSGVAGGILLVVPNVMGMMCWSPPLDKMGNSVKGIHFCHDLVSLCNFHNYDNLRHFAKKLDPRREGGDQRHSFGPLDYESLQQELALKETVWKKVSPESNEDISTTVVYRMESLGEKS

SEQ ID NO: 25806 - protein, 129 aa, Artificial Sequence
  Synthetic polypeptide
HFGRLRRADHKVGLPAKSGVAGGILLVVPNVMGMMCWSPPLDKMGNSVKGIHFCHDLVSLCNFHNYDNLRHFAKKLDPRREGGDQRVKSVINLLFAAYTGDVSALRRFALSAMDMEQRDYDSRTALHVA

SEQ ID NO: 25807 - protein, 55 aa, Artificial Sequence
  Synthetic polypeptide
PLLPLSLTVVLSVLHLSQATKEVPADKEFRLSNSVLYPGLEGSKNSAGTEASKAL

SEQ ID NO: 25808 - protein, 347 aa, Artificial Sequence
  Synthetic polypeptide
LLCFLCCISPRQQKRYQQTKSSALVIQSYIRGWKARKILRELKHQKRCKEAVTTIAAYWHGTQVRREYRKFFRANAGKKIYEFTLQRIVQKYFLEMKNKMPSLSPIDKNWPSRPYLFLDSTHKELKRIFHLWRCKKYRDQFTDQQKLIYEEKLEASELFKDKKALYPSSVGQPFQGAYLEINKNPKYKKLKDAIEEKIIIAEVVNKINRANGKSTSRIFLLTNNNLLLADQKSGQIKSEVPLVDVTKVSMSSQNDGFFAVHLKEGSEAASKGDFLFSSDHLIEMATKLYRTTLSQTKQKLNIEISDEFLVQFRQDKVCVKFIQGNQKNGSVPTCKRKNNRLLEVAVP

SEQ ID NO: 25809 - protein, 41 aa, Artificial Sequence
  Synthetic polypeptide
VFFDLPHLEVTSAASEPDCCAFCAASLPGNKRGTSRQRVPP

SEQ ID NO: 25810 - protein, 405 aa, Artificial Sequence
  Synthetic polypeptide
LLCFLCCISPRQQKRYQQTKSSALVIQSYIRGWKARKILRELKHQKRCKEAVTTIAAYWHGTQARRELRRLKEEARNKHAIAVIWAYWLGSKARRELKRLKEEARRKHAVAVIWAYWLGLKVRREYRKFFRANAGKKIYEFTLQRIVQKYFLEMKNKMPSLSPIDKNWPSRPYLFLDSTHKELKRIFHLWRCKKYRDQFTDQQKLIYEEKLEASELFKDKKALYPSSVGQPFQGAYLEINKNPKYKKLKDAIEEKIIIAEVVNKINRANGKSTSRIFLLTNNNLLLADQKSGQIKSEVPLVDVTKVSMSSQNDGFFAVHLKEGSEAASKGDFLFSSDHLIEMATKLYRTTLSQTKQKLNIEISDEFLVQFRQDKVCVKFIQGNQKNGSVPTCKRKNNRLLEVAVP

SEQ ID NO: 25811 - protein, 376 aa, Artificial Sequence
  Synthetic polypeptide
LLCFLCCISPRQQKRYQQTKSSALVIQSYIRGWKARKILRELKHQKRCKEAVTTIAAYWHGTQARRELKRLKEEARRKHAVAVIWAYWLGLKVRREYRKFFRANAGKKIYEFTLQRIVQKYFLEMKNKMPSLSPIDKNWPSRPYLFLDSTHKELKRIFHLWRCKKYRDQFTDQQKLIYEEKLEASELFKDKKALYPSSVGQPFQGAYLEINKNPKYKKLKDAIEEKIIIAEVVNKINRANGKSTSRIFLLTNNNLLLADQKSGQIKSEVPLVDVTKVSMSSQNDGFFAVHLKEGSEAASKGDFLFSSDHLIEMATKLYRTTLSQTKQKLNIEISDEFLVQFRQDKVCVKFIQGNQKNGSVPTCKRKNNRLLEVAVP

SEQ ID NO: 25812 - protein, 436 aa, Artificial Sequence
  Synthetic polypeptide
YPLGSTLVFTAWICGIISITVISLLSLLGVILVPIINQGCFKFLLTFLVALAVGTMSGDALLHLLPHSQGGHDHSHQHAHGHGHSHGHESNKFLEEYDAVLKGLVALGGIYLLFIIEHCIRMFKHYKQQRGKQKWFMKQNTEESTIGRKLSDHKLNNTPDSDWLQLKPLAGTDDSVVSEDRLNETELTDLEGQQESPPKNYLCIEEEKIIDHSHSDGLHTIHEHDLHAAAHNHHGENKTVLRKHNHQWHHKHSHHSHGPCHSGSDLKETGIANIAWMVIMGDGIHNFSDGLAIGAAFSAGLTGGISTSIAVFCHELPHELGDFAVLLKAGMTVKQAIVYNLLSAMMAYIGMLIGTAVGQYANNITLWIFAVTAGMFLYVALVDMLPEMLHGDGDNEEHGFCPVGQFILQNLGLLFGFAIMLVIALYEDKIVFDIQF

SEQ ID NO: 25813 - protein, 27 aa, Artificial Sequence
  Synthetic polypeptide
THLAPPWCSQPGFVVSFLSLSLACFPC

SEQ ID NO: 25814 - protein, 21 aa, Artificial Sequence
  Synthetic polypeptide
PTWLHLGVHSLDLWYHFYHCH

SEQ ID NO: 25815 - protein, 45 aa, Artificial Sequence
  Synthetic polypeptide
NPRDCYLVEPGLALMSLTELIWKYSLWLLNKSLLSKEVLMQVLIY

SEQ ID NO: 25816 - protein, 13 aa, Artificial Sequence
  Synthetic polypeptide
IQGTVILWSLGLL

SEQ ID NO: 25817 - protein, 2658 aa, Artificial Sequence
  Synthetic polypeptide
SKGLLSCGAWACFDEFNRIDLEVLSVVAQQILTIQRGINAGADILMFEGTELKLDPTCAVFITMNPGYAGRSELPDNLKALFRTVAMMVPDYAMIAEIVLYSCGFVTARPLSVKIVATYRLCSEQLSSQHHYDYGMRAVKSVLTAAGNLKLKYPNENEEILLLRSIIDVNLPKFLSHDLPLFEGITSDLFPGVKLPKPDYNDLLAAIKDNCASMNLQMTAFFSEKILQVYEMMIVRHGFMIVGEPFGGKTSAYRVLAGALNDICEKGLMEENKVQITVLNPKSVTMGQLYGQFDSVSHEWSDGVLAVSFRAFASSVTPDRKWLIFDGPVDAVWIENMNTVLDDNKKLCLMSGEIIQMSPQMNLIFEPMDLEVASPATVSRCGMIYMEPHMLGWRPLMLSWVNLLPASVSVIQKEFIMGLFDRMVPVSVEFIRKHTKELSPTSDTNLVRSLMNLIDCFMDDFADEVKLKERNDRETYSLLEGIFLFSLIWSVGASCTDDDRLKFNKILRELMESPISDRTRNTFKLQSGTEQTSSKALTVPFPEKGTIYDYQFVTEGIGKWEPWIKKLKEAPPIPKDVMFNEIIVPTLDTIRYSALMELLTTHQKPSIFVGPTGTGKSVYITNFLLNQLNKEIYKPLLINFSAQTTAAQTQNIVMSKLDKRRKGVFGPPLGKRMVVFVDDVNMPAREVYGAQPPIELLRQWLDHWNWYDLKDCSMIKLVDIQIMCAMGPPGGGRNPVTPRYMRHFNIITINEFSDKSMYTIFSRILTWHLEICYKFPDEFLDLTTQIVNGTMTLYKEAMKNLLPTPAKSHYLFNLRDFSRVIQGVCLSRPETTETTEVIKRLWVHEVLRVYYDRLLDNTDRSWLINYIQEILRNYMYEDFHELFQRLDFDNDGMVEADDLRSLMFCDFHDPKREDTNYREIADVDNLRMIVEIHLEEYNNISKKPMNLVLFRFAIEHISRISRILKQPRSHALLVGVGGSGRQSVTRLAAHMADYSVFQVEISKGYDTTEWHEDLKVILRKCAEGEMQGVFLFTDTQIKEESFLEDVSNLLNAGEIPNLFALDEKQEICDKMRQLDRQRDKTKQTDGSPIALFNMFIDHCRSQLHVVLAMSPIGDAFRNRLRKFPALVNCCTIDWFQSWPEDALQAVASRFLEEIEMSEEIRDGCIDMCKSFHTSTIDLSKSFFVELQRYNYVTPTSYLELISTFKLLLEKKRSEVMKMKKRYEVGLEKLDSASSQVATMQMELEALHPQLKVASKEVDEMMIMIEKESVEVAKTEKIVKADETIANEQAMASKAIKDECDADLAGALPILESALAALDTLTAQDITVVKSMKSPPAGVKLVMEAICILKGIKADKIPDPTGSGKKIEDFWGPAKRLLGDMRFLQSLHEYDKDNIPPAYMNIIRKNYIPNPDFVPEKIRNASTAAEGLCKWVIAMDSYDKVAKIVAPKKIKLAAAEGELKIAMDGLRKKQAALKEVQDKLARLQDTLELNKQKKADLENQVDLCSKKLERAEQLIGGLGGEKTRWSHTALELGQLYINLTGDILISSGVVAYLGAFTSTYRQNQTKEWTTLCKGRDIPCSDDCSLMGTLGEAVTIRTWNIAGLPSDSFSIDNGIIIMNARRWPLMIDPQSQANKWIKNMEKANSLYVIKLSEPDYVRTLENCIQFGTPVLLENVGEELDPILEPLLLKQTFKQGGSTCIRLGDSTIEYAPDFRFYITTKLRNPHYLPETSVKVTLLNFMITPEGMQDQLLGIVVAQERPDLEEEKQALILQGAENKRQLKEIEDKILEVLSSSEGNILEDETAIKILSSSKALANEISQKQEVAEETEKKIDTTRMGYRPIAIHSSILFFSLADLANIEPMYQYSLTWFINLFILSIENSEKSEILAKRLQILKDHFTYSLYVNVCRSLFEKDKLLFSFCLTINLLLHERAINKAEWRFLLTGGIGLDNPYANLCTWLPQKSWDEICRLDDLPAFKTIRREFMRLKDGWKKVYDSLEPHHEVFPEEWEDKANEFQRMLIIRCLRPDKVIPMLQEFIINRLGRAFIEPPPFDLAKAFGDSNCCAPLIFVLSPGADPMAALLKFADDQGYGGSKLSSLSLGQGQGPIAMKMLEKAVKEGTWVVLQNCHLATSWMPTLEKVCEELSPESTHPDFRMWLTSYPSPNFPVSVLQNGVKMTNEAPKGLRANIIRSYLMDPISDPEFFGSCKKPEEFKKLLYGLCFFHALVQERRKFGPLGWNIPYEFNETDLRISVQQLHMFLNQYEELPYEALRYMTGECNYGGRVTDDWDRRTLRSILNKFFNPELVENSDYKFDSSGIYFVPPSGDHKSYIEYTKTLPLTPAPEIFGMNANADITKDQSETQLLFDNILLTQSRSAGAGAKSSDEVVNEVASDILGKLPNNFDIEAAMRRYPTTYTQSMNTVLVQEMGRFNKLLKTIRDSCVNIQKAIKGLAVMSTDLEEVVSSILNVKIPEMWMGKSYPSLKPLGSYVNDFLARLKFLQQWYEVGPPPVFWLSGFFFTQAFLTGAQQNYARKYTIPIDLLGFDYEVMEDKEYKHPPEDGVFIHGLFLDGASWNRKIKKLAESHPKILYDTVPVMWLKPCKRADIPKRPSYVAPLYKTSERRGVLSTTGHSTNFVIAMTLPSDQPKEHWIGRGVALLCQLNS

SEQ ID NO: 25818 - protein, 861 aa, Artificial Sequence
  Synthetic polypeptide
DHVLCRDMDGVGSRYPQQTNTGTEDQTPHVLTYKWELNDENTGTKGGETSDGVRKSVHKVFASMLGENEDDEEEEEEEEEEEEEEETPEQPTAGDVFVLEMVLNRETKKMMKEKRPRSKLPRALRGLMGEANIRFARGEREEAILMCMEIIRQAPLAYEPFSTLAMIYEDQGDMEKSLQFELIAAHLNPSDTEEWVRLAEMSLEQDNIKQAIFCYTKALKYEPTNVRYLWERSSLYEQMGDHKMAMDGYRRILNLLSPSDGERFMQLARDMAKSYYEANDVTSAINIIDEAFSKHQGLVSMEDVNIAAELYISNKQYDKALEIITDFSGIVLEKKTSEEGTSEENKAPENVTCTIPDGVPIDITVKLMVCLVHLNILEPLNPLLTTLVEQNPEDMGDLYLDVAEAFLDVGEYNSALPLLSALVCSERYNLAVVWLRHAECLKALGYMERAAESYGKVVDLAPLHLDARISLSTLQQQLGQPEKALEALEPMYDPDTLAQDANAAQQELKLLLHRSTLLFSQGKMYGYVDTLLTMLAMLLKVAMNRAQVCLISSSKSGERHLYLIKVSRDKISDSNDQESANCDAKAIFAVLTSVLTKDDWWNLLLKAIYSLCDLSRFQEAELLVDSSLEYYSFYDDRQKRKELEYFGLSAAILDKNFRKAYNYIRIMVMENVNKPQLWNIFNQVTMHSQDVRHHRFCLRLMLKNPENHALCVLNGHNAFVSGSFKHALGQYVQAFRTHPDEPLYSFCIGLTFIHMASQKYVLRRHALIVQGFSFLNRYLSLRGPCQESFYNLGRGLHQLGLIHLAIHYYQKALELPPLVVEGIELDQLDLRRDIAYNLSLIYQSSGNTGMAQTLLYTYCSI

SEQ ID NO: 25819 - protein, 15 aa, Artificial Sequence
  Synthetic polypeptide
MMRTQGQKGEKHQME

SEQ ID NO: 25820 - protein, 28 aa, Artificial Sequence
  Synthetic polypeptide
EHRDKRGRNIRWSEEVSSQGLCFHAWRE

SEQ ID NO: 25821 - protein, 388 aa, Artificial Sequence
  Synthetic polypeptide
DHVLCRDMDGVGSRYPQQTNTGTEDQTPHVLTYKWELNDENTGTKGGETSDGVRKSVHKVFASMLGENEDDEEEEEEEEEEEEEEETPEQPTAGDVFVLEMVLNRETKKMMKEKRPRSKLPRALRGLMGEANIRFARGEREEAILMCMEIIRQAPLAYEPFSTLAMIYEDQGDMEKSLQFELIAAHLNPSDTEEWVRLAEMSLEQDNIKQAIFCYTKALKYEPTNVRYLWERSSLYEQMGDHKMAMDGYRRILNLLSPSDGERFMQLARDMAKSYYEANDVTSAINIIDEAFSKHQGLVSMEDVNIAAELYISNKQYDKALEIITDFSGIVLEKKTSEEGTSEENKAPENVTCTIPDGVPIDITVKLMVCLVHLNILEPLNVCNKICT

SEQ ID NO: 25822 - protein, 853 aa, Artificial Sequence
  Synthetic polypeptide
MSLQEKGKLSAEENPDDSEVPSSSGINSTKSQDKDVNEGETSDGVRKSVHKVFASMLGENEDDEEEEEEEEEEEEEEETPEQPTAGDVFVLEMVLNRETKKMMKEKRPRSKLPRALRGLMGEANIRFARGEREEAILMCMEIIRQAPLAYEPFSTLAMIYEDQGDMEKSLQFELIAAHLNPSDTEEWVRLAEMSLEQDNIKQAIFCYTKALKYEPTNVRYLWERSSLYEQMGDHKMAMDGYRRILNLLSPSDGERFMQLARDMAKSYYEANDVTSAINIIDEAFSKHQGLVSMEDVNIAAELYISNKQYDKALEIITDFSGIVLEKKTSEEGTSEENKAPENVTCTIPDGVPIDITVKLMVCLVHLNILEPLNPLLTTLVEQNPEDMGDLYLDVAEAFLDVGEYNSALPLLSALVCSERYNLAVVWLRHAECLKALGYMERAAESYGKVVDLAPLHLDARISLSTLQQQLGQPEKALEALEPMYDPDTLAQDANAAQQELKLLLHRSTLLFSQGKMYGYVDTLLTMLAMLLKVAMNRAQVCLISSSKSGERHLYLIKVSRDKISDSNDQESANCDAKAIFAVLTSVLTKDDWWNLLLKAIYSLCDLSRFQEAELLVDSSLEYYSFYDDRQKRKELEYFGLSAAILDKNFRKAYNYIRIMVMENVNKPQLWNIFNQVTMHSQDVRHHRFCLRLMLKNPENHALCVLNGHNAFVSGSFKHALGQYVQAFRTHPDEPLYSFCIGLTFIHMASQKYVLRRHALIVQGFSFLNRYLSLRGPCQESFYNLGRGLHQLGLIHLAIHYYQKALELPPLVVEGIELDQLDLRRDIAYNLSLIYQSSGNTGMAQTLLYTYCSI

SEQ ID NO: 25823 - protein, 380 aa, Artificial Sequence
  Synthetic polypeptide
MSLQEKGKLSAEENPDDSEVPSSSGINSTKSQDKDVNEGETSDGVRKSVHKVFASMLGENEDDEEEEEEEEEEEEEEETPEQPTAGDVFVLEMVLNRETKKMMKEKRPRSKLPRALRGLMGEANIRFARGEREEAILMCMEIIRQAPLAYEPFSTLAMIYEDQGDMEKSLQFELIAAHLNPSDTEEWVRLAEMSLEQDNIKQAIFCYTKALKYEPTNVRYLWERSSLYEQMGDHKMAMDGYRRILNLLSPSDGERFMQLARDMAKSYYEANDVTSAINIIDEAFSKHQGLVSMEDVNIAAELYISNKQYDKALEIITDFSGIVLEKKTSEEGTSEENKAPENVTCTIPDGVPIDITVKLMVCLVHLNILEPLNVCNKICT

SEQ ID NO: 25824 - protein, 28 aa, Artificial Sequence
  Synthetic polypeptide
RCQINLFWKEQTVDLKNQILVLLRVHST

SEQ ID NO: 25825 - protein, 20 aa, Artificial Sequence
  Synthetic polypeptide
KTQHNEDAKLISFGKNKQWI

SEQ ID NO: 25826 - protein, 427 aa, Artificial Sequence
  Synthetic polypeptide
SLLERTNSGFEESDSGATKSPLHLAAYNGHHQALEVLLQSLVDLDIRDEKGRTALDLAAFKGHTECVEALINQGASIFVKDNVTKRTPLHASVINGHTLCLRLLLEIADNPEAVDVKDAKGQTPLMLAVAYGHIDAVSLLLEKEANVDTVDILGCTALHRGIMTGHEECVQMLLEQEVSILCKDSRGRTPLHYAAARGHATWLSELLQMALSEEDCCFKDNQGYTPLHWACYNGNENCIEVLLEQKCFRKFIGNPFTPLHCAIINDHGNCASLLLGAIDSSIVSCRDDKGRTPLHAAAFADHVECLQLLLRHSAPVNAVDNSGKTALMMAAENGQAGAVDILVNSAQADLTVKDKDLNTPLHLACSKGHEKCALLILDKIQDESLINEKNNALQTPLHVAARNGLKVVVEELLAKGACVLAVDENGC

SEQ ID NO: 25827 - protein, 444 aa, Artificial Sequence
  Synthetic polypeptide
SLLERTNSGFEESDSGATKSPLHLAAYNGHHQALEVLLQSLVDLDIRDEKGRTALDLAAFKGHTECVEALINQGASIFVKDNVTKRTPLHASVINGHTLCLRLLLEIADNPEAVDVKDAKGQTPLMLAVAYGHIDAVSLLLEKEANVDTVDILGCTALHRGIMTGHEECVQMLLEQEVSILCKDSRGRTPLHYAAARGHATWLSELLQMALSEEDCCFKDNQGYTPLHWACYNGNENCIEVLLEQKCFRKFIGNPFTPLHCAIINDHGNCASLLLGAIDSSIVSCRDDKGRTPLHAAAFADHVECLQLLLRHSAPVNAVDNSGKTALMMAAENGQAGAVDILVNSAQADLTVKDKDLNTPLHLACSKGHEKCALLILDKIQDESLINEKNNALQTPLHVAARNGLKVVVEELLAKGACVLAVDENASRSNGPRSTPGTAVQKEE

SEQ ID NO: 25828 - protein, 395 aa, Artificial Sequence
  Synthetic polypeptide
SLLERTNSGFEESDSGATKSPLHLAAYNGHHQALEVLLQSLVDLDIRDEKGRTALDLAAFKGHTECVEALINQGASIFVKDNVTKRTPLHASVINGHTLCLRLLLEIADNPEAVDVKDAKGQTPLMLAVAYGHIDAVSLLLEKEANVDTVDILGCTALHRGIMTGHEECVQMLLEQEVSILCKDSRGRTPLHYAAARGHATWLSELLQMALSEEDCCFKDNQGYTPLHWACYNGNENCIEVLLEQKCFRKFIGNPFTPLHCAIINDHGNCASLLLGAIDSSIVSCRDDKGRTPLHAAAFADHVECLQLLLRHSAPVNAVDNSGKTALMMAAENGQAGAVDILVNSAQADLTVKDKDLNTPLHLACSKGHEKCALLILDKIQDESLINEKNNALQT

SEQ ID NO: 25829 - protein, 92 aa, Artificial Sequence
  Synthetic polypeptide
SLLERTNSGFEESDSGATKSPLHLAAYNGHHQALEVLLQSLVDLDIRDEKGRTALDLAAFKGHTECVEALINQGASIFVKDNVTKRTPLHAS

SEQ ID NO: 25830 - protein, 1015 aa, Artificial Sequence
  Synthetic polypeptide
LAVTLGHPQTPQAPVSFSGKWGGGHHFATHQPPLVQAIFSGDPEEIRMLIHKTEDVNTLDSEKRTPLHVAAFLGDAEIIELLILSGARVNAKDNMWLTPLHRAVASRSEEAVQVLIKHSADVNARDKNWQTPLHVAAANKAVKCAEVIIPLLSSVNVSDRGGRTALHHAALNGHVEMVNLLLAKGANINAFDKKDRRALHWAAYMGHLDVVALLINHGAEVTCKDKKGYTPLHAAASNGQINVVKHLLNLGVEIDEINVYGNTALHIACYNGQDAVVNELIDYGANVNQPNNNGFTPLHFAAASTHGALCLELLVNNGADVNIQSKDGKSPLHMTAVHGRFTRSQTLIQNGGEIDCVDKDGNTPLHVAARYGHELLINTLITSGADTAKCGIHSMFPLHLAALNAHSDCCRKLLSSGFEIDTPDKFGRTCLHAAAAGGNVECIKLLQSSGADFHKKDKCGRTPLHYAAANCHFHCIETLVTTGANVNETDDWGRTALHYAAASDMDRNKTILGNAHDNSEELERARELKEKEATLCLEFLLQNDANPSIRDKEGYNSIHYAAAYGHRQCLELLLERTNSGFEESDSGATKSPLHLAAYNGHHQALEVLLQSLVDLDIRDEKGRTALDLAAFKGHTECVEALINQGASIFVKDNVTKRTPLHASVINGHTLCLRLLLEIADNPEAVDVKDAKGQTPLMLAVAYGHIDAVSLLLEKEANVDTVDILGCTALHRGIMTGHEECVQMLLEQEVSILCKDSRGRTPLHYAAARGHATWLSELLQMALSEEDCCFKDNQGYTPLHWACYNGNENCIEVLLEQKCFRKFIGNPFTPLHCAIINDHGNCASLLLGAIDSSIVSCRDDKGRTPLHAAAFADHVECLQLLLRHSAPVNAVDNSGKTALMMAAENGQAGAVDILVNSAQADLTVKDKDLNTPLHLACSKGHEKCALLILDKIQDESLINEKNNALQTPLHVAARNGLKVVVEELLAKGACVLAVDENASRSNGPRSTPGTAVQKEE

SEQ ID NO: 25831 - protein, 67 aa, Artificial Sequence
  Synthetic polypeptide
HGIWSWKDLPSDWQSPWAIPKLPKPQFLSQGNGVEDITSQLTSHHWFRQSSAVIQRRSGCSSIKLKM

SEQ ID NO: 25832 - protein, 54 aa, Artificial Sequence
  Synthetic polypeptide
TSMGSGAGKIFPVTGSHLGPSPNSPSPSFFLREMGWRTSLRNSPATIGSGNLQR

SEQ ID NO: 25833 - protein, 601 aa, Artificial Sequence
  Synthetic polypeptide
LAVTLGHPQTPQAPVSFSGKWGGGHHFATHQPPLVQAIFSGDPEEIRMLIHKTEDVNTLDSEKRTPLHVAAFLGDAEIIELLILSGARVNAKDNMWLTPLHRAVASRSEEAVQVLIKHSADVNARDKNWQTPLHVAAANKAVKCAEVIIPLLSSVNVSDRGGRTALHHAALNGHVEMVNLLLAKGANINAFDKKDRRALHWAAYMGHLDVVALLINHGAEVTCKDKKGYTPLHAAASNGQINVVKHLLNLGVEIDEINVYGNTALHIACYNGQDAVVNELIDYGANVNQPNNNGFTPLHFAAASTHGALCLELLVNNGADVNIQSKDGKSPLHMTAVHGRFTRSQTLIQNGGEIDCVDKDGNTPLHVAARYGHELLINTLITSGADTAKCGIHSMFPLHLAALNAHSDCCRKLLSSGFEIDTPDKFGRTCLHAAAAGGNVECIKLLQSSGADFHKKDKCGRTPLHYAAANCHFHCIETLVTTGANVNETDDWGRTALHYAAASDMDRNKTILGNAHDNSEELERARELKEKEATLCLEFLLQNDANPSIRDKEGYNSIHYAAAYGHRQCLELVSCFVLFSLTHTHTHTPNHRGINCFFPEL

SEQ ID NO: 25834 - protein, 389 aa, Artificial Sequence
  Synthetic polypeptide
LAVTLGHPQTPQAPVSFSGKWGGGHHFATHQPPLVQAIFSGDPEEIRMLIHKTEDVNTLDSEKRTPLHVAAFLGDAEIIELLILSGARVNAKDNMWLTPLHRAVASRSEEAVQVLIKHSADVNARDKNWQTPLHVAAANKAVKCAEVIIPLLSSVNVSDRGGRTALHHAALNGHVEMVNLLLAKGANINAFDKKDRRALHWAAYMGHLDVVALLINHGAEVTCKDKKGYTPLHAAASNGQINVVKHLLNLGVEIDEINVYGNTALHIACYNGQDAVVNELIDYGANVNQPNNNGFTPLHFAAASTHGALCLELLVNNGADVNIQSKDGKSPLHMTAVHGRFTRSQTLIQNGGEIDCVDKDGNTPLHVAARYGHELLINTLITSGADTAK

SEQ ID NO: 25835 - protein, 62 aa, Artificial Sequence
  Synthetic polypeptide
LAVTLGHPQTPQAPVSFSGKWGGGHHFATHQPPLVQAIFSGDPEEIRMLIHKTEDVNTLELV

SEQ ID NO: 25836 - protein, 14 aa, Artificial Sequence
  Synthetic polypeptide
ATWNSTIGSGNLQR

SEQ ID NO: 25837 - protein, 1046 aa, Artificial Sequence
  Synthetic polypeptide
LDLGGGFLHAVLVIVRSVLVRSDGFKRELSLLSLSLACCHARCAGFPFTFCHDCKFPEPRGTPPLVQAIFSGDPEEIRMLIHKTEDVNTLDSEKRTPLHVAAFLGDAEIIELLILSGARVNAKDNMWLTPLHRAVASRSEEAVQVLIKHSADVNARDKNWQTPLHVAAANKAVKCAEVIIPLLSSVNVSDRGGRTALHHAALNGHVEMVNLLLAKGANINAFDKKDRRALHWAAYMGHLDVVALLINHGAEVTCKDKKGYTPLHAAASNGQINVVKHLLNLGVEIDEINVYGNTALHIACYNGQDAVVNELIDYGANVNQPNNNGFTPLHFAAASTHGALCLELLVNNGADVNIQSKDGKSPLHMTAVHGRFTRSQTLIQNGGEIDCVDKDGNTPLHVAARYGHELLINTLITSGADTAKCGIHSMFPLHLAALNAHSDCCRKLLSSGFEIDTPDKFGRTCLHAAAAGGNVECIKLLQSSGADFHKKDKCGRTPLHYAAANCHFHCIETLVTTGANVNETDDWGRTALHYAAASDMDRNKTILGNAHDNSEELERARELKEKEATLCLEFLLQNDANPSIRDKEGYNSIHYAAAYGHRQCLELLLERTNSGFEESDSGATKSPLHLAAYNGHHQALEVLLQSLVDLDIRDEKGRTALDLAAFKGHTECVEALINQGASIFVKDNVTKRTPLHASVINGHTLCLRLLLEIADNPEAVDVKDAKGQTPLMLAVAYGHIDAVSLLLEKEANVDTVDILGCTALHRGIMTGHEECVQMLLEQEVSILCKDSRGRTPLHYAAARGHATWLSELLQMALSEEDCCFKDNQGYTPLHWACYNGNENCIEVLLEQKCFRKFIGNPFTPLHCAIINDHGNCASLLLGAIDSSIVSCRDDKGRTPLHAAAFADHVECLQLLLRHSAPVNAVDNSGKTALMMAAENGQAGAVDILVNSAQADLTVKDKDLNTPLHLACSKGHEKCALLILDKIQDESLINEKNNALQTPLHVAARNGLKVVVEELLAKGACVLAVDENASRSNGPRSTPGTAVQKEE

SEQ ID NO: 25838 - protein, 66 aa, Artificial Sequence
  Synthetic polypeptide
DLMVLKGSFLCSRSLSPAAMQDVPASPSLSAMIVSFLSHVELHHWFRQSSAVIQRRSGCSSIKLKM

SEQ ID NO: 25839 - protein, 632 aa, Artificial Sequence
  Synthetic polypeptide
LDLGGGFLHAVLVIVRSVLVRSDGFKRELSLLSLSLACCHARCAGFPFTFCHDCKFPEPRGTPPLVQAIFSGDPEEIRMLIHKTEDVNTLDSEKRTPLHVAAFLGDAEIIELLILSGARVNAKDNMWLTPLHRAVASRSEEAVQVLIKHSADVNARDKNWQTPLHVAAANKAVKCAEVIIPLLSSVNVSDRGGRTALHHAALNGHVEMVNLLLAKGANINAFDKKDRRALHWAAYMGHLDVVALLINHGAEVTCKDKKGYTPLHAAASNGQINVVKHLLNLGVEIDEINVYGNTALHIACYNGQDAVVNELIDYGANVNQPNNNGFTPLHFAAASTHGALCLELLVNNGADVNIQSKDGKSPLHMTAVHGRFTRSQTLIQNGGEIDCVDKDGNTPLHVAARYGHELLINTLITSGADTAKCGIHSMFPLHLAALNAHSDCCRKLLSSGFEIDTPDKFGRTCLHAAAAGGNVECIKLLQSSGADFHKKDKCGRTPLHYAAANCHFHCIETLVTTGANVNETDDWGRTALHYAAASDMDRNKTILGNAHDNSEELERARELKEKEATLCLEFLLQNDANPSIRDKEGYNSIHYAAAYGHRQCLELVSCFVLFSLTHTHTHTPNHRGINCFFPEL

SEQ ID NO: 25840 - protein, 420 aa, Artificial Sequence
  Synthetic polypeptide
LDLGGGFLHAVLVIVRSVLVRSDGFKRELSLLSLSLACCHARCAGFPFTFCHDCKFPEPRGTPPLVQAIFSGDPEEIRMLIHKTEDVNTLDSEKRTPLHVAAFLGDAEIIELLILSGARVNAKDNMWLTPLHRAVASRSEEAVQVLIKHSADVNARDKNWQTPLHVAAANKAVKCAEVIIPLLSSVNVSDRGGRTALHHAALNGHVEMVNLLLAKGANINAFDKKDRRALHWAAYMGHLDVVALLINHGAEVTCKDKKGYTPLHAAASNGQINVVKHLLNLGVEIDEINVYGNTALHIACYNGQDAVVNELIDYGANVNQPNNNGFTPLHFAAASTHGALCLELLVNNGADVNIQSKDGKSPLHMTAVHGRFTRSQTLIQNGGEIDCVDKDGNTPLHVAARYGHELLINTLITSGADTAK

SEQ ID NO: 25841 - protein, 93 aa, Artificial Sequence
  Synthetic polypeptide
LDLGGGFLHAVLVIVRSVLVRSDGFKRELSLLSLSLACCHARCAGFPFTFCHDCKFPEPRGTPPLVQAIFSGDPEEIRMLIHKTEDVNTLELV

SEQ ID NO: 25842 - protein, 63 aa, Artificial Sequence
  Synthetic polypeptide
LDLGGGFLHAVLVIVRSVLVRSDGFKRELSLLSLSLACCHARCAGFPFTFCHDSTIGSGNLQR

SEQ ID NO: 25843 - protein, 1017 aa, Artificial Sequence
  Synthetic polypeptide
DLMVLKGSFLCSRSLSPAAMQDVPASPSLSAMIPPLVQAIFSGDPEEIRMLIHKTEDVNTLDSEKRTPLHVAAFLGDAEIIELLILSGARVNAKDNMWLTPLHRAVASRSEEAVQVLIKHSADVNARDKNWQTPLHVAAANKAVKCAEVIIPLLSSVNVSDRGGRTALHHAALNGHVEMVNLLLAKGANINAFDKKDRRALHWAAYMGHLDVVALLINHGAEVTCKDKKGYTPLHAAASNGQINVVKHLLNLGVEIDEINVYGNTALHIACYNGQDAVVNELIDYGANVNQPNNNGFTPLHFAAASTHGALCLELLVNNGADVNIQSKDGKSPLHMTAVHGRFTRSQTLIQNGGEIDCVDKDGNTPLHVAARYGHELLINTLITSGADTAKCGIHSMFPLHLAALNAHSDCCRKLLSSGFEIDTPDKFGRTCLHAAAAGGNVECIKLLQSSGADFHKKDKCGRTPLHYAAANCHFHCIETLVTTGANVNETDDWGRTALHYAAASDMDRNKTILGNAHDNSEELERARELKEKEATLCLEFLLQNDANPSIRDKEGYNSIHYAAAYGHRQCLELLLERTNSGFEESDSGATKSPLHLAAYNGHHQALEVLLQSLVDLDIRDEKGRTALDLAAFKGHTECVEALINQGASIFVKDNVTKRTPLHASVINGHTLCLRLLLEIADNPEAVDVKDAKGQTPLMLAVAYGHIDAVSLLLEKEANVDTVDILGCTALHRGIMTGHEECVQMLLEQEVSILCKDSRGRTPLHYAAARGHATWLSELLQMALSEEDCCFKDNQGYTPLHWACYNGNENCIEVLLEQKCFRKFIGNPFTPLHCAIINDHGNCASLLLGAIDSSIVSCRDDKGRTPLHAAAFADHVECLQLLLRHSAPVNAVDNSGKTALMMAAENGQAGAVDILVNSAQADLTVKDKDLNTPLHLACSKGHEKCALLILDKIQDESLINEKNNALQTPLHVAARNGLKVVVEELLAKGACVLAVDENASRSNGPRSTPGTAVQKEE

SEQ ID NO: 25844 - protein, 603 aa, Artificial Sequence
  Synthetic polypeptide
DLMVLKGSFLCSRSLSPAAMQDVPASPSLSAMIPPLVQAIFSGDPEEIRMLIHKTEDVNTLDSEKRTPLHVAAFLGDAEIIELLILSGARVNAKDNMWLTPLHRAVASRSEEAVQVLIKHSADVNARDKNWQTPLHVAAANKAVKCAEVIIPLLSSVNVSDRGGRTALHHAALNGHVEMVNLLLAKGANINAFDKKDRRALHWAAYMGHLDVVALLINHGAEVTCKDKKGYTPLHAAASNGQINVVKHLLNLGVEIDEINVYGNTALHIACYNGQDAVVNELIDYGANVNQPNNNGFTPLHFAAASTHGALCLELLVNNGADVNIQSKDGKSPLHMTAVHGRFTRSQTLIQNGGEIDCVDKDGNTPLHVAARYGHELLINTLITSGADTAKCGIHSMFPLHLAALNAHSDCCRKLLSSGFEIDTPDKFGRTCLHAAAAGGNVECIKLLQSSGADFHKKDKCGRTPLHYAAANCHFHCIETLVTTGANVNETDDWGRTALHYAAASDMDRNKTILGNAHDNSEELERARELKEKEATLCLEFLLQNDANPSIRDKEGYNSIHYAAAYGHRQCLELVSCFVLFSLTHTHTHTPNHRGINCFFPEL

SEQ ID NO: 25845 - protein, 391 aa, Artificial Sequence
  Synthetic polypeptide
DLMVLKGSFLCSRSLSPAAMQDVPASPSLSAMIPPLVQAIFSGDPEEIRMLIHKTEDVNTLDSEKRTPLHVAAFLGDAEIIELLILSGARVNAKDNMWLTPLHRAVASRSEEAVQVLIKHSADVNARDKNWQTPLHVAAANKAVKCAEVIIPLLSSVNVSDRGGRTALHHAALNGHVEMVNLLLAKGANINAFDKKDRRALHWAAYMGHLDVVALLINHGAEVTCKDKKGYTPLHAAASNGQINVVKHLLNLGVEIDEINVYGNTALHIACYNGQDAVVNELIDYGANVNQPNNNGFTPLHFAAASTHGALCLELLVNNGADVNIQSKDGKSPLHMTAVHGRFTRSQTLIQNGGEIDCVDKDGNTPLHVAARYGHELLINTLITSGADTAK

SEQ ID NO: 25846 - protein, 64 aa, Artificial Sequence
  Synthetic polypeptide
DLMVLKGSFLCSRSLSPAAMQDVPASPSLSAMIPPLVQAIFSGDPEEIRMLIHKTEDVNTLELV

SEQ ID NO: 25847 - protein, 22 aa, Artificial Sequence
  Synthetic polypeptide
FLHFHLRYRVHLTRECQTVGAD

SEQ ID NO: 25848 - protein, 370 aa, Artificial Sequence
  Synthetic polypeptide
GTGFISLGSARQWAQINVAAKRGMKFVGFISQHYSPSKFCNGTNHDGDIESMLHVRHGSDENCRSWNEGTLSGQSSESGIEEELHHESGQYQMEQNGSPTSSKSRKGEASDNKLYTVFNAFDDDSTSWAYQEGILSMKVTRKGSVISTLDADWLELTTFYYKQGLSLIDSFVFWETSKGEHLPKSLEGFFIYEEEGSGVPGSSRKGNDAIVVEQWTVIEGCEIKTDYGPLLHTLAEFGWLLTSVLPTPVLRHDSEGNLATKQIVFLQRPVMWNSAAQTPDKKASRHIKGEDKNKATSRSIGLDTTSSQPAESRHLPEECRLSPSRECWTKEGRLAQHNSFSGFSSSDNVLRELDDGQFDQEDGVTQVTCM

SEQ ID NO: 25849 - protein, 16 aa, Artificial Sequence
  Synthetic polypeptide
GVPDSGRRLMSLLKEE

SEQ ID NO: 25850 - protein, 15 aa, Artificial Sequence
  Synthetic polypeptide
FLHFHLRLMSLLKEE

SEQ ID NO: 25851 - protein, 387 aa, Artificial Sequence
  Synthetic polypeptide
GRSQDGRIGTAPVYSSRRERRRRRVISAFPSEINVAAKRGMKFVGFISQHYSPSKFCNGTNHDGDIESMLHVRHGSDENCRSWNEGTLSGQSSESGIEEELHHESGQYQMEQNGSPTSSKSRKGEASDNKLYTVFNAFDDDSTSWAYQEGILSMKVTRKGSVISTLDADWLELTTFYYKQGLSLIDSFVFWETSKGEHLPKSLEGFFIYEEEGSGVPGSSRKGNDAIVVEQWTVIEGCEIKTDYGPLLHTLAEFGWLLTSVLPTPVLRHDSEGNLATKQIVFLQRPVMWNSAAQTPDKKASRHIKGEDKNKATSRSIGLDTTSSQPAESRHLPEECRLSPSRECWTKEGRLAQHNSFSGFSSSDNVLRELDDGQFDQEDGVTQVTCM

SEQ ID NO: 25852 - protein, 15 aa, Artificial Sequence
  Synthetic polypeptide
FLHFHLRLMSLLKEE

SEQ ID NO: 25853 - protein, 387 aa, Artificial Sequence
  Synthetic polypeptide
GRSQDGRIGTAPVYSAQRERRRRRVISAFPSEINVAAKRGMKFVGFISQHYSPSKFCNGTNHDGDIESMLHVRHGSDENCRSWNEGTLSGQSSESGIEEELHHESGQYQMEQNGSPTSSKSRKGEASDNKLYTVFNAFDDDSTSWAYQEGILSMKVTRKGSVISTLDADWLELTTFYYKQGLSLIDSFVFWETSKGEHLPKSLEGFFIYEEEGSGVPGSSRKGNDAIVVEQWTVIEGCEIKTDYGPLLHTLAEFGWLLTSVLPTPVLRHDSEGNLATKQIVFLQRPVMWNSAAQTPDKKASRHIKGEDKNKATSRSIGLDTTSSQPAESRHLPEECRLSPSRECWTKEGRLAQHNSFSGFSSSDNVLRELDDGQFDQEDGVTQVTCM

SEQ ID NO: 25854 - protein, 31 aa, Artificial Sequence
  Synthetic polypeptide
FLHFHLSFIKPRSHQDKFNSGYSNKSGKLLS

SEQ ID NO: 25855 - protein, 41 aa, Artificial Sequence
  Synthetic polypeptide
GRSQDGRIGTAPVYSAQRERRRRRVISAFPSELHQTQKSSR

SEQ ID NO: 25856 - protein, 65 aa, Artificial Sequence
  Synthetic polypeptide
GRSQDGRIGTAPVYSSQRERRRRRVISAFPSEAKAVGPKLPLEYENKQHHYEKSKELWSQTVLHL

SEQ ID NO: 25857 - protein, 39 aa, Artificial Sequence
  Synthetic polypeptide
FLHFHLRPRRWDRSYLWSMKISNTIMKSQKNFGVKQSCI

SEQ ID NO: 25858 - protein, 88 aa, Artificial Sequence
  Synthetic polypeptide
CRSCNKLPRSLASLAKSKDEGLAEDLVLHVPGCSVFLFGEADLPEKRSLVQRRKQLGWFTRRDFSALQPDLGAAPSQRCGLTACFRAL

SEQ ID NO: 25859 - protein, 66 aa, Artificial Sequence
  Synthetic polypeptide
LRARMKALLRIWCCMFLAAACFSLAKLTCLRSAVLCREGSSWAGSRGGISVLFSLTWELPLPKDVV

SEQ ID NO: 25860 - protein, 35 aa, Artificial Sequence
  Synthetic polypeptide
SIYLWSCLLCISAVECELHVNKGLVCFAPCPTELP

SEQ ID NO: 25861 - protein, 282 aa, Artificial Sequence
  Synthetic polypeptide
SVLLPAQLNYHEIMTRHPENYQWENWSLENVATILAHRFPNSYIWVIKCSRMHLHKFSCYDNFVKSNMFGAPEHNTDFGAFKHLYMLLVNAFNLSQNSLSKKSLNVWNKDSIASNCRSSPSHTTNGCQGEKVRTCEKSDESAMSFYPPSLNDASFTLIGFSKGCVVLNQLLFELKEAKKDKNIDAFIKSIRTMYWLDGGHSGGSNTWVTYPEVLKEFAQTGIIVHTHVTPYQVRDPMRSWIGKEHKKFVQILGDLGMQVTSQIHFTKEAPSIENHFRVHEVF

SEQ ID NO: 25862 - protein, 17 aa, Artificial Sequence
  Synthetic polypeptide
YISVKYNFEKTSCVGRD

SEQ ID NO: 25863 - protein, 297 aa, Artificial Sequence
  Synthetic polypeptide
TSVLNIILRKPLVLEGIDLGPCTSKWTVDYLSQVGGKKEVKIHVAAVAQMDFISKNFVYRTLPFDQLVQRAAEEKHKEFFVSEDEKYYLRSLGEDPRKDVADIRKQFPLLKGDIKFPEFFKEEQFFSSVFRISSPGLQLWTHYDVMDNLLIQVTGKKRVVLFSPRDAQYLYLKGTKSEVLNIDNPDLAKYPLFSKARRYECSLEAGDVLFIPALWFHNVISEEFGVGVNIFWKHLPSECYDKTDTYGNKDPTAASRAAQILDRALKTLAELPEEYRDFYARRMVLHIQDKAYSKNSE

SEQ ID NO: 25864 - protein, 103 aa, Artificial Sequence
  Synthetic polypeptide
TSVLNIILRKPLVLEGIDLGPCTSKWTVDYLSQVGGKKEVKIHVAAVAQMDFIKLYLLTSWSRGQLKRNIKNSLFQRMRNTTYGHLEKTLERMLQISESSFLC

SEQ ID NO: 25865 - protein, 43 aa, Artificial Sequence
  Synthetic polypeptide
AREVEAAVIHDPATAPAWARGENLLCWKGLIWGHVQANGQWIT

SEQ ID NO: 25866 - protein, 21 aa, Artificial Sequence
  Synthetic polypeptide
SMILPLLQHGREEKTSCVGRD

SEQ ID NO: 25867 - protein, 299 aa, Artificial Sequence
  Synthetic polypeptide
SCHCSSMGERRKPLVLEGIDLGPCTSKWTVDYLSQVGGKKEVKIHVAAVAQMDFISKNFVYRTLPFDQLVQRAAEEKHKEFFVSEDEKYYLRSLGEDPRKDVADIRKQFPLLKGDIKFPEFFKEEQFFSSVFRISSPGLQLWTHYDVMDNLLIQVTGKKRVVLFSPRDAQYLYLKGTKSEVLNIDNPDLAKYPLFSKARRYECSLEAGDVLFIPALWFHNVISEEFGVGVNIFWKHLPSECYDKTDTYGNKDPTAASRAAQILDRALKTLAELPEEYRDFYARRMVLHIQDKAYSKNSE

SEQ ID NO: 25868 - protein, 105 aa, Artificial Sequence
  Synthetic polypeptide
SCHCSSMGERRKPLVLEGIDLGPCTSKWTVDYLSQVGGKKEVKIHVAAVAQMDFIKLYLLTSWSRGQLKRNIKNSLFQRMRNTTYGHLEKTLERMLQISESSFLC

SEQ ID NO: 25869 - protein, 21 aa, Artificial Sequence
  Synthetic polypeptide
EDCSGNPDCSSEESRRTKETH

SEQ ID NO: 25870 - protein, 283 aa, Artificial Sequence
  Synthetic polypeptide
PSAEKTAVEILTARQKKAEELKRLTDLASQMAEMQLAELRAEIKHFVSERKYDEELGKAARFSCDIEQLKAQIMLCGEITHPKNNYSSRTPCSSLLPLLNAHAATSGKQSNFSRKSSTHNKPSEGKAANPKMVSSLPSTADPSHQTMPANKQNGSSNQRRRFNPQYHNNRLNGPAKSQGSGNEAEPLGKGNSRHEHRRQPHNGFRPKNKGGAKNQEASLGMKTPEAPAHSEKPRRRQHAADTSEARPFRGSVGRVSQCNLCPTRIEVSTDAAVLSVPAVTLVA

SEQ ID NO: 25871 - protein, 18 aa, Artificial Sequence
  Synthetic polypeptide
PKSLMAPNPVLRRLQWKS

SEQ ID NO: 25872 - protein, 59 aa, Artificial Sequence
  Synthetic polypeptide
PSAEKTAVEILTARQKKAEELKRLTDLASQMAEMQLAELRAEIKHFVSERKYDEELGKA

SEQ ID NO: 25873 - protein, 37 aa, Artificial Sequence
  Synthetic polypeptide
PSAEKTAVEILTARQKKAEELKRLTDLASQMAEMQLA

SEQ ID NO: 25874 - protein, 219 aa, Artificial Sequence
  Synthetic polypeptide
DHLRPGVRGQPSQYVTHPKNNYSSRTPCSSLLPLLNAHAATSGKQSNFSRKSSTHNKPSEGKAANPKMVSSLPSTADPSHQTMPANKQNGSSNQRRRFNPQYHNNRLNGPAKSQGSGNEAEPLGKGNSRHEHRRQPHNGFRPKNKGGAKNQEASLGMKTPEAPAHSEKPRRRQHAADTSEARPFRGSVGRVSQCNLCPTRIEVSTDAAVLSVPAVTLVA

SEQ ID NO: 25875 - protein, 31 aa, Artificial Sequence
  Synthetic polypeptide
GQEFEASLANMLHIQRTTIPQELPAAPCCLC

SEQ ID NO: 25876 - protein, 34 aa, Artificial Sequence
  Synthetic polypeptide
PICYTSKEQLFLKNSLQLPAASAECARSNLWETE

SEQ ID NO: 25877 - protein, 38 aa, Artificial Sequence
  Synthetic polypeptide
RCSILVSSVDPGVRYISGPALLSYCSAFRIQNIQTRIT

SEQ ID NO: 25878 - protein, 39 aa, Artificial Sequence
  Synthetic polypeptide
GVVSWLAVWTQESDISQAQPCSLIVQPLGSRTSKQGLPN

SEQ ID NO: 25879 - protein, 22 aa, Artificial Sequence
  Synthetic polypeptide
ETKAGGLPEVGSSRSAWLTCLY

SEQ ID NO: 25880 - protein, 7 aa, Artificial Sequence
  Synthetic polypeptide
HVCTSSL

SEQ ID NO: 25881 - protein, 783 aa, Artificial Sequence
  Synthetic polypeptide
GREFEIGLANMFVLVLCNSIGTPLDPKYIDIVPLFVAMTKTHVIAASKEAFYTWQYRVAKKLTALEINQITRSRKEGRERIYHVDDTPSGSMDGVLDYSKTIQGTRDPICAITASDKILIVGRESGTIQRYSLPNVGLIQKYSLNCRAYQLSLNCNSSRLAIIDISGVLTFFDLDARVTDSTGQQVVGELLKLERRDVWDMKWAKDNPDLFAMMEKTRMYVFRNLDPEEPIQTSGYICNFEDLEIKSVLLDEILKDPEHPNKDYLINFEIRSLRDSRALIEKVGIKDASQFIEDNPHPRLWRLLAEAALQKLDLYTAEQAFVRCKDYQGIKFVKRLGKLLSESMKQAEVVGYFGRFEEAERTYLEMDRRDLAIGLRLKLGDWFRVLQLLKTGSGDADDSLLEQANNAIGDYFADRQKWLNAVQYYVQGRNQERLAECYYMLEDYEGLENLAISLPENHKLLPEIAQMFVRVGMCEQAVTAFLKCSQPKAAVDTCVHLNQWNKAVELAKNHSMKEIGSLLARYASHLLEKNKTLDAIELYRKANYFFDAAKLMFKIADEEAKKGSKPLRVKKLYVLSALLIEQYHEQMKNAQRGKVKGKSSEATSALAGLLEEEVLSTTDRFTDNAWRGAEAYHFFILAQRQLYEGCVDTALKTALHLKDYEDIIPPVEIYSLLALCACASRAFGTCSKAFIKLKSLETLSSEQKQQYEDLALEIFTKHTSKDNRKPELDSLMEGGEGKLPTCVATGSPITEYQFWMCSVCKHGVLAQEISHYSFCPLCHSPVG

SEQ ID NO: 25882 - protein, 475 aa, Artificial Sequence
  Synthetic polypeptide
GREFEIGLANMFVLVLCNSIGTPLDPKYIDIVPLFVAMTKTHVIAASKEAFYTWQYRVAKKLTALEINQITRSRKEGRERIYHVDDTPSGSMDGVLDYSKTIQGTRDPICAITASDKILIVGRESGTIQRYSLPNVGLIQKYSLNCRAYQLSLNCNSSRLAIIDISGVLTFFDLDARVTDSTGQQVVGELLKLERRDVWDMKWAKDNPDLFAMMEKTRMYVFRNLDPEEPIQTSGYICNFEDLEIKSVLLDEILKDPEHPNKDYLINFEIRSLRDSRALIEKVGIKDASQFIEDNPHPRLWRLLAEAALQKLDLYTAEQAFVRCKDYQGIKFVKRLGKLLSESMKQAEVVGYFGRFEEAERTYLEMDRRDLAIGLRLKLGDWFRVLQLLKTGSGDADDSLLEQANNAIGDYFADRQKWLNAVQYYVQGRNQERLAECYYMLEDYEGLENLAISLPENHKLLPVGNSTNVCQSWNV

SEQ ID NO: 25883 - protein, 35 aa, Artificial Sequence
  Synthetic polypeptide
GWAQWLTPVIPALWEAEVRGLLDPRSSTPAWATHL

SEQ ID NO: 25884 - protein, 24 aa, Artificial Sequence
  Synthetic polypeptide
EDCLIPGVQHQLGQHICDTAYRCR

SEQ ID NO: 25885 - protein, 175 aa, Artificial Sequence
  Synthetic polypeptide
SQEFNTSLGNTSVTLHTDVGDIKIEVFCERTPKTCEMESRCVPQAGVQWRDLGSLQPPPPGFKQVFCLSLPRTGRGGNSIWGKKFEDEYSEYLKHNVRGVVSMANNGPNTNGSQFFITYGKQPHLDMKYTVFGKVIDGLETLDELEKLPVNEKTYRPLNDVHIKDITIHANPFAQ

SEQ ID NO: 25886 - protein, 171 aa, Artificial Sequence
  Synthetic polypeptide
SQEFNTSLGNTSVTLHTDVGDIKIEVFCERTPKTCENFLALCASNYYNGCIFHRNIKGFMVQTGDPTGTGRGGNSIWGKKFEDEYSEYLKHNVRGVVSMANNGPNTNGSQFFITYGKQPHLDMKYTVFGKVIDGLETLDELEKLPVNEKTYRPLNDVHIKDITIHANPFAQ

SEQ ID NO: 25887 - protein, 63 aa, Artificial Sequence
  Synthetic polypeptide
SQEFNTSLGNTSVTLHTDVGDIKIEVFCERTPKTCEEYQGFHGSNRRSNRNWKRRQQYLGQEV

SEQ ID NO: 25888 - protein, 167 aa, Artificial Sequence
  Synthetic polypeptide
SQEFNTSLGNTSVTLHTDVGDIKIEVFCERTPKTCEAGVQWRDLGSLQPPPPGFKQVFCLSLPRTGRGGNSIWGKKFEDEYSEYLKHNVRGVVSMANNGPNTNGSQFFITYGKQPHLDMKYTVFGKVIDGLETLDELEKLPVNEKTYRPLNDVHIKDITIHANPFAQ

SEQ ID NO: 25889 - protein, 83 aa, Artificial Sequence
  Synthetic polypeptide
SQEFNTSLGNTSVTLHTDVGDIKIEVFCERTPKTCEELEEEATVFGARSLRMNTVNILSTMLEVLYLWLIMARTPMDLSSSSP

SEQ ID NO: 25890 - protein, 90 aa, Artificial Sequence
  Synthetic polypeptide
SQEFNTSLGNTSVTLHTDVGDIKIEVFCERTPKTCENFLALCASNYYNGCIFHRNIKGFMVQTGDPTGTGRGGNSIWGKKFEDEYSEYLK

SEQ ID NO: 25891 - protein, 181 aa, Artificial Sequence
  Synthetic polypeptide
GWAQWLTPVIPALWEAESVTLHTDVGDIKIEVFCERTPKTCEMESRCVPQAGVQWRDLGSLQPPPPGFKQVFCLSLPRTGRGGNSIWGKKFEDEYSEYLKHNVRGVVSMANNGPNTNGSQFFITYGKQPHLDMKYTVFGKVIDGLETLDELEKLPVNEKTYRPLNDVHIKDITIHANPFAQ

SEQ ID NO: 25892 - protein, 9 aa, Artificial Sequence
  Synthetic polypeptide
SQHFGRRSL

SEQ ID NO: 25893 - protein, 25 aa, Artificial Sequence
  Synthetic polypeptide
MGTVADTCDPSTLGGGVCDTAYRCR

SEQ ID NO: 25894 - protein, 177 aa, Artificial Sequence
  Synthetic polypeptide
GWAQWLTPVIPALWEAESVTLHTDVGDIKIEVFCERTPKTCENFLALCASNYYNGCIFHRNIKGFMVQTGDPTGTGRGGNSIWGKKFEDEYSEYLKHNVRGVVSMANNGPNTNGSQFFITYGKQPHLDMKYTVFGKVIDGLETLDELEKLPVNEKTYRPLNDVHIKDITIHANPFAQ

SEQ ID NO: 25895 - protein, 69 aa, Artificial Sequence
  Synthetic polypeptide
GWAQWLTPVIPALWEAESVTLHTDVGDIKIEVFCERTPKTCEEYQGFHGSNRRSNRNWKRRQQYLGQEV

SEQ ID NO: 25896 - protein, 173 aa, Artificial Sequence
  Synthetic polypeptide
GWAQWLTPVIPALWEAESVTLHTDVGDIKIEVFCERTPKTCEAGVQWRDLGSLQPPPPGFKQVFCLSLPRTGRGGNSIWGKKFEDEYSEYLKHNVRGVVSMANNGPNTNGSQFFITYGKQPHLDMKYTVFGKVIDGLETLDELEKLPVNEKTYRPLNDVHIKDITIHANPFAQ

SEQ ID NO: 25897 - protein, 89 aa, Artificial Sequence
  Synthetic polypeptide
GWAQWLTPVIPALWEAESVTLHTDVGDIKIEVFCERTPKTCEELEEEATVFGARSLRMNTVNILSTMLEVLYLWLIMARTPMDLSSSSP

SEQ ID NO: 25898 - protein, 96 aa, Artificial Sequence
  Synthetic polypeptide
GWAQWLTPVIPALWEAESVTLHTDVGDIKIEVFCERTPKTCENFLALCASNYYNGCIFHRNIKGFMVQTGDPTGTGRGGNSIWGKKFEDEYSEYLK

SEQ ID NO: 25899 - protein, 4 aa, Artificial Sequence
  Synthetic polypeptide
MPSL

SEQ ID NO: 25900 - protein, 11 aa, Artificial Sequence
  Synthetic polypeptide
CPVCDTAYRCR

SEQ ID NO: 25901 - protein, 166 aa, Artificial Sequence
  Synthetic polypeptide
AQSVTLHTDVGDIKIEVFCERTPKTCEMESRCVPQAGVQWRDLGSLQPPPPGFKQVFCLSLPRTGRGGNSIWGKKFEDEYSEYLKHNVRGVVSMANNGPNTNGSQFFITYGKQPHLDMKYTVFGKVIDGLETLDELEKLPVNEKTYRPLNDVHIKDITIHANPFAQ

SEQ ID NO: 25902 - protein, 162 aa, Artificial Sequence
  Synthetic polypeptide
AQSVTLHTDVGDIKIEVFCERTPKTCENFLALCASNYYNGCIFHRNIKGFMVQTGDPTGTGRGGNSIWGKKFEDEYSEYLKHNVRGVVSMANNGPNTNGSQFFITYGKQPHLDMKYTVFGKVIDGLETLDELEKLPVNEKTYRPLNDVHIKDITIHANPFAQ

SEQ ID NO: 25903 - protein, 54 aa, Artificial Sequence
  Synthetic polypeptide
AQSVTLHTDVGDIKIEVFCERTPKTCEEYQGFHGSNRRSNRNWKRRQQYLGQEV

SEQ ID NO: 25904 - protein, 158 aa, Artificial Sequence
  Synthetic polypeptide
AQSVTLHTDVGDIKIEVFCERTPKTCEAGVQWRDLGSLQPPPPGFKQVFCLSLPRTGRGGNSIWGKKFEDEYSEYLKHNVRGVVSMANNGPNTNGSQFFITYGKQPHLDMKYTVFGKVIDGLETLDELEKLPVNEKTYRPLNDVHIKDITIHANPFAQ

SEQ ID NO: 25905 - protein, 74 aa, Artificial Sequence
  Synthetic polypeptide
AQSVTLHTDVGDIKIEVFCERTPKTCEELEEEATVFGARSLRMNTVNILSTMLEVLYLWLIMARTPMDLSSSSP

SEQ ID NO: 25906 - protein, 81 aa, Artificial Sequence
  Synthetic polypeptide
AQSVTLHTDVGDIKIEVFCERTPKTCENFLALCASNYYNGCIFHRNIKGFMVQTGDPTGTGRGGNSIWGKKFEDEYSEYLK

SEQ ID NO: 25907 - protein, 484 aa, Artificial Sequence
  Synthetic polypeptide
PGMVAHTYNPNTLRGKASELAKTPQKSVSFSLKNDPEITINVPQSSKGHSASDKVQPKNNDKSEFLSTAPRSLRKRLIVPRSHSDSESEYSASNSEDDEGVAQEHEEDTNAVIFSQKIQAQNRVVSAPVGKETPSKRMKRDKTSDLVEEYFEAHSSSKVLTSDRTLQKLKRAKLDQQTLRNLLSKVSPSFSAELKQLNQQYEKLFHKWMLQLHLGFNIVLYGLGSKRDLLERFRTTMLQDSIHVVINGFFPGISVKSVLNSITEEVLDHMGTFRSILDQLDWIVNKFKEDSSLELFLLIHNLDSQMLRGEKSQQIIGQLSSLHNIYLIASIDHLNAPLMWDHAKQSLFNWLWYETTTYSPYTEETSYENSLLVKQSGSLPLSSLTHVLRSLTPNARGIFRLLIKYQLDNQDNPSYIGLSFQDFYQQCREAFLVNSDLTLRAQLTEFRDHKLIRTKKGTDGVEYLLIPVDNGTLTDFLEKEEEEA

SEQ ID NO: 25908 - protein, 6 aa, Artificial Sequence
  Synthetic polypeptide
EEKLQN

SEQ ID NO: 25909 - protein, 25 aa, Artificial Sequence
  Synthetic polypeptide
SQHFERKSFRTSKNTTKKCFIQFEE

SEQ ID NO: 25910 - protein, 1112 aa, Artificial Sequence
  Synthetic polypeptide
EEQVSIKDIIWTIGSVQVVTWNEQYQKLTTSDENGLIIVWMLYKGSWIEEMINNRNKSVVRSMSWNADGQKICIVYEDGAVIVGSVDGNRIWGKDLKGIQLSHVTWSADSKVLLFGMANGEIHIYDNQGNFMIKMKLSCLVNVTGAISIAGIHWYHGTEGYVEPDCPCLAVCFDNGRCQIMRHENDQNPVLIDTGMYVVGIQWNHMGSVLAVAGFQKAAMQDKDVNIVQFYTPFGEHLGTLKVPGKEISALSWEGGGLKIALAVDSFIYFANIRPNYKWGYCSNTVVYAYTRPDRPEYCVVFWDTKNNEKYVKYVKGLISITTCGDFCILATKADENHPQFVLVLCNSIGTPLDPKYIDIVPLFVAMTKTHVIAASKEAFYTWQYRVAKKLTALEINQITRSRKEGRERIYHVDDTPSGSMDGVLDYSKTIQGTRDPICAITASDKILIVGRESGTIQRYSLPNVGLIQKYSLNCRAYQLSLNCNSSRLAIIDISGVLTFFDLDARVTDSTGQQVVGELLKLERRDVWDMKWAKDNPDLFAMMEKTRMYVFRNLDPEEPIQTSGYICNFEDLEIKSVLLDEILKDPEHPNKDYLINFEIRSLRDSRALIEKVGIKDASQFIEDNPHPRLWRLLAEAALQKLDLYTAEQAFVRCKDYQGIKFVKRLGKLLSESMKQAEVVGYFGRFEEAERTYLEMDRRDLAIGLRLKLGDWFRVLQLLKTGSGDADDSLLEQANNAIGDYFADRQKWLNAVQYYVQGRNQERLAECYYMLEDYEGLENLAISLPENHKLLPEIAQMFVRVGMCEQAVTAFLKCSQPKAAVDTCVHLNQWNKAVELAKNHSMKEIGSLLARYASHLLEKNKTLDAIELYRKANYFFDAAKLMFKIADEEAKKGSKPLRVKKLYVLSALLIEQYHEQMKNAQRGKVKGKSSEATSALAGLLEEEVLSTTDRFTDNAWRGAEAYHFFILAQRQLYEGCVDTALKTALHLKDYEDIIPPVEIYSLLALCACASRAFGTCSKAFIKLKSLETLSSEQKQQYEDLALEIFTKHTSKDNRKPELDSLMEGGEGKLPTCVATGSPITEYQFWMCSVCKHGVLAQEISHYSFCPLCHSPVG

SEQ ID NO: 25911 - protein, 12 aa, Artificial Sequence
  Synthetic polypeptide
RTLFGQLVLFKL

SEQ ID NO: 25912 - protein, 36 aa, Artificial Sequence
  Synthetic polypeptide
QLNALYNPRLDLGMRRTSVYKGHYLDNWFCSSCNME

SEQ ID NO: 25913 - protein, 1123 aa, Artificial Sequence
  Synthetic polypeptide
EEQVSIKDIIWTIGSVQVVTWNEQYQKLTTSDENGLIIVWMLYKGSWIEEMINNRNKSVVRSMSWNADGQKICIVYEDGAVIVGSVDGNRIWGKDLKGIQLSHVTWSADSKVLLFGMANGEIHIYDNQGNFMIKMKLSCLVNVTGAISIAGIHWYHGTEGYVEPDCPCLAVCFDNGRCQIMRHENDQNPVLIDTGMYVVGIQWNHMGSVLAVAGFQKAAMQDKDVNIVQFYTPFGEHLGTLKVPGKEISALSWEGGGLKIALAVDSFIYFANIRPNYKWGYCSNTVVYAYTRPDRPEYCVVFWDTKNNEKYVKYVKGLISITTCGDFCILATKADENHPQEENEMETFGATFVLVLCNSIGTPLDPKYIDIVPLFVAMTKTHVIAASKEAFYTWQYRVAKKLTALEINQITRSRKEGRERIYHVDDTPSGSMDGVLDYSKTIQGTRDPICAITASDKILIVGRESGTIQRYSLPNVGLIQKYSLNCRAYQLSLNCNSSRLAIIDISGVLTFFDLDARVTDSTGQQVVGELLKLERRDVWDMKWAKDNPDLFAMMEKTRMYVFRNLDPEEPIQTSGYICNFEDLEIKSVLLDEILKDPEHPNKDYLINFEIRSLRDSRALIEKVGIKDASQFIEDNPHPRLWRLLAEAALQKLDLYTAEQAFVRCKDYQGIKFVKRLGKLLSESMKQAEVVGYFGRFEEAERTYLEMDRRDLAIGLRLKLGDWFRVLQLLKTGSGDADDSLLEQANNAIGDYFADRQKWLNAVQYYVQGRNQERLAECYYMLEDYEGLENLAISLPENHKLLPEIAQMFVRVGMCEQAVTAFLKCSQPKAAVDTCVHLNQWNKAVELAKNHSMKEIGSLLARYASHLLEKNKTLDAIELYRKANYFFDAAKLMFKIADEEAKKGSKPLRVKKLYVLSALLIEQYHEQMKNAQRGKVKGKSSEATSALAGLLEEEVLSTTDRFTDNAWRGAEAYHFFILAQRQLYEGCVDTALKTALHLKDYEDIIPPVEIYSLLALCACASRAFGTCSKAFIKLKSLETLSSEQKQQYEDLALEIFTKHTSKDNRKPELDSLMEGGEGKLPTCVATGSPITEYQFWMCSVCKHGVLAQEISHYSFCPLCHSPVG

SEQ ID NO: 25914 - protein, 815 aa, Artificial Sequence
  Synthetic polypeptide
EEQVSIKDIIWTIGSVQVVTWNEQYQKLTTSDENGLIIVWMLYKGSWIEEMINNRNKSVVRSMSWNADGQKICIVYEDGAVIVGSVDGNRIWGKDLKGIQLSHVTWSADSKVLLFGMANGEIHIYDNQGNFMIKMKLSCLVNVTGAISIAGIHWYHGTEGYVEPDCPCLAVCFDNGRCQIMRHENDQNPVLIDTGMYVVGIQWNHMGSVLAVAGFQKAAMQDKDVNIVQFYTPFGEHLGTLKVPGKEISALSWEGGGLKIALAVDSFIYFANIRPNYKWGYCSNTVVYAYTRPDRPEYCVVFWDTKNNEKYVKYVKGLISITTCGDFCILATKADENHPQEENEMETFGATFVLVLCNSIGTPLDPKYIDIVPLFVAMTKTHVIAASKEAFYTWQYRVAKKLTALEINQITRSRKEGRERIYHVDDTPSGSMDGVLDYSKTIQGTRDPICAITASDKILIVGRESGTIQRYSLPNVGLIQKYSLNCRAYQLSLNCNSSRLAIIDISGVLTFFDLDARVTDSTGQQVVGELLKLERRDVWDMKWAKDNPDLFAMMEKTRMYVFRNLDPEEPIQTSGYICNFEDLEIKSVLLDEILKDPEHPNKDYLINFEIRSLRDSRALIEKVGIKDASQFIEDNPHPRLWRLLAEAALQKLDLYTAEQAFVRCKDYQGIKFVKRLGKLLSESMKQAEVVGYFGRFEEAERTYLEMDRRDLAIGLRLKLGDWFRVLQLLKTGSGDADDSLLEQANNAIGDYFADRQKWLNAVQYYVQGRNQERLAECYYMLEDYEGLENLAISLPENHKLLPVGNSTNVCQSWNV

SEQ ID NO: 25915 - protein, 18 aa, Artificial Sequence
  Synthetic polypeptide
WLTPIVQALWEAKVLFKL

SEQ ID NO: 25916 - protein, 16 aa, Artificial Sequence
  Synthetic polypeptide
FKHFGRPRFCSSCNME

SEQ ID NO: 25917 - protein, 1115 aa, Artificial Sequence
  Synthetic polypeptide
MGVVANTYSSSTLGGQGSVQVVTWNEQYQKLTTSDENGLIIVWMLYKGSWIEEMINNRNKSVVRSMSWNADGQKICIVYEDGAVIVGSVDGNRIWGKDLKGIQLSHVTWSADSKVLLFGMANGEIHIYDNQGNFMIKMKLSCLVNVTGAISIAGIHWYHGTEGYVEPDCPCLAVCFDNGRCQIMRHENDQNPVLIDTGMYVVGIQWNHMGSVLAVAGFQKAAMQDKDVNIVQFYTPFGEHLGTLKVPGKEISALSWEGGGLKIALAVDSFIYFANIRPNYKWGYCSNTVVYAYTRPDRPEYCVVFWDTKNNEKYVKYVKGLISITTCGDFCILATKADENHPQFVLVLCNSIGTPLDPKYIDIVPLFVAMTKTHVIAASKEAFYTWQYRVAKKLTALEINQITRSRKEGRERIYHVDDTPSGSMDGVLDYSKTIQGTRDPICAITASDKILIVGRESGTIQRYSLPNVGLIQKYSLNCRAYQLSLNCNSSRLAIIDISGVLTFFDLDARVTDSTGQQVVGELLKLERRDVWDMKWAKDNPDLFAMMEKTRMYVFRNLDPEEPIQTSGYICNFEDLEIKSVLLDEILKDPEHPNKDYLINFEIRSLRDSRALIEKVGIKDASQFIEDNPHPRLWRLLAEAALQKLDLYTAEQAFVRCKDYQGIKFVKRLGKLLSESMKQAEVVGYFGRFEEAERTYLEMDRRDLAIGLRLKLGDWFRVLQLLKTGSGDADDSLLEQANNAIGDYFADRQKWLNAVQYYVQGRNQERLAECYYMLEDYEGLENLAISLPENHKLLPEIAQMFVRVGMCEQAVTAFLKCSQPKAAVDTCVHLNQWNKAVELAKNHSMKEIGSLLARYASHLLEKNKTLDAIELYRKANYFFDAAKLMFKIADEEAKKGSKPLRVKKLYVLSALLIEQYHEQMKNAQRGKVKGKSSEATSALAGLLEEEVLSTTDRFTDNAWRGAEAYHFFILAQRQLYEGCVDTALKTALHLKDYEDIIPPVEIYSLLALCACASRAFGTCSKAFIKLKSLETLSSEQKQQYEDLALEIFTKHTSKDNRKPELDSLMEGGEGKLPTCVATGSPITEYQFWMCSVCKHGVLAQEISHYSFCPLCHSPVG

SEQ ID NO: 25918 - protein, 1126 aa, Artificial Sequence
  Synthetic polypeptide
MGVVANTYSSSTLGGQGSVQVVTWNEQYQKLTTSDENGLIIVWMLYKGSWIEEMINNRNKSVVRSMSWNADGQKICIVYEDGAVIVGSVDGNRIWGKDLKGIQLSHVTWSADSKVLLFGMANGEIHIYDNQGNFMIKMKLSCLVNVTGAISIAGIHWYHGTEGYVEPDCPCLAVCFDNGRCQIMRHENDQNPVLIDTGMYVVGIQWNHMGSVLAVAGFQKAAMQDKDVNIVQFYTPFGEHLGTLKVPGKEISALSWEGGGLKIALAVDSFIYFANIRPNYKWGYCSNTVVYAYTRPDRPEYCVVFWDTKNNEKYVKYVKGLISITTCGDFCILATKADENHPQEENEMETFGATFVLVLCNSIGTPLDPKYIDIVPLFVAMTKTHVIAASKEAFYTWQYRVAKKLTALEINQITRSRKEGRERIYHVDDTPSGSMDGVLDYSKTIQGTRDPICAITASDKILIVGRESGTIQRYSLPNVGLIQKYSLNCRAYQLSLNCNSSRLAIIDISGVLTFFDLDARVTDSTGQQVVGELLKLERRDVWDMKWAKDNPDLFAMMEKTRMYVFRNLDPEEPIQTSGYICNFEDLEIKSVLLDEILKDPEHPNKDYLINFEIRSLRDSRALIEKVGIKDASQFIEDNPHPRLWRLLAEAALQKLDLYTAEQAFVRCKDYQGIKFVKRLGKLLSESMKQAEVVGYFGRFEEAERTYLEMDRRDLAIGLRLKLGDWFRVLQLLKTGSGDADDSLLEQANNAIGDYFADRQKWLNAVQYYVQGRNQERLAECYYMLEDYEGLENLAISLPENHKLLPEIAQMFVRVGMCEQAVTAFLKCSQPKAAVDTCVHLNQWNKAVELAKNHSMKEIGSLLARYASHLLEKNKTLDAIELYRKANYFFDAAKLMFKIADEEAKKGSKPLRVKKLYVLSALLIEQYHEQMKNAQRGKVKGKSSEATSALAGLLEEEVLSTTDRFTDNAWRGAEAYHFFILAQRQLYEGCVDTALKTALHLKDYEDIIPPVEIYSLLALCACASRAFGTCSKAFIKLKSLETLSSEQKQQYEDLALEIFTKHTSKDNRKPELDSLMEGGEGKLPTCVATGSPITEYQFWMCSVCKHGVLAQEISHYSFCPLCHSPVG

SEQ ID NO: 25919 - protein, 818 aa, Artificial Sequence
  Synthetic polypeptide
MGVVANTYSSSTLGGQGSVQVVTWNEQYQKLTTSDENGLIIVWMLYKGSWIEEMINNRNKSVVRSMSWNADGQKICIVYEDGAVIVGSVDGNRIWGKDLKGIQLSHVTWSADSKVLLFGMANGEIHIYDNQGNFMIKMKLSCLVNVTGAISIAGIHWYHGTEGYVEPDCPCLAVCFDNGRCQIMRHENDQNPVLIDTGMYVVGIQWNHMGSVLAVAGFQKAAMQDKDVNIVQFYTPFGEHLGTLKVPGKEISALSWEGGGLKIALAVDSFIYFANIRPNYKWGYCSNTVVYAYTRPDRPEYCVVFWDTKNNEKYVKYVKGLISITTCGDFCILATKADENHPQEENEMETFGATFVLVLCNSIGTPLDPKYIDIVPLFVAMTKTHVIAASKEAFYTWQYRVAKKLTALEINQITRSRKEGRERIYHVDDTPSGSMDGVLDYSKTIQGTRDPICAITASDKILIVGRESGTIQRYSLPNVGLIQKYSLNCRAYQLSLNCNSSRLAIIDISGVLTFFDLDARVTDSTGQQVVGELLKLERRDVWDMKWAKDNPDLFAMMEKTRMYVFRNLDPEEPIQTSGYICNFEDLEIKSVLLDEILKDPEHPNKDYLINFEIRSLRDSRALIEKVGIKDASQFIEDNPHPRLWRLLAEAALQKLDLYTAEQAFVRCKDYQGIKFVKRLGKLLSESMKQAEVVGYFGRFEEAERTYLEMDRRDLAIGLRLKLGDWFRVLQLLKTGSGDADDSLLEQANNAIGDYFADRQKWLNAVQYYVQGRNQERLAECYYMLEDYEGLENLAISLPENHKLLPVGNSTNVCQSWNV

SEQ ID NO: 25920 - protein, 6 aa, Artificial Sequence
  Synthetic polypeptide
ATKKSE

SEQ ID NO: 25921 - protein, 67 aa, Artificial Sequence
  Synthetic polypeptide
QRDTGANRKSFQRTKLQKYEQPKKVNKWTTSGFKSHQHECRGRSPIYSYPRSFSPEGFETCQYCAPA

SEQ ID NO: 25922 - protein, 86 aa, Artificial Sequence
  Synthetic polypeptide
YMGVQAASLLKCSRVNLCFLGFPTSLNSWRKSGRCWESLQRILGRESPSYLTTIQNGSHCLRLEAFMLSGTGWAGFLKLKTWPPRC

SEQ ID NO: 25923 - protein, 22 aa, Artificial Sequence
  Synthetic polypeptide
EMLHHQILNIEDDTWGCRLHLY

SEQ ID NO: 25924 - protein, 156 aa, Artificial Sequence
  Synthetic polypeptide
RMIHGGAGCIFIEMFQGQPLFPGVSNILEQLEKIWEVLGVPTEDTWPGVSKLPNYNPEWFPLPTPRSLHVVWNRLGRVPEAEDLASQMLKGFPRDRVSAQEALVHDYFSALPSQLYQLPDEESLFTVSGVRLKPEMCDLLASYQKGHHPAQFSKCW

SEQ ID NO: 25925 - protein, 150 aa, Artificial Sequence
  Synthetic polypeptide
RMIHGGAGCIFIEMFQGQPLFPGVSNILEQLEKIWEVLGVPTEDTWPGVSKLPNYNPEWFPLPTPRSLHVVWNRLGRVPEAEDLASQMLKGFPRDRVSAQEALVHDYFSALPSQLYQLPDVSGVRLKPEMCDLLASYQKGHHPAQFSKCW

SEQ ID NO: 25926 - protein, 121 aa, Artificial Sequence
  Synthetic polypeptide
RMIHGGAGCIFIEMFQGQPLFPGVSNILEQLEKIWEVLGVPTEDTWPGVSKLPNYNPEWFPLPTPRSLHVVWNRLGRVPEAEDLASQMLKGFPRDRVSAQEALVHDYFSALPSQLYQLPDE

SEQ ID NO: 25927 - protein, 197 aa, Artificial Sequence
  Synthetic polypeptide
EVVNLLMAILLTVEVTHPNSMPAVNIQYEVIGNYYSSERMADNACVLFAVSVLMFIISSMLVYGAISYQVGWLIPFFCYRLFDFVLSCLVAISSLTYLPRIKEYLDQLPDFPYKDDLLALDSSCLLFIVLVFFALFIIFKAYLINCVWNCYKYINNRNVPEIAVYPAFEAPPQYVLPTYEMAVKMPEKEPPPPYLPA

SEQ ID NO: 25928 - protein, 34 aa, Artificial Sequence
  Synthetic polypeptide
GDCPYASNPRLQLHERPCVRSTQLRPASPQSCER

SEQ ID NO: 25929 - protein, 36 aa, Artificial Sequence
  Synthetic polypeptide
GLPAPRAVRGSKPIDGNFADCGSDSSKLHASCQHSV

SEQ ID NO: 25930 - protein, 19 aa, Artificial Sequence
  Synthetic polypeptide
SLWSPLNRWIDCHGFAVLM

SEQ ID NO: 25931 - protein, 52 aa, Artificial Sequence
  Synthetic polypeptide
LSWFCSADVTKHDSLLQAPPVLSDALPPWILLLHRILLDTGLGIAMGKLHLA

SEQ ID NO: 25932 - protein, 39 aa, Artificial Sequence
  Synthetic polypeptide
SLWSPLNRWIDCHGFAVLMFEEFLFYLMASKPKSSDAGL

SEQ ID NO: 25933 - protein, 400 aa, Artificial Sequence
  Synthetic polypeptide
WPQSPRAVMLACDKTRQPSSSPSSIIRRTSSLDTLAAPYLAGHWPRDSHGQAAPCMRDKATQTESAWAEEYSEKKKGSHKRSASWGSTDQLKEIAKLRQQLQRSKHSSRHHRDKERQSPFHGNHAAINQCQAPVPKSALIPVIPITKSTGSRFRNSVEGLNQEIEIIIKETGEKEEQLIPQDIPDGHRAPPPLVQRSSSTRSIDTQTPGGADRGSNNSSRSQSVSPTSFLTISNEGSEESPCSADDLLVDPRDKENGNNSPLPKYATSPKPNNSYMFKREPPEGCERVKVFEECSPKQLHEIPAFYCPDKNKVNFIPKSGSAFCLVSILKPLLPTPDLTLKGSGHSLTVTTGMTTTLLQPIAVASLSTNTEQDRVSRGTSTVMPSASLLPPPEPIEEAEG

SEQ ID NO: 25934 - protein, 47 aa, Artificial Sequence
  Synthetic polypeptide
CWLVTKHDSLLQAPPVLSDALPPWILLLHRILLDTGLGIAMGKLHLA

SEQ ID NO: 25935 - protein, 15 aa, Artificial Sequence
  Synthetic polypeptide
NPISTKGLKMSSARQ

SEQ ID NO: 25936 - protein, 55 aa, Artificial Sequence
  Synthetic polypeptide
SQHFGGPRRADHEVRSSRPTGQYGETPSLLKGSRCLPPGNEISKCAPPRASSTKP

SEQ ID NO: 25937 - protein, 25 aa, Artificial Sequence
  Synthetic polypeptide
AEITPLRSSLGDKDCKSSSCFGPWL

SEQ ID NO: 25938 - protein, 244 aa, Artificial Sequence
  Synthetic polypeptide
SQLLGRLKKENRLNPGGRGYSEPRSRHCAPAWATKIASQVAALDLGYKPGVEAIRKNPPKVLFLLGADGGCITRQDLPKDCFIIYQGHHGDVGAPIADVILPGAAYTEKSATYVNTEGRAQQTKVAVTPPGLAREDWKIIRALSEIAGMTLPYDTLDQVRNRLEEVSPNLVRYDDIEGANYFQQANELSKLVNQQLLADPLVPPQLTIKDFYMTDSISRASQTMAKCVKAVTEGAQAVEEPSIC

SEQ ID NO: 25939 - protein, 26 aa, Artificial Sequence
  Synthetic polypeptide
IQEAEVTVSRDHATALQPGRQRLQVK

SEQ ID NO: 25940 - protein, 48 aa, Artificial Sequence
  Synthetic polypeptide
GRRRWLTPVIPPLWEAEAGGSRGQEIETILANTQYVKDTCKKGLSRPF

SEQ ID NO: 25941 - protein, 752 aa, Artificial Sequence
  Synthetic polypeptide
SHHFGRPRRADHEARRSRPSWLTRNMLRIPVRKALVGLSKSPKGCVRTTATAASNLIEVFVDGQSVMVEPGTTVLQACEKVGMQIPRFCYHERLSVAGNCRMCLVEIEKAPKVVAACAMPVMKGWNILTNSEKSKKAREGVMEFLLANHPLDCPICDQGGECDLQDQSMMFGNDRSRFLEGKRAVEDKNIGPLVKTIMTRCIQCTRCIRFASEIAGVDDLGTTGRGNDMQVGTYIEKMFMSELSGNIIDICPVGALTSKPYAFTARPWETRKTESIDVMDAVGSNIVVSTRTGEVMRILPRMHEDINEEWISDKTRFAYDGLKRQRLTEPMVRNEKGLLTYTSWEDALSRVAGMLQSFQGKDVAAIAGGLVDAEALVALKDLLNRVDSDTLCTEEVFPTAGAGTDLRSNYLLNTTIAGVEEADVVLLVGTNPRFEAPLFNARIRKSWLHNDLKVALIGSPVDLTYTYDHLGDSPKILQDIASGSHPFSQVLKEAKKPMVVLGSSALQRNDGAAILAAVSSIAQKIRMTSGVTGDWKVMNILHRIASQVAALDLGYKPGVEAIRKNPPKVLFLLGADGGCITRQDLPKDCFIIYQGHHGDVGAPIADVILPGAAYTEKSATYVNTEGRAQQTKVAVTPPGLAREDWKIIRALSEIAGMTLPYDTLDQVRNRLEEVSPNLVRYDDIEGANYFQQANELSKLVNQQLLADPLVPPQLTIKDFYMTDSISRASQTMAKCVKAVTEGAQAVEEPSIC

SEQ ID NO: 25942 - protein, 4 aa, Artificial Sequence
  Synthetic polypeptide
HAIC

SEQ ID NO: 25943 - protein, 30 aa, Artificial Sequence
  Synthetic polypeptide
TLMFIAALFTIAKRWKQPKCPSADEWRWNL

SEQ ID NO: 25944 - protein, 18 aa, Artificial Sequence
  Synthetic polypeptide
PRGGSSPNVHQQMSGGGI

SEQ ID NO: 25945 - protein, 5 aa, Artificial Sequence
  Synthetic polypeptide
VEVEF

SEQ ID NO: 25946 - protein, 30 aa, Artificial Sequence
  Synthetic polypeptide
CPRPSHSFTLLTDSPRATSSPASSIHDHLL

SEQ ID NO: 25947 - protein, 217 aa, Artificial Sequence
  Synthetic polypeptide
KNVVYPKCTVCIKSTVVYSNVLGLHIHSPSSLTHPEQLPVLQAPFMITFYEDRAFQGRSYETTTDCPNLQPYFSRCNSIRVESGCWMLYERPNYQGQQYLLRRGEYPDYQQWMGLSDSIRSCCLIPQTVSHRLRLYEREDHKGLMMELSEDCPSIQDRFHLSEIRSLHVLEGCWVLYELPNYRGRQYLLRPQEYRRCQDWGAMDAKAGSLRRVVDLY

SEQ ID NO: 25948 - protein, 44 aa, Artificial Sequence
  Synthetic polypeptide
STCTGCPGPLCSYLLLLSLHSSCCCPTGLLTGPQVCQLFSHSAS

SEQ ID NO: 25949 - protein, 724 aa, Artificial Sequence
  Synthetic polypeptide
LGLRYVSYSPIRLLEVCVPLPKIFIKRQAPLKVSLLQDLKDFFQKVSQVYVAIDERLASLKTDTFSKTREEKMEDIFAQKEMEEGEFKNWIEKMQARLMSSSVDTPQQLQSVFESLIAKKQSLCEVLQAWNNRLQDLFQQEKGRKRPSVPPSPGRLRQGEESKISAMDASPRNISPGLQNGEKEDRFLTTLSSQSSTSSTHLQLPTPPEVMSEQSVGGPPELDTASSSEDVFDGHLLGSTDSQVKEKSTMKAIFANLLPGNSYNPIPFPFDPDKHYLMYEHERVPIAVCEKEPSSIIAFALSCKEYRNALEELSKATQWNSAEEGLPTNSTSDSRPKSSSPIRLPEMSGGQTNRTTETEPQPTKKASGMLSFFRGTAGKSPDLSSQKRETLRGADSAYYQVGQTGKEGTENQGVEPQDEVDGGDTQKKQLINPHVELQFSDANAKFYCRLYYAGEFHKMREVILDSSEEDFIRSLSHSSPWQARGGKSGAAFYATEDDRFILKQMPRLEVQSFLDFAPHYFNYITNAVQQKRPTALAKILGVYRIGYKNSQNNTEKKLDLLVMENLFYGRKMAQVFDLKGSLRNRNVKTDTGKESCDVVLLDENLLKMVRDNPLYIRSHSKAVLRTSIHSDSHFLSSHLIIDYSLLVGRDDTSNELVVGIIDYIRTFTWDKKLEMVVKSTGILGGQGKMPTVVSPELYRTRFCEAMDKYFLMVPDHWTGLGLNC

SEQ ID NO: 25950 - protein, 70 aa, Artificial Sequence
  Synthetic polypeptide
KPKSIYWPLIYLHWLPRTSLLLPPTALSSLILLLPHWPPDWASGMSVILPFGFLKYVFHSPKYSLSVRPH

SEQ ID NO: 25951 - protein, 66 aa, Artificial Sequence
  Synthetic polypeptide
LGLRYVSYSPIRLLEVCVPLPKIFIKRQAPLKVSLLQDLKDFFQKVSQVYVAIDERLASLKTDTFS

SEQ ID NO: 25952 - protein, 526 aa, Artificial Sequence
  Synthetic polypeptide
LLDSDGTITIEEQIVLVLKAKVQCELNITAQLQEGEGNCFPEWDGLICWPRGTVGKISAVPCPPYIYDFNHKGVAFRHCNPNGTWDFMHSLNKTWANYSDCLRFLQPDISIGKQEFFERLYVMYTVGYSISFGSLAVAILIIGYFRRLHCTRNYIHMHLFVSFMLRATSIFVKDRVVHAHIGVKELESLIMQDDPQNSIEATSVDKSQYIGCKIAVVMFIYFLATNYYWILVEGLYLHNLIFVAFFSDTKYLWGFILIGWGFPAAFVAAWAVARATLADARCWELSAGDIKWIYQAPILAAIGLNFILFLNTVRVLATKIWETNAVGHDTRKQYRKLAKSTLVLVLVFGVHYIVFVCLPHSFTGLGWEIRMHCELFFNSFQGFFVSIIYCYCNGEVQAEVKKMWSRWNLSVDWKRTPPCGSRRCGSVLTTVTHSTSSQSQVAASTRMVLISGKAAKIASRQPDSHITLPGYVWSNSEQDCLPHSFHEETKEDSGRQGDDILMEKPSRPMESNPDTEGCQGETEDVL

SEQ ID NO: 25953 - protein, 64 aa, Artificial Sequence
  Synthetic polypeptide
KNVKRETGLASQPTSFSRAGCFLPLNTGLQVLQFWNSDWLSLLFSLQMAIVEPCDCWILMAPLL

SEQ ID NO: 25954 - protein, 33 aa, Artificial Sequence
  Synthetic polypeptide
TLDSKFFSFGTQTGSPCSSACRWLLWNLVIAGF

SEQ ID NO: 25955 - protein, 36 aa, Artificial Sequence
  Synthetic polypeptide
GRVWWPIPIIPALREASVRGSLVARSSRPAWETTCT

SEQ ID NO: 25956 - protein, 54 aa, Artificial Sequence
  Synthetic polypeptide
SLHFGKPASEDHLWPEVRDQPGKQHAHDGVQARTVGKANGCSRSQSVHLSSRGY

SEQ ID NO: 25957 - protein, 193 aa, Artificial Sequence
  Synthetic polypeptide
PGVVAHTYNPCTSGSQRQRITCGQKFETSLGNNMHMMVSKPEQWVKPMAVAGANQYTFHLEATENPGALIKDIRENGMKVGLAIKPGTSVEYLAPWANQIDMALVMTVEPGFGGQKFMEDMMPKVHWLRTQFPSLDIEVDGGVGPDTVHKCAEAGANMIVSGSAIMRSEDPRSVINLLRNVCSEAAQKRSLDR

SEQ ID NO: 25958 - protein, 164 aa, Artificial Sequence
  Synthetic polypeptide
PGVVAHTYNPCTSGSQRQRITCGQKFETSLGNNMHMMVSKPEQWVKPMAVAGANQYTFHLEATENPGALIKDIRENGMKVGLAIKPGTSVEYLAPWANQIDMALVMTVEPGFGGQKFMEDMMPKAGANMIVSGSAIMRSEDPRSVINLLRNVCSEAAQKRSLDR

SEQ ID NO: 25959 - protein, 190 aa, Artificial Sequence
  Synthetic polypeptide
PGVVAHTYNPCTSGSQRQRITCGQKFETSLGNNMHMMVSKPEQWVKPMAVAGANQYTFHLEATENPGALIKDIRENGMKVGLAIKPGTSVEYLAPWANQIDMALVMTVEPGFGGQKFMEDMMPKVHWLRTQFPSLDIEVDGGVGPDTVHKCAEIGVQWRDLCSLQSLPAGFKRFSCLSLLSSWDYRQELT

SEQ ID NO: 25960 - protein, 156 aa, Artificial Sequence
  Synthetic polypeptide
PGVVAHTYNPCTSGSQRQRITCGQKFETSLGNNMHMMVSKPEQWVKPMAVAGANQYTFHLEATENPGALIKDIRENGMKVGLAIKPGTSVEYLAPWANQIDMALVMTVEPGFGGQKFMEDMMPKVHWLRTQFPSLDIEVDGGVGPDTVHKCAEELT

SEQ ID NO: 25961 - protein, 211 aa, Artificial Sequence
  Synthetic polypeptide
PGVVAHTYNPCTSGSQRQRITCGQKFETSLGNNMHMMVSKPEQWVKPMAVAGANQYTFHLEATENPGALIKDIRENGMKSCSVTQAEVQWHSQGPLQVGLAIKPGTSVEYLAPWANQIDMALVMTVEPGFGGQKFMEDMMPKVHWLRTQFPSLDIEVDGGVGPDTVHKCAEAGANMIVSGSAIMRSEDPRSVINLLRNVCSEAAQKRSLDR

SEQ ID NO: 25962 - protein, 71 aa, Artificial Sequence
  Synthetic polypeptide
GQAWWLKPVIPALWEAEAGELQGDSGPRRMSASKRYFEKTNAICRPSSFTKHSRESSGSPGVSRSCTGTRF

SEQ ID NO: 25963 - protein, 590 aa, Artificial Sequence
  Synthetic polypeptide
SQHFGRPRQANYKGIVVLEECQLPKDILKKQMQFADQAASLNILGNPQVPQECQDPVPEQDFEMSPSSPTLLLRNIEKQSAQLTEIINSLIAPLNLSPTSSPLSSKSCSHKCLANGIYRSASENLDELSSSSSWLLNQKHSKKKRKDRTRLKSSSLTFMSTSARTRPLQSFHKRKLYRLSPTFYWTPQTLPSKETAFLNTTQMPCLQSASTWSSYEHNSESYLLREHVSELDSSFHSVLSLPSDVPLHFHFETLLKKTEIKGNLAENKFVDEYIISPSPVHSTLNQWRNGYSPICKPQIRSESSAQLLQGRKKRHLSETALGERTKLEESDFQHTESGSHSNFTAVSNVNVLSRIQNSSRNTARRRLRSESSYDIDNIVIPMSLVAPAKLEKLQYKEILTPSWRMVVLQPLDEYNLGKEEIEDLSDEVFSLRHKKYEEREQARWSLWEQSKWHRRNSRAYSKNVEGQDLLLKEYPNNFSSSQQCAAASPPGLPSENQDLCAYGLPSLNQSQETKSLWWERRAFPLKGEDMAALLCQDEKKDQVERSSTAFHGEIFGTSVPENGHHPKKQSDGMEEYKTFGLGLTNVKKNR

SEQ ID NO: 25964 - protein, 23 aa, Artificial Sequence
  Synthetic polypeptide
PGMVAQACNPSTLGGRGRRITRG

SEQ ID NO: 25965 - protein, 548 aa, Artificial Sequence
  Synthetic polypeptide
SQHFGRPRQANYKGIVVLEECQLPKDILKKQMQFADQAASLNILGNPQVPQECQDPVPEQDFEMSPSSPTLLLRNIEKQSAQLTEIINSLIAPLNLSPTSSPLSSKSCSHKCLANGIYRSASENLDELSSSSSWLLNQKHSKKKRKDRTRLKSSSLTFMSTSARTRPLQSFHKRKLYRLSPTFYWTPQTLPSKETAFLNTTQMPCLQSASTWSSYEHNSESYLLREHVSELDSSFHSVLSLPSDVPLHFHFETLLKKTEIKGNLAENKFVDEYIISPSPGERTKLEESDFQHTESGSHSNFTAVSNVNVLSRIQNSSRNTARRRLRSESSYDIDNIVIPMSLVAPAKLEKLQYKEILTPSWRMVVLQPLDEYNLGKEEIEDLSDEVFSLRHKKYEEREQARWSLWEQSKWHRRNSRAYSKNVEGQDLLLKEYPNNFSSSQQCAAASPPGLPSENQDLCAYGLPSLNQSQETKSLWWERRAFPLKGEDMAALLCQDEKKDQVERSSTAFHGEIFGTSVPENGHHPKKQSDGMEEYKTFGLGLTNVKKNR

SEQ ID NO: 25966 - protein, 308 aa, Artificial Sequence
  Synthetic polypeptide
SQHFGRPRQANYKGIVVLEECQLPKDILKKQMQFADQAASLNILGNPQVPQECQDPVPEQDFEMSPSSPTLLLRNIEKQSAQLTEIINSLIAPLNLSPTSSPLSSKSCSHKCLANGIYRSASENLDELSSSSSWLLNQKHSKKKRKDRTRLKSSSLTFMSTSARTRPLQSFHKRKLYRLSPTFYWTPQTLPSKETAFLNTTQMPCLQSASTWSSYEHNSESYLLREHVSELDSSFHSVLSLPSDVPLHFHFETLLKKTEIKGNLAENKFVDEYIISPSPGMSHLQFLYSICLFMSLYLLFLHSKKNKI

SEQ ID NO: 25967 - protein, 251 aa, Artificial Sequence
  Synthetic polypeptide
SQHFGRPRQANYKGIVVLEECQLPKDILKKQMQFADQAASLNILGNPQVPQECQDPVPEQDFEMSPSSPTLLLRNIEKQSAQLTEIINSLIAPLNLSPTSSPLSSKSCSHKCLANGIYRSASENLDELSSSSSWLLNQKHSKKKRKDRTRLKSSSLTFMSTSARTRPLQSFHKRKLYRLSPTFYWTPQTLPSKETAFLNTTQMPCLQSASTWSSYEHNSESYLLREHVSELDSSFHSVLSLPSGKPPCNNF

SEQ ID NO: 25968 - protein, 120 aa, Artificial Sequence
  Synthetic polypeptide
SQHFGRPRQANYKGIVVLEECQLPKDILKKQMQFADQAASLNILGNPQVPQECQDPVPEQDFEMSPSSPTLLLRNIEKQSAQLTEIINSLIAPLNLSPTSSPLSSKSCSHKCLANGIYRR

SEQ ID NO: 25969 - protein, 83 aa, Artificial Sequence
  Synthetic polypeptide
SQHFGRPRQANYKGIVVLEECQLPKDILKKQMQFADQAASLNILGNPQVPQECQDPVPEQDFEMSPSSPTLLLRNIEKQVKSK

SEQ ID NO: 25970 - protein, 379 aa, Artificial Sequence
  Synthetic polypeptide
NGPNMYQLTPEFSQRLTNKIRELLQQMERGLKSADPRDGTGYTGWAGIAVLYLHLYDVFGDPAYLQLAHGYVKQSLNCLTKRSITFLCGDAGPLAVAAVLYHKMNNEKQAEDCITRLIHLNKIDPHAPNEMLYGRIGYIYALLFVNKNFGVEKIPQSHIQQICETILTSGENLARKRNFTAKSPLMYEWYQEYYVGAAHGLAGIYYYLMQPSLQVSQGKLHSLVKPSVDYVCQLKFPSGNYPPCIGDNRDLLVHWCHGAPGVIYMLIQAYKVFREEKYLCDAYQCADVIWQYGLLKKGYGLCHGSAGNAYAFLTLYNLTQDMKYLYRACKFAEWCLEYGEHGCRTPDTPFSLFEGMAGTIYFLADLLVPTKARFPAFEL

SEQ ID NO: 25971 - protein, 10 aa, Artificial Sequence
  Synthetic polypeptide
SNRMGLICTS

SEQ ID NO: 25972 - protein, 6 aa, Artificial Sequence
  Synthetic polypeptide
YVPADS

SEQ ID NO: 25973 - protein, 176 aa, Artificial Sequence
  Synthetic polypeptide
NGPNMYQLTPEFSQRLTNKIRELLQQMERGLKSADPRDGTGYTGWAGIAVLYLHLYDVFGDPAYLQLAHGYVKQSLNCLTKRSITFLCGDAGPLAVAAVLYHKMNNEKQAEDCITRLIHLNKIDPHAPNEMLYGRIGYIYALLFVNKNFGVEKIPQSHIQQICETILTSGENLARK

SEQ ID NO: 25974 - protein, 62 aa, Artificial Sequence
  Synthetic polypeptide
NGPNMYQLTPEFSQRLTNKIRELLQQMERGLKSADPRDGTGYTGWAVGRIGKSSKIQCLKRR

SEQ ID NO: 25975 - protein, 1269 aa, Artificial Sequence
  Synthetic polypeptide
WVYQGFLLLFPPHLLLLLPCKKCLSPPAMILGPPKPCGTSVREVTGYVLVALNQFRYLPLENLRIIRGTKLYEDRYALAIFLNYRKDGNFGLQELGLKNLTEILNGGVYVDQNKFLCYADTIHWQDIVRNPWPSNLTLVSTNGSSGCGRCHKSCTGRCWGPTENHCQTLTRTVCAEQCDGRCYGPYVSDCCHRECAGGCSGPKDTDCFACMNFNDSGACVTQCPQTFVYNPTTFQLEHNFNAKYTYGAFCVKKCPHNFVVDSSSCVRACPSSKMEVEENGIKMCKPCTDICPKACDGIGTGSLMSAQTVDSSNIDKFINCTKINGNLIFLVTGIHGDPYNAIEAIDPEKLNVFRTVREITGFLNIQSWPPNMTDFSVFSNLVTIGGRVLYSGLSLLILKQQGITSLQFQSLKEISAGNIYITDNSNLCYYHTINWTTLFSTINQRIVIRDNRKAENCTAEGMVCNHLCSSDGCWGPGPDQCLSCRRFSRGRICIESCNLYDGEFREFENGSICVECDPQCEKMEDGLLTCHGPGPDNCTKCSHFKDGPNCVEKCPDGLQGANSFIFKYADPDRECHPCHPNCTQGCNGPTSHDCIYYPWTGHSTLPQHARTPLIAAGVIGGLFILVIVGLTFAVYVRRKSIKKKRALRRFLETELVEPLTPSGTAPNQAQLRILKETELKRVKVLGSGAFGTVYKGIWVPEGETVKIPVAIKILNETTGPKANVEFMDEALIMASMDHPHLVRLLGVCLSPTIQLVTQLMPHGCLLEYVHEHKDNIGSQLLLNWCVQIAKGMMYLEERRLVHRDLAARNVLVKSPNHVKITDFGLARLLEGDEKEYNADGGKMPIKWMALECIHYRKFTHQSDVWSYGVTIWELMTFGGKPYDGIPTREIPDLLEKGERLPQPPICTIDVYMVMVKCWMIDADSRPKFKELAAEFSRMARDPQRYLVIQGDDRMKLPSPNDSKFFQNLLDEEDLEDMMDAEEYLVPQAFNIPPPIYTSRARIDSNRSEIGHSPPPAYTPMSGNQFVYRDGGFAAEQGVSVPYRAPTSTIPEAPVAQGATAEIFDDSCCNGTLRKPVAPHVQEDSSTQRYSADPTVFAPERSPRGELDEEGYMTPMRDKPKQEYLNPVEENPFVSRRKNGDLQALDNPEYHNASNGPPKAEDEYVNEPLYLNTFANTLGKAEYLKNNILSMPEKAKKAFDNPDYWNHSLPPRSTLQHPDYLQEYSTKYFYKQNGRIRPIVAENPEYLSEFSLKPGTVLPPPPYRHRNTVV

SEQ ID NO: 25976 - protein, 19 aa, Artificial Sequence
  Synthetic polypeptide
FWGLLSHVELLFEKSQATC

SEQ ID NO: 25977 - protein, 17 aa, Artificial Sequence
  Synthetic polypeptide
AMWNFCSRSHRLRVSGS

SEQ ID NO: 25978 - protein, 1253 aa, Artificial Sequence
  Synthetic polypeptide
WVYQGFLLLFPPHLLLLLPCKKCLSPPAMILGPPKPCGTSVREVTGYVLVALNQFRYLPLENLRIIRGTKLYEDRYALAIFLNYRKDGNFGLQELGLKNLTEILNGGVYVDQNKFLCYADTIHWQDIVRNPWPSNLTLVSTNGSSGCGRCHKSCTGRCWGPTENHCQTLTRTVCAEQCDGRCYGPYVSDCCHRECAGGCSGPKDTDCFACMNFNDSGACVTQCPQTFVYNPTTFQLEHNFNAKYTYGAFCVKKCPHNFVVDSSSCVRACPSSKMEVEENGIKMCKPCTDICPKACDGIGTGSLMSAQTVDSSNIDKFINCTKINGNLIFLVTGIHGDPYNAIEAIDPEKLNVFRTVREITGFLNIQSWPPNMTDFSVFSNLVTIGGRVLYSGLSLLILKQQGITSLQFQSLKEISAGNIYITDNSNLCYYHTINWTTLFSTINQRIVIRDNRKAENCTAEGMVCNHLCSSDGCWGPGPDQCLSCRRFSRGRICIESCNLYDGEFREFENGSICVECDPQCEKMEDGLLTCHGPGPDNCTKCSHFKDGPNCVEKCPDGLQGANSFIFKYADPDRECHPCHPNCTQGCNGPTSHDCIYYPWTGHSTLPQHARTPLIAAGVIGGLFILVIVGLTFAVYVRRKSIKKKRALRRFLETELVEPLTPSGTAPNQAQLRILKETELKRVKVLGSGAFGTVYKGIWVPEGETVKIPVAIKILNETTGPKANVEFMDEALIMASMDHPHLVRLLGVCLSPTIQLVTQLMPHGCLLEYVHEHKDNIGSQLLLNWCVQIAKGMMYLEERRLVHRDLAARNVLVKSPNHVKITDFGLARLLEGDEKEYNADGGKMPIKWMALECIHYRKFTHQSDVWSYGVTIWELMTFGGKPYDGIPTREIPDLLEKGERLPQPPICTIDVYMVMVKCWMIDADSRPKFKELAAEFSRMARDPQRYLVIQGDDRMKLPSPNDSKFFQNLLDEEDLEDMMDAEEYLVPQAFNIPPPIYTSRARIDSNRNQFVYRDGGFAAEQGVSVPYRAPTSTIPEAPVAQGATAEIFDDSCCNGTLRKPVAPHVQEDSSTQRYSADPTVFAPERSPRGELDEEGYMTPMRDKPKQEYLNPVEENPFVSRRKNGDLQALDNPEYHNASNGPPKAEDEYVNEPLYLNTFANTLGKAEYLKNNILSMPEKAKKAFDNPDYWNHSLPPRSTLQHPDYLQEYSTKYFYKQNGRIRPIVAENPEYLSEFSLKPGTVLPPPPYRHRNTVV

SEQ ID NO: 25979 - protein, 1259 aa, Artificial Sequence
  Synthetic polypeptide
WVYQGFLLLFPPHLLLLLPCKKCLSPPAMILGPPKPCGTSVREVTGYVLVALNQFRYLPLENLRIIRGTKLYEDRYALAIFLNYRKDGNFGLQELGLKNLTEILNGGVYVDQNKFLCYADTIHWQDIVRNPWPSNLTLVSTNGSSGCGRCHKSCTGRCWGPTENHCQTLTRTVCAEQCDGRCYGPYVSDCCHRECAGGCSGPKDTDCFACMNFNDSGACVTQCPQTFVYNPTTFQLEHNFNAKYTYGAFCVKKCPHNFVVDSSSCVRACPSSKMEVEENGIKMCKPCTDICPKACDGIGTGSLMSAQTVDSSNIDKFINCTKINGNLIFLVTGIHGDPYNAIEAIDPEKLNVFRTVREITGFLNIQSWPPNMTDFSVFSNLVTIGGRVLYSGLSLLILKQQGITSLQFQSLKEISAGNIYITDNSNLCYYHTINWTTLFSTINQRIVIRDNRKAENCTAEGMVCNHLCSSDGCWGPGPDQCLSCRRFSRGRICIESCNLYDGEFREFENGSICVECDPQCEKMEDGLLTCHGPGPDNCTKCSHFKDGPNCVEKCPDGLQGANSFIFKYADPDRECHPCHPNCTQGCIGSSIEDCIGLMDRTPLIAAGVIGGLFILVIVGLTFAVYVRRKSIKKKRALRRFLETELVEPLTPSGTAPNQAQLRILKETELKRVKVLGSGAFGTVYKGIWVPEGETVKIPVAIKILNETTGPKANVEFMDEALIMASMDHPHLVRLLGVCLSPTIQLVTQLMPHGCLLEYVHEHKDNIGSQLLLNWCVQIAKGMMYLEERRLVHRDLAARNVLVKSPNHVKITDFGLARLLEGDEKEYNADGGKMPIKWMALECIHYRKFTHQSDVWSYGVTIWELMTFGGKPYDGIPTREIPDLLEKGERLPQPPICTIDVYMVMVKCWMIDADSRPKFKELAAEFSRMARDPQRYLVIQGDDRMKLPSPNDSKFFQNLLDEEDLEDMMDAEEYLVPQAFNIPPPIYTSRARIDSNRSEIGHSPPPAYTPMSGNQFVYRDGGFAAEQGVSVPYRAPTSTIPEAPVAQGATAEIFDDSCCNGTLRKPVAPHVQEDSSTQRYSADPTVFAPERSPRGELDEEGYMTPMRDKPKQEYLNPVEENPFVSRRKNGDLQALDNPEYHNASNGPPKAEDEYVNEPLYLNTFANTLGKAEYLKNNILSMPEKAKKAFDNPDYWNHSLPPRSTLQHPDYLQEYSTKYFYKQNGRIRPIVAENPEYLSEFSLKPGTVLPPPPYRHRNTVV

SEQ ID NO: 25980 - protein, 692 aa, Artificial Sequence
  Synthetic polypeptide
WVYQGFLLLFPPHLLLLLPCKKCLSPPAMILGPPKPCGTSVREVTGYVLVALNQFRYLPLENLRIIRGTKLYEDRYALAIFLNYRKDGNFGLQELGLKNLTEILNGGVYVDQNKFLCYADTIHWQDIVRNPWPSNLTLVSTNGSSGCGRCHKSCTGRCWGPTENHCQTLTRTVCAEQCDGRCYGPYVSDCCHRECAGGCSGPKDTDCFACMNFNDSGACVTQCPQTFVYNPTTFQLEHNFNAKYTYGAFCVKKCPHNFVVDSSSCVRACPSSKMEVEENGIKMCKPCTDICPKACDGIGTGSLMSAQTVDSSNIDKFINCTKINGNLIFLVTGIHGDPYNAIEAIDPEKLNVFRTVREITGFLNIQSWPPNMTDFSVFSNLVTIGGRVLYSGLSLLILKQQGITSLQFQSLKEISAGNIYITDNSNLCYYHTINWTTLFSTINQRIVIRDNRKAENCTAEGMVCNHLCSSDGCWGPGPDQCLSCRRFSRGRICIESCNLYDGEFREFENGSICVECDPQCEKMEDGLLTCHGPGPDNCTKCSHFKDGPNCVEKCPDGLQGANSFIFKYADPDRECHPCHPNCTQGCIGSSIEDCIGLMDRTPLIAAGVIGGLFILVIVGLTFAVYVRRKSIKKKRALRRFLETELVEPLTPSGTAPNQAQLRILKETELKRVKVLGSGAFGTVYKGIWVPEG

SEQ ID NO: 25981 - protein, 148 aa, Artificial Sequence
  Synthetic polypeptide
WVYQGFLLLFPPHLLLLLPCKKCLSPPAMILGPPKPCGTSVREVTGYVLVALNQFRYLPLENLRIIRGTKLYEDRYALAIFLNYRKDGNFGLQELGLKNLTEILNGGVYVDQNKFLCYADTIHWQDIVRNPWPSNLTLVSTNGSSGCG

SEQ ID NO: 25982 - protein, 43 aa, Artificial Sequence
  Synthetic polypeptide
RTFLLHVAVVGPSVQYLLWKIVRNKSLLWTTIFLWCLLRDLLS

SEQ ID NO: 25983 - protein, 14 aa, Artificial Sequence
  Synthetic polypeptide
LWWDPQSSTSYGRL

SEQ ID NO: 25984 - protein, 329 aa, Artificial Sequence
  Synthetic polypeptide
KTSVVFACLTSLPPSLDNKSAHLPLENFPVACSCGGTLSPVPPMEDCKEQEPIMDNNISLVPFERPAVIEKLTGNMGKRKSSTPQKFVGEKLMRFSYPDIHFDMNLTYEKEAELMQSHMMDQAINNAITYLGAEALHPLMQHPPSTIAEVAPVISSAYSQVYHPNRIERPISRETADSHENNMDGPISLIRPKSRPQEREASPSNSCLDSTDSESSHDDHQSYQGHPALNPKRKQSPAYMKEDVKALDTTKAPKGSLKDIYKVFNGEGEQIRAFKCEHCRVLFLDHVMYTIHMGCHGYRDPLECNICGYRSQDRYEFSSHIVRGEHTFH

SEQ ID NO: 25985 - protein, 22 aa, Artificial Sequence
  Synthetic polypeptide
YKVNAPSTVTSVELLLLRRATF

SEQ ID NO: 25986 - protein, 2 aa, Artificial Sequence
  Synthetic polypeptide
IR

SEQ ID NO: 25987 - protein, 12 aa, Artificial Sequence
  Synthetic polypeptide
YKVNAPSTVTSV

SEQ ID NO: 25988 - protein, 58 aa, Artificial Sequence
  Synthetic polypeptide
TPCHLQSYRQPPVVTPTSLESCLHATPQRHPSLLWRGPTLEGVGPSKMQCASHGIWPH

SEQ ID NO: 25989 - protein, 320 aa, Artificial Sequence
  Synthetic polypeptide
VVTLIGLNNGVATQVLSIVSCSLGELPATSSLTVSLLLSPQPLWNLVSMQPHKDILVSCGEDRLWKVLGLPKCNVLLTGFGHTDWLSDCCFHPSGDKLATSSGDTTVKLWDLCKGDCILTFEGHSRAVWSCTWHSCGNFVASSSLDKTSKIWDVNSERCRCTLYGHTDSVNSIEFFPFSNTLLTSSADKTLSIWDARTGICEQSLYGHMHSINDAIFDPRGHMIASCDACGVTKLWDFRKLLPIVSIDIGPSPGNEVNFDSSGRVLAQASGNGVIHLLDLKSGEIHKLMGHENEAHTVVFSHDGEILFSGGSDGTVRTWS

SEQ ID NO: 25990 - protein, 44 aa, Artificial Sequence
  Synthetic polypeptide
PPRFSPSFPAHWVNSLPPPVLPSASCCHPNLSGILSPCNPTKTS

SEQ ID NO: 25991 - protein, 258 aa, Artificial Sequence
  Synthetic polypeptide
VVTLIGLNNGVATQVLSIVSCSLGELPATSSLTVSLLLSPQPLWNLVSMQPHKDILVSCGEDRLWKVLGLPKCNVLLTGFGHTDWLSDCCFHPSERCRCTLYGHTDSVNSIEFFPFSNTLLTSSADKTLSIWDARTGICEQSLYGHMHSINDAIFDPRGHMIASCDACGVTKLWDFRKLLPIVSIDIGPSPGNEVNFDSSGRVLAQASGNGVIHLLDLKSGEIHKLMGHENEAHTVVFSHDGEILFSGGSDGTVRTWS

SEQ ID NO: 25992 - protein, 40 aa, Artificial Sequence
  Synthetic polypeptide
WFKSGSFPCALSLLPPCEEGACFPFAFCHDLSPCNPTKTS

SEQ ID NO: 25993 - protein, 73 aa, Artificial Sequence
  Synthetic polypeptide
VLMRSDGLKVAVSPVLSLSCHHVKKVPASPLPSAMICLHATPQRHPSLLWRGPTLEGVGPSKMQCASHGIWPH

SEQ ID NO: 25994 - protein, 282 aa, Artificial Sequence
  Synthetic polypeptide
SLPRHVKFVSMQPHKDILVSCGEDRLWKVLGLPKCNVLLTGFGHTDWLSDCCFHPSGDKLATSSGDTTVKLWDLCKGDCILTFEGHSRAVWSCTWHSCGNFVASSSLDKTSKIWDVNSERCRCTLYGHTDSVNSIEFFPFSNTLLTSSADKTLSIWDARTGICEQSLYGHMHSINDAIFDPRGHMIASCDACGVTKLWDFRKLLPIVSIDIGPSPGNEVNFDSSGRVLAQASGNGVIHLLDLKSGEIHKLMGHENEAHTVVFSHDGEILFSGGSDGTVRTWS

SEQ ID NO: 25995 - protein, 11 aa, Artificial Sequence
  Synthetic polypeptide
NLSPCNPTKTS

SEQ ID NO: 25996 - protein, 85 aa, Artificial Sequence
  Synthetic polypeptide
VLMRSDGLKVAVSPVLSLSCHHVKKVPASPLPSAMIVSFLKPPPPCEICLHATPQRHPSLLWRGPTLEGVGPSKMQCASHGIWPH

SEQ ID NO: 25997 - protein, 220 aa, Artificial Sequence
  Synthetic polypeptide
SLPRHVKFVSMQPHKDILVSCGEDRLWKVLGLPKCNVLLTGFGHTDWLSDCCFHPSERCRCTLYGHTDSVNSIEFFPFSNTLLTSSADKTLSIWDARTGICEQSLYGHMHSINDAIFDPRGHMIASCDACGVTKLWDFRKLLPIVSIDIGPSPGNEVNFDSSGRVLAQASGNGVIHLLDLKSGEIHKLMGHENEAHTVVFSHDGEILFSGGSDGTVRTWS

SEQ ID NO: 25998 - protein, 307 aa, Artificial Sequence
  Synthetic polypeptide
GRAQCLTPVVPGLWEAEAGRSRGADRMSSFGDFVALSDVCDVPTAKIISREVSDGIIAPGYEEEALTILSKKKNGNYCVLQMDQSYKPDENEVRTLFGLHLSQKRNNGVVDKSLFSNVVTKNKDLPESALRDLIVATIAVKYTQSNSVCYAKNGQVIGIGAGQQSRIHCTRLAGDKANYWWLRHHPQVLSMKFKTGVKRAEISNAIDQYVTGTIGEDEDLIKWKALFEEVPELLTEAEKKEWVEKLTEVSISSDAFFPFRDNVDRAKRSGVAYIAAPSGSAADKVVIEACDELGIILAHTNLRLFHH

SEQ ID NO: 25999 - protein, 46 aa, Artificial Sequence
  Synthetic polypeptide
YQDFGRLRRADHEGLIGCLHLVILLHCPMFVMYQLQKLFPEKYLMV

SEQ ID NO: 26000 - protein, 7 aa, Artificial Sequence
  Synthetic polypeptide
GGQITRG

SEQ ID NO: 26001 - protein, 221 aa, Artificial Sequence
  Synthetic polypeptide
GRAQCLTPVVPGLWEAEAGRSRGADRMSSFGDFVALSDVCDVPTAKIISREVSDGIIAPGYEEEALTILSKKKNGNYCVLQMDQSYKPDENEVRTLFGLHLSQKRNNGVVDKSLFSNVVTKNKDLPESALRDLIVATIAVKYTQSNSVCYAKNGQVIGIGAGQQSRIHCTRLAGDKANYWWLRHHPQVLSMKFKTGVKRAEISNAIDQYVTGTIGEEQEST

SEQ ID NO: 26002 - protein, 26 aa, Artificial Sequence
  Synthetic polypeptide
WLMPVIPALWEAECSLGALFHLTTPR

SEQ ID NO: 26003 - protein, 22 aa, Artificial Sequence
  Synthetic polypeptide
FQHFGRPSAAWELYSTLQHRGD

SEQ ID NO: 26004 - protein, 1172 aa, Artificial Sequence
  Synthetic polypeptide
PGVMAHACNSSTLGGRVQPGSSIPPYNTEVTETTIVITWTPAPRIGFKLGVRPSQGGEAPREVTSDSGSIVVSGLTPGVEYVYTIQVLRDGQERDAPIVNKVVTPLSPPTNLHLEANPDTGVLTVSWERSTTPDITGYRITTTPTNGQQGNSLEEVVHADQSSCTFDNLSPGLEYNVSVYTVKDDKESVPISDTIIPAVPPPTDLRFTNIGPDTMRVTWAPPPSIDLTNFLVRYSPVKNEEDVAELSISPSDNAVVLTNLLPGTEYVVSVSSVYEQHESTPLRGRQKTGLDSPTGIDFSDITANSFTVHWIAPRATITGYRIRHHPEHFSGRPREDRVPHSRNSITLTNLTPGTEYVVSIVALNGREESPLLIGQQSTVSDVPRDLEVVAATPTSLLISWDAPAVTVRYYRITYGETGGNSPVQEFTVPGSKSTATISGLKPGVDYTITVYAVTGRGDSPASSKPISINYRTEIDKPSQMQVTDVQDNSISVKWLPSSSPVTGYRVTTTPKNGPGPTKTKTAGPDQTEMTIEGLQPTVEYVVSVYAQNPSGESQPLVQTAVTTIPAPTDLKFTQVTPTSLSAQWTPPNVQLTGYRVRVTPKEKTGPMKEINLAPDSSSVVVSGLMVATKYEVSVYALKDTLTSRPAQGVVTTLENVSPPRRARVTDATETTITISWRTKTETITGFQVDAVPANGQTPIQRTIKPDVRSYTITGLQPGTDYKIYLYTLNDNARSSPVVIDASTAIDAPSNLRFLATTPNSLLVSWQPPRARITGYIIKYEKPGSPPREVVPRPRPGVTEATITGLEPGTEYTIYVIALKNNQKSEPLIGRKKTVQKTPFVTHPGYDTGNGIQLPGTSGQQPSVGQQMIFEEHGFRRTTPPTTATPIRHRPRPYPPNVGQEALSQTTISWAPFQDTSEYIISCHPVGTDEEPLQFRVPGTSTSATLTGLTRGATYNVIVEALKDQQRHKVREEVVTVGNSVNEGLNQPTDDSCFDPYTVSHYAVGDEWERMSESGFKLLCQCLGFGSGHFRCDSSRWCHDNGVNYKIGEKWDRQGENGQMMSCTCLGNGKGEFKCDPHEATCYDDGKTYHVGEQWQKEYLGAICSCTCFGGQRGWRCDNCRRPGGEPSPEGTTGQSYNQYSQRYHQRTNTNVNCPIECFMPLDVQADREDSRE

SEQ ID NO: 26005 - protein, 1378 aa, Artificial Sequence
  Synthetic polypeptide
PGVMAHACNSSTLGGRVQPGSSIPPYNTEVTETTIVITWTPAPRIGFKLGVRPSQGGEAPREVTSDSGSIVVSGLTPGVEYVYTIQVLRDGQERDAPIVNKVVTPLSPPTNLHLEANPDTGVLTVSWERSTTPDITGYRITTTPTNGQQGNSLEEVVHADQSSCTFDNLSPGLEYNVSVYTVKDDKESVPISDTIIPEVPQLTDLSFVDITDSSIGLRWTPLNSSTIIGYRITVVAAGEGIPIFEDFVDSSVGYYTVTGLEPGIDYDISVITLINGGESAPTTLTQQTAVPPPTDLRFTNIGPDTMRVTWAPPPSIDLTNFLVRYSPVKNEEDVAELSISPSDNAVVLTNLLPGTEYVVSVSSVYEQHESTPLRGRQKTGLDSPTGIDFSDITANSFTVHWIAPRATITGYRIRHHPEHFSGRPREDRVPHSRNSITLTNLTPGTEYVVSIVALNGREESPLLIGQQSTVSDVPRDLEVVAATPTSLLISWDAPAVTVRYYRITYGETGGNSPVQEFTVPGSKSTATISGLKPGVDYTITVYAVTGRGDSPASSKPISINYRTEIDKPSQMQVTDVQDNSISVKWLPSSSPVTGYRVTTTPKNGPGPTKTKTAGPDQTEMTIEGLQPTVEYVVSVYAQNPSGESQPLVQTAVTNIDRPKGLAFTDVDVDSIKIAWESPQGQVSRYRVTYSSPEDGIHELFPAPDGEEDTAELQGLRPGSEYTVSVVALHDDMESQPLIGTQSTAIPAPTDLKFTQVTPTSLSAQWTPPNVQLTGYRVRVTPKEKTGPMKEINLAPDSSSVVVSGLMVATKYEVSVYALKDTLTSRPAQGVVTTLENVSPPRRARVTDATETTITISWRTKTETITGFQVDAVPANGQTPIQRTIKPDVRSYTITGLQPGTDYKIYLYTLNDNARSSPVVIDASTAIDAPSNLRFLATTPNSLLVSWQPPRARITGYIIKYEKPGSPPREVVPRPRPGVTEATITGLEPGTEYTIYVIALKNNQKSEPLIGRKKTDELPQLVTLPHPNLHGPEILDVPSTVQKTPFVTHPGYDTGNGIQLPGTSGQQPSVGQQMIFEEHGFRRTTPPTTATPIRHRPRPYPPNVGQEALSQTTISWAPFQDTSEYIISCHPVGTDEEPLQFRVPGTSTSATLTGLTRGATYNVIVEALKDQQRHKVREEVVTVGNSVNEGLNQPTDDSCFDPYTVSHYAVGDEWERMSESGFKLLCQCLGFGSGHFRCDSSRWCHDNGVNYKIGEKWDRQGENGQMMSCTCLGNGKGEFKCDPHEATCYDDGKTYHVGEQWQKEYLGAICSCTCFGGQRGWRCDNCRRPGGEPSPEGTTGQSYNQYSQRYHQRTNTNVNCPIECFMPLDVQADREDSRE

SEQ ID NO: 26006 - protein, 1287 aa, Artificial Sequence
  Synthetic polypeptide
PGVMAHACNSSTLGGRVQPGSSIPPYNTEVTETTIVITWTPAPRIGFKLGVRPSQGGEAPREVTSDSGSIVVSGLTPGVEYVYTIQVLRDGQERDAPIVNKVVTPLSPPTNLHLEANPDTGVLTVSWERSTTPDITGYRITTTPTNGQQGNSLEEVVHADQSSCTFDNLSPGLEYNVSVYTVKDDKESVPISDTIIPAVPPPTDLRFTNIGPDTMRVTWAPPPSIDLTNFLVRYSPVKNEEDVAELSISPSDNAVVLTNLLPGTEYVVSVSSVYEQHESTPLRGRQKTGLDSPTGIDFSDITANSFTVHWIAPRATITGYRIRHHPEHFSGRPREDRVPHSRNSITLTNLTPGTEYVVSIVALNGREESPLLIGQQSTVSDVPRDLEVVAATPTSLLISWDAPAVTVRYYRITYGETGGNSPVQEFTVPGSKSTATISGLKPGVDYTITVYAVTGRGDSPASSKPISINYRTEIDKPSQMQVTDVQDNSISVKWLPSSSPVTGYRVTTTPKNGPGPTKTKTAGPDQTEMTIEGLQPTVEYVVSVYAQNPSGESQPLVQTAVTNIDRPKGLAFTDVDVDSIKIAWESPQGQVSRYRVTYSSPEDGIHELFPAPDGEEDTAELQGLRPGSEYTVSVVALHDDMESQPLIGTQSTAIPAPTDLKFTQVTPTSLSAQWTPPNVQLTGYRVRVTPKEKTGPMKEINLAPDSSSVVVSGLMVATKYEVSVYALKDTLTSRPAQGVVTTLENVSPPRRARVTDATETTITISWRTKTETITGFQVDAVPANGQTPIQRTIKPDVRSYTITGLQPGTDYKIYLYTLNDNARSSPVVIDASTAIDAPSNLRFLATTPNSLLVSWQPPRARITGYIIKYEKPGSPPREVVPRPRPGVTEATITGLEPGTEYTIYVIALKNNQKSEPLIGRKKTDELPQLVTLPHPNLHGPEILDVPSTVQKTPFVTHPGYDTGNGIQLPGTSGQQPSVGQQMIFEEHGFRRTTPPTTATPIRHRPRPYPPNVGQEALSQTTISWAPFQDTSEYIISCHPVGTDEEPLQFRVPGTSTSATLTGLTRGATYNVIVEALKDQQRHKVREEVVTVGNSVNEGLNQPTDDSCFDPYTVSHYAVGDEWERMSESGFKLLCQCLGFGSGHFRCDSSRWCHDNGVNYKIGEKWDRQGENGQMMSCTCLGNGKGEFKCDPHEATCYDDGKTYHVGEQWQKEYLGAICSCTCFGGQRGWRCDNCRRPGGEPSPEGTTGQSYNQYSQRYHQRTNTNVNCPIECFMPLDVQADREDSRE

SEQ ID NO: 26007 - protein, 1108 aa, Artificial Sequence
  Synthetic polypeptide
PGVMAHACNSSTLGGRVQPGSSIPPYNTEVTETTIVITWTPAPRIGFKLGVRPSQGGEAPREVTSDSGSIVVSGLTPGVEYVYTIQVLRDGQERDAPIVNKVVTPLSPPTNLHLEANPDTGVLTVSWERSTTPDITGYRITTTPTNGQQGNSLEEVVHADQSSCTFDNLSPGLEYNVSVYTVKDDKESVPISDTIIPAVPPPTDLRFTNIGPDTMRVTWAPPPSIDLTNFLVRYSPVKNEEDVAELSISPSDNAVVLTNLLPGTEYVVSVSSVYEQHESTPLRGRQKTGLDSPTGIDFSDITANSFTVHWIAPRATITGYRIRHHPEHFSGRPREDRVPHSRNSITLTNLTPGTEYVVSIVALNGREESPLLIGQQSTVSDVPRDLEVVAATPTSLLISWDAPAVTVRYYRITYGETGGNSPVQEFTVPGSKSTATISGLKPGVDYTITVYAVTGRGDSPASSKPISINYRTEIDKPSQMQVTDVQDNSISVKWLPSSSPVTGYRVTTTPKNGPGPTKTKTAGPDQTEMTIEGLQPTVEYVVSVYAQNPSGESQPLVQTAVTTIPAPTDLKFTQVTPTSLSAQWTPPNVQLTGYRVRVTPKEKTGPMKEINLAPDSSSVVVSGLMVATKYEVSVYALKDTLTSRPAQGVVTTLENVSPPRRARVTDATETTITISWRTKTETITGFQVDAVPANGQTPIQRTIKPDVRSYTITGLQPGTDYKIYLYTLNDNARSSPVVIDASTAIDAPSNLRFLATTPNSLLVSWQPPRARITGYIIKYEKPGSPPREVVPRPRPGVTEATITGLEPGTEYTIYVIALKNNQKSEPLIGRKKTGQEALSQTTISWAPFQDTSEYIISCHPVGTDEEPLQFRVPGTSTSATLTGLTRGATYNVIVEALKDQQRHKVREEVVTVGNSVNEGLNQPTDDSCFDPYTVSHYAVGDEWERMSESGFKLLCQCLGFGSGHFRCDSSRWCHDNGVNYKIGEKWDRQGENGQMMSCTCLGNGKGEFKCDPHEATCYDDGKTYHVGEQWQKEYLGAICSCTCFGGQRGWRCDNCRRPGGEPSPEGTTGQSYNQYSQRYHQRTNTNVNCPIECFMPLDVQADREDSRE

SEQ ID NO: 26008 - protein, 1409 aa, Artificial Sequence
  Synthetic polypeptide
PGVMAHACNSSTLGGRVQPGSSIPPYNTEVTETTIVITWTPAPRIGFKLGVRPSQGGEAPREVTSDSGSIVVSGLTPGVEYVYTIQVLRDGQERDAPIVNKVVTPLSPPTNLHLEANPDTGVLTVSWERSTTPDITGYRITTTPTNGQQGNSLEEVVHADQSSCTFDNLSPGLEYNVSVYTVKDDKESVPISDTIIPEVPQLTDLSFVDITDSSIGLRWTPLNSSTIIGYRITVVAAGEGIPIFEDFVDSSVGYYTVTGLEPGIDYDISVITLINGGESAPTTLTQQTAVPPPTDLRFTNIGPDTMRVTWAPPPSIDLTNFLVRYSPVKNEEDVAELSISPSDNAVVLTNLLPGTEYVVSVSSVYEQHESTPLRGRQKTGLDSPTGIDFSDITANSFTVHWIAPRATITGYRIRHHPEHFSGRPREDRVPHSRNSITLTNLTPGTEYVVSIVALNGREESPLLIGQQSTVSDVPRDLEVVAATPTSLLISWDAPAVTVRYYRITYGETGGNSPVQEFTVPGSKSTATISGLKPGVDYTITVYAVTGRGDSPASSKPISINYRTEIDKPSQMQVTDVQDNSISVKWLPSSSPVTGYRVTTTPKNGPGPTKTKTAGPDQTEMTIEGLQPTVEYVVSVYAQNPSGESQPLVQTAVTNIDRPKGLAFTDVDVDSIKIAWESPQGQVSRYRVTYSSPEDGIHELFPAPDGEEDTAELQGLRPGSEYTVSVVALHDDMESQPLIGTQSTAIPAPTDLKFTQVTPTSLSAQWTPPNVQLTGYRVRVTPKEKTGPMKEINLAPDSSSVVVSGLMVATKYEVSVYALKDTLTSRPAQGVVTTLENVSPPRRARVTDATETTITISWRTKTETITGFQVDAVPANGQTPIQRTIKPDVRSYTITGLQPGTDYKIYLYTLNDNARSSPVVIDASTAIDAPSNLRFLATTPNSLLVSWQPPRARITGYIIKYEKPGSPPREVVPRPRPGVTEATITGLEPGTEYTIYVIALKNNQKSEPLIGRKKTDELPQLVTLPHPNLHGPEILDVPSTVQKTPFVTHPGYDTGNGIQLPGTSGQQPSVGQQMIFEEHGFRRTTPPTTATPIRHRPRPYPPNVGEEIQIGHIPREDVDYHLYPHGPGLNPNASTGQEALSQTTISWAPFQDTSEYIISCHPVGTDEEPLQFRVPGTSTSATLTGLTRGATYNVIVEALKDQQRHKVREEVVTVGNSVNEGLNQPTDDSCFDPYTVSHYAVGDEWERMSESGFKLLCQCLGFGSGHFRCDSSRWCHDNGVNYKIGEKWDRQGENGQMMSCTCLGNGKGEFKCDPHEATCYDDGKTYHVGEQWQKEYLGAICSCTCFGGQRGWRCDNCRRPGGEPSPEGTTGQSYNQYSQRYHQRTNTNVNCPIECFMPLDVQADREDSRE

SEQ ID NO: 26009 - protein, 1116 aa, Artificial Sequence
  Synthetic polypeptide
PGVMAHACNSSTLGGRVQPGSSIPPYNTEVTETTIVITWTPAPRIGFKLGVRPSQGGEAPREVTSDSGSIVVSGLTPGVEYVYTIQVLRDGQERDAPIVNKVVTPLSPPTNLHLEANPDTGVLTVSWERSTTPDITGYRITTTPTNGQQGNSLEEVVHADQSSCTFDNLSPGLEYNVSVYTVKDDKESVPISDTIIPAVPPPTDLRFTNIGPDTMRVTWAPPPSIDLTNFLVRYSPVKNEEDVAELSISPSDNAVVLTNLLPGTEYVVSVSSVYEQHESTPLRGRQKTGLDSPTGIDFSDITANSFTVHWIAPRATITGYRIRHHPEHFSGRPREDRVPHSRNSITLTNLTPGTEYVVSIVALNGREESPLLIGQQSTVSDVPRDLEVVAATPTSLLISWDAPAVTVRYYRITYGETGGNSPVQEFTVPGSKSTATISGLKPGVDYTITVYAVTGRGDSPASSKPISINYRTEIDKPSQMQVTDVQDNSISVKWLPSSSPVTGYRVTTTPKNGPGPTKTKTAGPDQTEMTIEGLQPTVEYVVSVYAQNPSGESQPLVQTAVTNIDRPKGLAFTDVDVDSIKIAWESPQGQVSRYRVTYSSPEDGIHELFPAPDGEEDTAELQGLRPGSEYTVSVVALHDDMESQPLIGTQSTAIPAPTDLKFTQVTPTSLSAQWTPPNVQLTGYRVRVTPKEKTGPMKEINLAPDSSSVVVSGLMVATKYEVSVYALKDTLTSRPAQGVVTTLENVSPPRRARVTDATETTITISWRTKTETITGFQVDAVPANGQTPIQRTIKPDVRSYTITGLQPGTDYKIYLYTLNDNARSSPVVIDASTAIDAPSNLRFLATTPNSLLVSWQPPRARITGYIIKYEKPGSPPREVVPRPRPGVTEATITGLEPGTEYTIYVIALKNNQKSEPLIGRKKTVNEGLNQPTDDSCFDPYTVSHYAVGDEWERMSESGFKLLCQCLGFGSGHFRCDSSRWCHDNGVNYKIGEKWDRQGENGQMMSCTCLGNGKGEFKCDPHEATCYDDGKTYHVGEQWQKEYLGAICSCTCFGGQRGWRCDNCRRPGGEPSPEGTTGQSYNQYSQRYHQRTNTNVNCPIECFMPLDVQADREDSRE

SEQ ID NO: 26010 - protein, 1143 aa, Artificial Sequence
  Synthetic polypeptide
PGVMAHACNSSTLGGRVQPGSSIPPYNTEVTETTIVITWTPAPRIGFKLGVRPSQGGEAPREVTSDSGSIVVSGLTPGVEYVYTIQVLRDGQERDAPIVNKVVTPLSPPTNLHLEANPDTGVLTVSWERSTTPDITGYRITTTPTNGQQGNSLEEVVHADQSSCTFDNLSPGLEYNVSVYTVKDDKESVPISDTIIPAVPPPTDLRFTNIGPDTMRVTWAPPPSIDLTNFLVRYSPVKNEEDVAELSISPSDNAVVLTNLLPGTEYVVSVSSVYEQHESTPLRGRQKTGLDSPTGIDFSDITANSFTVHWIAPRATITGYRIRHHPEHFSGRPREDRVPHSRNSITLTNLTPGTEYVVSIVALNGREESPLLIGQQSTVSDVPRDLEVVAATPTSLLISWDAPAVTVRYYRITYGETGGNSPVQEFTVPGSKSTATISGLKPGVDYTITVYAVTGRGDSPASSKPISINYRTEIDKPSQMQVTDVQDNSISVKWLPSSSPVTGYRVTTTPKNGPGPTKTKTAGPDQTEMTIEGLQPTVEYVVSVYAQNPSGESQPLVQTAVTNIDRPKGLAFTDVDVDSIKIAWESPQGQVSRYRVTYSSPEDGIHELFPAPDGEEDTAELQGLRPGSEYTVSVVALHDDMESQPLIGTQSTAIPAPTDLKFTQVTPTSLSAQWTPPNVQLTGYRVRVTPKEKTGPMKEINLAPDSSSVVVSGLMVATKYEVSVYALKDTLTSRPAQGVVTTLENVSPPRRARVTDATETTITISWRTKTETITGFQVDAVPANGQTPIQRTIKPDVRSYTITGLQPGTDYKIYLYTLNDNARSSPVVIDASTAIDAPSNLRFLATTPNSLLVSWQPPRARITGYIIKYEKPGSPPREVVPRPRPGVTEATITGLEPGTEYTIYVIALKNNQKSEPLIGRKKTGQEALSQTTISWAPFQDTSEYIISCHPVGTDEEPLQFRVPGTSTSATLTGLTRGATYNVIVEALKDQQRHKVREEVVTVGNSGWCHDNGVNYKIGEKWDRQGENGQMMSCTCLGNGKGEFKCDPHEATCYDDGKTYHVGEQWQKEYLGAICSCTCFGGQRGWRCDNCRRPGGEPSPEGTTGQSYNQYSQRYHQRTNTNVNCPIECFMPLDVQADREDSRE

SEQ ID NO: 26011 - protein, 963 aa, Artificial Sequence
  Synthetic polypeptide
PGVMAHACNSSTLGGRVQPGSSIPPYNTEVTETTIVITWTPAPRIGFKLGVRPSQGGEAPREVTSDSGSIVVSGLTPGVEYVYTIQVLRDGQERDAPIVNKVVTPLSPPTNLHLEANPDTGVLTVSWERSTTPDITGYRITTTPTNGQQGNSLEEVVHADQSSCTFDNLSPGLEYNVSVYTVKDDKESVPISDTIIPAVPPPTDLRFTNIGPDTMRVTWAPPPSIDLTNFLVRYSPVKNEEDVAELSISPSDNAVVLTNLLPGTEYVVSVSSVYEQHESTPLRGRQKTGLDSPTGIDFSDITANSFTVHWIAPRATITGYRIRHHPEHFSGRPREDRVPHSRNSITLTNLTPGTEYVVSIVALNGREESPLLIGQQSTVSDVPRDLEVVAATPTSLLISWDAPAVTVRYYRITYGETGGNSPVQEFTVPGSKSTATISGLKPGVDYTITVYAVTGRGDSPASSKPISINYRTEIDKPSQMQVTDVQDNSISVKWLPSSSPVTGYRVTTTPKNGPGPTKTKTAGPDQTEMTIEGLQPTVEYVVSVYAQNPSGESQPLVQTAVTNIDRPKGLAFTDVDVDSIKIAWESPQGQVSRYRVTYSSPEDGIHELFPAPDGEEDTAELQGLRPGSEYTVSVVALHDDMESQPLIGTQSTAIPAPTDLKFTQVTPTSLSAQWTPPNVQLTGYRVRVTPKEKTGPMKEINLAPDSSSVVVSGLMVATKYEVSVYALKDTLTSRPAQGVVTTLENVSPPRRARVTDATETTITISWRTKTETITGFQVDAVPANGQTPIQRTIKPDVRSYTITGLQPGTDYKIYLYTLNDNARSSPVVIDASTAIDAPSNLRFLATTPNSLLVSWQPPRARITGYIIKYEKPGSPPREVVPRPRPGVTEATITGLEPGTEYTIYVIALKNNQKSEPLIGRKKTGQEALSQTTISWAPFQDTSEYIISCHPVGTDEEPLQSTKA

SEQ ID NO: 26012 - protein, 1318 aa, Artificial Sequence
  Synthetic polypeptide
PGVMAHACNSSTLGGRVQPGSSIPPYNTEVTETTIVITWTPAPRIGFKLGVRPSQGGEAPREVTSDSGSIVVSGLTPGVEYVYTIQVLRDGQERDAPIVNKVVTPLSPPTNLHLEANPDTGVLTVSWERSTTPDITGYRITTTPTNGQQGNSLEEVVHADQSSCTFDNLSPGLEYNVSVYTVKDDKESVPISDTIIPAVPPPTDLRFTNIGPDTMRVTWAPPPSIDLTNFLVRYSPVKNEEDVAELSISPSDNAVVLTNLLPGTEYVVSVSSVYEQHESTPLRGRQKTGLDSPTGIDFSDITANSFTVHWIAPRATITGYRIRHHPEHFSGRPREDRVPHSRNSITLTNLTPGTEYVVSIVALNGREESPLLIGQQSTVSDVPRDLEVVAATPTSLLISWDAPAVTVRYYRITYGETGGNSPVQEFTVPGSKSTATISGLKPGVDYTITVYAVTGRGDSPASSKPISINYRTEIDKPSQMQVTDVQDNSISVKWLPSSSPVTGYRVTTTPKNGPGPTKTKTAGPDQTEMTIEGLQPTVEYVVSVYAQNPSGESQPLVQTAVTNIDRPKGLAFTDVDVDSIKIAWESPQGQVSRYRVTYSSPEDGIHELFPAPDGEEDTAELQGLRPGSEYTVSVVALHDDMESQPLIGTQSTAIPAPTDLKFTQVTPTSLSAQWTPPNVQLTGYRVRVTPKEKTGPMKEINLAPDSSSVVVSGLMVATKYEVSVYALKDTLTSRPAQGVVTTLENVSPPRRARVTDATETTITISWRTKTETITGFQVDAVPANGQTPIQRTIKPDVRSYTITGLQPGTDYKIYLYTLNDNARSSPVVIDASTAIDAPSNLRFLATTPNSLLVSWQPPRARITGYIIKYEKPGSPPREVVPRPRPGVTEATITGLEPGTEYTIYVIALKNNQKSEPLIGRKKTDELPQLVTLPHPNLHGPEILDVPSTVQKTPFVTHPGYDTGNGIQLPGTSGQQPSVGQQMIFEEHGFRRTTPPTTATPIRHRPRPYPPNVGEEIQIGHIPREDVDYHLYPHGPGLNPNASTGQEALSQTTISWAPFQDTSEYIISCHPVGTDEEPLQFRVPGTSTSATLTGLTRGATYNVIVEALKDQQRHKVREEVVTVGNSVNEGLNQPTDDSCFDPYTVSHYAVGDEWERMSESGFKLLCQCLGFGSGHFRCDSSRWCHDNGVNYKIGEKWDRQGENGQMMSCTCLGNGKGEFKCDPHEATCYDDGKTYHVGEQWQKEYLGAICSCTCFGGQRGWRCDNCRRPGGEPSPEGTTGQSYNQYSQRYHQRTNTNVNCPIECFMPLDVQADREDSRE

SEQ ID NO: 26013 - protein, 1262 aa, Artificial Sequence
  Synthetic polypeptide
PGVMAHACNSSTLGGRVQPGSSIPPYNTEVTETTIVITWTPAPRIGFKLGVRPSQGGEAPREVTSDSGSIVVSGLTPGVEYVYTIQVLRDGQERDAPIVNKVVTPLSPPTNLHLEANPDTGVLTVSWERSTTPDITGYRITTTPTNGQQGNSLEEVVHADQSSCTFDNLSPGLEYNVSVYTVKDDKESVPISDTIIPAVPPPTDLRFTNIGPDTMRVTWAPPPSIDLTNFLVRYSPVKNEEDVAELSISPSDNAVVLTNLLPGTEYVVSVSSVYEQHESTPLRGRQKTGLDSPTGIDFSDITANSFTVHWIAPRATITGYRIRHHPEHFSGRPREDRVPHSRNSITLTNLTPGTEYVVSIVALNGREESPLLIGQQSTVSDVPRDLEVVAATPTSLLISWDAPAVTVRYYRITYGETGGNSPVQEFTVPGSKSTATISGLKPGVDYTITVYAVTGRGDSPASSKPISINYRTEIDKPSQMQVTDVQDNSISVKWLPSSSPVTGYRVTTTPKNGPGPTKTKTAGPDQTEMTIEGLQPTVEYVVSVYAQNPSGESQPLVQTAVTNIDRPKGLAFTDVDVDSIKIAWESPQGQVSRYRVTYSSPEDGIHELFPAPDGEEDTAELQGLRPGSEYTVSVVALHDDMESQPLIGTQSTAIPAPTDLKFTQVTPTSLSAQWTPPNVQLTGYRVRVTPKEKTGPMKEINLAPDSSSVVVSGLMVATKYEVSVYALKDTLTSRPAQGVVTTLENVSPPRRARVTDATETTITISWRTKTETITGFQVDAVPANGQTPIQRTIKPDVRSYTITGLQPGTDYKIYLYTLNDNARSSPVVIDASTAIDAPSNLRFLATTPNSLLVSWQPPRARITGYIIKYEKPGSPPREVVPRPRPGVTEATITGLEPGTEYTIYVIALKNNQKSEPLIGRKKTVQKTPFVTHPGYDTGNGIQLPGTSGQQPSVGQQMIFEEHGFRRTTPPTTATPIRHRPRPYPPNVGQEALSQTTISWAPFQDTSEYIISCHPVGTDEEPLQFRVPGTSTSATLTGLTRGATYNVIVEALKDQQRHKVREEVVTVGNSVNEGLNQPTDDSCFDPYTVSHYAVGDEWERMSESGFKLLCQCLGFGSGHFRCDSSRWCHDNGVNYKIGEKWDRQGENGQMMSCTCLGNGKGEFKCDPHEATCYDDGKTYHVGEQWQKEYLGAICSCTCFGGQRGWRCDNCRRPGGEPSPEGTTGQSYNQYSQRYHQRTNTNVNCPIECFMPLDVQADREDSRE

SEQ ID NO: 26014 - protein, 1197 aa, Artificial Sequence
  Synthetic polypeptide
PGVMAHACNSSTLGGRVQPGSSIPPYNTEVTETTIVITWTPAPRIGFKLGVRPSQGGEAPREVTSDSGSIVVSGLTPGVEYVYTIQVLRDGQERDAPIVNKVVTPLSPPTNLHLEANPDTGVLTVSWERSTTPDITGYRITTTPTNGQQGNSLEEVVHADQSSCTFDNLSPGLEYNVSVYTVKDDKESVPISDTIIPAVPPPTDLRFTNIGPDTMRVTWAPPPSIDLTNFLVRYSPVKNEEDVAELSISPSDNAVVLTNLLPGTEYVVSVSSVYEQHESTPLRGRQKTGLDSPTGIDFSDITANSFTVHWIAPRATITGYRIRHHPEHFSGRPREDRVPHSRNSITLTNLTPGTEYVVSIVALNGREESPLLIGQQSTVSDVPRDLEVVAATPTSLLISWDAPAVTVRYYRITYGETGGNSPVQEFTVPGSKSTATISGLKPGVDYTITVYAVTGRGDSPASSKPISINYRTEIDKPSQMQVTDVQDNSISVKWLPSSSPVTGYRVTTTPKNGPGPTKTKTAGPDQTEMTIEGLQPTVEYVVSVYAQNPSGESQPLVQTAVTTIPAPTDLKFTQVTPTSLSAQWTPPNVQLTGYRVRVTPKEKTGPMKEINLAPDSSSVVVSGLMVATKYEVSVYALKDTLTSRPAQGVVTTLENVSPPRRARVTDATETTITISWRTKTETITGFQVDAVPANGQTPIQRTIKPDVRSYTITGLQPGTDYKIYLYTLNDNARSSPVVIDASTAIDAPSNLRFLATTPNSLLVSWQPPRARITGYIIKYEKPGSPPREVVPRPRPGVTEATITGLEPGTEYTIYVIALKNNQKSEPLIGRKKTDELPQLVTLPHPNLHGPEILDVPSTVQKTPFVTHPGYDTGNGIQLPGTSGQQPSVGQQMIFEEHGFRRTTPPTTATPIRHRPRPYPPNVGQEALSQTTISWAPFQDTSEYIISCHPVGTDEEPLQFRVPGTSTSATLTGLTRGATYNVIVEALKDQQRHKVREEVVTVGNSVNEGLNQPTDDSCFDPYTVSHYAVGDEWERMSESGFKLLCQCLGFGSGHFRCDSSRWCHDNGVNYKIGEKWDRQGENGQMMSCTCLGNGKGEFKCDPHEATCYDDGKTYHVGEQWQKEYLGAICSCTCFGGQRGWRCDNCRRPGGEPSPEGTTGQSYNQYSQRYHQRTNTNVNCPIECFMPLDVQADREDSRE

SEQ ID NO: 26015 - protein, 1199 aa, Artificial Sequence
  Synthetic polypeptide
PGVMAHACNSSTLGGRVQPGSSIPPYNTEVTETTIVITWTPAPRIGFKLGVRPSQGGEAPREVTSDSGSIVVSGLTPGVEYVYTIQVLRDGQERDAPIVNKVVTPLSPPTNLHLEANPDTGVLTVSWERSTTPDITGYRITTTPTNGQQGNSLEEVVHADQSSCTFDNLSPGLEYNVSVYTVKDDKESVPISDTIIPEVPQLTDLSFVDITDSSIGLRWTPLNSSTIIGYRITVVAAGEGIPIFEDFVDSSVGYYTVTGLEPGIDYDISVITLINGGESAPTTLTQQTAVPPPTDLRFTNIGPDTMRVTWAPPPSIDLTNFLVRYSPVKNEEDVAELSISPSDNAVVLTNLLPGTEYVVSVSSVYEQHESTPLRGRQKTGLDSPTGIDFSDITANSFTVHWIAPRATITGYRIRHHPEHFSGRPREDRVPHSRNSITLTNLTPGTEYVVSIVALNGREESPLLIGQQSTVSDVPRDLEVVAATPTSLLISWDAPAVTVRYYRITYGETGGNSPVQEFTVPGSKSTATISGLKPGVDYTITVYAVTGRGDSPASSKPISINYRTEIDKPSQMQVTDVQDNSISVKWLPSSSPVTGYRVTTTPKNGPGPTKTKTAGPDQTEMTIEGLQPTVEYVVSVYAQNPSGESQPLVQTAVTTIPAPTDLKFTQVTPTSLSAQWTPPNVQLTGYRVRVTPKEKTGPMKEINLAPDSSSVVVSGLMVATKYEVSVYALKDTLTSRPAQGVVTTLENVSPPRRARVTDATETTITISWRTKTETITGFQVDAVPANGQTPIQRTIKPDVRSYTITGLQPGTDYKIYLYTLNDNARSSPVVIDASTAIDAPSNLRFLATTPNSLLVSWQPPRARITGYIIKYEKPGSPPREVVPRPRPGVTEATITGLEPGTEYTIYVIALKNNQKSEPLIGRKKTGQEALSQTTISWAPFQDTSEYIISCHPVGTDEEPLQFRVPGTSTSATLTGLTRGATYNVIVEALKDQQRHKVREEVVTVGNSVNEGLNQPTDDSCFDPYTVSHYAVGDEWERMSESGFKLLCQCLGFGSGHFRCDSSRWCHDNGVNYKIGEKWDRQGENGQMMSCTCLGNGKGEFKCDPHEATCYDDGKTYHVGEQWQKEYLGAICSCTCFGGQRGWRCDNCRRPGGEPSPEGTTGQSYNQYSQRYHQRTNTNVNCPIECFMPLDVQADREDSRE

SEQ ID NO: 26016 - protein, 1228 aa, Artificial Sequence
  Synthetic polypeptide
PGVMAHACNSSTLGGRVQPGSSIPPYNTEVTETTIVITWTPAPRIGFKLGVRPSQGGEAPREVTSDSGSIVVSGLTPGVEYVYTIQVLRDGQERDAPIVNKVVTPLSPPTNLHLEANPDTGVLTVSWERSTTPDITGYRITTTPTNGQQGNSLEEVVHADQSSCTFDNLSPGLEYNVSVYTVKDDKESVPISDTIIPAVPPPTDLRFTNIGPDTMRVTWAPPPSIDLTNFLVRYSPVKNEEDVAELSISPSDNAVVLTNLLPGTEYVVSVSSVYEQHESTPLRGRQKTGLDSPTGIDFSDITANSFTVHWIAPRATITGYRIRHHPEHFSGRPREDRVPHSRNSITLTNLTPGTEYVVSIVALNGREESPLLIGQQSTVSDVPRDLEVVAATPTSLLISWDAPAVTVRYYRITYGETGGNSPVQEFTVPGSKSTATISGLKPGVDYTITVYAVTGRGDSPASSKPISINYRTEIDKPSQMQVTDVQDNSISVKWLPSSSPVTGYRVTTTPKNGPGPTKTKTAGPDQTEMTIEGLQPTVEYVVSVYAQNPSGESQPLVQTAVTTIPAPTDLKFTQVTPTSLSAQWTPPNVQLTGYRVRVTPKEKTGPMKEINLAPDSSSVVVSGLMVATKYEVSVYALKDTLTSRPAQGVVTTLENVSPPRRARVTDATETTITISWRTKTETITGFQVDAVPANGQTPIQRTIKPDVRSYTITGLQPGTDYKIYLYTLNDNARSSPVVIDASTAIDAPSNLRFLATTPNSLLVSWQPPRARITGYIIKYEKPGSPPREVVPRPRPGVTEATITGLEPGTEYTIYVIALKNNQKSEPLIGRKKTDELPQLVTLPHPNLHGPEILDVPSTVQKTPFVTHPGYDTGNGIQLPGTSGQQPSVGQQMIFEEHGFRRTTPPTTATPIRHRPRPYPPNVGEEIQIGHIPREDVDYHLYPHGPGLNPNASTGQEALSQTTISWAPFQDTSEYIISCHPVGTDEEPLQFRVPGTSTSATLTGLTRGATYNVIVEALKDQQRHKVREEVVTVGNSVNEGLNQPTDDSCFDPYTVSHYAVGDEWERMSESGFKLLCQCLGFGSGHFRCDSSRWCHDNGVNYKIGEKWDRQGENGQMMSCTCLGNGKGEFKCDPHEATCYDDGKTYHVGEQWQKEYLGAICSCTCFGGQRGWRCDNCRRPGGEPSPEGTTGQSYNQYSQRYHQRTNTNVNCPIECFMPLDVQADREDSRE

SEQ ID NO: 26017 - protein, 98 aa, Artificial Sequence
  Synthetic polypeptide
GQAQWLMPVIPALWEAEAGGSRVQKIETILANTVSSVVCFLLSPAASFITGQSVDVDGGRSLYTHSYEVPDHDNWPKGAGDLSVVKKMKETFKEKAKL

SEQ ID NO: 26018 - protein, 78 aa, Artificial Sequence
  Synthetic polypeptide
SQHFGRPRQADHEFRRSRPSWLTRSPLWSASYCLLQLPSSLDSRWMWMGAGVSILTRMRYQIMTTGPREQGTFLLSKR

SEQ ID NO: 26019 - protein, 35 aa, Artificial Sequence
  Synthetic polypeptide
HGLLCGLLPTVSCSFLHHWTVGGCGWGPESLYSLV

SEQ ID NO: 26020 - protein, 187 aa, Artificial Sequence
  Synthetic polypeptide
IQSTHRTTRNNGDDHSEGGLVENHVDSTMNMLGGGGSAGRKPLKSGMKELAVFREKVTEQHRQMGKGGKHHLGLEEPKKLRPPPARTPCQQELDQVLERISTMRLPDERGPLEHLYSLHIPNCDKHGLYNLKQCKMSLNGQRGECWCVNPNTGKLIQGAPTIRGDPECHLFYNEQQEARGVHTQRMQ

SEQ ID NO: 26021 - protein, 38 aa, Artificial Sequence
  Synthetic polypeptide
NSPHENCPAESSQPTEPRETMAMTTQKEAWWRTTWTAP

SEQ ID NO: 26022 - protein, 25 aa, Artificial Sequence
  Synthetic polypeptide
LHETAHMRTAQLNPVNPQNHEKQWR

SEQ ID NO: 26023 - protein, 16 aa, Artificial Sequence
  Synthetic polypeptide
RLSEGCGSWKLFLDSL

SEQ ID NO: 26024 - protein, 23 aa, Artificial Sequence
  Synthetic polypeptide
VRAAEAGSFFWTPYNHYGLDLWL

SEQ ID NO: 26025 - protein, 54 aa, Artificial Sequence
  Synthetic polypeptide
GRVQWLMPVIPALWEAEEHLSIEDFTQAFGMTPAAFSALPRWKQQNLKKEKGLF

SEQ ID NO: 26026 - protein, 21 aa, Artificial Sequence
  Synthetic polypeptide
SQHFGRPRNTCPLKISLRPLG

SEQ ID NO: 26027 - protein, 21 aa, Artificial Sequence
  Synthetic polypeptide
PGAVAHACNPSTLGGRGTPVH

SEQ ID NO: 26028 - protein, 442 aa, Artificial Sequence
  Synthetic polypeptide
EAKVEGLLETKSSRPAWATWVLILHLKRYSFNVALSLNNKIGQQVIIPRYLTLSSHCTENTKPPFTLGWSAHMAISRPLKASQMVNSCITSPSTPSKKFTFKSKSSLALCLDSDSEDELKRSVALSQRLCEMLGNEQQQEDLEKDSKLCPIEPDKSELENSGFDRMSEEELLAAVLEISKRDASPSLSHEDDDKPTSSPDTGFAEDDIQEMPENPDTMETEKPKTITELDPASFTEITKDCDENKENKTPEGSQGEVDWLQQYDMEREREEQELQQALAQSLQEQEAWEQKEDDDLKRATELSLQEFNNSFVDALGSDEDSGNEDVFDMEYTEAEAEELKRNAETGNLPHSYRLISVVSHIGSTSSSGHYISDVYDIKKQAWFTYNDLEVSKIQEAAVQSDRDRSGYIFFYMHKEIFDELLETEKNSQSLSTEVGKTTRQAL

SEQ ID NO: 26029 - protein, 30 aa, Artificial Sequence
  Synthetic polypeptide
SQHFEKPRWKVCLRPRVQDQPGQHGSSFSI

SEQ ID NO: 26030 - protein, 20 aa, Artificial Sequence
  Synthetic polypeptide
DQEFKTSLGNMGPHSPFETI

SEQ ID NO: 26031 - protein, 420 aa, Artificial Sequence
  Synthetic polypeptide
EAKVEGLLETKSSRPAWATWVLILHLKRYSFNVALSLNNKIGQQVIIPRYLTLSSHCTENTKPPFTLGWSAHMAMKFTFKSKSSLALCLDSDSEDELKRSVALSQRLCEMLGNEQQQEDLEKDSKLCPIEPDKSELENSGFDRMSEEELLAAVLEISKRDASPSLSHEDDDKPTSSPDTGFAEDDIQEMPENPDTMETEKPKTITELDPASFTEITKDCDENKENKTPEGSQGEVDWLQQYDMEREREEQELQQALAQSLQEQEAWEQKEDDDLKRATELSLQEFNNSFVDALGSDEDSGNEDVFDMEYTEAEAEELKRNAETGNLPHSYRLISVVSHIGSTSSSGHYISDVYDIKKQAWFTYNDLEVSKIQEAAVQSDRDRSGYIFFYMHKEIFDELLETEKNSQSLSTEVGKTTRQAL

SEQ ID NO: 26032 - protein, 8 aa, Artificial Sequence
  Synthetic polypeptide
LMRMLMNF

SEQ ID NO: 26033 - protein, 563 aa, Artificial Sequence
  Synthetic polypeptide
GQEFQTSLTDEDAHEFLSQCLDQLKEDMEKLNKTWKTEPVSGEENSPDISATRAYTCPVITNLEFEVQHSIICKACGEIIPKREQFNDLSIDLPRRKKPLPPRSIQDSLDLFFRAEELEYSCEKCGGKCALVRHKFNRLPRVLILHLKRYSFNVALSLNNKIGQQVIIPRYLTLSSHCTENTKPPFTLGWSAHMAISRPLKASQMVNSCITSPSTPSKKFTFKSKSSLALCLDSDSEDELKRSVALSQRLCEMLGNEQQQEDLEKDSKLCPIEPDKSELENSGFDRMSEEELLAAVLEISKRDASPSLSHEDDDKPTSSPDTGFAEDDIQEMPENPDTMETEKPKTITELDPASFTEITKDCDENKENKTPEGSQGEVDWLQQYDMEREREEQELQQALAQSLQEQEAWEQKEDDDLKRATELSLQEFNNSFVDALGSDEDSGNEDVFDMEYTEAEAEELKRNAETGNLPHSYRLISVVSHIGSTSSSGHYISDVYDIKKQAWFTYNDLEVSKIQEAAVQSDRDRSGYIFFYMHKEIFDELLETEKNSQSLSTEVGKTTRQAL

SEQ ID NO: 26034 - protein, 541 aa, Artificial Sequence
  Synthetic polypeptide
GQEFQTSLTDEDAHEFLSQCLDQLKEDMEKLNKTWKTEPVSGEENSPDISATRAYTCPVITNLEFEVQHSIICKACGEIIPKREQFNDLSIDLPRRKKPLPPRSIQDSLDLFFRAEELEYSCEKCGGKCALVRHKFNRLPRVLILHLKRYSFNVALSLNNKIGQQVIIPRYLTLSSHCTENTKPPFTLGWSAHMAMKFTFKSKSSLALCLDSDSEDELKRSVALSQRLCEMLGNEQQQEDLEKDSKLCPIEPDKSELENSGFDRMSEEELLAAVLEISKRDASPSLSHEDDDKPTSSPDTGFAEDDIQEMPENPDTMETEKPKTITELDPASFTEITKDCDENKENKTPEGSQGEVDWLQQYDMEREREEQELQQALAQSLQEQEAWEQKEDDDLKRATELSLQEFNNSFVDALGSDEDSGNEDVFDMEYTEAEAEELKRNAETGNLPHSYRLISVVSHIGSTSSSGHYISDVYDIKKQAWFTYNDLEVSKIQEAAVQSDRDRSGYIFFYMHKEIFDELLETEKNSQSLSTEVGKTTRQAL

SEQ ID NO: 26035 - protein, 17 aa, Artificial Sequence
  Synthetic polypeptide
VRCCVECPGHRANCGMC

SEQ ID NO: 26036 - protein, 27 aa, Artificial Sequence
  Synthetic polypeptide
DAAWNALGIEQTAACAEYGWLPQLPLL

SEQ ID NO: 26037 - protein, 193 aa, Artificial Sequence
  Synthetic polypeptide
GQYHMRIHKEERKYLCPECGYKCKWVNQLKYHMTKHTGLKPYQCPECEYCTNRADALRVHQETRHREARAFMCEQCGKAFKTRFLLRTHLRKHSEAKPYVCNVCHRAFRWAAGLRHHALTHTDRHPFFCRLCNYKAKQKFQVVKHVRRHHPDQADPNQGVGKDPTTPTVHLHDVQLEDPSPPAPAAPHTGPEG

SEQ ID NO: 26038 - protein, 28 aa, Artificial Sequence
  Synthetic polypeptide
ASTTCGSTRRNGSTCALSVATSASGSTS

SEQ ID NO: 26039 - protein, 16 aa, Artificial Sequence
  Synthetic polypeptide
PVPHADPQGGTEVPVP

SEQ ID NO: 26040 - protein, 54 aa, Artificial Sequence
  Synthetic polypeptide
RYQFHRVVKRRVTSGDTCMILSAEPGPHTTCGSTRRNGSTCALSVATSASGSTS

SEQ ID NO: 26041 - protein, 21 aa, Artificial Sequence
  Synthetic polypeptide
VQSLAHIPHADPQGGTEVPVP

SEQ ID NO: 26042 - protein, 203 aa, Artificial Sequence
  Synthetic polypeptide
HMYDTECRAWPTYHMRIHKEERKYLCPECGYKCKWVNQLKYHMTKHTGLKPYQCPECEYCTNRADALRVHQETRHREARAFMCEQCGKAFKTRFLLRTHLRKHSEAKPYVCNVCHRAFRWAAGLRHHALTHTDRHPFFCRLCNYKAKQKFQVVKHVRRHHPDQADPNQGVGKDPTTPTVHLHDVQLEDPSPPAPAAPHTGPEG

SEQ ID NO: 26043 - protein, 227 aa, Artificial Sequence
  Synthetic polypeptide
VARSPKVGPSGAGKSTILRLLFRFYDISSGCIRIDGQDISQVTQASLRSHIGVVPQDTVLFNDTIADNIRYGRVTAGNDEVEAAAQAAGIHDAIMAFPEGYRTQVGERGLKLSGGEKQRVAIARTILKAPGIILLDEATSALDTSNERAIQASLAKVCANRTTIVVAHRLSTVVNADQILVIKDGCIVERGRHEALLSRGGVYADMWQLQQGQEETSEDTKPQTMER

SEQ ID NO: 26044 - protein, 41 aa, Artificial Sequence
  Synthetic polypeptide
SQHFGRLRWPDHLRWAHLGQGRAQFCACCFASTTSALAASE

SEQ ID NO: 26045 - protein, 78 aa, Artificial Sequence
  Synthetic polypeptide
QMYGLVPSINCSKLKFLTSKLAKLDITRLSPRMPPVPSAHPTATLSGKEPPRAPVTEAFSELTTMLPLCPAPVHHLLP

SEQ ID NO: 26046 - protein, 40 aa, Artificial Sequence
  Synthetic polypeptide
NSSLLSLQNWILQGSLHGCHLCQVPTPQLLCLGRSHLVHL

SEQ ID NO: 26047 - protein, 30 aa, Artificial Sequence
  Synthetic polypeptide
TAGWKGLGSLNEHVKQSHPPSWTIRLQTIS

SEQ ID NO: 26048 - protein, 585 aa, Artificial Sequence
  Synthetic polypeptide
SRATHHPGPFASRLLADEEFDELCFEFGLELDEITSEKEIISKEQGNVKAAGASDVVLYKIDVPANRYDLLCLEGLVRGLQVFKERIKAPVYKRVMPDGKIQKLIITEETAKIRPFAVAAVLRNIKFTKDRYDSFIELQEKLHQNICRKRALVAIGTHDLDTLSGPFTYTAKRPSDIKFKPLNKTKEYTACELMNIYKTDNHLKHYLHIIENKPLYPVIYDSNGVVLSMPPIINGDHSRITVNTRNIFIECTGTDFTKAKIVLDIIVTMFSEYCENQFTVEAAEVVFPNGKSHTFPELAYRKEMVRADLINKKVGIRETPENLAKLLTRMYLKSEVIGDGNQIEIEIPPTRADIIHACDIVEDAAIAYGYNNIQMTLPKTYTIANQFPLNKLTELLRHDMAAAGFTEALTFALCSQEDIADKLGVDISATKAVHISNPKTAEFQVARTTLLPGLLKTIAANRKMPLPLKLFEISDIVIKDSNTDVGAKNYRHLCAVYYNKNPGFEIIHGLLDRIMQLLDVPPGEDKGGYVIKASEGPAFFPGRCAEIFARGQSVGKLGVLHPDVITKFELTMPCSSLEINVGPFL

SEQ ID NO: 26049 - protein, 64 aa, Artificial Sequence
  Synthetic polypeptide
CGIYIGASQIRYISYCSSVDKGNYGYRNGTSLSLIKRGRRSPGKLFRLFSPVVTGQAVLLTGRS

SEQ ID NO: 26050 - protein, 33 aa, Artificial Sequence
  Synthetic polypeptide
VAFTLELLRLDTFHIALQSTREITATEMVHHSP

SEQ ID NO: 26051 - protein, 63 aa, Artificial Sequence
  Synthetic polypeptide
GRTLHQQNDYPSLKVQMIVNFFLAIKYFKTKNHPGMAEKRQWSILAQHLPHNGLSLLCYGLPS

SEQ ID NO: 26052 - protein, 370 aa, Artificial Sequence
  Synthetic polypeptide
SILKLRTIRVWLKRDSGQYWPSIYHTMASPCSAMAYHHDSRRIFVGQDNGAVMEFHVSEDFNKMNFIKTYPAHQNRVSAIIFSLATEWVISTGHDKCVSWMCTRSGNMLGRHFFTSWASCLQYDFDTQYAFVGDYSGQITLLKLEQNTCSVITTLKGHEGSVACLWWDPIQRLLFSGASDNSIIMWDIGGRKGRTLLLQGHHDKVQSLCYLQLTRQLVSCSSDGGIAVWNMDVSREEAPQWLESDSCQKCEQPFFWNIKQMWDTKTLGLRQHHCRKCGQAVCGKCSSKRSSYPVMGFEFQVRVCDSCYDSIKDEDRTSLATFHEGKHNISHMSMDIARGLMVTCGTDRIVKIWDMTPVVGCSLATGFSPH

SEQ ID NO: 26053 - protein, 105 aa, Artificial Sequence
  Synthetic polypeptide
GRTLHQQNDYPSLKVQMIVNFFLAIKYFKTKNHPGMAEKRQWSILAQHLPHNGLSSEPGVCDYLQLGHRVGDQYRPRQVCELDVHAEREHAREALLHVLGFVSAI

SEQ ID NO: 26054 - protein, 175 aa, Artificial Sequence
  Synthetic polypeptide
SILKLRTIRVWLKRDSGQYWPSIYHTMASHQNRVSAIIFSLATEWVISTGHDKCVSWMCTRSGNMLGRHFFTSWASCLQYDFDTQYAFVGDYSGQITLLKLEQNTCSVITTLKGHEGSVACLWWDPIQRLLFSGASDNSIIMWDIGGRKGRTLLLQGHHDKVQSLCYLQLTRQLV

SEQ ID NO: 26055 - protein, 36 aa, Artificial Sequence
  Synthetic polypeptide
PHGTNHPGMAEKRQWSILAQHLPHNGLSLLCYGLPS

SEQ ID NO: 26056 - protein, 372 aa, Artificial Sequence
  Synthetic polypeptide
GFPSHMELTIRVWLKRDSGQYWPSIYHTMASPCSAMAYHHDSRRIFVGQDNGAVMEFHVSEDFNKMNFIKTYPAHQNRVSAIIFSLATEWVISTGHDKCVSWMCTRSGNMLGRHFFTSWASCLQYDFDTQYAFVGDYSGQITLLKLEQNTCSVITTLKGHEGSVACLWWDPIQRLLFSGASDNSIIMWDIGGRKGRTLLLQGHHDKVQSLCYLQLTRQLVSCSSDGGIAVWNMDVSREEAPQWLESDSCQKCEQPFFWNIKQMWDTKTLGLRQHHCRKCGQAVCGKCSSKRSSYPVMGFEFQVRVCDSCYDSIKDEDRTSLATFHEGKHNISHMSMDIARGLMVTCGTDRIVKIWDMTPVVGCSLATGFSPH

SEQ ID NO: 26057 - protein, 78 aa, Artificial Sequence
  Synthetic polypeptide
PHGTNHPGMAEKRQWSILAQHLPHNGLSSEPGVCDYLQLGHRVGDQYRPRQVCELDVHAEREHAREALLHVLGFVSAI

SEQ ID NO: 26058 - protein, 177 aa, Artificial Sequence
  Synthetic polypeptide
GFPSHMELTIRVWLKRDSGQYWPSIYHTMASHQNRVSAIIFSLATEWVISTGHDKCVSWMCTRSGNMLGRHFFTSWASCLQYDFDTQYAFVGDYSGQITLLKLEQNTCSVITTLKGHEGSVACLWWDPIQRLLFSGASDNSIIMWDIGGRKGRTLLLQGHHDKVQSLCYLQLTRQLV

SEQ ID NO: 26059 - protein, 30 aa, Artificial Sequence
  Synthetic polypeptide
GRCFSGSVAHRFEKCCVIGNLEGRPWWKEP

SEQ ID NO: 26060 - protein, 59 aa, Artificial Sequence
  Synthetic polypeptide
ATWKVVLGGRNHELASPPLPLGLCDAAFHLLPLQSSVSRGTRLQHGDPGFQSDCEVEAS

SEQ ID NO: 26061 - protein, 414 aa, Artificial Sequence
  Synthetic polypeptide
KVLCDRQLGRSSLVEGTMNWHLPLFLLASVTLPSICSHFNPLSLEELGSNTGIQVFNQIVKSRPHDNIVISPHGIASVLGMLQLGADGRTKKQLAMVMRYGVNGVGKILKKINKAIVSKKNKDIVTVANAVFVKNASEIEVPFVTRNKDVFQCEVRNVNFEDPASACDSINAWVKNETRDMIDNLLSPDLIDGVLTRLVLVNAVYFKGLWKSRFQPENTKKRTFVAADGKSYQVPMLAQLSVFRCGSTSAPNDLWYNFIELPYHGESISMLIALPTESSTPLSAIIPHISTKTIDSWMSIMVPKRVQVILPKFTAVAQTDLKEPLKVLGITDMFDSSKANFAKITRSENLHVSHILQKAKIEVSEDGTKASAATTAILIARSSPPWFIVDRPFLFFIRHNPTGAVLFMGQINKP

SEQ ID NO: 26062 - protein, 407 aa, Artificial Sequence
  Synthetic polypeptide
STWSSLVEGTMNWHLPLFLLASVTLPSICSHFNPLSLEELGSNTGIQVFNQIVKSRPHDNIVISPHGIASVLGMLQLGADGRTKKQLAMVMRYGVNGVGKILKKINKAIVSKKNKDIVTVANAVFVKNASEIEVPFVTRNKDVFQCEVRNVNFEDPASACDSINAWVKNETRDMIDNLLSPDLIDGVLTRLVLVNAVYFKGLWKSRFQPENTKKRTFVAADGKSYQVPMLAQLSVFRCGSTSAPNDLWYNFIELPYHGESISMLIALPTESSTPLSAIIPHISTKTIDSWMSIMVPKRVQVILPKFTAVAQTDLKEPLKVLGITDMFDSSKANFAKITRSENLHVSHILQKAKIEVSEDGTKASAATTAILIARSSPPWFIVDRPFLFFIRHNPTGAVLFMGQINKP

SEQ ID NO: 26063 - protein, 32 aa, Artificial Sequence
  Synthetic polypeptide
SQHCGRLNQADHLRSGVQDQPDQHGRPWWKEP

SEQ ID NO: 26064 - protein, 66 aa, Artificial Sequence
  Synthetic polypeptide
GQEFKTSLINMVVLGGRNHELASPPLPLGLCDAAFHLLPLQSSVSRGTRLQHGDPGFQSDCEVEAS

SEQ ID NO: 26065 - protein, 61 aa, Artificial Sequence
  Synthetic polypeptide
LILAFKVVLGGRNHELASPPLPLGLCDAAFHLLPLQSSVSRGTRLQHGDPGFQSDCEVEAS

SEQ ID NO: 26066 - protein, 409 aa, Artificial Sequence
  Synthetic polypeptide
SWLSRSSLVEGTMNWHLPLFLLASVTLPSICSHFNPLSLEELGSNTGIQVFNQIVKSRPHDNIVISPHGIASVLGMLQLGADGRTKKQLAMVMRYGVNGVGKILKKINKAIVSKKNKDIVTVANAVFVKNASEIEVPFVTRNKDVFQCEVRNVNFEDPASACDSINAWVKNETRDMIDNLLSPDLIDGVLTRLVLVNAVYFKGLWKSRFQPENTKKRTFVAADGKSYQVPMLAQLSVFRCGSTSAPNDLWYNFIELPYHGESISMLIALPTESSTPLSAIIPHISTKTIDSWMSIMVPKRVQVILPKFTAVAQTDLKEPLKVLGITDMFDSSKANFAKITRSENLHVSHILQKAKIEVSEDGTKASAATTAILIARSSPPWFIVDRPFLFFIRHNPTGAVLFMGQINKP

SEQ ID NO: 26067 - protein, 92 aa, Artificial Sequence
  Synthetic polypeptide
ERHHSLLPLSDPLAKSLLPIPMTLFCWPRGFDSRERNALTRRHNNDSIDLEVKTAAHFGLLMPLSQQAKKGVTVLAGMIDPGFQGRPWWKEP

SEQ ID NO: 26068 - protein, 771 aa, Artificial Sequence
  Synthetic polypeptide
RYKKLLNCLMCTRLSSAAVVTCHFKMTMDEKYVNSIWDLLKNAIQEIQRKNNSGLSFEELYRNAYTMVLHKHGEKLYTGLREVVTEHLINKVREDVLNSLNNNFLQTLNQAWNDHQTAMVMIRDILMYMDRVYVQQNNVENVYNLGLIIFRDQVVRYGCIRDHLRQTLLDMIARERKGEVVDRGAIRNACQMLMILGLEGRSVYEEDFEAPFLEMSAEFFQMESQKFLAENSASVYIKKVEARINEEIERVMHCLDKSTEEPIVKVVERELISKHMKTIVEMENSGLVHMLKNGKTEDLGCMYKLFSRVPNGLKTMCECMSSYLREQGKALVSEEGEGKNPVDYIQGLLDLKSRFDRFLLESFNNDRLFKQTIAGDFEYFLNLNSRSPEYLSLFIDDKLKKGVKGLTEQEVETILDKAMVLFRFMQEKDVFERYYKQHLARRLLTNKSVSDDSEKNMISKLKTECGCQFTSKLEGMFRDMSISNTTMDEFRQHLQATGVSLGGVDLTVRVLTTGYWPTQSATPKCNIPPAPRHAFEIFRRFYLAKHSGRQLTLQHHMGSADLNATFYGPVKKEDGSEVGVGGAQVTGSNTRKHILQVSTFQMTILMLFNNREKYTFEEIQQETDIPERELVRALQSLACGKPTQRVLTKEPKSKEIENGHIFTVNDQFTSKLHRVKIQTVAAKQGESDPERKETRQKVDDDRKHEIEAAIVRIMKSRKKMQHNVLVAEVTQQLKARFLPSPVVIKKRIEGLIEREYLARTPEDRKVYTYVA

SEQ ID NO: 26069 - protein, 11 aa, Artificial Sequence
  Synthetic polypeptide
VLQLWLPAISR

SEQ ID NO: 26070 - protein, 16 aa, Artificial Sequence
  Synthetic polypeptide
IKFCSCGYLPFQDDHG

SEQ ID NO: 26071 - protein, 174 aa, Artificial Sequence
  Synthetic polypeptide
RYKKLLNCLMCTRLSSAAVVTCHFKMTMDEKYVNSIWDLLKNAIQEIQRKNNSGLSFEELYRNAYTMVLHKHGEKLYTGLREVVTEHLINKVREDVLNSLNNNFLQTLNQAWNDHQTAMVMIRDILMYMDRVYVQQNNVENVYNLGLIIFRDQVVRYGCIRDHLRQTLLDMIAR

SEQ ID NO: 26072 - protein, 433 aa, Artificial Sequence
  Synthetic polypeptide
LTPVIPALWETKAGGSQGMFSMGWPAFLSITPNIKEEGAMKEDSGMQDTPYNENILVEQLYMCVEFLWKSERYELIADVNKPIIAVFEKQRDFKKLSDLYYDIHRSYLKVAEVVNSEKRLFGRYYRVAFYGQGFFEEEEGKEYIYKEPKLTGLSEISQRLLKLYADKFGADNVKIIQDSNKVNPKDLDPKYAYIQVTYVTPFFEEKEIEDRKTDFEMHHNINRFVFETPFTLSGKKHGGVAEQCKRRTILTTSHLFPYVKKRIQVISQSSTELNPIEVAIDEMSKKVSELNQLCTMEEVDMIRLQLKLQGSVSVKVNAGPMAYARAFLEETNAKKYPDNQVKLLKEIFRQFADACGQALDVNERLIKEDQLEYQEELRSHYKDMLSELSTVMNEQITGRDDLSKRGVDQTCTRVISKATPALPTVSISSSAEV

SEQ ID NO: 26073 - protein, 23 aa, Artificial Sequence
  Synthetic polypeptide
SQHFGRPRQVDHKACSLWDGQLF

SEQ ID NO: 26074 - protein, 38 aa, Artificial Sequence
  Synthetic polypeptide
PGAMTHACNPSTLGDQGRWITRHVLYGMASFFEHYTKH

SEQ ID NO: 26075 - protein, 1157 aa, Artificial Sequence
  Synthetic polypeptide
EHHLRGLLGKHGASGPPGNKGAKGDMVVSRVKGHKGERGPDGPPGFPGQPGSHGRDGHAGEKGDPGPPGDHEDATPGGKGFPGPLGPPGKAGPVGPPGLGFPGPPGERGHPGVPGHPGVRGPDGLKGQKGDTISCNVTYPGRHGPPGFDGPPGPKGFPGPQGAPGLSGSDGHKGRPGTPGTAEIPGPPGFRGDMGDPGFGGEKGSSPVGPPGPPGSPGVNGQKGIPGDPAFGHLGPPGKRGLSGVPGIKGPRGDPGCPGAEGPAGIPGFLGLKGPKGREGHAGFPGVPGPPGHSCERGAPGIPGQPGLPGYPGSPGAPGGKGQPGDVGPPGPAGMKGLPGLPGRPGAHGPPGLPGIPGPFGDDGLPGPPGPKGPRGLPGFPGFPGERGKPGAEGCPGAKGEPGEKGMSGLPGDRGLRGAKGAIGPPGDEGEMAIISQKGTPGEPGPPGDDGFPGERGDKGTPGMQGRRGEPGRYGPPGFHRGEPGEKGQPGPPGPPGPPGSTGLRGFIGFPGLPGDQGEPGSPGPPGFSGIDGARGPKGNKGDPASHFGPPGPKGEPGSPGCPGHFGASGEQGLPGIQGPRGSPGRPGPPGSSGPPGCPGDHGMPGLRGQPGEMGDPGPRGLQGDPGIPGPPGIKGPSGSPGLNGLHGLKGQKGTKGASGLHDVGPPGPVGIPGLKGERGDPGSPGISPPGPRGKKGPPGPPGSSGPPGPAGATGRAPKDIPDPGPPGDQGPPGPDGPRGAPGPPGLPGSVDLLRGEPGDCGLPGPPGPPGPPGPPGYKGFPGCDGKDGQKGPVGFPGPQGPHGFPGPPGEKGLPGPPGRKGPTGLPGPRGEPGPPADVDDCPRIPGLPGAPGMRGPEGAMGLPGMRGPSGPGCKGEPGLDGRRGVDGVPGSPGPPGRKGDTGEDGYPGGPGPPGPIGDPGPKGFGPGYLGGFLLVLHSQTDQEPTCPLGMPRLWTGYSLLYLEGQEKAHNQDLGLAGSCLPVFSTLPFAYCNIHQVCHYAQRNDRSYWLASAAPLPMMPLSEEAIRPYVSRCAVCEAPAQAVAVHSQDQSIPPCPQTWRSLWIGYSFLMHTGAGDQGGGQALMSPGSCLEDFRAAPFLECQGRQGTCHFFANKYSFWLTTVKADLQFSSAPAPDTLKESQAQRQKISRCQVCVKYS

SEQ ID NO: 26076 - protein, 122 aa, Artificial Sequence
  Synthetic polypeptide
NGYKNTILEACWESMVPLDHLATKGRRVTWLYQELKGTKEKEVLMGPQDFQGSQDHMVGMDMLEKKGIQDLQGIMKMRPQVVKDFLDLWAPQAKQDLWGPQDWDFLVHQESEATQEFQATQV

SEQ ID NO: 26077 - protein, 19 aa, Artificial Sequence
  Synthetic polypeptide
RLVGKAWCLWTTWQQRGEG

SEQ ID NO: 26078 - protein, 1154 aa, Artificial Sequence
  Synthetic polypeptide
EHHLRGLLGKHGASGPPGNKGAKGDMVVSRVKGHKGERGPDGPPGFPGQPGSHGRDGHAGEKGDPGPPGDHEDATPGGKGFPGPLGPPGKAGPVGPPGLGFPGPPGERGHPGVPGHPGVRGPDGLKGQKGDTISCNVTYPGRHGPPGFDGPPGPKGFPGPQGAPGLSGSDGHKGRPGTPGTAEIPGPPGFRGDMGDPGFGGEKGSSPVGPPGPPGSPGVNGQKGIPGDPAFGHLGPPGKRGLSGVPGIKGPRGDPGCPGAEGPAGIPGFLGLKGPKGREGHAGFPGVPGPPGHSCERGAPGIPGQPGLPGYPGSPGAPGGKGQPGDVGPPGPAGMKGLPGLPGRPGAHGPPGLPGIPGPFGDDGLPGPPGPKGPRGLPGFPGFPGERGKPGAEGCPGAKGEPGEKGMSGLPGDRGLRGAKGAIGPPGDEGEMAIISQKGTPGEPGPPGDDGFPGERGDKGTPGMQGRRGEPGRYGPPGFHRGEPGEKGQPGPPGPPGPPGSTGLRGFIGFPGLPGDQGEPGSPGPPGFSGIDGARGPKGNKGDPASHFGPPGPKGEPGSPGCPGHFGASGEQGLPGIQGPRGSPGRPGPPGSSGPPGCPGDHGMPGLRGQPGEMGDPGPRGLQGDPGIPGPPGIKGPSGSPGLNGLHGLKGQKGTKGASGLHDVGPPGPVGIPGLKGERGDPGSPGISPPGPRGKKGPPGPPGSSGPPGPAGATGRAPKDIPDPGPPGDQGPPGPDGPRGAPGPPGLPGSVDLLRGEPGDCGLPGPPGPPGPPGPPGYKGFPGCDGKDGQKGPVGFPGPQGPHGFPGPPGEKGLPGPPGRKGPTGLPGEPGPPADVDDCPRIPGLPGAPGMRGPEGAMGLPGMRGPSGPGCKGEPGLDGRRGVDGVPGSPGPPGRKGDTGEDGYPGGPGPPGPIGDPGPKGFGPGYLGGFLLVLHSQTDQEPTCPLGMPRLWTGYSLLYLEGQEKAHNQDLGLAGSCLPVFSTLPFAYCNIHQVCHYAQRNDRSYWLASAAPLPMMPLSEEAIRPYVSRCAVCEAPAQAVAVHSQDQSIPPCPQTWRSLWIGYSFLMHTGAGDQGGGQALMSPGSCLEDFRAAPFLECQGRQGTCHFFANKYSFWLTTVKADLQFSSAPAPDTLKESQAQRQKISRCQVCVKYS

SEQ ID NO: 26079 - protein, 13 aa, Artificial Sequence
  Synthetic polypeptide
GTELCWNMKNMEN

SEQ ID NO: 26080 - protein, 13 aa, Artificial Sequence
  Synthetic polypeptide
GLPSHEELNYVGI

SEQ ID NO: 26081 - protein, 8 aa, Artificial Sequence
  Synthetic polypeptide
GTELCWNM

SEQ ID NO: 26082 - protein, 58 aa, Artificial Sequence
  Synthetic polypeptide
FITRFDGFIMVLLSSHSSLSCQHVKKDMFAYSSSMIVSFLRPPSPVELLYWRALPVQD

SEQ ID NO: 26083 - protein, 362 aa, Artificial Sequence
  Synthetic polypeptide
GPPALWNCYTGELCQSKIDYCILDPCRNGATCISSLSGFTCQCPEGYFGSACEEKVDPCASSPCQNNGTCYVDGVHFTCNCSPGFTGPTCAQLIDFCALSPCAHGTCRSVGTSYKCLCDPGYHGLYCEEEYNECLSAPCLNAATCRDLVNGYECVCLAEYKGTHCELYKDPCANVSCLNGATCDSDGLNGTCICAPGFTGEECDIDINECDSNPCHHGGSCLDQPNGYNCHCPHGWVGANCEIHLQWKSGHMAESLTNMPRHSLYIIIGALCVAFILMLIILIVGICRISRIEYQGSSRPAYEEFYNCRSIDSEFSNAIASIRHARFGKKSRPAMYDVSPIAYEDYSPDDKPLVTLIKTKDL

SEQ ID NO: 26084 - protein, 57 aa, Artificial Sequence
  Synthetic polypeptide
WFYNGFAQFSFFSFLPACKEGHVCLLFLHDCKFLEAPQPCGTVILESFASPRLITAS

SEQ ID NO: 26085 - protein, 14 aa, Artificial Sequence
  Synthetic polypeptide
CNPSTLGDQAEKLG

SEQ ID NO: 26086 - protein, 192 aa, Artificial Sequence
  Synthetic polypeptide
VIPALWETKRKNSDECEVCCQGGQLLCCGTCPRVFHEDCHIPPVEAKRMLWSCTFCRMKRSSGSQQCHHVSKTLERQMQPQDQLKCEFLLLKAYCHPQSSFFTGIPFNIRDYGEPFQEAMWLDLVKERLITEMYTVAWFVRDMRLMFRNHKTFYKASDFGQVGLDLEAEFEKDLKDVLGFHEANDGGFWTLP

SEQ ID NO: 26087 - protein, 56 aa, Artificial Sequence
  Synthetic polypeptide
SQHFGRPSGKTRMNARCAVKGDNFSAAVLVHESSMRTVTSPLWKPRGCCGVAPSAG

SEQ ID NO: 26088 - protein, 168 aa, Artificial Sequence
  Synthetic polypeptide
VIPALWETKRKNSDECEVCCQGGQLLCCGTCPRVFHEDCHIPPVEAKRMLWSCTFCRMKRSSGSQQCHHVSKTLERQMQPQDQLIRDYGEPFQEAMWLDLVKERLITEMYTVAWFVRDMRLMFRNHKTFYKASDFGQVGLDLEAEFEKDLKDVLGFHEANDGGFWTLP

SEQ ID NO: 26089 - protein, 37 aa, Artificial Sequence
  Synthetic polypeptide
TFATRTTTGTFQQNKEFTDPLKEVACHCKLCETAKKL

SEQ ID NO: 26090 - protein, 20 aa, Artificial Sequence
  Synthetic polypeptide
KKWLATANSVRQPKNYEKLG

SEQ ID NO: 26091 - protein, 44 aa, Artificial Sequence
  Synthetic polypeptide
DSQKTMRNLDECEVCRDGGELFCCDTCSRVFHEDCHIPPVESEK

SEQ ID NO: 26092 - protein, 186 aa, Artificial Sequence
  Synthetic polypeptide
DSQKTMRNLDECEVCRDGGELFCCDTCSRVFHEDCHIPPVESEKTPWNCIFCRMKESPGSQQCCQESEVLERQMCPEEQLKCEFLLLKVYCCSESSFFAKIPYYYYIREACQGLKEPMWLDKIKKRLNEHGYPQVEGFVQDMRLIFQNHRASYKYKDFGQMGLRLEAEFEKDFKEVFAIQETNGNS

SEQ ID NO: 26093 - protein, 37 aa, Artificial Sequence
  Synthetic polypeptide
IWFCCVPTQNLILNCNPRNLQVLRERPDGGCSRKTRV

SEQ ID NO: 26094 - protein, 15 aa, Artificial Sequence
  Synthetic polypeptide
GRDQMEDVHGRPGCR

SEQ ID NO: 26095 - protein, 854 aa, Artificial Sequence
  Synthetic polypeptide
SPGVKGETRWRMFTEDQGVDDRLLYDIVFKHFKRNKVEISNAIKKTFPFLEGLRDRDLITNKMFEDSQDSCRNLVPVQRVVYNVLSELEKTFNLPVLEALFSDVNMQEYPDLIHIYKGFENVIHDKLPLQESEEEEREERSGLQLSLEQGTGENSFRSLTWPPSGSPSHAGTTPPENGLSEHPCETEQINAKRKDTTSDKDDSLGSQQTNEQCAQKAEPTESCEQIAVQVNNGDAGREMPCPLPCDEESPEAELHNHGIQINSCSVRLVDIKKEKPFSNSKVECQAQARTHHNQASDIIVISSEDSEGSTDVDEPLEVFISAPRSEPVINNDNPLESNDEKEGQEATCSRPQIVPEPMDFRKLSTFRESFKKRVIGQDHDFSESSEEEAPAEASSGALRSKHGEKAPMTSRSTSTWRIPSRKRRFSSSDFSDLSNGEELQETCSSSLRRGSGSQPQEPENKKCSCVMCFPKGVPRSQEARTESSQASDMMDTMDVENNSTLEKHSGKRRKKRRHRSKVNGLQRGRKKDRPRKHLTLNNKVQKKRWQQRGRKANTRPLKRRRKRGPRIPKDENINFKQSELPVTCGEVKGTLYKERFKQGTSKKCIQSEDKKWFTPREFEIEGDRGASKNWKLSIRCGGYTLKVLMENKFLPEPPSTRKKRILESHNNTLVDPCEEHKKKNPDASVKFSEFLKKCSETWKTIFAKEKGKFEDMAKADKAHYEREMKTYIPPKGEKKKKFKDPNAPKRPPLAFFLFCSEYRPKIKGEHPGLSIDDVVKKLAGMWNNTAAADKQFYEKKAAKLKEKYKKDIAAYRAKGKPNSAKKRVVKAEKSKKKKEEEEDEEDEQEEENEEDDDK

SEQ ID NO: 26096 - protein, 452 aa, Artificial Sequence
  Synthetic polypeptide
SPGVKGETRWRMFTEDQGVDDRLLYDIVFKHFKRNKVEISNAIKKTFPFLEGLRDRDLITNKMFEDSQDSCRNLVPVQRVVYNVLSELEKTFNLPVLEALFSDVNMQEYPDLIHIYKGFENVIHDKLPLQESEEEEREERSGLQLSLEQGTGENSFRSLTWPPSGSPSHAGTTPPENGLSEHPCETEQINAKRKDTTSDKDDSLGSQQTNEQCAQKAEPTESCEQIAVQVNNGDAGREMPCPLPCDEESPEAELHNHGIQINSCSVRLVDIKKEKPFSNSKVECQAQARTHHNQASDIIVISSEDSEGSTDVDEPLEVFISAPRSEPVINNDNPLESNDEKEGQEATCSRPQIVPEPMDFRKLSTFRESFKKRVIGQDHDFSESSEEEAPAEASSGALRSKHAPMTSRSTSTWRIPSRKRRFSSSDFSDLSNGEELQETCSSSLRRGSGKED

SEQ ID NO: 26097 - protein, 192 aa, Artificial Sequence
  Synthetic polypeptide
SPGVKGETRWRMFTEDQGVDDRLLYDIVFKHFKRNKVEISNAIKKTFPFLEGLRDRDLITNKMFEDSQDSCRNLVPVQRVVYNVLSELEKTFNLPVLEALFSDVNMQEYPDLIHIYKGFENVIHDKLPLQESEEEEREERSGLQLSLEQGTGENSFRSLTWPPSGSPSHAGCLGGFLPPTPLNHTCCWFLLP

SEQ ID NO: 26098 - protein, 455 aa, Artificial Sequence
  Synthetic polypeptide
SPGVKGETRWRMFTEDQGVDDRLLYDIVFKHFKRNKVEISNAIKKTFPFLEGLRDRDLITNKMFEDSQDSCRNLVPVQRVVYNVLSELEKTFNLPVLEALFSDVNMQEYPDLIHIYKGFENVIHDKLPLQESEEEEREERSGLQLSLEQGTGENSFRSLTWPPSGSPSHAGTTPPENGLSEHPCETEQINAKRKDTTSDKDDSLGSQQTNEQCAQKAEPTESCEQIAVQVNNGDAGREMPCPLPCDEESPEAELHNHGIQINSCSVRLVDIKKEKPFSNSKVECQAQARTHHNQASDIIVISSEDSEGSTDVDEPLEVFISAPRSEPVINNDNPLESNDEKEGQEATCSRPQIVPEPMDFRKLSTFRESFKKRVIGQDHDFSESSEEEAPAEASSGALRSKHGEKAPMTSRSTSTWRIPSRKRRFSSSDFSDLSNGEELQETCSSSLRRGSGKED

SEQ ID NO: 26099 - protein, 448 aa, Artificial Sequence
  Synthetic polypeptide
SPGVKGETRWRMFTEDQGVDDRLLYDIVFKHFKRNKVEISNAIKKTFPFLEGLRDRDLITNKMFEDSQDSCRNLVPVQRVVYNVLSELEKTFNLPVLEALFSDVNMQEYPDLIHIYKGFENVIHDKLPLQESEEEEREERSGLQLSLEQGTGENSFRSLTWPPSGSPSHAGTTPPENGLSEHPCETEQINAKRKDTTSDKDDSLGSQQTNEQCAQKAEPTESCEQIAVQVNNGDAGREMPCPLPCDEESPEAELHNHGIQINSCSVRLVDIKKEKPFSNSKVECQAQARTHHNQASDIIVISSEDSEGSTDVDEPLEVFISAPRSEPVINNDNPLESNDEKEGQEATCSRPQIVPEPMDFRKLSTFRESFKKRVIGQDHDFSESSEEEAPAEASSGALRSKHGEKAPMTSRSTSTWRIPSRKRQLKKKKKKKQCHPQPQPQRGLLEQS

SEQ ID NO: 26100 - protein, 663 aa, Artificial Sequence
  Synthetic polypeptide
SPGVKGETRWRMFTEDQGVDDRLLYDIVFKHFKRNKVEISNAIKKTFPFLEGLRDRDLITNKMFEDSQDSCRNLVPVQRVVYNVLSELEKTFNLPVLEALFSDVNMQEYPDLIHIYKGFENVIHDKLPLQESEEEEREERSGLQLSLEQGTGENSFRSLTWPPSGSPSHAGTTPPENGLSEHPCETEQINAKRKDTTSDKDDSLGSQQTNEQCAQKAEPTESCEQIAVQVNNGDAGREMPCPLPCDEESPEAELHNHGIQINSCSVRLVDIKKEKPFSNSKVECQAQARTHHNQASDIIVISSEDSEGSTDVDEPLEVFISAPRSEPVINNDNPLESNDEKEGQEATCSRPQIVPEPMDFRKLSTFRESFKKRVIGQDHDFSESSEEEAPAEASSGALRSKHGEKAPMTSRSTSTWRIPSRKRRFSSSDFSDLSNGEELQETCSSSLRRGSGSQPQEPENKKCSCVMCFPKGVPRSQEARTESSQASDMMDTMDVENNSTLEKHSGKRRKKRRHRSKVNGLQRGRKKDRPRKHLTLNNKVQKKRWQQRGRKANTRPLKRRRKRGPRIPKDENINFKQSELPVTCGEVKGTLYKERFKQGTSKKCIQSEDKKWFTPREFEIEGDRGASKNWKLSIRCGGYTLKVLMENKFLPEPPSTRKKVMIK

SEQ ID NO: 26101 - protein, 860 aa, Artificial Sequence
  Synthetic polypeptide
SPGVKGETRWRMFTEDQGVDDRLLYDIVFKHFKRNKVEISNAIKKTFPFLEGLRDRDLITNKMFEDSQDSCRNLVPVQRVVYNVLSELEKTFNLPVLEALFSDVNMQEYPDLIHIYKGFENVIHDKLPLQESEEEEREERSGLQLSLEQGTGENSFRSLTWPPSGSPSHAGTTPPENGLSEHPCETEQINAKRKDTTSDKDDSLGSQQTNEQCAQKAEPTESCEQIAVQVNNGDAGREMPCPLPCDEESPEAELHNHGIQINSCSVRLVDIKKEKPFSNSKVECQAQARTHHNQASDIIVISSEDSEGSTDVDEPLEVFISAPRSEPVINNDNPLESNDEKEGQEATCSRPQIVPEPMDFRKLSTFRESFKKRVIGQDHDFSESSEEEAPAEASSGALRSKHGEKAPMTSRSTSTWRIPSRKRRFSSSDFSDLSNGEELQETCSSSLRRGSGSQPQEPENKKCSCVMCFPKGVPRSQEARTESSQASDMMDTMDVENNSTLEKHSGKRRKKRRHRSKVNGLQRGRKKDRPRKHLTLNNKVQKKRWQQRGRKANTRPLKRRRKRGPRIPKDENINFKQSELPVTCGEVKGTLYKERFKQGTSKKCIQSEDKKWFTPREFEIEGDRGASKNWKLSIRCGGYTLKVLMENKFLPEPPSTRKKRILESHNNTLVDPCPENSNICEVCNKWGRLFCCDTCPRSFHEHCHIPSVEANKNPWSCIFCRIKTIQERCPESQSGHQESEVLMRQMLPEEQLKCEFLLLKVYCDSKSCFFASEPYYNREGSQGPQKPMWLNKVKTSLNEQMYTRVEGFVQDMRLIFHNHKEFYREDKFTRLGIQVQDIFEKNFRNIFAIQETSKNIIMFI

SEQ ID NO: 26102 - protein, 61 aa, Artificial Sequence
  Synthetic polypeptide
NTPGHSIWTMQPSRKTQIYVRCATNGDGCSAATLVQDPFMSTATSHPWKLTRTRGVASSAG

SEQ ID NO: 26103 - protein, 23 aa, Artificial Sequence
  Synthetic polypeptide
QGAETHQVTASGQCNPAGKLKYM

SEQ ID NO: 26104 - protein, 206 aa, Artificial Sequence
  Synthetic polypeptide
DCNKELKHTRSQHLDNATQPENSNICEVCNKWGRLFCCDTCPRSFHEHCHIPSVEANKNPWSCIFCRIKTIQERCPESQSGHQESEVLMRQMLPEEQLKCEFLLLKVYCDSKSCFFASEPYYNREGSQGPQKPMWLNKVKTSLNEQMYTRVEGFVQDMRLIFHNHKEFYREDKFTRLGIQVQDIFEKNFRNIFAIQETSKNIIMFI

SEQ ID NO: 26105 - protein, 317 aa, Artificial Sequence
  Synthetic polypeptide
IQLILHYWTLEIFKATEEVSKNLVAMKEILYGTNEKEPQTEAVAQLAQELYNSGLLSTLVADLQLIDFEGKKDVAQIFNNILRRQIGTRTPTVEYICTQQNILFMLLKGYESPEIALNCGIMLRECIRHEPLAKIILWSEQFYDFFRYVEMSTFDIASDAFATFKDLLTRHKLLSAEFLEQHYDRFFSEYEKLLHSENYVTKRQSLKLLGELLLDRHNFTIMTKYISKPENLKLMMNLLRDKSRNIQFEAFHVFKVFVANPNKTQPILDILLKNQAKLIEFLSKFQNDRTEDEQFNDEKTYLVKQIRDLKRPAQQEA

SEQ ID NO: 26106 - protein, 31 aa, Artificial Sequence
  Synthetic polypeptide
QLSDSEFSSSCITGHWKYLRLQKKFPKIWLP

SEQ ID NO: 26107 - protein, 23 aa, Artificial Sequence
  Synthetic polypeptide
NEDIGLACRFSVNMRSYFIQKIM

SEQ ID NO: 26108 - protein, 5 aa, Artificial Sequence
  Synthetic polypeptide
LVVFQ

SEQ ID NO: 26109 - protein, 139 aa, Artificial Sequence
  Synthetic polypeptide
GHWTSLSFFSEYEKLLHSENYVTKRQSLKLLGELLLDRHNFTIMTKYISKPENLKLMMNLLRDKSRNIQFEAFHVFKVFVANPNKTQPILDILLKNQAKLIEFLSKFQNDRTEDEQFNDEKTYLVKQIRDLKRPAQQEA

SEQ ID NO: 26110 - protein, 22 aa, Artificial Sequence
  Synthetic polypeptide
ERVCDVHGTVPGTQEALNKLFQ

SEQ ID NO: 26111 - protein, 155 aa, Artificial Sequence
  Synthetic polypeptide
GLDKNVYVTCMAQCLEHRKHLINFFSEYEKLLHSENYVTKRQSLKLLGELLLDRHNFTIMTKYISKPENLKLMMNLLRDKSRNIQFEAFHVFKVFVANPNKTQPILDILLKNQAKLIEFLSKFQNDRTEDEQFNDEKTYLVKQIRDLKRPAQQEA

SEQ ID NO: 26112 - protein, 65 aa, Artificial Sequence
  Synthetic polypeptide
TQEAEVAVSRDHTTALHAQRQKPLNSAQVLSLCCQRVTTLMCATELQWPWGYAVLVQETRKPLIC

SEQ ID NO: 26113 - protein, 15 aa, Artificial Sequence
  Synthetic polypeptide
AEITPLPSTLSDKNP

SEQ ID NO: 26114 - protein, 340 aa, Artificial Sequence
  Synthetic polypeptide
KLARHGGTRLYSQLLRRLRWENHLNPGGRGCSEPRSHHCPPRSATKTPEQCPSVVSLLSESYNPHVRYGAAMALGICCAGTGNKEAINLLEPMTNDPVNYVRQGALIASALIMIQQTEITCPKVNQFRQLYSKVINDKHDDVMAKFGAILAQGILDAGGHNVTISLQSRTGHTHMPSVVGVLVFTQFWFWFPLSHFLSLAYTPTCVIGLNKDLKVSTAVLSITAKAKKKEKEKEKKEEEKMEVDEAEKKEEKEKKKEPEPNFQLLDNPARVMPAQLKVLTMPETCRYQPFKPLSIGGIIILKDTSEDIEELVEPVAAHGPKIEEEEQEPEPPEPFEYIDD

SEQ ID NO: 26115 - protein, 371 aa, Artificial Sequence
  Synthetic polypeptide
KLARHGGTRLYSQLLRRLRWENHLNPGGRGCSEPRSHHCPPRSATKTPEQCPSVVSLLSESYNPHVRYGAAMALGICCAGTGNKEAINLLEPMTNDPVNYVRQGALIASALIMIQQTEITCPKVNQFRQLYSKVINDKHDDVMAKFGAILAQGILDAGGHNVTISLQSRTGHTHMPSVVGVLVFTQFWFWFPLSHFLSLAYTPTCVIGLNKDLKMPKVQYKSNCKPSTFAYPAPLEVPKEKEKEKVSTAVLSITAKAKKKEKEKEKKEEEKMEVDEAEKKEEKEKKKEPEPNFQLLDNPARVMPAQLKVLTMPETCRYQPFKPLSIGGIIILKDTSEDIEELVEPVAAHGPKIEEEEQEPEPPEPFEYIDD

SEQ ID NO: 26116 - protein, 60 aa, Artificial Sequence
  Synthetic polypeptide
TQEAEVAVSRDHTTALHAQRQKPLNSAQVLSLCCQRVTTLMCATELQWPWGYAVLVQETR

SEQ ID NO: 26117 - protein, 117 aa, Artificial Sequence
  Synthetic polypeptide
KLARHGGTRLYSQLLRRLRWENHLNPGGRGCSEPRSHHCPPRSATKTPEQCPSVVSLLSESYNPHVRYGAAMALGICCAGTGNKVKPTANGVSSFLAPDCFPSPQNLCNSCKNTSAM

SEQ ID NO: 26118 - protein, 195 aa, Artificial Sequence
  Synthetic polypeptide
DPRLYKKFKNQPGGHNVTISLQSRTGHTHMPSVVGVLVFTQFWFWFPLSHFLSLAYTPTCVIGLNKDLKVSTAVLSITAKAKKKEKEKEKKEEEKMEVDEAEKKEEKEKKKEPEPNFQLLDNPARVMPAQLKVLTMPETCRYQPFKPLSIGGIIILKDTSEDIEELVEPVAAHGPKIEEEEQEPEPPEPFEYIDD

SEQ ID NO: 26119 - protein, 73 aa, Artificial Sequence
  Synthetic polypeptide
PGQHSETLVSTKNLKISQVVIMSQSPCSPGLGILICLLWLASLYLPSFGSGFLFHTSCHWLIPLPVSLALTRT

SEQ ID NO: 26120 - protein, 6 aa, Artificial Sequence
  Synthetic polypeptide
KSARWS

SEQ ID NO: 26121 - protein, 226 aa, Artificial Sequence
  Synthetic polypeptide
DPRLYKKFKNQPGGHNVTISLQSRTGHTHMPSVVGVLVFTQFWFWFPLSHFLSLAYTPTCVIGLNKDLKMPKVQYKSNCKPSTFAYPAPLEVPKEKEKEKVSTAVLSITAKAKKKEKEKEKKEEEKMEVDEAEKKEEKEKKKEPEPNFQLLDNPARVMPAQLKVLTMPETCRYQPFKPLSIGGIIILKDTSEDIEELVEPVAAHGPKIEEEEQEPEPPEPFEYIDD

SEQ ID NO: 26122 - protein, 47 aa, Artificial Sequence
  Synthetic polypeptide
GSRGGWITRCRKFSINRTVNHPHLHILPLWKYQKKKKRKRFLLLYYL

SEQ ID NO: 26123 - protein, 14 aa, Artificial Sequence
  Synthetic polypeptide
EAEAGGSRDAESSV

SEQ ID NO: 26124 - protein, 165 aa, Artificial Sequence
  Synthetic polypeptide
KPRRVDHEMPKVQYKSNCKPSTFAYPAPLEVPKEKEKEKVSTAVLSITAKAKKKEKEKEKKEEEKMEVDEAEKKEEKEKKKEPEPNFQLLDNPARVMPAQLKVLTMPETCRYQPFKPLSIGGIIILKDTSEDIEELVEPVAAHGPKIEEEEQEPEPPEPFEYIDD

SEQ ID NO: 26125 - protein, 26 aa, Artificial Sequence
  Synthetic polypeptide
DKSFNLCISVSSSVKLICSLLEASSF

SEQ ID NO: 26126 - protein, 14 aa, Artificial Sequence
  Synthetic polypeptide
YALYWRHHHSEGYQ

SEQ ID NO: 26127 - protein, 61 aa, Artificial Sequence
  Synthetic polypeptide
SLYFSFLICKIDMLSIGGIIILKDTSEDIEELVEPVAAHGPKIEEEEQEPEPPEPFEYIDD

SEQ ID NO: 26128 - protein, 42 aa, Artificial Sequence
  Synthetic polypeptide
ISAACHLLEKSYQMVFLNLMMMKMKMMKRTMTSWKPIWTKTN

SEQ ID NO: 26129 - protein, 20 aa, Artificial Sequence
  Synthetic polypeptide
TRLESQLPATYWKRATRWCS

SEQ ID NO: 26130 - protein, 114 aa, Artificial Sequence
  Synthetic polypeptide
GKIMEFRDRLGLNLSCLPLTGKELPDGVLESDDDEDEDDEEDHDIMEADLDKDELIQPQLGELSGEKLLTTEYLGIMTNTGKTRRKGLANVQWSGDEPLQRPVTPGGHRNGYPV

SEQ ID NO: 26131 - protein, 673 aa, Artificial Sequence
  Synthetic polypeptide
SSSSSSSSSSSPQKKGKKAAATSAKKVVVSPTKKVAVATPAKKAAVTPGKKAAATPAKKTVTPAKAVTTPGKKGATPGKALVATPGKKGAAIPAKGAKNGKNAKKEDSDEEEDDDSEEDEEDDEDEDEDEDEIEPAAMKAAAAAPASEDEDDEDDEDDEDDDDDEEDDSEEEAMETTPAKGKKAAKVVPVKAKNVAEDEDEEEDDEDEDDDDDEDDEDDDDEDDEEEEEEEEEEPVKEAPGKRKKEMAKQKAAPEAKKQKVEGTEPTTAFNLFVGNLNFNKSAPELKTGISDVFAKNDLAVVDVRIGMTRKFGYVDFESAEDLEKALELTGLKVFGNEIKLEKPKGKDSKKERDARTLLAKNLPYKVTQDELKEVFEDAAEIRLVSKDGKSKGIAYIEFKTEADAEKTFEEKQGTEIDGRSISLYYTGEKGQNQDYRGGKNSTWSGESKTLVLSNLSYSATEETLQEVFEKATFIKVPQNQNGKSKGYAFIEFASFEDAKEALNSCNKREIEGRAIRLELQGPRGSPNARSQPSKTLFVKGLSEDTTEETLKESFDGSVRARIVTDRETGSSKGFGFVDFNSEEDAKAAKEAMEDGEIDGNKVTLDWAKPKGEGGFGGRGGGRGGFGGRGGGRGGRGGFGGRGRGGFGGRGGFRGGRGGGGDHKPQGKKTKFE

SEQ ID NO: 26132 - protein, 81 aa, Artificial Sequence
  Synthetic polypeptide
HLHPHPRPRHHLRRKARRLLQPQQRRWSFPQQKRLQLPHQPRKQLSLQAKRQQQHLPRRQLHQPKQLPHLARREPHQAKHW

SEQ ID NO: 26133 - protein, 85 aa, Artificial Sequence
  Synthetic polypeptide
IFILILVLVITSEERQEGCCNLSKEGGRFPNKKGCSCHTSQESSCHSRQKGSSNTCQEDSYTSQSSYHTWQEGSHTRQSIGSNSW

SEQ ID NO: 26134 - protein, 149 aa, Artificial Sequence
  Synthetic polypeptide
SSSSSSSSSSSPQKKGKKAAATSAKKVVVSPTKKVAVATPAKKAAVTPGKKAAATPAKKTVTPAKAVTTPGKKGATPGKALVATPGKKGAAIPAKGAKNGKNAKKEDSDEEEDDDSEEDEEDDEDEDEDEDEIEPAAMKAAAAAPASED

SEQ ID NO: 26135 - protein, 145 aa, Artificial Sequence
  Synthetic polypeptide
SSSSSSSSSSSPQKKGKKAAATSAKKVVVSPTKKVAVATPAKKAAVTPGKKAAATPAKKTVTPAKAVTTPGKKGATPGKALVATPGKKGAAIPAKGAKNGKNAKKEDSDEEEDDDSEEDEEDDEDEDEDEDEIEPAAMKAAAAAP

SEQ ID NO: 26136 - protein, 130 aa, Artificial Sequence
  Synthetic polypeptide
SSSSSSSSSSSPQKKGKKAAATSAKKVVVSPTKKVAVATPAKKAAVTPGKKAAATPAKKTVTPAKAVTTPGKKGATPGKALVATPGKKGAAIPAKGAKNGKNAKKEDSDEEEDDDSEEDEEDDEDEDEDE

SEQ ID NO: 26137 - protein, 120 aa, Artificial Sequence
  Synthetic polypeptide
SSSSSSSSSSSPQKKGKKAAATSAKKVVVSPTKKVAVATPAKKAAVTPGKKAAATPAKKTVTPAKAVTTPGKKGATPGKALVATPGKKGAAIPAKGAKNGKNAKKEDSDEEEDDDSEEDE

SEQ ID NO: 26138 - protein, 97 aa, Artificial Sequence
  Synthetic polypeptide
GWARWLMPIIPALWEAEAGGSPEVKSSRPAWPTWQNPVSTKNTKISCAWWHAPVIPTTQEAETGESLEPRRQRRIWWQRPGRLWRARRLPRRQRRRR

SEQ ID NO: 26139 - protein, 55 aa, Artificial Sequence
  Synthetic polypeptide
SQLLRRLRQENHLNRGGRGGFGGRGRGGFGGRGGFRGGRGGGGDHKPQGKKTKFE

SEQ ID NO: 26140 - protein, 42 aa, Artificial Sequence
  Synthetic polypeptide
TEEAEEDLVAEAGEALEGEEASEEAEEEEVTTSHKERRRSLN

SEQ ID NO: 26141 - protein, 31 aa, Artificial Sequence
  Synthetic polypeptide
GWARWLMPVIPALWEAEAGRSLEPTRRACQN

SEQ ID NO: 26142 - protein, 67 aa, Artificial Sequence
  Synthetic polypeptide
SQHFGRPRQADHLSQQGEPARTEHSSAEQAEASYHRELGIKNEVYPLLRVAERPGDAESPGTRRPYH

SEQ ID NO: 26143 - protein, 22 aa, Artificial Sequence
  Synthetic polypeptide
SQHFGRPRQADHLSQQGEPART

SEQ ID NO: 26144 - protein, 33 aa, Artificial Sequence
  Synthetic polypeptide
SWKPSFSANYHKDRKPNTTCSHSQILLSRYPSL

SEQ ID NO: 26145 - protein, 169 aa, Artificial Sequence
  Synthetic polypeptide
AGNHHSQQTITRTENQTPHVLIHRFYCQDIRAYDILFGDTPRPAQAEDLYEILDSFTEKYENEGQRINARKAAREQRKSSAKELPPKPLSRPQQSSAPVQLNSGSQSNLNQPIEVTALYSFEGQQPGDLNFQAGDRITVISKTDSHFDWWEGKLRGQTGIFPANYVTMN

SEQ ID NO: 26146 - protein, 100 aa, Artificial Sequence
  Synthetic polypeptide
METIILSKLSQGQKTKHHMFSFTDFIVKISELMTFYLEIHRGLLKPKIFMKFLIPLLKSMKMKDNESMQEKQQGSRGSLLLKNYLQSHCQDHSSHLHQSS

SEQ ID NO: 26147 - protein, 188 aa, Artificial Sequence
  Synthetic polypeptide
AGNHHSQQTITRTENQTPHVLIHRFYCQDIRAYDILFGDTPRPAQAEDLYEILDSFTEKYENEGQRINARKAAREQRKSSAKELPPKPLSRPQQSSAPVQLNSGSQSNRNEYKLYPGLSSYHERVGNLNQPIEVTALYSFEGQQPGDLNFQAGDRITVISKTDSHFDWWEGKLRGQTGIFPANYVTMN

SEQ ID NO: 26148 - protein, 97 aa, Artificial Sequence
  Synthetic polypeptide
AGNHHSQQTITRTENQTPHVLIHRFYCQDIRAYDILFGDTPRPAQAEDLYEILDSFTEKYENEGQRINARKAAREQRKSSVPFGFMFHSVFSENLFL

SEQ ID NO: 26149 - protein, 97 aa, Artificial Sequence
  Synthetic polypeptide
METIILSKLSQGQKTKHHMFSFTDFIVKISELMTFYLEIHRGLLKPKIFMKFLIPLLKSMKMKDNESMQEKQQGSRGSLLYRLVLCFTQYSQKISFC

SEQ ID NO: 26150 - protein, 120 aa, Artificial Sequence
  Synthetic polypeptide
AGNHHSQQTITRTENQTPHVLIHRFYCQDIRAYDILFGDTPRPAQAEDLYEILDSFTEKYENEGQRINARKAAREQRKSSAKELPPKPLSRPQQSSAPVQLNSGSQSKYFCCNSNTVVIK

SEQ ID NO: 26151 - protein, 232 aa, Artificial Sequence
  Synthetic polypeptide
SHIGKDCIFTIDPSTARDLDDALSCKPLADGNFKVGVHIADVSYFVPEGSDLDKVAAERATSVYLVQKVVPMLPRLLCEELCSLNPMSDKLTFSVIWTLTPEGKILDEWFGRTIIRSCTKLSYEHAQSMIESPTEKIPAKELPPISPEHSSEEVHQQNADKDGAAHLQASHSPSAEDAEAQPSTEERLPETRGICDRDPDTRLFFLQQQSRVLEAKPQNTIRVEEQTTQLQI

SEQ ID NO: 26152 - protein, 22 aa, Artificial Sequence
  Synthetic polypeptide
VIKQTSAHVKMKSYRKRLYLHH

SEQ ID NO: 26153 - protein, 514 aa, Artificial Sequence
  Synthetic polypeptide
SHIGKDCIFTIDPSTARDLDDALSCKPLADGNFKVGVHIADVSYFVPEGSDLDKVAAERATSVYLVQKVVPMLPRLLCEELCSLNPMSDKLTFSVIWTLTPEGKILDEWFGRTIIRSCTKLSYEHAQSMIESPTEKIPAKELPPISPEHSSEEVHQAVLNLHGIAKQLRQQRFVDGALRLDQLKLAFTLDHETGLPQGCHIYEYRESNKLVEEFMLLANMAVAHKIHRAFPEQALLRRHPPPQTRMLSDLVEFCDQMGLPVDFSSAGALNKSLTQTFGDDKYSLARKEVLTNMCSRPMQMALYFCSGLLQDPAQFRHYALNVPLYTHFTSPIRRFADVLVHRLLAAALGYRERLDMAPDTLQKQADHCNDRRMASKRVQELSTSLFFAVLVKESGPLESEAMVMGILKQAFDVLVLRYGVQKRIYCNALALRSHHFQKVGKKPELTLVWEPEDMEQEPAQQVITIFSLVEVVLQAESTALKYSAILKRPGTQGHLGPEKEEEESDGEPEDSSTS

SEQ ID NO: 26154 - protein, 248 aa, Artificial Sequence
  Synthetic polypeptide
SHIGKDCIFTIDPSTARDLDDALSCKPLADGNFKVGVHIADVSYFVPEGSDLDKVAAERATSVYLVQKVVPMLPRLLCEELCSLNPMSDKLTFSVIWTLTPEGKILDEWFGRTIIRSCTKLSYEHAQSMIESPTEKIPAKELPPISPEHSSEEVHQAVLNLHGIAKQLRQQRFVDGALRLDQLKLAFTLDHETGLPQGCHIYEYRESNKPCCAGTPRPKQGCSVTWWNSATRWGCPWTSAPQEPSIKA

SEQ ID NO: 26155 - protein, 377 aa, Artificial Sequence
  Synthetic polypeptide
SHIGKDCIFTIDPSTARDLDDALSCKPLADGNFKVGVHIADVSYFVPEGSDLDKVAAERATSVYLVQKVVPMLPRLLCEELCSLNPMSDKLTFSVIWTLTPEGKILDEWFGRTIIRSCTKLSYEHAQSMIESPTEKIPAKELPPISPEHSSEEVHQAVLNLHGIAKQLRQQRFVDGALRLDQLKLAFTLDHETGLPQGCHIYEYRESNKLVEEFMLLANMAVAHKIHRAFPEQALLRRHPPPQTRMLSDLVEFCDQMGLPVDFSSAGALNKSLTQTFGDDKYSLARKEVLTNMCSRPMQMALYFCSGLLQDPAQFRHYALNVPLYTHFTSPIRRFADVLVHRLLAAALGYRERLDMAPDTLQKQADHCNDRRMASKR

SEQ ID NO: 26156 - protein, 30 aa, Artificial Sequence
  Synthetic polypeptide
SQHFGRPRGVDHEVRRSRPSWLTRAGQTTG

SEQ ID NO: 26157 - protein, 12 aa, Artificial Sequence
  Synthetic polypeptide
HGLDRQPAEVEC

SEQ ID NO: 26158 - protein, 186 aa, Artificial Sequence
  Synthetic polypeptide
RAQWLMPVIPALWKAEGGGSRGQEIKTILADTGWTDNRLKWNAEEFGNISVLRLPPDMVWLPEIVLENNNDGSFQISYSCNVLVYHYGFVYWLPPAIFRSSCPISVTYFPFDWQNCSLKFRERGVGDSPPAGQGQRGPQSPSGQPQPPGHHLLPHHPPQAPLLHHQHPGALRAHLLHGQPGLLPTG

SEQ ID NO: 26159 - protein, 138 aa, Artificial Sequence
  Synthetic polypeptide
RAQWLMPVIPALWKAEGGGSRGQEIKTILADTGWTDNRLKWNAEEFGNISVLRLPPDMVWLPEIVLENNNDGSFQISYSCNVLVYHYGFVYWLPPAIFRSSCPISVTYFPFDWQNCSLKFSSLKYTAKEITLSLKQDA

SEQ ID NO: 26160 - protein, 468 aa, Artificial Sequence
  Synthetic polypeptide
RAQWLMPVIPALWKAEGGGSRGQEIKTILADTGWTDNRLKWNAEEFGNISVLRLPPDMVWLPEIVLENNNDGSFQISYSCNVLVYHYGFVYWLPPAIFRSSCPISVTYFPFDWQNCSLKFSSLKYTAKEITLSLKQDAKENRTYPVEWIIIDPEGFTENGEWEIVHRPARVNVDPRAPLDSPSRQDITFYLIIRRKPLFYIINILVPCVLISFMVNLVFYLPADSGEKTSVAISVLLAQSVFLLLISKRLPATSMAIPLIGKFLLFGMVLVTMVVVICVIVLNIHFRTPSTHVLSEGVKKLFLETLPELLHMSRPAEDGPSPGALVRRSSSLGYISKAEEYFLLKSRSDLMFEKQSERHGLARRLTTARRPPASSEQAQQELFNELKPAVDGANFIVNHMRDQNNYNEEKDSWNRVARTVDRLCLFVVTPVMVVGTAWIFLQGVYNQPPPQPFPGDPYSYNVQDKRFI

SEQ ID NO: 26161 - protein, 122 aa, Artificial Sequence
  Synthetic polypeptide
RAQWLMPVIPALWKAEGGGSRGQEIKTILADTGWTDNRLKWNAEEFGNISVLRLPPDMVWLPEIVLENNNDGSFQISYSCNVLVYHYGFVYWLPPAIFRSSCPISVTYFPFDWQNCSLKFRW

SEQ ID NO: 26162 - protein, 59 aa, Artificial Sequence
  Synthetic polypeptide
RAQWLMPVIPALWKAEGGGSRGQEIKTILADTGWTDNRLKWNAEEFGNISVLRLPPDMQ

SEQ ID NO: 26163 - protein, 54 aa, Artificial Sequence
  Synthetic polypeptide
MPISDDWIKKMLYIYTMEYYAASKKNEIMSFAGTWMELEKVSCLHPSCPQETSR

SEQ ID NO: 26164 - protein, 51 aa, Artificial Sequence
  Synthetic polypeptide
RKCCIYTPWNTMQPVKRTRSCPLQEHGWSWRKCRVSTRAAPKKHPADCQLL

SEQ ID NO: 26165 - protein, 119 aa, Artificial Sequence
  Synthetic polypeptide
KERDHVLCRNMDGAGESVVSPPELPPRNIPLTASSCEAKEVPFSNENPRATETSRPSLSETLFQRLQSMDTSGLPEEHLKAIQDYLSTQLAQDSEFVKTGSSSLPHLKKLTTLLCKELY

SEQ ID NO: 26166 - protein, 494 aa, Artificial Sequence
  Synthetic polypeptide
KERDHVLCRNMDGAGESVVSPPELPPRNIPLTASSCEAKEVPFSNENPRATETSRPSLSETLFQRLQSMDTSGLPEEHLKAIQDYLSTQLAQDSEFVKTGSSSLPHLKKLTTLLCKELYGYCLEVLLSYPLSLLSQVPGEANPINMVSKLSQLTSLLSSIEDKVKALLHEGPESPHRPSLIPPVTFEVKAESLGIPQKMQLKVDVESGKLIIKKSKDGSEDKFYSHKKILQLIKSQKFLNKLVILVETEKEKILRKEYVFADSKKREGFCQLLQQMKNKHSEQPEPDMITIFIGTWNMGNAPPPKKITSWFLSKGQGKTRDDSADYIPHDIYVIGTQEDPLSEKEWLEILKHSLQEITSVTFKTVAIHTLWNIRIVVLAKPEHENRISHICTDNVKTGIANTLGNKGAVGVSFMFNGTSLGFVNSHLTSGSEKKLRRNQNYMNILRFLALGDKKLSPFNITHRFTHLFWFGDLNYRVDLPTWEAETIIQKIKQQ

SEQ ID NO: 26167 - protein, 1075 aa, Artificial Sequence
  Synthetic polypeptide
KERDHVLCRNMDGAGESVVSPPELPPRNIPLTASSCEAKEVPFSNENPRATETSRPSLSETLFQRLQSMDTSGLPEEHLKAIQDYLSTQLAQDSEFVKTGSSSLPHLKKLTTLLCKELYGQMLRTVPGIGKVKEEDHVPGEANPINMVSKLSQLTSLLSSIEDKVKALLHEGPESPHRPSLIPPVTFEVKAESLGIPQKMQLKVDVESGKLIIKKSKDGSEDKFYSHKKILQLIKSQKFLNKLVILVETEKEKILRKEYVFADSKKREGFCQLLQQMKNKHSEQPEPDMITIFIGTWNMGNAPPPKKITSWFLSKGQGKTRDDSADYIPHDIYVIGTQEDPLSEKEWLEILKHSLQEITSVTFKTVAIHTLWNIRIVVLAKPEHENRISHICTDNVKTGIANTLGNKGAVGVSFMFNGTSLGFVNSHLTSGSEKKLRRNQNYMNILRFLALGDKKLSPFNITHRFTHLFWFGDLNYRVDLPTWEAETIIQKIKQQQYADLLSHDQLLTERREQKVFLHFEEEEITFAPTYRFERLTRDKYAYTKQKATGMKYNLPSWCDRVLWKSYPLVHVVCQSYGSTSDIMTSDHSPVFATFEAGVTSQFVSKNGPGTVDSQGQIEFLRCYATLKTKSQTKFYLEFHSSCLESFVKSQEGENEEGSEGELVVKFGETLPKLKPIISDPEYLLDQHILISIKSSDSDESYGEGCIALRLEATETQLPIYTPLTHHGELTGHFQGEIKLQTSQGKTREKLYDFVKTERDESSGPKTLKSLTSHDPMKQWEVTSRAPPCSGSSITEIINPNYMGVGPFGPPMPLHVKQTLSPDQQPTAWSYDQPPKDSPLGPCRGESPPTPPGQPPISPKKFLPSTANRGLPPRTQESRPSDLGKNAGDTLPQEDLPLTKPEMFENPLYGSLSSFPKPAPRKDQESPKMPRKEPPPCPEPGILSPSIVLTKAQEADRGEGPGKQVPAPRLRSFTCSSSAEGRAAGGDKSQGKPKTPVSSQAPVPAKRPIKPSRSEINQQTPPTPTPRPPLPVKSPAVLHLQHSKGRDYRDNTELPHHGKHRPEEGPPGPLGRTAMQ

SEQ ID NO: 26168 - protein, 22 aa, Artificial Sequence
  Synthetic polypeptide
DVEAEDNDTDDPDSVPSSKRGC

SEQ ID NO: 26169 - protein, 55 aa, Artificial Sequence
  Synthetic polypeptide
EVTAPCTSLSLKTFQWDRMWRRKIMILMILTLYHHQRGDADQTEQFIPAIKKEIL

SEQ ID NO: 26170 - protein, 1164 aa, Artificial Sequence
  Synthetic polypeptide
LCTIIKEGMLTKQNNSFQRSKRRYFKLRGRTLYYAKTAKSIIFDEVDLTDASVAESSTKNVNNSFTVITPCRKLILCADNRKEMEDWIAALKTVQNREHFEPTQYSMDHFSGMHNWYACSHARPTYCNVCREALSGVTSHGLSCEVCKFKAHKRCAVRATNNCKWTTLASIGKDIIEDADGIAMPHQWLEGNLPVSAKCTVCDKTCGSVLRLQDWRCLWCKAMVHTSCKESLLTKCPLGLCKVSVIPPTALNSIDSDGFWKASCPPSCTSPLLVFVNSKSGDNQGVKFLRRFKQLLNPAQVFDLMNGGPHLGLRLFQKFDTFRILVCGGDGSVGWVLSEIDSLNLHKQCQLGVLPLGTGNDLARVLGWGSACDDDTQLPQILEKLERASTKMLDRWSVMAYEAKLPRQASSSTVTEDFSEDSEVQQILFYEDSVAAHLSKILTSDQHSVVISSAKVLCETVKDFVARVGKAYEKTTESSEESEVMAKKCSVLKEKLDSLLKTLDDESQASSSLPNPPPTIAEEAEDGDGSGSICGSTGDRLVASACPARPQIFRPREQLMLRANSLKKAIRQIIEHTEKAVDEQNAQTQEQEGFVLGLSESEEKMDHRVCPPLSHSESFGVPKGRSQRKVSKSPCEKLISKGSLSLGSSASLPPQPGSRDGLPALNTKILYPNVRAGMSGSLPGGSVISRLLINADPFNSEPETLEYYTEKCVMNNYFGIGLDAKISLDFNNKRDEHPEKCRSRTKNMMWYGVLGTKELLHRTYKNLEQKVLLECDGRPIPLPSLQGIAVLNIPSYAGGTNFWGGTKEDDTFAAPSFDDKILEVVAVFGSMQMAVSRVIRLQHHRIAQCRTVKISILGDEGVPVQVDGEAWVQPPGYIRIVHKNRAQTLTRDRAFESTLKSWEDKQKCELPRPPSCSLHPEMLSEEEATQMDQFGQAAGVLIHSIREIAQSHRDMEQELAHAVNASSKSMDRVYGKPRTTEGLNCSFVLEMVNNFRALRSETELLLSGKMALQLDPPQKEQLGSALAEMDRQLRRLADTPWLCQSAEPGDEESVMLDLAKRSRSGKFRLVTKFKKEKNNKNKEAHSSLGAPVHLWGTEEVAAWLEHLSLCEYKDIFTRHDIRGSELLHLERRDLKDLGVTKVGHMKRILCGIKELSRSAPAVEA

SEQ ID NO: 26171 - protein, 144 aa, Artificial Sequence
  Synthetic polypeptide
LCTIIKEGMLTKQNNSFQRSKRRYFKLRGRTLYYAKTAKSIIFDEVDLTDASVAESSTKNVNNSFTVITPCRKLILCADNRKEMEDWIAALKTVQNREHFEPTQYSMDHFSGMHNWYACSHARPTYCNVCREALSGVTSHGLSC

SEQ ID NO: 26172 - protein, 21 aa, Artificial Sequence
  Synthetic polypeptide
ESEAGGSLEVRSLGPTWPTWP

SEQ ID NO: 26173 - protein, 58 aa, Artificial Sequence
  Synthetic polypeptide
SQHFRSLRQADHLRSGVWDQPGQHGHDLASFPGVRCPVPSPPQSLDGGEEAPRQAFTN

SEQ ID NO: 26174 - protein, 243 aa, Artificial Sequence
  Synthetic polypeptide
GQEFGTNLANMAMTLPPFLEFGVPSPAHLRAWTVERKRPGRLLRTDRQPLREYKLGRRIEICLEPLQKGENLGPQDVLLRTQVRIPGERTYAPALDLVWNAAQGGTAGSLRQRVADFYRLPVEKIEIAKYFPEKFEWLPISSWNQQITKRKKKKKQDYLQGAPYYLKDGDTIGVKNLLIDDDDDFSTIRDDTGKEKQKQRALGRRKSQEALHEQSSYILSSAETPARPRAPETSLSIHVGSFR

SEQ ID NO: 26175 - protein, 45 aa, Artificial Sequence
  Synthetic polypeptide
GQEFGTNLANMAMTLPPFLEFGVPSPAHLRAWTVERKRPGRLLRT

SEQ ID NO: 26176 - protein, 78 aa, Artificial Sequence
  Synthetic polypeptide
GQEFGTNLANMAMTLPPFLEFGVPSPAHLRAWTVERKRPGRLLRTDRQPLREYKLGRRIEICLEPLQKGENLGCILTP

SEQ ID NO: 26177 - protein, 62 aa, Artificial Sequence
  Synthetic polypeptide
ERLVTPILTTLLWFPILPRVRGEVLNVCTRAYVIWFSVFKVNAEEIWPTRRCLAFTKNGLVL

SEQ ID NO: 26178 - protein, 369 aa, Artificial Sequence
  Synthetic polypeptide
SGSLCLKLMLKKSGLQGDAWHLRKMDWCYEAGEPLCEEDATLKELLICSGDTLLLIEGQLPPLGFLKVPIWWYQLQGPSGHWESHQDQTNCTSSWGRVWRATSSQGASGNEPAQVSLLYLGDIEISEDATLAELKSQAMTLPPFLEFGVPSPAHLRAWTVERKRPGRLLRTDRQPLREYKLGRRIEICLEPLQKGENLGPQDVLLRTQVRIPGERTYAPALDLVWNAAQGGTAGSLRQRVADFYRLPVEKIEIAKYFPEKFEWLPISSWNQQITKRKKKKKQDYLQGAPYYLKDGDTIGVKNLLIDDDDDFSTIRDDTGKEKQKQRALGRRKSQEALHEQSSYILSSAETPARPRAPETSLSIHVGSFR

SEQ ID NO: 26179 - protein, 16 aa, Artificial Sequence
  Synthetic polypeptide
SLECLHKGLCDLVLCV

SEQ ID NO: 26180 - protein, 204 aa, Artificial Sequence
  Synthetic polypeptide
SGSLCLKLMLKKSGLQGDAWHLRKMDWCYEAGEPLCEEDATLKELLICSGDTLLLIEGQLPPLGFLKVPIWWYQLQGPSGHWESHQDQTNCTSSWGRVWRATSSQGASGNEPAQVSLLYLGDIEISEDATLAELKSQAMTLPPFLEFGVPSPAHLRAWTVERKRPGRLLRTDRQPLREYKLGRRIEICLEPLQKGENLGCILTP

SEQ ID NO: 26181 - protein, 121 aa, Artificial Sequence
  Synthetic polypeptide
SGSLCLKLMLKKSGLQGDAWHLRKMDWCYEAGEPLCEEDATLKELLICSGDTLLLIEGQLPPLGFLKVPIWWYQLQGPSGHWESHQDQTNCTSSWGRVWRATSSQGENRMGFQQPVHHKEK

SEQ ID NO: 26182 - protein, 250 aa, Artificial Sequence
  Synthetic polypeptide
YVFAHEFEAYINASGEHGIVVFSLGSMVSEIPEKKAMAIADALGKIPQTVLWRYTGTRPSNLANNTILVKWLPQNDLLGHPMTRAFITHAGSHGVYESICNGVPMVMMPLFGDQMDNAKRMETKGAGVTLNVLEMTSEDLENALKAVINDKSYKENIMRLSSLHKDRPVEPLDLAVFWVEFVMRHKGAPHLRPAAHDLTWYQYHSLDVIGFLLAVVLTVAFITFKCCAYGYRKCLGKKGRVKKAHKSKTH

SEQ ID NO: 26183 - protein, 81 aa, Artificial Sequence
  Synthetic polypeptide
MCLHMNLKPTLMLLENMELWFSLWDQWSQKFQRRKLWQLLMLWAKSLRQSCGGTLEPDHRILRTTRYLLSGYPKTICLVTR

SEQ ID NO: 26184 - protein, 161 aa, Artificial Sequence
  Synthetic polypeptide
YVFAHEFEAYINASGEHGIVVFSLGSMVSEIPEKKAMAIADALGKIPQTVLWRYTGTRPSNLANNTILVKWLPQNDLLGHPMTRAFITHAGSHGVYESICNGVPMVMMPLFGDQMDNAKRMETKGAGVTLNVLEMTSEDLENALKAVINDKRKKQQSGRQM

SEQ ID NO: 26185 - protein, 7 aa, Artificial Sequence
  Synthetic polypeptide
ISLIISS

SEQ ID NO: 26186 - protein, 89 aa, Artificial Sequence
  Synthetic polypeptide
SLVHERPSSVPGEAAEAGSFAAGEGCRPGGRRGPAGAVPARPRQHGPGRPQEGEAVPEGLAGEVPGPPEGAREQQRDCRGHGGPDQDPG

SEQ ID NO: 26187 - protein, 362 aa, Artificial Sequence
  Synthetic polypeptide
NQKYHLTQQSHYWAYTQRNIIILLQRYMHVYVHCSTIHNNKDMESTQMPINDTLDKENEFMSGPVLYQEKLLKPAALLLEKGADQEEDEALRVLSLRALGNMALGAPKKVKQYRKVLLEKCLGPLREPVSNSVTAEGMEALTKILAELREGDVGSSFDAMSEQCRIFFDNESELLRLKAFILFGKLARVVGMSKKHFFKGEVKKAWIPLMLHSQDPCSNAAQACMATMFQCVHFWGWKSLEHPSGPSDTATDDKMTVFQTTMCSILTRKKPAVLYRFLLETMAYVKNNLSRIRIAACNLAGIIMKQMSTHYLKKLDFPALRNSLQELQLDPDPGVRRAALETLTVLDSCSQHGFLASPQGMS

SEQ ID NO: 26188 - protein, 40 aa, Artificial Sequence
  Synthetic polypeptide
SFYYKDICMCMFIVALFTITKTWNQPKCPSMIHWIKKMSS

SEQ ID NO: 26189 - protein, 592 aa, Artificial Sequence
  Synthetic polypeptide
SQHFERPRQCAGNRAGRDVRVTPLPSLASPAVPAPGYCSRISRKSPGDPAKPASSPREWDPLHPSSTDMALVPRNDSLSLQETSSSSFLSSQPFEDDDICNVTISDLYAGMLHSMSRLLSTKPSSIISTKTFIMQNWNSRRRHRYKSRMNKTYCKGARRSQRSSKENFIPCSEPVKGTGALRDCKNVLDVSCRKTGLKLEKAFLEVNRPQIHKLDPSWKERKVTPSKYSSLIYFDSSATYNLDEENRFRTLKWLISPVKIVSRPTIRQGHGENRQREIEIRFDQLHREYCLSPRNQPRRMCLPDSWAMNMYRGGPASPGGLQGLETRRLSLPSSKAKAKSLSEAFENLGKRSLEAGRCLPKSDSSSSLPKTNPTHSATRPQQTSDLHVQGNSSGIFRKSVSPSKTLSVPDKEVPGHGRNRYDEIKEEFDKLHQKYCLKSPGQMTVPLCIGVSTDKASMEVRYQTEGFLGKLNPDPHFQGFQKLPSSPLGCRKSLLGSTAIEAPSSTCVARAITRDGTRDHQFPAKRPRLSEPQGSGRQGNSLGASDGVDNTVRPGDQGSSSQPNSEERGENTSYRMEEKSDFMLEKLETKSV

SEQ ID NO: 26190 - protein, 29 aa, Artificial Sequence
  Synthetic polypeptide
PGTVAHVCNPSTLRGQGSVQVTELEGMYV

SEQ ID NO: 26191 - protein, 7 aa, Artificial Sequence
  Synthetic polypeptide
EAKAVCR

SEQ ID NO: 26192 - protein, 499 aa, Artificial Sequence
  Synthetic polypeptide
SQHFERPRQCAGNRAGRDVRVTPLPSLASPAVPAPGYCSRISRKSPGDPAKPASSPREWDPLHPSSTDMALVPRNDSLSLQETSSSSFLSSQPFEDDDICNVTISDLYAGMLHSMSRLLSTKPSSIISTKTFIMQNWNSRRRHRYKSRMNKTYCKGARRSQRSSKENFIPCSEPVKGTGALRDCKNVLDVSCRKTGLKLEKAFLEVNRPQIHKLDPSWKERKVTPSKYSSLIYFDSSATYNLDEENRFRTLKWLISPVKIVSRPTIRQGHGENRQREIEIRFDQLHREYCLSPRNQPRRMCLPDSWAMNMYRGGPASPGGLQGLETRRLSLPSSKAKAKSLSEAFENLGKRSLEAGRCLPKSDSSSSLPKTNPTHSATRPQQTSDLHVQGNSSGIFRKSVSPSKTLSVPDKEVPGHGRNRYDEIKEEFDKLHQKYCLKSPGQMTVPLCIGVSTDKASMEVRYQTEGFLGKLNPDPHFQGFQKLPSSPLGCRKSLLGSTA

SEQ ID NO: 26193 - protein, 153 aa, Artificial Sequence
  Synthetic polypeptide
SQHFERPRQCAGNRAGRDVRVTPLPSLASPAVPAPGYCSRISRKSPGDPAKPASSPREWDPLHPSSTDMALVPRNDSLSLQETSSSSFLSSQPFEDDDICNVTISDLYAGMLHSMSRLLSTKPSSIISTKTFIMQNWNSRRRHRYKSRMNKTY

SEQ ID NO: 26194 - protein, 80 aa, Artificial Sequence
  Synthetic polypeptide
AQPRADSEWIFGRMCASVAMPRASTWKAPRSTKVRNGTTRNTPRNFLPTPLGIFSLRHWGRKGSIYVCPATRTRKSFTSC

SEQ ID NO: 26195 - protein, 33 aa, Artificial Sequence
  Synthetic polypeptide
LSPGLTQSGFSGECVQVWLCPEPAHGRHPDQPK

SEQ ID NO: 26196 - protein, 1046 aa, Artificial Sequence
  Synthetic polypeptide
LRVDFRENVCKCGYAQSQHMEGTQINQSEKWNYKKHTKEFPTDAFGDIQFETLGKKGKYIRLSCDTDAEILYELLTQHWHLKTPNLVISVTGGAKNFALKPRMRKIFSRLIYIAQSKGAWILTGGTHYGLMKYIGEVVRDNTISRSSEENIVAIGIAAWGMVSNRDTLIRNCDAEGYFLAQYLMDDFTRDPLYILDNNHTHLLLVDNGCHGHPTVEAKLRNQLEKYISERTIQDSNYGGKIPIVCFAQGGGKETLKAINTSIKNKIPCVVVEGSGQIADVIASLVEVEDALTSSAVKEKLVRFLPRTVSRLPEEETESWIKWLKEILECSHLLTVIKMEEAGDEIVSNAISYALYKAFSTSEQDKDNWNGQLKLLLEWNQLDLANDEIFTNDRRWESADLQEVMFTALIKDRPKFVRLFLENGLNLRKFLTHDVLTELFSNHFSTLVYRNLQIAKNSYNDALLTFVWKLVANFRRGFRKEDRNGRDEMDIELHDVSPITRHPLQALFIWAILQNKKELSKVIWEQTRGCTLAALGASKLLKTLAKVKNDINAAGESEELANEYETRAVELFTECYSSDEDLAEQLLVYSCEAWGGSNCLELAVEATDQHFIAQPGVQNFLSKQWYGEISRDTKNWKIILCLFIIPLVGCGFVSFRKKPVDKHKKLLWYYVAFFTSPFVVFSWNVVFYIAFLLLFAYVLLMDFHSVPHPPELVLYSLVFVLFCDEVRQWYVNGVNYFTDLWNVMDTLGLFYFIAGIVFRLHSSNKSSLYSGRVIFCLDYIIFTLRLIHIFTVSRNLGPKIIMLQRMLIDVFFFLFLFAVWMVAFGVARQGILRQNEQRWRWIFRSVIYEPYLAMFGQVPSDVDGTTYDFAHCTFTGNESKPLCVELDEHNLPRFPEWITIPLVCIYMLSTNILLVNLLVAMFGYTVGTVQENNDQVWKFQRYFLVQEYCSRLNIPFPFIVFAYFYMVVKKCFKCCCKEKNMESSVCCFKNEDNETLAWEGVMKENYLVKINTKANDTSEEMRHRFRQLDTKLNDLKGLLKEIANKIK

SEQ ID NO: 26197 - protein, 267 aa, Artificial Sequence
  Synthetic polypeptide
LRVDFRENVCKCGYAQSQHMEGTQINQSEKWNYKKHTKEFPTDAFGDIQFETLGKKGKYIRLSCDTDAEILYELLTQHWHLKTPNLVISVTGGAKNFALKPRMRKIFSRLIYIAQSKGAWILTGGTHYGLMKYIGEVVRDNTISRSSEENIVAIGIAAWGMVSNRDTLIRNCDAEGYFLAQYLMDDFTRDPLYILDNNHTHLLLVDNGCHGHPTVEAKLRNQLEKYISERTIQDSNYGGKIPIVCFAQGGGKETLKSRRFGRRISVT

SEQ ID NO: 26198 - protein, 184 aa, Artificial Sequence
  Synthetic polypeptide
LRVDFRENVCKCGYAQSQHMEGTQINQSEKWNYKKHTKEFPTDAFGDIQFETLGKKGKYIRLSCDTDAEILYELLTQHWHLKTPNLVISVTGGAKNFALKPRMRKIFSRLIYIAQSKGAWILTGGTHYGLMKYIGEVVRDNTISRSSEENIVAIGIAAWGMVSNRDTLIRNCDAEVPVGQEEVC

SEQ ID NO: 26199 - protein, 77 aa, Artificial Sequence
  Synthetic polypeptide
KKSEEWLPGSEKEGLVGVGGGPEELLRGIFSSWLGLHGICQHSWTGTTKMFCISHCPEDCCHKEEAAAVHRTLQVAT

SEQ ID NO: 26200 - protein, 246 aa, Artificial Sequence
  Synthetic polypeptide
SSTTGKLIGDERNRKNGCQEVRRRDWLGLGVAQRNSSGGYFHRGLGYTASVNIHGPVQLRCFAFHIAQKIVATRKKQQLSIGPCKSLPNSPSHSSVCSAQVSAVHISQTSNGGGSLSDYSSSVPSTPSTSQKELRIDVPPTANTPTPVRKQSKRRSNLFTSRKGSDPDKEKKGLESRADSIGSGRAIPIKQGLPFFVLALTASTYLRPAGARARQSSPWPGPRGGQTSPHCAEGPQSAQLSGAMMN

SEQ ID NO: 26201 - protein, 21 aa, Artificial Sequence
  Synthetic polypeptide
DVLHFTLPRRLLPQGRSSSCP

SEQ ID NO: 26202 - protein, 645 aa, Artificial Sequence
  Synthetic polypeptide
SSTTGKLIGDERNRKNGCQEVRRRDWLGLGVAQRNSSGGYFHRGLGYTASVNIHGPVQLRCFAFHIAQKIVATRKKQQLSIGPCKSLPNSPSHSSVCSAQVSAVHISQTSNGGGSLSDYSSSVPSTPSTSQKELRIDVPPTANTPTPVRKQSKRRSNLFTSRKGSDPDKEKKGLESRADSIGSGRAIPIKQGMLLKRSGKSLNKEWKKKYVTLCDNGVLTYHPSLHDYMQNVHGKEIDLLRTTVKVPGKRPPRATSACAPISSPKTNGLSKDMSSLHISPNSDTGLGDSVCSSPSISSTTSPKLDPPPSPHANRKKHRRKKSTSNFKADGLSGTAEEQEENFEFIIVSLTGQTWHFEATTYEERDAWVQAIESQILASLQSCESSKNKSRLTSQSEAMALQSIRNMRGNSHCVDCETQNPNWASLNLGALMCIECSGIHRNLGTHLSRVRSLDLDDWPVELIKVMSSIGNELANSVWEESSQGRTKPSVDSTREEKERWIRAKYEQKLFLAPLPCTELSLGQHLLRATADEDLRTAILLLAHGSRDEVNETCGEGDGRTALHLACRKGNVVLAQLLIWYGVDVTARDAHGNTALAYARQASSQECIDVLLQYGCPDERFVLMATPNLSRRNNNRNNSSGRVPTII

SEQ ID NO: 26203 - protein, 698 aa, Artificial Sequence
  Synthetic polypeptide
SSTTGKLIGDERNRKNGCQEVRRRDWLGLGVAQRNSSGGYFHRGLGYTASVNIHGPVQLRCFAFHIAQKIVATRKKQQLSIGPCKSLPNSPSHSSVCSAQVSAVHISQTSNGGGSLSDYSSSVPSTPSTSQKELRIDVPPTANTPTPVRKQSKRRSNLFTSRKGSDPDKEKKGLESRADSIGSGRAIPIKQGMLLKRSGKSLNKEWKKKYVTLCDNGVLTYHPSLHDYMQNVHGKEIDLLRTTVKVPGKRPPRATSACAPISSPKTNGLSKDMSSLHISPNSGNVTSASGSQMASGISLVSFNSRPDGMHQRSYSVSSADQWSEATVIANSAISSDTGLGDSVCSSPSISSTTSPKLDPPPSPHANRKKHRRKKSTSNFKADGLSGTAEEQEENFEFIIVSLTGQTWHFEATTYEERDAWVQAIESQILASLQSCESSKNKSRLTSQSEAMALQSIRNMRGNSHCVDCETQNPNWASLNLGALMCIECSGIHRNLGTHLSRVRSLDLDDWPVELIKVMSSIGNELANSVWEESSQGRTKPSVDSTREEKERWIRAKYEQKLFLAPLPCTELSLGQHLLRATADEDLRTAILLLAHGSRDEVNETCGEGDGRTALHLACRKGNVVLAQLLIWYGVDVTARDAHGNTALAYARQASSQECIDVLLQYGCPDERFVLMATPNLSRRNNNRNNSSGRVPTII

SEQ ID NO: 26204 - protein, 50 aa, Artificial Sequence
  Synthetic polypeptide
TDACTVVELHQKMKWTDGRTDGRTDGWVDRYIIKQLPRRLLPQGRSSSCP

SEQ ID NO: 26205 - protein, 24 aa, Artificial Sequence
  Synthetic polypeptide
SNCPEDCCHKEEAAAVHRTLQVAT

SEQ ID NO: 26206 - protein, 186 aa, Artificial Sequence
  Synthetic polypeptide
IYNKAIAQKIVATRKKQQLSIGPCKSLPNSPSHSSVCSAQVSAVHISQTSNGGGSLSDYSSSVPSTPSTSQKELRIDVPPTANTPTPVRKQSKRRSNLFTSRKGSDPDKEKKGLESRADSIGSGRAIPIKQGLPFFVLALTASTYLRPAGARARQSSPWPGPRGGQTSPHCAEGPQSAQLSGAMMN

SEQ ID NO: 26207 - protein, 585 aa, Artificial Sequence
  Synthetic polypeptide
IYNKAIAQKIVATRKKQQLSIGPCKSLPNSPSHSSVCSAQVSAVHISQTSNGGGSLSDYSSSVPSTPSTSQKELRIDVPPTANTPTPVRKQSKRRSNLFTSRKGSDPDKEKKGLESRADSIGSGRAIPIKQGMLLKRSGKSLNKEWKKKYVTLCDNGVLTYHPSLHDYMQNVHGKEIDLLRTTVKVPGKRPPRATSACAPISSPKTNGLSKDMSSLHISPNSDTGLGDSVCSSPSISSTTSPKLDPPPSPHANRKKHRRKKSTSNFKADGLSGTAEEQEENFEFIIVSLTGQTWHFEATTYEERDAWVQAIESQILASLQSCESSKNKSRLTSQSEAMALQSIRNMRGNSHCVDCETQNPNWASLNLGALMCIECSGIHRNLGTHLSRVRSLDLDDWPVELIKVMSSIGNELANSVWEESSQGRTKPSVDSTREEKERWIRAKYEQKLFLAPLPCTELSLGQHLLRATADEDLRTAILLLAHGSRDEVNETCGEGDGRTALHLACRKGNVVLAQLLIWYGVDVTARDAHGNTALAYARQASSQECIDVLLQYGCPDERFVLMATPNLSRRNNNRNNSSGRVPTII

SEQ ID NO: 26208 - protein, 638 aa, Artificial Sequence
  Synthetic polypeptide
IYNKAIAQKIVATRKKQQLSIGPCKSLPNSPSHSSVCSAQVSAVHISQTSNGGGSLSDYSSSVPSTPSTSQKELRIDVPPTANTPTPVRKQSKRRSNLFTSRKGSDPDKEKKGLESRADSIGSGRAIPIKQGMLLKRSGKSLNKEWKKKYVTLCDNGVLTYHPSLHDYMQNVHGKEIDLLRTTVKVPGKRPPRATSACAPISSPKTNGLSKDMSSLHISPNSGNVTSASGSQMASGISLVSFNSRPDGMHQRSYSVSSADQWSEATVIANSAISSDTGLGDSVCSSPSISSTTSPKLDPPPSPHANRKKHRRKKSTSNFKADGLSGTAEEQEENFEFIIVSLTGQTWHFEATTYEERDAWVQAIESQILASLQSCESSKNKSRLTSQSEAMALQSIRNMRGNSHCVDCETQNPNWASLNLGALMCIECSGIHRNLGTHLSRVRSLDLDDWPVELIKVMSSIGNELANSVWEESSQGRTKPSVDSTREEKERWIRAKYEQKLFLAPLPCTELSLGQHLLRATADEDLRTAILLLAHGSRDEVNETCGEGDGRTALHLACRKGNVVLAQLLIWYGVDVTARDAHGNTALAYARQASSQECIDVLLQYGCPDERFVLMATPNLSRRNNNRNNSSGRVPTII

SEQ ID NO: 26209 - protein, 25 aa, Artificial Sequence
  Synthetic polypeptide
FLHFHLRRKERKAKRKRRRQRRIKI

SEQ ID NO: 26210 - protein, 240 aa, Artificial Sequence
  Synthetic polypeptide
QRSQDGRIGTAPAYSSQCERRRRRVISAFPSEKKGKKGKKKEKKAKKDKDLTADRTIESLYKELVEEGLLIQALKVNLSDYIGEYSYLGTTLRQVSIEPMPSLLDVRQLITLYGIWPLGSAAVHEKAPLVKSLLLAGPSGVGKKMLVHAICTETGANLFNLSSSNIAGKYPGKNGLQMMLHAVFKVARQLQPSVVWIEDTEKTFYKKVPNAEKMFTPSAGEVAALQKNLKRSTSRMNLNA

SEQ ID NO: 26211 - protein, 384 aa, Artificial Sequence
  Synthetic polypeptide
QRSQDGRIGTAPAYSSQCERRRRRVISAFPSEKKGKKGKKKEKKAKKDKDLTADRTIESLYKELVEEGLLIQALKVNLSDYIGEYSYLGTTLRQVSIEPMPSLLDVRQLITLYGIWPLGSAAVHEKAPLVKSLLLAGPSGVGKKMLVHAICTETGANLFNLSSSNIAGKYPGKNGLQMMLHAVFKVARQLQPSVVWIEDTEKTFYKKVPNAEKMNEPKRLKKHLPQILKLLKPDDRILIVGTTRRPFDAELQSFCKVYQKIILVPRPDYASRYVLWKQIIERNGGVLTSALNVSCLAKVTDGFTQGHIVEVVKGVLTDQRIRRQIHKPLTAVEFITAITSMNPVYKEEEESFKNWYAKTPLGKKRALAITGGSTEKAKDKGKRK

SEQ ID NO: 26212 - protein, 78 aa, Artificial Sequence
  Synthetic polypeptide
QRSQDGRIGTAPAYSSQCERRRRRVISAFPSEKKGKKGKKKEKKAKKDKDLTADRTIESLYKELVEEGLLIQALKVNL

SEQ ID NO: 26213 - protein, 46 aa, Artificial Sequence
  Synthetic polypeptide
RGGSPARCKTGGPRGGSRDPHEGAGAAAEGDLSGPKEILWAGYKMG

SEQ ID NO: 26214 - protein, 609 aa, Artificial Sequence
  Synthetic polypeptide
EAEARLAAKRAARAEAREIRMKELERQQKEIYQVQKKYYGLDTKWGDIEQWMEDSERYSRRSRRNTSASDEDERMSVGSRGSLRSQPDLEYGGPYAWTNGYDGELYGSQSLNRRSGRPSCLYSAARPSGSYRASVLDEGSFGGTRRGSTSGSRAPSEYSGHLNSSSRASSRASSARASPVVEERPEKDFTEKGSRNMPGLSAATLASLGGTSSRRGSGDTSISIDTEASIREIKELNELKDQIQDVEGKYMQGLKEMKDSLAEVEEKYKKAMVSNAQLDNEKTNFMYQVDTLKDMLLELEEQLAESRRQYEEKNKEFEREKHAHSILQFQFAEVKEALKQREEMLEEIRQLQQKQASSIREISDLQETIEWKDKKIGALERQKEFFDSVRSERDDLREEVVMLKEELKKHGIILNSEIATNGETSDTLNNVGYQGPTKMTKEELNALKSTGDGTLDIRLKKLVDERECLLEQIKKLKGQLEERQKIGKLDNLRSEDDVLENGTDMHVMDLQRDANRQISDLKFKLAKSEQEITALEQNVIRLESQVSRYKSAAENAEKIEDELKAEKRKLQRELRSALDKTEELEVSNGHLVKRLEKMKANRSALLSQQ

SEQ ID NO: 26215 - protein, 40 aa, Artificial Sequence
  Synthetic polypeptide
RGGSPARCKTGGPRGGSRDPHEGAGAAAEGGRRETRKRFY

SEQ ID NO: 26216 - protein, 731 aa, Artificial Sequence
  Synthetic polypeptide
EAEARLAAKRAARAEAREIRMKELERQQKEVEERPEKDFTEKGSRNMPGLSAATLASLGGTSSRRGSGDTSISIDTEASIREIKDSLAEVEEKYKKAMVSNAQLDNEKTNFMYQVDTLKDMLLELEEQLAESRRQYEEKNKEFEREKHAHSILQFQFAEVKEALKQREEMLEKHGIILNSEIATNGETSDTLNNVGYQGPTKMTKEELNALKSTGDGTLGRASEVEVKNEIVANVGKREILHNTEKEQHTEDTVKDCVDIEVFPAGENTEDQKSSEDTAPFLGTLAGATYEEQVQSQILESSSLPENTVQVESNEVMGAPDDRTRTPLEPSNCWSDLDGGNHTENVGEAAVTQVEEQAGTVASCPLGHSDDTVYHDDKCMVEVPQELETSTGHSLEKEFTNQEAAEPKEVPAHSTEVGRDHNEEEGEETGLRDEKPIKTEVPGSPAGTEGNCQEATGPSTVDTQNEPLDMKEPDEEKSDQQGEALDSSQKKTKNKKKKNKKKKSPVPVETLKDVKKELTYQNTDLSEIKEEEQVKSTDRKSAVEAQNEVTENPKQKIAAESSENVDCPENPKIKLDGKLDQEGDDVQTAAEEVLADGDTLDFEDDTVQSSGPRAGGEELDEGVAKDNAKIDGATQSSPAEPKSEDADRCTLPEHESPSQDISDACEAESTERCEMSEHPSQTVRKALDSNSLENDDLSAPGREPGHFNPESREDTRGGNEKGKSKEDCTMS

SEQ ID NO: 26217 - protein, 33 aa, Artificial Sequence
  Synthetic polypeptide
RGGSPARCKTGGPRGGSRDPHEGAGAAAEGGRQ

SEQ ID NO: 26218 - protein, 763 aa, Artificial Sequence
  Synthetic polypeptide
EAEARLAAKRAARAEAREIRMKELERQQKEEDSERYSRRSRRNTSASDEDERMSVGSRGSLRVEERPEKDFTEKGSRNMPGLSAATLASLGGTSSRRGSGDTSISIDTEASIREIKDSLAEVEEKYKKAMVSNAQLDNEKTNFMYQVDTLKDMLLELEEQLAESRRQYEEKNKEFEREKHAHSILQFQFAEVKEALKQREEMLEKHGIILNSEIATNGETSDTLNNVGYQGPTKMTKEELNALKSTGDGTLGRASEVEVKNEIVANVGKREILHNTEKEQHTEDTVKDCVDIEVFPAGENTEDQKSSEDTAPFLGTLAGATYEEQVQSQILESSSLPENTVQVESNEVMGAPDDRTRTPLEPSNCWSDLDGGNHTENVGEAAVTQVEEQAGTVASCPLGHSDDTVYHDDKCMVEVPQELETSTGHSLEKEFTNQEAAEPKEVPAHSTEVGRDHNEEEGEETGLRDEKPIKTEVPGSPAGTEGNCQEATGPSTVDTQNEPLDMKEPDEEKSDQQGEALDSSQKKTKNKKKKNKKKKSPVPVETLKDVKKELTYQNTDLSEIKEEEQVKSTDRKSAVEAQNEVTENPKQKIAAESSENVDCPENPKIKLDGKLDQEGDDVQTAAEEVLADGDTLDFEDDTVQSSGPRAGGEELDEGVAKDNAKIDGATQSSPAEPKSEDADRCTLPEHESPSQDISDACEAESTERCEMSEHPSQTVRKALDSNSLENDDLSAPGREPGHFNPESREDTRGGNEKGKSKEDCTMS

SEQ ID NO: 26219 - protein, 128 aa, Artificial Sequence
  Synthetic polypeptide
EAEARLAAKRAARAEAREIRMKELERQQKEEDSERYSRRSRRNTSASDEDERMSVGSRGSLRTNGYDGELYGSQSLNRRSGRVEERPEKDFTEKGSRNMPGLSAATLASLGGTSSRRGSGDTSISIDT

SEQ ID NO: 26220 - protein, 787 aa, Artificial Sequence
  Synthetic polypeptide
EAEARLAAKRAARAEAREIRMKELERQQKEEDSERYSRRSRRNTSASDEDERMSVGSRGSLRVEERPEKDFTEKGSRNMPGLSAATLASLGGTSSRRGSGDTSISIDTEASIREIKELNELKDQIQDVEGKYMQGLKEMKDSLAEVEEKYKKAMVSNAQLDNEKTNFMYQVDTLKDMLLELEEQLAESRRQYEEKNKEFEREKHAHSILQFQFAEVKEALKQREEMLEKHGIILNSEIATNGETSDTLNNVGYQGPTKMTKEELNALKSTGDGTLGRASEVEVKNEIVANVGKREILHNTEKEQHTEDTVKDCVDIEVFPAGENTEDQKSSEDTAPFLGTLAGATYEEQVQSQILESSSLPENTVQVESNEVMGAPDDRTRTPLEPSNCWSDLDGGNHTENVGEAAVTQVEEQAGTVASCPLGHSDDTVYHDDKCMVEVPQELETSTGHSLEKEFTNQEAAEPKEVPAHSTEVGRDHNEEEGEETGLRDEKPIKTEVPGSPAGTEGNCQEATGPSTVDTQNEPLDMKEPDEEKSDQQGEALDSSQKKTKNKKKKNKKKKSPVPVETLKDVKKELTYQNTDLSEIKEEEQVKSTDRKSAVEAQNEVTENPKQKIAAESSENVDCPENPKIKLDGKLDQEGDDVQTAAEEVLADGDTLDFEDDTVQSSGPRAGGEELDEGVAKDNAKIDGATQSSPAEPKSEDADRCTLPEHESPSQDISDACEAESTERCEMSEHPSQTVRKALDSNSLENDDLSAPGREPGHFNPESREDTRGGNEKGKSKEDCTMS

SEQ ID NO: 26221 - protein, 48 aa, Artificial Sequence
  Synthetic polypeptide
RPEGGSPARCKTGGPRGGSRDPHEGAGAAAEGDLSGPKEILWAGYKMG

SEQ ID NO: 26222 - protein, 627 aa, Artificial Sequence
  Synthetic polypeptide
RPTVPHPQFQNPISFEDRKAEARLAAKRAARAEAREIRMKELERQQKEIYQVQKKYYGLDTKWGDIEQWMEDSERYSRRSRRNTSASDEDERMSVGSRGSLRSQPDLEYGGPYAWTNGYDGELYGSQSLNRRSGRPSCLYSAARPSGSYRASVLDEGSFGGTRRGSTSGSRAPSEYSGHLNSSSRASSRASSARASPVVEERPEKDFTEKGSRNMPGLSAATLASLGGTSSRRGSGDTSISIDTEASIREIKELNELKDQIQDVEGKYMQGLKEMKDSLAEVEEKYKKAMVSNAQLDNEKTNFMYQVDTLKDMLLELEEQLAESRRQYEEKNKEFEREKHAHSILQFQFAEVKEALKQREEMLEEIRQLQQKQASSIREISDLQETIEWKDKKIGALERQKEFFDSVRSERDDLREEVVMLKEELKKHGIILNSEIATNGETSDTLNNVGYQGPTKMTKEELNALKSTGDGTLDIRLKKLVDERECLLEQIKKLKGQLEERQKIGKLDNLRSEDDVLENGTDMHVMDLQRDANRQISDLKFKLAKSEQEITALEQNVIRLESQVSRYKSAAENAEKIEDELKAEKRKLQRELRSALDKTEELEVSNGHLVKRLEKMKANRSALLSQQ

SEQ ID NO: 26223 - protein, 25 aa, Artificial Sequence
  Synthetic polypeptide
ALKTGRRKPGSLQNGRPARRLARSA

SEQ ID NO: 26224 - protein, 42 aa, Artificial Sequence
  Synthetic polypeptide
RPEGGSPARCKTGGPRGGSRDPHEGAGAAAEGGRRETRKRFY

SEQ ID NO: 26225 - protein, 749 aa, Artificial Sequence
  Synthetic polypeptide
RPTVPHPQFQNPISFEDRKAEARLAAKRAARAEAREIRMKELERQQKEVEERPEKDFTEKGSRNMPGLSAATLASLGGTSSRRGSGDTSISIDTEASIREIKDSLAEVEEKYKKAMVSNAQLDNEKTNFMYQVDTLKDMLLELEEQLAESRRQYEEKNKEFEREKHAHSILQFQFAEVKEALKQREEMLEKHGIILNSEIATNGETSDTLNNVGYQGPTKMTKEELNALKSTGDGTLGRASEVEVKNEIVANVGKREILHNTEKEQHTEDTVKDCVDIEVFPAGENTEDQKSSEDTAPFLGTLAGATYEEQVQSQILESSSLPENTVQVESNEVMGAPDDRTRTPLEPSNCWSDLDGGNHTENVGEAAVTQVEEQAGTVASCPLGHSDDTVYHDDKCMVEVPQELETSTGHSLEKEFTNQEAAEPKEVPAHSTEVGRDHNEEEGEETGLRDEKPIKTEVPGSPAGTEGNCQEATGPSTVDTQNEPLDMKEPDEEKSDQQGEALDSSQKKTKNKKKKNKKKKSPVPVETLKDVKKELTYQNTDLSEIKEEEQVKSTDRKSAVEAQNEVTENPKQKIAAESSENVDCPENPKIKLDGKLDQEGDDVQTAAEEVLADGDTLDFEDDTVQSSGPRAGGEELDEGVAKDNAKIDGATQSSPAEPKSEDADRCTLPEHESPSQDISDACEAESTERCEMSEHPSQTVRKALDSNSLENDDLSAPGREPGHFNPESREDTRGGNEKGKSKEDCTMS

SEQ ID NO: 26226 - protein, 35 aa, Artificial Sequence
  Synthetic polypeptide
RPEGGSPARCKTGGPRGGSRDPHEGAGAAAEGGRQ

SEQ ID NO: 26227 - protein, 781 aa, Artificial Sequence
  Synthetic polypeptide
RPTVPHPQFQNPISFEDRKAEARLAAKRAARAEAREIRMKELERQQKEEDSERYSRRSRRNTSASDEDERMSVGSRGSLRVEERPEKDFTEKGSRNMPGLSAATLASLGGTSSRRGSGDTSISIDTEASIREIKDSLAEVEEKYKKAMVSNAQLDNEKTNFMYQVDTLKDMLLELEEQLAESRRQYEEKNKEFEREKHAHSILQFQFAEVKEALKQREEMLEKHGIILNSEIATNGETSDTLNNVGYQGPTKMTKEELNALKSTGDGTLGRASEVEVKNEIVANVGKREILHNTEKEQHTEDTVKDCVDIEVFPAGENTEDQKSSEDTAPFLGTLAGATYEEQVQSQILESSSLPENTVQVESNEVMGAPDDRTRTPLEPSNCWSDLDGGNHTENVGEAAVTQVEEQAGTVASCPLGHSDDTVYHDDKCMVEVPQELETSTGHSLEKEFTNQEAAEPKEVPAHSTEVGRDHNEEEGEETGLRDEKPIKTEVPGSPAGTEGNCQEATGPSTVDTQNEPLDMKEPDEEKSDQQGEALDSSQKKTKNKKKKNKKKKSPVPVETLKDVKKELTYQNTDLSEIKEEEQVKSTDRKSAVEAQNEVTENPKQKIAAESSENVDCPENPKIKLDGKLDQEGDDVQTAAEEVLADGDTLDFEDDTVQSSGPRAGGEELDEGVAKDNAKIDGATQSSPAEPKSEDADRCTLPEHESPSQDISDACEAESTERCEMSEHPSQTVRKALDSNSLENDDLSAPGREPGHFNPESREDTRGGNEKGKSKEDCTMS

SEQ ID NO: 26228 - protein, 146 aa, Artificial Sequence
  Synthetic polypeptide
RPTVPHPQFQNPISFEDRKAEARLAAKRAARAEAREIRMKELERQQKEEDSERYSRRSRRNTSASDEDERMSVGSRGSLRTNGYDGELYGSQSLNRRSGRVEERPEKDFTEKGSRNMPGLSAATLASLGGTSSRRGSGDTSISIDT

SEQ ID NO: 26229 - protein, 805 aa, Artificial Sequence
  Synthetic polypeptide
RPTVPHPQFQNPISFEDRKAEARLAAKRAARAEAREIRMKELERQQKEEDSERYSRRSRRNTSASDEDERMSVGSRGSLRVEERPEKDFTEKGSRNMPGLSAATLASLGGTSSRRGSGDTSISIDTEASIREIKELNELKDQIQDVEGKYMQGLKEMKDSLAEVEEKYKKAMVSNAQLDNEKTNFMYQVDTLKDMLLELEEQLAESRRQYEEKNKEFEREKHAHSILQFQFAEVKEALKQREEMLEKHGIILNSEIATNGETSDTLNNVGYQGPTKMTKEELNALKSTGDGTLGRASEVEVKNEIVANVGKREILHNTEKEQHTEDTVKDCVDIEVFPAGENTEDQKSSEDTAPFLGTLAGATYEEQVQSQILESSSLPENTVQVESNEVMGAPDDRTRTPLEPSNCWSDLDGGNHTENVGEAAVTQVEEQAGTVASCPLGHSDDTVYHDDKCMVEVPQELETSTGHSLEKEFTNQEAAEPKEVPAHSTEVGRDHNEEEGEETGLRDEKPIKTEVPGSPAGTEGNCQEATGPSTVDTQNEPLDMKEPDEEKSDQQGEALDSSQKKTKNKKKKNKKKKSPVPVETLKDVKKELTYQNTDLSEIKEEEQVKSTDRKSAVEAQNEVTENPKQKIAAESSENVDCPENPKIKLDGKLDQEGDDVQTAAEEVLADGDTLDFEDDTVQSSGPRAGGEELDEGVAKDNAKIDGATQSSPAEPKSEDADRCTLPEHESPSQDISDACEAESTERCEMSEHPSQTVRKALDSNSLENDDLSAPGREPGHFNPESREDTRGGNEKGKSKEDCTMS

SEQ ID NO: 26230 - protein, 65 aa, Artificial Sequence
  Synthetic polypeptide
GQVWWLMPVIPALWGGQDGQIACGQEFETSVGSMPPKVKCLTKIWHPNITETGEICLSLLREHSI

SEQ ID NO: 26231 - protein, 28 aa, Artificial Sequence
  Synthetic polypeptide
SQHFGEAKMGRSLVVRSLRPAWAACLPK

SEQ ID NO: 26232 - protein, 37 aa, Artificial Sequence
  Synthetic polypeptide
DQRGQHASQSEMPDQDLAPQHHRDRGNMSEFIERTFN

SEQ ID NO: 26233 - protein, 125 aa, Artificial Sequence
  Synthetic polypeptide
GQVWWLMPVIPALWGGQDGQIACGQEFETSVGSMPPKVKCLTKIWHPNITETGEICLSLLREHSIDGTGWAPTRTLKDVVWGLNSLFTDLLNFDDPLNIEAAEHHLRDKEDFRNKVDDYIKRYAR

SEQ ID NO: 26234 - protein, 71 aa, Artificial Sequence
  Synthetic polypeptide
GQVWWLMPVIPALWGGQDGQIACGQEFETSVGSMPPKVKCLTKIWHPNITETGEICLSLLREHSIDGTGWA

SEQ ID NO: 26235 - protein, 111 aa, Artificial Sequence
  Synthetic polypeptide
GQVWWLMPVIPALWGGQDGQIACGQEFETSVGSMPPKVKCLTKIWHPNITETGEICLSLLREHSIDGTGWAPTRTLKDVVWGLNSLFTDLLNFDDPLNIEAAEHHLRDKED

SEQ ID NO: 26236 - protein, 104 aa, Artificial Sequence
  Synthetic polypeptide
GQVWWLMPVIPALWGGQDGQIACGQEFETSVGSMPPKVKCLTKIWHPNITETGEICLSLLREHSIDGTGWAPTRTLKDVVWGLNSLFTEDFRNKVDDYIKRYAR

SEQ ID NO: 26237 - protein, 63 aa, Artificial Sequence
  Synthetic polypeptide
GQVWWLMPVIPALWGGQDGQIACGQEFETSVGSMPPKVKCLTKIWHPNITETGEICLRMSFGD

SEQ ID NO: 26238 - protein, 36 aa, Artificial Sequence
  Synthetic polypeptide
DQRGQHASQSEMPDQDLAPQHHRDRGNMSEDVVWGL

SEQ ID NO: 26239 - protein, 60 aa, Artificial Sequence
  Synthetic polypeptide
GQVWWLMPVIPALWGGQDGQIACGQEFETSVGSMPPKVKCLTKIWHPNITETGEICLRIF

SEQ ID NO: 26240 - protein, 33 aa, Artificial Sequence
  Synthetic polypeptide
DQRGQHASQSEMPDQDLAPQHHRDRGNMSEDLL

SEQ ID NO: 26241 - protein, 103 aa, Artificial Sequence
  Synthetic polypeptide
GQVWWLMPVIPALWGGQDGQIACGQEFETSVGSMPPKVKCLTKIWHPNITETGEICLSLLREHSIDGTGWAPTRTLKDVVWGLNSLFTDLLNFDDPLNIEAAE

SEQ ID NO: 26242 - protein, 205 aa, Artificial Sequence
  Synthetic polypeptide
PVDQERNGLARQKTLRQHLLYSSQMLQGKLCCHAYPHLQRWSGKPRLPPIQAVTRTENTPMIAGLGKAAELVTQNCEAYEAHMRDVRDYLEERLEAEFGQKRIHLNSQFPGTQRLPNTCNFSIRGPRLQGHVVLAQCRVLMASVGAACHSDHGDQPSPVLLSYGVPFDVARNALRLSVGRSTTRAEVDLVVQDLKQAVAQLEDQA

SEQ ID NO: 26243 - protein, 7 aa, Artificial Sequence
  Synthetic polypeptide
QGQRTPQ

SEQ ID NO: 26244 - protein, 93 aa, Artificial Sequence
  Synthetic polypeptide
GQTQKCPNQSLSSLASGPGKEWPSKTENFETTLALLQPDATGEIVLPRLSTPAKMEWETQTSTNTGCNKDREHPNDCWPWEGRGAGDPELRGL

SEQ ID NO: 26245 - protein, 77 aa, Artificial Sequence
  Synthetic polypeptide
PVDQERNGLARQKTLRQHLLYSSQMLQGKLCCHAYPHLQRWSGKPRLPPIQAVTRTENTPMIAGLGKVSPGELEEMS

SEQ ID NO: 26246 - protein, 85 aa, Artificial Sequence
  Synthetic polypeptide
GQTQKCPNQSLSSLASGPGKEWPSKTENFETTLALLQPDATGEIVLPRLSTPAKMEWETQTSTNTGCNKDREHPNDCWPWEGEPW

SEQ ID NO: 26247 - protein, 167 aa, Artificial Sequence
  Synthetic polypeptide
PVDQERNGLARQKTLRQHLLYSSQMLQGKLCCHAYPHLQRWSGKPRLPPIQAVTRTENTPMIAGLGKAEFGQKRIHLNSQFPGTQRLPNTCNFSIRGPRLQGHVVLAQCRVLMASVGAACHSDHGDQGFFSQNALAFGHTSHVDICIGVIFSGITFLMCGFTVQGTT

SEQ ID NO: 26248 - protein, 82 aa, Artificial Sequence
  Synthetic polypeptide
GQTQKCPNQSLSSLASGPGKEWPSKTENFETTLALLQPDATGEIVLPRLSTPAKMEWETQTSTNTGCNKDREHPNDCWPWEG

SEQ ID NO: 26249 - protein, 171 aa, Artificial Sequence
  Synthetic polypeptide
PVDQERNGLARQKTLRQHLLYSSQMLQGKLCCHAYPHLQRWSGKPRLPPIQAVTRTENTPMIAGLGKAAELVTQNCEAYEAHMRDVRDYLEERLEAEFGQKRIHLNSQFPGTQRLPNTCNFSIRGPRLQGHVVLAQCRVLMASVGAACHSDHGDHSSCSSVSPSPGRPQCC

SEQ ID NO: 26250 - protein, 140 aa, Artificial Sequence
  Synthetic polypeptide
PVDQERNGLARQKTLRQHLLYSSQMLQGKLCCHAYPHLQRWSGKPRLPPIQAVTRTENTPMIAGLGKAAELVTQNCEAYEAHMRDVRDYLEERLEAEFGQKRIHLNSQFPGTQRLPNTCNFSIRGPRLQGDGPSPWSFRV

SEQ ID NO: 26251 - protein, 32 aa, Artificial Sequence
  Synthetic polypeptide
VHVCKPSTLGSSSGRIAGAPEFETSLGNIGSG

SEQ ID NO: 26252 - protein, 32 aa, Artificial Sequence
  Synthetic polypeptide
TQHVGKLKWEDCWSPGVRDQPGQYRFRISLRC

SEQ ID NO: 26253 - protein, 34 aa, Artificial Sequence
  Synthetic polypeptide
MNKGRGWNQAGLEQVVAPRARLEDHRHGRGPCLP

SEQ ID NO: 26254 - protein, 789 aa, Artificial Sequence
  Synthetic polypeptide
TKAGAGIRQGLSKSWLHVLGWKTTDMEGAHASLSLEDEVSGAGSRQRPLEGKGGETPAAEEPGSLKNYAVFATRDVSAAPEKEEEEAEGPLRAQDLRESYIQLVQGVQEWQDGCMYQGEFGLNMKLGYGKFSWPTGESYHGQFYRDHCHGLGTYMWPDGSSFTGTFYLSHREGYGTMYMKTRLFQTHCHNDIVNLLLDCGADVNKCSDEGLTALSMCFLLHYPAQSFKPNVAERTIPEPQEPPKFPVVPILSSSFMDTNLESLYYEVNVPSQGSYELRPPPAPLLLPRVSGSHEGGHFQDTGQCGGSIDHRSSSLKGDSPLVKGSLGHVESGLEDVLGNTDRGSLCSAETKFESNVCVCDFSIELSQAMLERSAQSHSLLKMASPSPCTSSFDKGTMRRMALSMIERRKRWRTIKLLLRRGADPNLCCVPMQVLFLAVKAGDVDGVRLLLEHGARTDICFPPQLSTLTPLHIAAALPGEEGVQIVELLLHAITDVDAKASDEDDTYKPGKLDLLPSSLKLSNEPGPPQAYYSTDTALPEEGGRTALHMACEREDDNKVVKELLTQGADPNLPLTKGLGSALCVACDLTYEHQRNMDSKLALIDRLISHGADILKPVMLRQGEKEAVGTAVDYGYFRFFQDRRIARCPFHTLMPAERETFLARKRLLEYMGLQLRQAVFAKESQWDPTWLYLCKRAELIPSHRMKKKGPSLPRGLDVKEQGQIPFFKFCYQCGRSIGVRLLPCPRCYGILTCSKYCKTKAWTEFHKKDCGDLVAIVTQLEQVSRRREEFQ

SEQ ID NO: 26255 - protein, 208 aa, Artificial Sequence
  Synthetic polypeptide
RNKYMKRWLVDVNIKLWKNGFTVNDDFRSYSDGASQQFLNSIKKGELPSELQGIFDKEEVDVKVEDKKNEICLSTKPVFQPFSGQGHRLGSATPKIVSKAKNIEVENKNNLSAVPLNNLEPITNIQIWLANGKRIVQKFNITHRVSHIKDFIEKYQGSQRSPPFSLATALPVLRLLDETLTLEEADLQNAVIIQRLQKTASFRELSEH

SEQ ID NO: 26256 - protein, 4 aa, Artificial Sequence
  Synthetic polypeptide
KDGW

SEQ ID NO: 26257 - protein, 53 aa, Artificial Sequence
  Synthetic polypeptide
QVYEKMVGRCKYKIMEKRIHRQRRFQKLFRWCQSAVFELHQKGGITFRITGNF

SEQ ID NO: 26258 - protein, 155 aa, Artificial Sequence
  Synthetic polypeptide
RNKYMKRWLVDVNIKLWKNGFTVNDDFRSYSDGASQQFLNSIKKGELPSELQGIFDKEEVDVKVEDKKNEICLSTKPVFQPFSGQGHRLGRVSHIKDFIEKYQGSQRSPPFSLATALPVLRLLDETLTLEEADLQNAVIIQRLQKTASFRELSEH

SEQ ID NO: 26259 - protein, 922 aa, Artificial Sequence
  Synthetic polypeptide
AEVGESSSALKLRRKKPSSPVGGDHPVPDACLSAPCHNGGTCVDADQGYVCECPEGFMGLDCRERVPDDCECRNGGRCLGANTTLCQCPLGFFGLLCEFEITAMPCNMNTQCPDGGYCMEHGGSYLCVCHTDHNASHSLPSPCDSDPCFNGGSCDAHDDSYTCECPRGFHGKHCEKARPHLCSSGPCRNGGTCKEAGGEYHCSCPYRFTGRHCEIGKPDSCASGPCHNGGTCFHYIGKYKCDCPPGFSGRHCEIAPSPCFRSPCVNGGTCEDRDTDFFCHCQAGYMGRRCQAEVDCGPPEEVKHATLRFNGTRLGAVALYACDRGYSLSAPSRIRVCQPHGVWSEPPQCLEIDECRSQPCLHGGSCQDRVAGYLCLCSTGYEGAHCELERDECRAHPCRNGGSCRNLPGAYVCRCPAGFVGVHCETEVDACDSSPCQHGGRCESGGGAYLCVCPESFFGYHCETVSDPCFSSPCGGRGYCLASNGSHSCTCKVGYTGEDCAKELFPPTALKMERVEESGVSISWNPPNGPAARQMLDGYAVTYVSSDGSYRRTDFVDRTRSSHQLQALAAGRAYNISVFSVKRNSNNKNDISRPAVLLARTRPRPVEGFEVTNVTASTISVQWALHRIRHATVSGVRVSIRHPEALRDQATDVDRSVDRFTFRALLPGKRYTIQLTTLSGLRGEEHPTESLATAPTHVWTRPLPPANLTAARVTATSAHVVWDAPTPGSLLEAYVINVTTSQSTKSRYVPNGKLASYTVRDLLPGRRYQLSVIAVQSTELGPQHSEPAHLYIITSPRDGADRRWHQGGHHPRVLKNRPPPARLPELRLLNDHSAPETPTQPPRFSELVDGRGRVSARFGGSPSKAATVRSQPTASAQLENMEEAPKRVSLALQLPEHGSKDIGSESAALVGTLGLTDCSQGP

SEQ ID NO: 26260 - protein, 107 aa, Artificial Sequence
  Synthetic polypeptide
QKLGNPQVPLNCEGRNLPLQLEETIQCQTPASRPLATMGAPVWMRTRATCASAPKASWAWTAGRESPMTVSAATEADAWAPTPPSASAPWDSLGFSVNLKSQPCPAT

SEQ ID NO: 26261 - protein, 57 aa, Artificial Sequence
  Synthetic polypeptide
TAKEETFLSSWRRPSSARRLPLGPLPQWGHLCGCGPGLRVRVPRRLHGPGLQGESPR

SEQ ID NO: 26262 - protein, 978 aa, Artificial Sequence
  Synthetic polypeptide
AEVGESSSALKLRRKKPSSPVGGDHPVPDACLSAPCHNGGTCVDADQGYVCECPEGFMGLDCRERVPDDCECRNGGRCLGANTTLCQCPLGFFGLLCEFEITAMPCNMNTQCPDGGYCMEHGGSYLCVCHTDHNASHSLPSPCDSDPCFNGGSCDAHDDSYTCECPRGFHGKHCEKARPHLCSSGPCRNGGTCKEAGGEYHCSCPYRFTGRHCEIGKPDSCASGPCHNGGTCFHYIGKYKCDCPPGFSGRHCEIAPSPCFRSPCVNGGTCEDRDTDFFCHCQAGYMGRRCQAEVDCGPPEEVKHATLRFNGTRLGAVALYACDRGYSLSAPSRIRVCQPHGVWSEPPQCLEIDECRSQPCLHGGSCQDRVAGYLCLCSTGYEGAHCELERDECRAHPCRNGGSCRNLPGAYVCRCPAGFVGVHCETEVDACDSSPCQHGGRCESGGGAYLCVCPESFFGYHCETVSDPCFSSPCGGRGYCLASNGSHSCTCKVGYTGEDCAKELFPPTALKMERVEESGVSISWNPPNGPAARQMLDGYAVTYVSSDGSYRRTDFVDRTRSSHQLQALAAGRAYNISVFSVKRNSNNKNDISRPAVLLARTRPRPVEGFEVTNVTASTISVQWALHRIRHATVSGVRVSIRHPEALRDQATDVDRSVDRFTFRALLPGKRYTIQLTTLSGLRGEEHPTESLATAPTHVWTRPLPPANLTAARVTATSAHVVWDAPTPGSLLEAYVINVTTSQSTKSRYVPNGKLASYTVRDLLPGRRYQLSVIAVQSTELGPQHSEPAHLYIITSPRDGADRRWHQGGHHPRVLKNRPPPARLPELRLLNDHSAPETPTQPPRFSELVDGRGRVSARFGGSPSKAATVRSHVPGNCSENPCQNGGTCVPGADAHSCDCGPGFKGRRCELACIKVSRPCTRLFSETKAFPVWEGGVCHHVYKRVYRVHQDICFKESCESTSLKKTPNRKQSKSQTLEKS

SEQ ID NO: 26263 - protein, 950 aa, Artificial Sequence
  Synthetic polypeptide
AEVGESSSALKLRRKKPSSPVGGDHPVPDACLSAPCHNGGTCVDADQGYVCECPEGFMGLDCRERVPDDCECRNGGRCLGANTTLCQCPLGFFGLLCEFEITAMPCNMNTQCPDGGYCMEHGGSYLCVCHTDHNASHSLPSPCDSDPCFNGGSCDAHDDSYTCECPRGFHGKHCEKARPHLCSSGPCRNGGTCKEAGGEYHCSCPYRFTGRHCEIGKPDSCASGPCHNGGTCFHYIGKYKCDCPPGFSGRHCEIAPSPCFRSPCVNGGTCEDRDTDFFCHCQAGYMGRRCQAEVDCGPPEEVKHATLRFNGTRLGAVALYACDRGYSLSAPSRIRVCQPHGVWSEPPQCLEIDECRSQPCLHGGSCQDRVAGYLCLCSTGYEGAHCELERDECRAHPCRNGGSCRNLPGAYVCRCPAGFVGVHCETEVDACDSSPCQHGGRCESGGGAYLCVCPESFFGYHCETVSDPCFSSPCGGRGYCLASNGSHSCTCKVGYTGEDCAKELFPPTALKMERVEESGVSISWNPPNGPAARQMLDGYAVTYVSSDGSYRRTDFVDRTRSSHQLQALAAGRAYNISVFSVKRNSNNKNDISRPAVLLARTRPRPVEGFEVTNVTASTISVQWALHRIRHATVSGVRVSIRHPEALRDQATDVDRSVDRFTFRALLPGKRYTIQLTTLSGLRGEEHPTESLATAPTHVWTRPLPPANLTAARVTATSAHVVWDAPTPGSLLEAYVINVTTSQSTKSRYVPNGKLASYTVRDLLPGRRYQLSVIAVQSTELGPQHSEPAHLYIITSPRDGADRRWHQGGHHPRVLKNRPPPARLPELRLLNDHSAPETPTQPPRFSELVDGRGRVSARFGGSPSKAATVRSHVPGNCSENPCQNGGTCVPGADAHSCDCGPGFKGRRCELACIKVSRPCTRLFSETKAFPVWEGGVCHHVKQSKSQTLEKS

SEQ ID NO: 26264 - protein, 1011 aa, Artificial Sequence
  Synthetic polypeptide
AEVGESSSALKLRRKKPSSPVGGDHPVPDACLSAPCHNGGTCVDADQGYVCECPEGFMGLDCRERVPDDCECRNGGRCLGANTTLCQCPLGFFGLLCEFEITAMPCNMNTQCPDGGYCMEHGGSYLCVCHTDHNASHSLPSPCDSDPCFNGGSCDAHDDSYTCECPRGFHGKHCEKARPHLCSSGPCRNGGTCKEAGGEYHCSCPYRFTGRHCEIGKPDSCASGPCHNGGTCFHYIGKYKCDCPPGFSGRHCEIAPSPCFRSPCVNGGTCEDRDTDFFCHCQAGYMGRRCQAEVDCGPPEEVKHATLRFNGTRLGAVALYACDRGYSLSAPSRIRVCQPHGVWSEPPQCLEIDECRSQPCLHGGSCQDRVAGYLCLCSTGYEGAHCELERDECRAHPCRNGGSCRNLPGAYVCRCPAGFVGVHCETEVDACDSSPCQHGGRCESGGGAYLCVCPESFFGYHCETVSDPCFSSPCGGRGYCLASNGSHSCTCKVGYTGEDCAKELFPPTALKMERVEESGVSISWNPPNGPAARQMLDGYAVTYVSSDGSYRRTDFVDRTRSSHQLQALAAGRAYNISVFSVKRNSNNKNDISRPAVLLARTRPRPVEGFEVTNVTASTISVQWALHRIRHATVSGVRVSIRHPEALRDQATDVDRSVDRFTFRALLPGKRYTIQLTTLSGLRGEEHPTESLATAPTHVWTRPLPPANLTAARVTATSAHVVWDAPTPGSLLEAYVINVTTSQSTKSRYVPNGKLASYTVRDLLPGRRYQLSVIAVQSTELGPQHSEPAHLYIITSPRDGADRRWHQGGHHPRVLKNRPPPARLPELRLLNDHSAPETPTQPPRFSELVDGRGRVSARFGGSPSKAATVRSQPTASAQLENMEEAPKRVSLALQLPEHGSKDIGNVPGNCSENPCQNGGTCVPGADAHSCDCGPGFKGRRCELACIKVSRPCTRLFSETKAFPVWEGGVCHHVYKRVYRVHQDICFKESCESTSLKKTPNRKQSKSQTLEKS

SEQ ID NO: 26265 - protein, 201 aa, Artificial Sequence
  Synthetic polypeptide
AEVGESSSALKLRRKKPSSPVGGDHPVPDACLSAPCHNGGTCVDADQGYVCECPEGFMGLDCRERVPDDCECRNGGRCLGANTTLCQCPLGFFGLLCEFEITAMPCNMNTQCPDGGYCMEHGGSYLCVCHTDHNASHSLPSPCDSDPCFNGGSCDAHDDSYTCECPRGFHGKHCEKARPHLCSSGPCRNGGTCKEAGGEYH

SEQ ID NO: 26266 - protein, 212 aa, Artificial Sequence
  Synthetic polypeptide
AEVGESSSALKLRRKKPSSPVGGDHPVPDACLSAPCHNGGTCVDADQGYVCECPEGFMGLDCRERVPDDCECRNGGRCLGANTTLCQCPLGFFGLLCEFEITAMPCNMNTQCPDGGYCMEHGGSYLCVCHTDHNASHSLPSPCDSDPCFNGGSCDAHDDSYTCECPRGFHGKHCEKGMAGRGVRAGVSTLESARGPPSCFSAVSLLVSRIAD

SEQ ID NO: 26267 - protein, 25 aa, Artificial Sequence
  Synthetic polypeptide
DLARWLTPVIPALWEAESKPYQRLH

SEQ ID NO: 26268 - protein, 72 aa, Artificial Sequence
  Synthetic polypeptide
SQHFGRPRVSHIKDFIEKYQGSQRSPPFSLATALPVLRLLDETLTLEEADLQNAVIIQRLQKTASFRELSEH

SEQ ID NO: 26269 - protein, 17 aa, Artificial Sequence
  Synthetic polypeptide
PGTVAHACNPSTLGGRE

SEQ ID NO: 26270 - protein, 47 aa, Artificial Sequence
  Synthetic polypeptide
KCCHFLRLGHKRHYGPPPCLFSNYSLWRKPAVMSREHSSSLTGKPTK

SEQ ID NO: 26271 - protein, 356 aa, Artificial Sequence
  Synthetic polypeptide
VIKGIMAPHLASSQITHSGGSQLSCQENTQAALQGSPPSESGLGKSTLINSLFLTDLYPERVIPGAAEKIERTVQIEASTVEIEERGVKLRLTVVDTPGYGDAINCRDCFKTIISYIDEQFERYLHDESGLNRRHIIDNRVHCCFYFISPFGHGLKPLDVAFMKAIHNKVNIVPVIAKADTLTLKERERLKKRILDEIEEHNIKIYHLPDAESDEDEDFKEQTRLLKASIPFSVVGSNQLIEAKGKKVRGRLYPWGVVEVENPEHNDFLKLRTMLITHMQDLQEVTQDLHYENFRSERLKRGGRKVENEDMNKDQILLEKEAELRRMQEMIARMQAQMQMQMQGGDGDGGALGHHV

SEQ ID NO: 26272 - protein, 40 aa, Artificial Sequence
  Synthetic polypeptide
KALWPPTLPLLKLLTLEEASCHVKRTLKQPYREAHQVNQV

SEQ ID NO: 26273 - protein, 219 aa, Artificial Sequence
  Synthetic polypeptide
VIKGIMAPHLASSQITHSGGSQLSCQENTQAALQGSPPSESGLGKSTLINSLFLTDLYPERVIPGAAEKIERTVQIEASTVEIEERGVKLRLTVVDTPGYGDAINCRDCFKTIISYIDEQFERYLHDESGLNRRHIIDNRVHCCFYFISPFGHGLKPLDVAFMKAIHNKVNIVPVIAKADTLTLKERERLKKRILDEIEEHNIKIYHLPDAESDEDEDF

SEQ ID NO: 26274 - protein, 45 aa, Artificial Sequence
  Synthetic polypeptide
VIKGIMAPHLASSQITHSGGSQLSCQENTQAALQGSPPSESGLGK

SEQ ID NO: 26275 - protein, 67 aa, Artificial Sequence
  Synthetic polypeptide
VIKGIMAPHLASSQITHSGGSQLSCQENTQAALQGSPPSESGLGKSTLINSLFLTDLYPERVIPGAA

SEQ ID NO: 26276 - protein, 129 aa, Artificial Sequence
  Synthetic polypeptide
VIKGIMAPHLASSQITHSGGSQLSCQENTQAALQGSPPSESGLGKSTLINSLFLTDLYPERVIPGAAEKIERTVQIEASTVEIEERGVKLRLTVVDTPGYGDAINCRDWYAPPCPGICICLLNILHKFI

SEQ ID NO: 26277 - protein, 366 aa, Artificial Sequence
  Synthetic polypeptide
VIKGIMAPHLASSQITHSGGSQLSCQENTQAALQGSPPSESGLGKSTLINSLFLTDLYPERVIPGAAALNTRKTLLWEKIERTVQIEASTVEIEERGVKLRLTVVDTPGYGDAINCRDCFKTIISYIDEQFERYLHDESGLNRRHIIDNRVHCCFYFISPFGHGLKPLDVAFMKAIHNKVNIVPVIAKADTLTLKERERLKKRILDEIEEHNIKIYHLPDAESDEDEDFKEQTRLLKASIPFSVVGSNQLIEAKGKKVRGRLYPWGVVEVENPEHNDFLKLRTMLITHMQDLQEVTQDLHYENFRSERLKRGGRKVENEDMNKDQILLEKEAELRRMQEMIARMQAQMQMQMQGGDGDGGALGHHV

SEQ ID NO: 26278 - protein, 75 aa, Artificial Sequence
  Synthetic polypeptide
VIKGIMAPHLASSQITHSGGSQLSCQENTQAALQGSPPSESGLGKSTLINSLFLTDLYPERVIPGAAVCFFSRKN

SEQ ID NO: 26279 - protein, 143 aa, Artificial Sequence
  Synthetic polypeptide
VIKGIMAPHLASSQITHSGGSQLSCQENTQAALQGSPPSESGLGKSTLINSLFLTDLYPERVIPGAAEKIERTVQIEASTVEIEERGVKLRLTVVDTPGYGDAINCRDCFKTIISYIDEQFERYLHDESGLNRRHIIDNRVHC

SEQ ID NO: 26280 - protein, 131 aa, Artificial Sequence
  Synthetic polypeptide
VIKGIMAPHLASSQITHSGGSQLSCQENTQAALQGSPPSESGLGKSTLINSLFLTDLYPERVIPGAAEKIERTVQIEASTVEIEERGVKLRLTVVDTPGYGDAINCRDCFKTIISYIDEQFERYLHDESGL

SEQ ID NO: 26281 - protein, 100 aa, Artificial Sequence
  Synthetic polypeptide
VIKGIMAPHLASSQITHSGGSQLSCQENTQAALQGSPPSESGLGKSTLINSLFLTDLYPERVIPGAAEKIERTVQIEASTVEIEERGVKLRLTVVDTPGY

SEQ ID NO: 26282 - protein, 66 aa, Artificial Sequence
  Synthetic polypeptide
VIKGIMAPHLASSQITHSGGSQLSCQENTQAALQGSPPSESGLGKSTLINSLFLTDLYPERVIPGA

SEQ ID NO: 26283 - protein, 156 aa, Artificial Sequence
  Synthetic polypeptide
VIKGIMAPHLASSQITHSGGSQLSCQENTQAALQGSPPSESGLGKSTLINSLFLTDLYPERVIPGAAEKIERTVQIEASTVEIEERGVKLRLTVVDTPGYGDAINCRDCFKTIISYIDEQFERYLHDESGLNRRHIIDNRVHCCFYFISPFGHGLK

SEQ ID NO: 26284 - protein, 126 aa, Artificial Sequence
  Synthetic polypeptide
VIKGIMAPHLASSQITHSGGSQLSCQENTQAALQGSPPSESGLGKSTLINSLFLTDLYPERVIPGAAEKIERTVQIEASTVEIEERGVKLRLTVVDTPGYGDAINCRDCFKTIISYIDEQFERYLH

SEQ ID NO: 26285 - protein, 47 aa, Artificial Sequence
  Synthetic polypeptide
VIKGIMAPHLASSQITHSGGSQLSCQENTQAALQGSPPSESGLGKST

SEQ ID NO: 26286 - protein, 168 aa, Artificial Sequence
  Synthetic polypeptide
VIKGIMAPHLASSQITHSGGSQLSCQENTQAALQGSPPSESGLGKSTLINSLFLTDLYPERVIPGAAEKIERTVQIEASTVEIEERGVKLRLTVVDTPGYGDAINCRDCFKTIISYIDEQFERYLHDESGLNRRHIIDNRVHCCFYFISPFGHGLKPLDVAFMKAIHN

SEQ ID NO: 26287 - protein, 326 aa, Artificial Sequence
  Synthetic polypeptide
GTKACQWLCESGLGKSTLINSLFLTDLYPERVIPGAAEKIERTVQIEASTVEIEERGVKLRLTVVDTPGYGDAINCRDCFKTIISYIDEQFERYLHDESGLNRRHIIDNRVHCCFYFISPFGHGLKPLDVAFMKAIHNKVNIVPVIAKADTLTLKERERLKKRILDEIEEHNIKIYHLPDAESDEDEDFKEQTRLLKASIPFSVVGSNQLIEAKGKKVRGRLYPWGVVEVENPEHNDFLKLRTMLITHMQDLQEVTQDLHYENFRSERLKRGGRKVENEDMNKDQILLEKEAELRRMQEMIARMQAQMQMQMQGGDGDGGALGHHV

SEQ ID NO: 26288 - protein, 52 aa, Artificial Sequence
  Synthetic polypeptide
VIKGIMAPHLASSQITHSGGSQLSCQENTQAALQGSPPSKEPRPANGCVNQV

SEQ ID NO: 26289 - protein, 46 aa, Artificial Sequence
  Synthetic polypeptide
KALWPPTLPLLKLLTLEEASCHVKRTLKQPYREAHQVRNQGLPMAV

SEQ ID NO: 26290 - protein, 189 aa, Artificial Sequence
  Synthetic polypeptide
GTKACQWLCESGLGKSTLINSLFLTDLYPERVIPGAAEKIERTVQIEASTVEIEERGVKLRLTVVDTPGYGDAINCRDCFKTIISYIDEQFERYLHDESGLNRRHIIDNRVHCCFYFISPFGHGLKPLDVAFMKAIHNKVNIVPVIAKADTLTLKERERLKKRILDEIEEHNIKIYHLPDAESDEDEDF

SEQ ID NO: 26291 - protein, 15 aa, Artificial Sequence
  Synthetic polypeptide
GTKACQWLCESGLGK

SEQ ID NO: 26292 - protein, 37 aa, Artificial Sequence
  Synthetic polypeptide
GTKACQWLCESGLGKSTLINSLFLTDLYPERVIPGAA

SEQ ID NO: 26293 - protein, 99 aa, Artificial Sequence
  Synthetic polypeptide
GTKACQWLCESGLGKSTLINSLFLTDLYPERVIPGAAEKIERTVQIEASTVEIEERGVKLRLTVVDTPGYGDAINCRDWYAPPCPGICICLLNILHKFI

SEQ ID NO: 26294 - protein, 336 aa, Artificial Sequence
  Synthetic polypeptide
GTKACQWLCESGLGKSTLINSLFLTDLYPERVIPGAAALNTRKTLLWEKIERTVQIEASTVEIEERGVKLRLTVVDTPGYGDAINCRDCFKTIISYIDEQFERYLHDESGLNRRHIIDNRVHCCFYFISPFGHGLKPLDVAFMKAIHNKVNIVPVIAKADTLTLKERERLKKRILDEIEEHNIKIYHLPDAESDEDEDFKEQTRLLKASIPFSVVGSNQLIEAKGKKVRGRLYPWGVVEVENPEHNDFLKLRTMLITHMQDLQEVTQDLHYENFRSERLKRGGRKVENEDMNKDQILLEKEAELRRMQEMIARMQAQMQMQMQGGDGDGGALGHHV

SEQ ID NO: 26295 - protein, 45 aa, Artificial Sequence
  Synthetic polypeptide
GTKACQWLCESGLGKSTLINSLFLTDLYPERVIPGAAVCFFSRKN

SEQ ID NO: 26296 - protein, 113 aa, Artificial Sequence
  Synthetic polypeptide
GTKACQWLCESGLGKSTLINSLFLTDLYPERVIPGAAEKIERTVQIEASTVEIEERGVKLRLTVVDTPGYGDAINCRDCFKTIISYIDEQFERYLHDESGLNRRHIIDNRVHC

SEQ ID NO: 26297 - protein, 101 aa, Artificial Sequence
  Synthetic polypeptide
GTKACQWLCESGLGKSTLINSLFLTDLYPERVIPGAAEKIERTVQIEASTVEIEERGVKLRLTVVDTPGYGDAINCRDCFKTIISYIDEQFERYLHDESGL

SEQ ID NO: 26298 - protein, 70 aa, Artificial Sequence
  Synthetic polypeptide
GTKACQWLCESGLGKSTLINSLFLTDLYPERVIPGAAEKIERTVQIEASTVEIEERGVKLRLTVVDTPGY

SEQ ID NO: 26299 - protein, 36 aa, Artificial Sequence
  Synthetic polypeptide
GTKACQWLCESGLGKSTLINSLFLTDLYPERVIPGA

SEQ ID NO: 26300 - protein, 126 aa, Artificial Sequence
  Synthetic polypeptide
GTKACQWLCESGLGKSTLINSLFLTDLYPERVIPGAAEKIERTVQIEASTVEIEERGVKLRLTVVDTPGYGDAINCRDCFKTIISYIDEQFERYLHDESGLNRRHIIDNRVHCCFYFISPFGHGLK

SEQ ID NO: 26301 - protein, 96 aa, Artificial Sequence
  Synthetic polypeptide
GTKACQWLCESGLGKSTLINSLFLTDLYPERVIPGAAEKIERTVQIEASTVEIEERGVKLRLTVVDTPGYGDAINCRDCFKTIISYIDEQFERYLH

SEQ ID NO: 26302 - protein, 17 aa, Artificial Sequence
  Synthetic polypeptide
GTKACQWLCESGLGKST

SEQ ID NO: 26303 - protein, 138 aa, Artificial Sequence
  Synthetic polypeptide
GTKACQWLCESGLGKSTLINSLFLTDLYPERVIPGAAEKIERTVQIEASTVEIEERGVKLRLTVVDTPGYGDAINCRDCFKTIISYIDEQFERYLHDESGLNRRHIIDNRVHCCFYFISPFGHGLKPLDVAFMKAIHN

SEQ ID NO: 26304 - protein, 11 aa, Artificial Sequence
  Synthetic polypeptide
ILHRHLHEIDE

SEQ ID NO: 26305 - protein, 319 aa, Artificial Sequence
  Synthetic polypeptide
MSESGLGKSTLINSLFLTDLYPERVIPGAAEKIERTVQIEASTVEIEERGVKLRLTVVDTPGYGDAINCRDCFKTIISYIDEQFERYLHDESGLNRRHIIDNRVHCCFYFISPFGHGLKPLDVAFMKAIHNKVNIVPVIAKADTLTLKERERLKKRILDEIEEHNIKIYHLPDAESDEDEDFKEQTRLLKASIPFSVVGSNQLIEAKGKKVRGRLYPWGVVEVENPEHNDFLKLRTMLITHMQDLQEVTQDLHYENFRSERLKRGGRKVENEDMNKDQILLEKEAELRRMQEMIARMQAQMQMQMQGGDGDGGALGHHV

SEQ ID NO: 26306 - protein, 182 aa, Artificial Sequence
  Synthetic polypeptide
MSESGLGKSTLINSLFLTDLYPERVIPGAAEKIERTVQIEASTVEIEERGVKLRLTVVDTPGYGDAINCRDCFKTIISYIDEQFERYLHDESGLNRRHIIDNRVHCCFYFISPFGHGLKPLDVAFMKAIHNKVNIVPVIAKADTLTLKERERLKKRILDEIEEHNIKIYHLPDAESDEDEDF

SEQ ID NO: 26307 - protein, 8 aa, Artificial Sequence
  Synthetic polypeptide
MSESGLGK

SEQ ID NO: 26308 - protein, 30 aa, Artificial Sequence
  Synthetic polypeptide
MSESGLGKSTLINSLFLTDLYPERVIPGAA

SEQ ID NO: 26309 - protein, 92 aa, Artificial Sequence
  Synthetic polypeptide
MSESGLGKSTLINSLFLTDLYPERVIPGAAEKIERTVQIEASTVEIEERGVKLRLTVVDTPGYGDAINCRDWYAPPCPGICICLLNILHKFI

SEQ ID NO: 26310 - protein, 329 aa, Artificial Sequence
  Synthetic polypeptide
MSESGLGKSTLINSLFLTDLYPERVIPGAAALNTRKTLLWEKIERTVQIEASTVEIEERGVKLRLTVVDTPGYGDAINCRDCFKTIISYIDEQFERYLHDESGLNRRHIIDNRVHCCFYFISPFGHGLKPLDVAFMKAIHNKVNIVPVIAKADTLTLKERERLKKRILDEIEEHNIKIYHLPDAESDEDEDFKEQTRLLKASIPFSVVGSNQLIEAKGKKVRGRLYPWGVVEVENPEHNDFLKLRTMLITHMQDLQEVTQDLHYENFRSERLKRGGRKVENEDMNKDQILLEKEAELRRMQEMIARMQAQMQMQMQGGDGDGGALGHHV

SEQ ID NO: 26311 - protein, 38 aa, Artificial Sequence
  Synthetic polypeptide
MSESGLGKSTLINSLFLTDLYPERVIPGAAVCFFSRKN

SEQ ID NO: 26312 - protein, 106 aa, Artificial Sequence
  Synthetic polypeptide
MSESGLGKSTLINSLFLTDLYPERVIPGAAEKIERTVQIEASTVEIEERGVKLRLTVVDTPGYGDAINCRDCFKTIISYIDEQFERYLHDESGLNRRHIIDNRVHC

SEQ ID NO: 26313 - protein, 94 aa, Artificial Sequence
  Synthetic polypeptide
MSESGLGKSTLINSLFLTDLYPERVIPGAAEKIERTVQIEASTVEIEERGVKLRLTVVDTPGYGDAINCRDCFKTIISYIDEQFERYLHDESGL

SEQ ID NO: 26314 - protein, 63 aa, Artificial Sequence
  Synthetic polypeptide
MSESGLGKSTLINSLFLTDLYPERVIPGAAEKIERTVQIEASTVEIEERGVKLRLTVVDTPGY

SEQ ID NO: 26315 - protein, 29 aa, Artificial Sequence
  Synthetic polypeptide
MSESGLGKSTLINSLFLTDLYPERVIPGA

SEQ ID NO: 26316 - protein, 119 aa, Artificial Sequence
  Synthetic polypeptide
MSESGLGKSTLINSLFLTDLYPERVIPGAAEKIERTVQIEASTVEIEERGVKLRLTVVDTPGYGDAINCRDCFKTIISYIDEQFERYLHDESGLNRRHIIDNRVHCCFYFISPFGHGLK

SEQ ID NO: 26317 - protein, 89 aa, Artificial Sequence
  Synthetic polypeptide
MSESGLGKSTLINSLFLTDLYPERVIPGAAEKIERTVQIEASTVEIEERGVKLRLTVVDTPGYGDAINCRDCFKTIISYIDEQFERYLH

SEQ ID NO: 26318 - protein, 10 aa, Artificial Sequence
  Synthetic polypeptide
MSESGLGKST

SEQ ID NO: 26319 - protein, 131 aa, Artificial Sequence
  Synthetic polypeptide
MSESGLGKSTLINSLFLTDLYPERVIPGAAEKIERTVQIEASTVEIEERGVKLRLTVVDTPGYGDAINCRDCFKTIISYIDEQFERYLHDESGLNRRHIIDNRVHCCFYFISPFGHGLKPLDVAFMKAIHN

SEQ ID NO: 26320 - protein, 14 aa, Artificial Sequence
  Synthetic polypeptide
SQGQEFETSLANMF

SEQ ID NO: 26321 - protein, 271 aa, Artificial Sequence
  Synthetic polypeptide
SQHFGRLRWADHKVRSSRPAWPTCFKTIISYIDEQFERYLHDESGLNRRHIIDNRVHCCFYFISPFGHGLKPLDVAFMKAIHNKVNIVPVIAKADTLTLKERERLKKRILDEIEEHNIKIYHLPDAESDEDEDFKEQTRLLKASIPFSVVGSNQLIEAKGKKVRGRLYPWGVVEVENPEHNDFLKLRTMLITHMQDLQEVTQDLHYENFRSERLKRGGRKVENEDMNKDQILLEKEAELRRMQEMIARMQAQMQMQMQGGDGDGGALGHHV

SEQ ID NO: 26322 - protein, 38 aa, Artificial Sequence
  Synthetic polypeptide
GGLITRSGVRDQPGQHVLRQLSPILMSNLRGTCMTRAA

SEQ ID NO: 26323 - protein, 134 aa, Artificial Sequence
  Synthetic polypeptide
SQHFGRLRWADHKVRSSRPAWPTCFKTIISYIDEQFERYLHDESGLNRRHIIDNRVHCCFYFISPFGHGLKPLDVAFMKAIHNKVNIVPVIAKADTLTLKERERLKKRILDEIEEHNIKIYHLPDAESDEDEDF

SEQ ID NO: 26324 - protein, 58 aa, Artificial Sequence
  Synthetic polypeptide
SQHFGRLRWADHKVRSSRPAWPTCFKTIISYIDEQFERYLHDESGLNRRHIIDNRVHC

SEQ ID NO: 26325 - protein, 46 aa, Artificial Sequence
  Synthetic polypeptide
SQHFGRLRWADHKVRSSRPAWPTCFKTIISYIDEQFERYLHDESGL

SEQ ID NO: 26326 - protein, 71 aa, Artificial Sequence
  Synthetic polypeptide
SQHFGRLRWADHKVRSSRPAWPTCFKTIISYIDEQFERYLHDESGLNRRHIIDNRVHCCFYFISPFGHGLK

SEQ ID NO: 26327 - protein, 41 aa, Artificial Sequence
  Synthetic polypeptide
SQHFGRLRWADHKVRSSRPAWPTCFKTIISYIDEQFERYLH

SEQ ID NO: 26328 - protein, 33 aa, Artificial Sequence
  Synthetic polypeptide
GGLITRSGVRDQPGQHVLRQLSPILMSNLRGTC

SEQ ID NO: 26329 - protein, 83 aa, Artificial Sequence
  Synthetic polypeptide
SQHFGRLRWADHKVRSSRPAWPTCFKTIISYIDEQFERYLHDESGLNRRHIIDNRVHCCFYFISPFGHGLKPLDVAFMKAIHN

SEQ ID NO: 26330 - protein, 99 aa, Artificial Sequence
  Synthetic polypeptide
SQHFGRLRWADHKVRSSRPAWPTCFKTIISYIDEQFERYLHDESGLNRRHIIDNRVHCCFYFISPFGHGLKPLDVAFMKAIHNKVNIVPVIAKADTLTL

SEQ ID NO: 26331 - protein, 1022 aa, Artificial Sequence
  Synthetic polypeptide
RLQPEQLGRKKRREEKRKEEREAVHTGKEPKCDGQVLLTQVWKRLNLVECDYFGMEFQNTQSYWIWLEPMKPIIRQIRRPKNVVLRLAVKFFPPDPGQLQEEYTRYLFALQLKRDLLEERLTCADTTAALLTSHLLQSEIGDYDETLDREHLKVNEYLPGQQHCLEKILEFHQKHVGQTPAESDFQVLEIARKLEMYGIRFHMASDREGTKIQLAVSHMGVLVFQGTTKINTFNWSKVRKLSFKRKRFLIKLHPEVHGPYQDTLEFLLGSRDECKNFWKICVEYHTFFRLLDQPKPKAKAVFFSRGSSFRYSGRTQKQLVDYFKDSGMKRIPYERRHSKTHTSVRALTADLPKQSISFPEGLRTPASPSSANAFYSLSPSTLVPSGLPEFKDSSSSLTDPQVSYVKSPAAERRSGAVAGGPDTPSAQPLGPPALQPGPGLSTKSPQPSPSSRKSPLSLSPAFQVPLGPAEQGSSPLLSPVLSDAGGAGMDCEEPRHKRVPADEAYFIVKEILATERTYLKDLEVITVWFRSAVVKEDAMPATLMTLLFSNIDPIYEFHRGFLREVEQRLALWEGPSKAHTKGSHQRIGDILLRNMRQLKEFTSYFQRHDEVLTELEKATKRCKKLEAVYKEFELQKVCYLPLNTFLLKPIQRLLHYRLLLRRLCGHYSPGHHDYADCHDALKAITEVTTTLQHILIRLENLQKLTELQRDLVGIENLIAPGREFIREGCLHKLTKKGLQQRMFFLFSDMLLYTSKGVAGTSHFRIRGLLPLQGMLVEESDNEWSVPHCFTIYAAQKTIVVAASTRLEKEKWMLDLNSAIQAAKSGGDTAPALPGRTVCTRPPRSPNEVSLEQESEDDARGVRSSLEGHGQHRANTTMHVCWYRNTSVSRADHSAAVENQLSGYLLRKFKNSHGWQKLWVVFTNFCLFFYKTHQDDYPLASLPLLGYSVSIPREADGIHKDYVFKLQFKSHVYFFRAESKYTFERWMEVIQGASSSAGRAPSIVQDGPQPSSGLEGMVRGKEE

SEQ ID NO: 26332 - protein, 39 aa, Artificial Sequence
  Synthetic polypeptide
TRGSSQSSWEERKGGRRKERKRGRPSTLERSLNAMARYY

SEQ ID NO: 26333 - protein, 31 aa, Artificial Sequence
  Synthetic polypeptide
LEAPARAAGKKEKEGGEKKGREGGRPHWKGA

SEQ ID NO: 26334 - protein, 606 aa, Artificial Sequence
  Synthetic polypeptide
RLQPEQLGRKKRREEKRKEEREAVHTGKEPKCDGQVLLTQVWKRLNLVECDYFGMEFQNTQSYWIWLEPMKPIIRQIRRPKNVVLRLAVKFFPPDPGQLQEEYTRYLFALQLKRDLLEERLTCADTTAALLTSHLLQSEIGDYDETLDREHLKVNEYLPGQQHCLEKILEFHQKHVGQTPAESDFQVLEIARKLEMYGIRFHMASDREGTKIQLAVSHMGVLVFQGTTKINTFNWSKVRKLSFKRKRFLIKLHPEVHGPYQDTLEFLLGSRDECKNFWKICVEYHTFFRLLDQPKPKAKAVFFSRGSSFRYSGRTQKQLVDYFKDSGMKRIPYERRHSKTHTSVRALTADLPKQSISFPEGLRTPASPSSANAFYSLSPSTLVPSGLPEFKDSSSSLTDPQVSYVKSPAAERRSGAVAGGPDTPSAQPLGPPALQPGPGLSTKSPQPSPSSRKSPLSLSPAFQVPLGPAEQGSSPLLSPVLSDAGGAGMDCEEPRHKRVPADEAYFIVKEILATERTYLKDLEVITVWFRSAVVKEDAMPATLMTLLFSNIDPIYEFHRGFLREVEQRLALWEGPSKAHTKGSHQRIGDILLRNMRQLKAAHEFTT

SEQ ID NO: 26335 - protein, 615 aa, Artificial Sequence
  Synthetic polypeptide
RLQPEQLGRKKRREEKRKEEREAVHTGKEPKCDGQVLLTQVWKRLNLVECDYFGMEFQNTQSYWIWLEPMKPIIRQIRRPKNVVLRLAVKFFPPDPGQLQEEYTRYLFALQLKRDLLEERLTCADTTAALLTSHLLQSEIGDYDETLDREHLKVNEYLPGQQHCLEKILEFHQKHVGQTPAESDFQVLEIARKLEMYGIRFHMASDREGTKIQLAVSHMGVLVFQGTTKINTFNWSKVRKLSFKRKRFLIKLHPEVHGPYQDTLEFLLGSRDECKNFWKICVEYHTFFRLLDQPKPKAKAVFFSRGSSFRYSGRTQKQLVDYFKDSGMKRIPYERRHSKTHTSVRALTADLPKQSISFPEGLRTPASPSSANAFYSLSPSTLVPSGLPEFKDSSSSLTDPQVSYVKSPAAERRSGAVAGGPDTPSAQPLGPPALQPGPGLSTKSPQPSPSSRKSPLSLSPAFQVPLGPAEQGSSPLLSPVLSDAGGAGMDCEEPRHKRVPADEAYFIVKEILATERTYLKDLEVITVWFRSAVVKEDAMPATLMTLLFSNIDPIYEFHRGFLREVEQRLALWEGPSKAHTKGSHQRIGDILLRNMRQLKVFQLHEGHVAGVTKME

SEQ ID NO: 26336 - protein, 102 aa, Artificial Sequence
  Synthetic polypeptide
RLQPEQLGRKKRREEKRKEEREAVHTGKEPKCDGQVLLTQVWKRLNLVECDYFGMEFQNTQSYWIWLEPMKPIIRQIRRPKNVVLRLAVKFFPPDPGQLQEE

SEQ ID NO: 26337 - protein, 61 aa, Artificial Sequence
  Synthetic polypeptide
RLQPEQLGRKKRREEKRKEEREAVHTGKEPKCDGQVLLTQVWKRLNLVECDYFGMEFQNTQ

SEQ ID NO: 26338 - protein, 76 aa, Artificial Sequence
  Synthetic polypeptide
VKYARHKMNKPCDYTYVKFSGHHVGQGGVPVCGGRGAGRGLCEAGPACHGPRPRGLPGGVRAQDPGNLAAETRRMD

SEQ ID NO: 26339 - protein, 99 aa, Artificial Sequence
  Synthetic polypeptide
NFQGITWGKVVSLYAVAAGLAVDCVRQAQPAMVHALVDCLGEFVRKTLATWLRRRGGWTDVLKCVVSTDPGLRSHWLVAALCSFGRFLKAAFFVLLPER

SEQ ID NO: 26340 - protein, 29 aa, Artificial Sequence
  Synthetic polypeptide
LHLCEIFRASRGARWCPCMRWPRGWPWTV

SEQ ID NO: 26341 - protein, 134 aa, Artificial Sequence
  Synthetic polypeptide
TREVEVAVSRDHAIALHPGLEVDTKEEAARQLLQRPQRIHRQEGQLLLHSPDSANGSWRRQVHRPVVRAQHCRPGPEEACCLRYVELLGGPHCNGQHCCDGGNQKVVQDQRSLCRRHCVSCRFRPALQRIPCRS

SEQ ID NO: 26342 - protein, 296 aa, Artificial Sequence
  Synthetic polypeptide
AEITPLHSILDWRWTQRKRQPDSYFSVLNAFIDRKDSYYSIHQIAQMGVGEGKSIGQWYGPNTVAQVLKKLAVFDTWSSLAVHIAMDNTVVMEEIRRLCRTSVPCAGATAFPADSDRHCNGFPAGAEVTNRPSPWRPLVLLIPLRLGLTDINEAYVETLKHCFMMPQSLGVIGGKPNSAHYFIGYVGEELIYLDPHTTQPAVEPTDGCFIPDESFHCQHPPCRMSIAELDPSIAVGFFCKTEDDFNDWCQQVKKLSLLGGALPMFELVELQPSHLACPDVLNLSLGESCQVQILLM

SEQ ID NO: 26343 - protein, 65 aa, Artificial Sequence
  Synthetic polypeptide
SQLLGRLKQENRLNPGGGGCSEPRSRHCTPSWIGGGHKGRGSQTATSASSTHSSTGRTVTTPFTR

SEQ ID NO: 26344 - protein, 321 aa, Artificial Sequence
  Synthetic polypeptide
AEITPLHSILDWRWTQRKRQPDSYFSVLNAFIDRKDSYYSIHQIAQMGVGEGKSIGQWYGPNTVAQVLKKLAVFDTWSSLAVHIAMDNTVVMEEIRRLCRTSVPCAGATAFPADSDRHCNGFPAGAEVTNRPSPWRPLVLLIPLRLGLTDINEAYVETLKHCFMMPQSLGVIGGKPNSAHYFIGYVGEELIYLDPHTTQPAVEPTDGCFIPDESFHCQHPPCRMSIAELDPSIAVGFFCKTEDDFNDWCQQVKKLSLLGGALPMFELVELQPSHLACPDVLNLSLGESCQVQVGSLGDSSDVERLERFFDSEDEDFEILSL

SEQ ID NO: 26345 - protein, 309 aa, Artificial Sequence
  Synthetic polypeptide
AEITPLHSILDWRWTQRKRQPDSYFSVLNAFIDRKDSYYSIHQIAQMGVGEGKSIGQWYGPNTVAQVLKKLAVFDTWSSLAVHIAMDNTVVMEEIRRLCRTSVPCAGATAFPADSDRHCNGFPAGAEVTNRPSPWRPLVLLIPLRLGLTDINEAYVETLKHCFMMPQSLGVIGGKPNSAHYFIGYVGEELIYLDPHTTQPAVEPTDGCFIPDESFHCQHPPCRMSIAELDPSIAVGFFCKTEDDFNDWCQQVKKLSLLGGALPMFELVELQPSHLACPDVLNLSLDSSDVERLERFFDSEDEDFEILSL

SEQ ID NO: 26346 - protein, 64 aa, Artificial Sequence
  Synthetic polypeptide
TREVEVAVSRDHAIALHPGLEVDTKEEAARQLLQRPQRIHRQEGQLLLHSPDSANGSWRRQVHR

SEQ ID NO: 26347 - protein, 56 aa, Artificial Sequence
  Synthetic polypeptide
AEITPLHSILDWRWTQRKRQPDSYFSVLNAFIDRKDSYYSIHQIAQMGVGEGKSIG

SEQ ID NO: 26348 - protein, 104 aa, Artificial Sequence
  Synthetic polypeptide
TREVEVAVSRDHAIALHPGLEVDTKEEAARQLLQRPQRIHRQEGQLLLHSPDSANGSWRRQVHRPVVRAQHCRPGPEEACCLRYVELLGGPHCNGQHCCDGGNQ

SEQ ID NO: 26349 - protein, 182 aa, Artificial Sequence
  Synthetic polypeptide
AEITPLHSILDWRWTQRKRQPDSYFSVLNAFIDRKDSYYSIHQIAQMGVGEGKSIGQWYGPNTVAQVLKKLAVFDTWSSLAVHIAMDNTVVMEEISKWLRVSMDKKVEITGNIHTSSPESPREPRRVLSVAPCRAGAPWGLCAKPDARWPRSPIPAVIPREESPGCLEAATWYLTSCFVSWL

SEQ ID NO: 26350 - protein, 83 aa, Artificial Sequence
  Synthetic polypeptide
TREVEVAVSRDHAIALHPGLEVDTKEEAARQLLQRPQRIHRQEGQLLLHSPDRKVVQDQRSLCRRHCVSCRFRPALQRIPCRS

SEQ ID NO: 26351 - protein, 135 aa, Artificial Sequence
  Synthetic polypeptide
AEITPLHSILDWRWTQRKRQPDSYFSVLNAFIDRKDSYYSIHQIGRLCRTSVPCAGATAFPADSDRHCNGFPAGAEVTNRPSPWRPLVLLIPLRLGLTDINEAYVETLKHCFMMPQSLGVIGGKPNSAHYFIGYV

SEQ ID NO: 26352 - protein, 103 aa, Artificial Sequence
  Synthetic polypeptide
TREVEVAVSRDHAIALHPGLEVDTKEEAARQLLQRPQRIHRQEGQLLLHSPDSANGSWRRQVHRPVVRAQHCRPGPEEACCLRYVELLGGPHCNGQHCCDGGN

SEQ ID NO: 26353 - protein, 95 aa, Artificial Sequence
  Synthetic polypeptide
AEITPLHSILDWRWTQRKRQPDSYFSVLNAFIDRKDSYYSIHQIAQMGVGEGKSIGQWYGPNTVAQVLKKLAVFDTWSSLAVHIAMDNTVVMEEI

SEQ ID NO: 26354 - protein, 137 aa, Artificial Sequence
  Synthetic polypeptide
AEITPLHSILDWRWTQRKRQPDSYFSVLNAFIDRKDSYYSIHQIAQMGVGEGKSIGQWYGPNTVAQVLKKLAVFDTWSSLAVHIAMDNTVVMEEIRRLCRTSVPCAGATAFPADSDRHCNGFPAGAEVTNRPSPWRP

SEQ ID NO: 26355 - protein, 250 aa, Artificial Sequence
  Synthetic polypeptide
GQARWLTPVIPALWETEAGGSQGIENLPCELQRNFQLMRELDQRTEDKKAEIDILAAEYISTVKTLSPDQRVERLQKIQNAYSKCKEYSDDKVQLAMQTYEMVDKHIRRLDADLARFEADLKDKMEGSDFESSGGRGLKKGRGQKEKRGSRGRGRRTSEEDTPKKKKHKGGSEFTDTILSVHPSDVLDMPVDPNEPTYCLCHQVSYGEMIGCDNPDCPIEWFHFACVDLTTKPKGKWFCPRCVQEKRKKK

SEQ ID NO: 26356 - protein, 27 aa, Artificial Sequence
  Synthetic polypeptide
SQHFGRPRRADHKVSRTFPANFRGTSS

SEQ ID NO: 26357 - protein, 46 aa, Artificial Sequence
  Synthetic polypeptide
PGAVAHACNPSTLGDRGGRITRYREPSLRTSEELPADARAGPEDGR

SEQ ID NO: 26358 - protein, 236 aa, Artificial Sequence
  Synthetic polypeptide
GQARWLTPVIPALWETEAGGSQGIENLPCELQRNFQLMRELDQRTEDKKAEIDILAAEYISTVKTLSPDQRVERLQKIQNAYSKCKEYSDDKVQLAMQTYEMVDKHIRRLDADLARFEADLKDKMEGSDFESSGGRGLKKGRGQKEKRGSRGRGRRTSEEDTPKKKKHKGGSEFTDTILSVHPSDVLDMPVDPNEPTYCLCHQVSYGEMIGCDNPDCPIEWFHFACVDLTTKPKGK

SEQ ID NO: 26359 - protein, 152 aa, Artificial Sequence
  Synthetic polypeptide
GQARWLTPVIPALWETEAGGSQGIENLPCELQRNFQLMRELDQRTEDKKAEIDILAAEYISTVKTLSPDQRVERLQKIQNAYSKCKEYSDDKVQLAMQTYEMVDKHIRRLDADLARFEADLKDKMEGSDFESSGGRGLKSKSVNFFSLFYYC

SEQ ID NO: 26360 - protein, 26 aa, Artificial Sequence
  Synthetic polypeptide
PSVPALQNGTWSHCLRNTVRAVARCC

SEQ ID NO: 26361 - protein, 24 aa, Artificial Sequence
  Synthetic polypeptide
ADDPQCLPYKMGLGATASGTPCGL

SEQ ID NO: 26362 - protein, 267 aa, Artificial Sequence
  Synthetic polypeptide
LSRAPVLAQHCCLGGPRQMTLSACPTKWDLEPLPQEHRAGCSKVLLRPRTSEEVSHILRHCHERNLAVNPQGGNTGMVGGSVPVFDEIILSTARMNRVLSFHSVSGILVCQAGCVLEELSRYVEERDFIMPLDLGAKGSCHIGGNVATNAGGLRFLRYGSLHGTVLGLEVVLADGTVLDCLTSLRKDNTGYDLKQLFIGSEGTLGIITTVSILCPPKPRAVNVAFLVTCVPPACGPGSPRPARLPHPALRTPGLRQESLASSCHAHV

SEQ ID NO: 26363 - protein, 463 aa, Artificial Sequence
  Synthetic polypeptide
LSRAPVLAQHCCLGGPRQMTLSACPTKWDLEPLPQEHRAGCSKVLLRPRTSEEVSHILRHCHERNLAVNPQGGNTGMVGGSVPVFDEIILSTARMNRVLSFHSVSGILVCQAGCVLEELSRYVEERDFIMPLDLGAKGSCHIGGNVATNAGGLRFLRYGSLHGTVLGLEVVLADGTVLDCLTSLRKDNTGYDLKQLFIGSEGTLGIITTVSILCPPKPRAVNVAFLGCPGFAEVLQTFSTCKGMLGEILSAFEFMDAVCMQLVGRHLHLASPVQESPFYVLIETSGSNAGHDAEKLGHFLEHALGSGLVTDGTMATDQRKVKMLWALRERITEALSRDGYVYKYDLSLPVERLYDIVTDLRARLGPHAKHVVGYGHLGDGNLHLNVTAEAFSPSLLAALEPHVYEWTAGQQGSVSAEHGVGFRKRDVLGYSKPPGALQLMQQLKALLDPKGILNPYKTLPSQA

SEQ ID NO: 26364 - protein, 185 aa, Artificial Sequence
  Synthetic polypeptide
LSRAPVLAQHCCLGGPRQMTLSACPTKWDLEPLPQEHRAGCSKVLLRPRTSEEVSHILRHCHERNLAVNPQGGNTGMVGGSVPVFDEIILSTARMNRVLSFHSVSGGLRPGGAEPVCGGTGLHHAAGLRSQGQLPHRGKRGNQRWRPAVSSIWLTAWDCPGPGSGAGRRHCPGLPDLPEEGQHGL

SEQ ID NO: 26365 - protein, 261 aa, Artificial Sequence
  Synthetic polypeptide
LSRAPVLAQHCCLGGPRQMTLSACPTKWDLEPLPQEHRAGCSKVLLRPRTSEEVSHILRHCHERNLAVNPQGGNTGMVGGSVPVFDEIILSTARMNRVLSFHSVSGILVCQAGCVLEELSRYVEERDFIMPLDLGAKGSCHIGGNVATNAGGLRFLRYGSLHGTVLGLEVVLADGTVLDCLTSLRKDNTGYDLKQLFIGSEGTLGIITTVSILCPPKPRAVNVAFLVTCVPPACGPGSPRPARLPHPALRTPGVCPQPLRL

SEQ ID NO: 26366 - protein, 262 aa, Artificial Sequence
  Synthetic polypeptide
LSRAPVLAQHCCLGGPRQMTLSACPTKWDLEPLPQEHRAGCSKVLLRPRTSEEVSHILRHCHERNLAVNPQGGNTGMVGGSVPVFDEIILSTARMNRVLSFHSVSGILVCQAGCVLEELSRYVEERDFIMPLDLGAKGSCHIGGNVATNAGGLRFLRYGSLHGTVLGLEVVLADGTVLDCLTSLRKDNTGYDLKQLFIGSEGTLGIITTVSILCPPKPRAVNVAFLDAVGPEGKDHRGAEPGWLRVQVRPLPPCGAALRHRD

SEQ ID NO: 26367 - protein, 23 aa, Artificial Sequence
  Synthetic polypeptide
GRARRLMPVTTALREAEAVARCC

SEQ ID NO: 26368 - protein, 9 aa, Artificial Sequence
  Synthetic polypeptide
PQPLGRLRL

SEQ ID NO: 26369 - protein, 56 aa, Artificial Sequence
  Synthetic polypeptide
EAEVGGLLEPRSLRRAWAHMILPGHPPPPPGPDSAPAGRIPALGLRAGHTPVWGPG

SEQ ID NO: 26370 - protein, 23 aa, Artificial Sequence
  Synthetic polypeptide
AQEFEKSLGTHDTSGSSSSSSWP

SEQ ID NO: 26371 - protein, 196 aa, Artificial Sequence
  Synthetic polypeptide
GTAPVCSSQRDRRRRQVISAFPTEVTIPPFHDPLKKAQYDKDNEKRTLLQCETGKIYSIKEFKEVEKVQLHSRFPQISNSRHFITPNEWLKLPTRYIESEFCRRRRLKVKVNFNDCSFDLKPLARAPYLLESQEEEKTVIYKNKGSSFLEREPLCYQEGNNPSAKEAISEGYFSSLSLSRNGRKTRMGLPPRVWGC

SEQ ID NO: 26372 - protein, 16 aa, Artificial Sequence
  Synthetic polypeptide
FLHFRLRLPSHHFMTL

SEQ ID NO: 26373 - protein, 200 aa, Artificial Sequence
  Synthetic polypeptide
GTAPVCSSQRDRRRRQVISAFPTEVTIPPFHDPLKKAQYDKDNEKRTLLQCETGKIYSIKEFKEVEKVQLHSRFPQISNSRHFITPNEWLKLPTRYIESEFCRRRRLKVKVNFNDCSFDLKPLARAPYLLESQEEEKTVIYKNKGSSFLEREPLCYQEGNNPSAKEAISEGYFSSLSLQEREEDQDGSPSPRLGLLKLEL

SEQ ID NO: 26374 - protein, 175 aa, Artificial Sequence
  Synthetic polypeptide
GTAPVCSSQRDRRRRQVISAFPTEVTIPPFHDPLKKAQYDKDNEKRTLLQCETGKIYSIKEFKEVEKVQLHSRFPQISNSRHFITPNEWLKLPTRYIESEFCRRRRNKGSSFLEREPLCYQEGNNPSAKEAISEGYFSSLSLSRNGRKTRMGLVLSPSWSGYKHGLLQPQPPGLK

SEQ ID NO: 26375 - protein, 29 aa, Artificial Sequence
  Synthetic polypeptide
GTAPVCSSQRDRRRRQVISAFPTEAKYIQ

SEQ ID NO: 26376 - protein, 18 aa, Artificial Sequence
  Synthetic polypeptide
FLHFRLRQNIFNKGIQRS

SEQ ID NO: 26377 - protein, 33 aa, Artificial Sequence
  Synthetic polypeptide
GTAPVCSSQRDRRRRQVISAFPTEVSLPAFGAA

SEQ ID NO: 26378 - protein, 16 aa, Artificial Sequence
  Synthetic polypeptide
FLHFRLRSPSPRLGLL

SEQ ID NO: 26379 - protein, 38 aa, Artificial Sequence
  Synthetic polypeptide
GTAPVCSSQRDRRRRQVISAFPTEVSLPAFGAAEAGAI

SEQ ID NO: 26380 - protein, 20 aa, Artificial Sequence
  Synthetic polypeptide
FLHFRLRSPSPRLGLLKLEL

SEQ ID NO: 26381 - protein, 33 aa, Artificial Sequence
  Synthetic polypeptide
GTAPVCSSQRDRRRRQVISAFPTEVSATKEHTP

SEQ ID NO: 26382 - protein, 18 aa, Artificial Sequence
  Synthetic polypeptide
FLHFRLRFQQPRSTHPDP

SEQ ID NO: 26383 - protein, 173 aa, Artificial Sequence
  Synthetic polypeptide
KVTIPPFHDPLKKAQYDKDNEKRTLLQCETGKIYSIKEFKEVEKVQLHSRFPQISNSRHFITPNEWLKLPTRYIESEFCRRRRLKVKVNFNDCSFDLKPLARAPYLLESQEEEKTVIYKNKGSSFLEREPLCYQEGNNPSAKEAISEGYFSSLSLSRNGRKTRMGLPPRVWGC

SEQ ID NO: 26384 - protein, 22 aa, Artificial Sequence
  Synthetic polypeptide
EKLLTIFVANDKRLPSHHFMTL

SEQ ID NO: 26385 - protein, 15 aa, Artificial Sequence
  Synthetic polypeptide
QYLLPMIKGYHPTIS

SEQ ID NO: 26386 - protein, 177 aa, Artificial Sequence
  Synthetic polypeptide
KVTIPPFHDPLKKAQYDKDNEKRTLLQCETGKIYSIKEFKEVEKVQLHSRFPQISNSRHFITPNEWLKLPTRYIESEFCRRRRLKVKVNFNDCSFDLKPLARAPYLLESQEEEKTVIYKNKGSSFLEREPLCYQEGNNPSAKEAISEGYFSSLSLQEREEDQDGSPSPRLGLLKLEL

SEQ ID NO: 26387 - protein, 152 aa, Artificial Sequence
  Synthetic polypeptide
KVTIPPFHDPLKKAQYDKDNEKRTLLQCETGKIYSIKEFKEVEKVQLHSRFPQISNSRHFITPNEWLKLPTRYIESEFCRRRRNKGSSFLEREPLCYQEGNNPSAKEAISEGYFSSLSLSRNGRKTRMGLVLSPSWSGYKHGLLQPQPPGLK

SEQ ID NO: 26388 - protein, 37 aa, Artificial Sequence
  Synthetic polypeptide
YLNLRLIIKVTAVKTVVILASRQENRSMEQSRLMKKP

SEQ ID NO: 26389 - protein, 13 aa, Artificial Sequence
  Synthetic polypeptide
HLDRKIDQWNRVG

SEQ ID NO: 26390 - protein, 36 aa, Artificial Sequence
  Synthetic polypeptide
DFSQVNTEGQTCGLLPLKNVLSMTGSLITSNLQEVT

SEQ ID NO: 26391 - protein, 11 aa, Artificial Sequence
  Synthetic polypeptide
ILRAKHVGYYL

SEQ ID NO: 26392 - protein, 38 aa, Artificial Sequence
  Synthetic polypeptide
RTLTTVANDKLCDLHGGGDSAPHPDHLLPGCHLSPGLS

SEQ ID NO: 26393 - protein, 503 aa, Artificial Sequence
  Synthetic polypeptide
NEENNPCPSGHSRLWLMTNYVTFMVGEILLLILTICSLAAIFPRAFPKKLVAFSTWIDRTRWARNTWAMLAIFILVMANVVDMLSCLQYYTGPSNATAGMETEGSCLENPKYYNYVAVLSLIATIMLVQVSHMVKLTLMLLVAGAVATINLYAWRPVFDEYDHKRFREHDLPMVALEQMQGFNPGLNGTDRLPLVPSKYSMTVMVFLMMLSFYYFSRHVEKLARTLFLWKIEVHDQKERVYEMRRWNEALVTNMLPEHVARHFLGSKKRDEELYSQTYDEIGVMFASLPNFADFYTEESINNGGIECLRFLNEIISDFDSLLDNPKFRVITKIKTIGSTYMAASGVTPDVNTNGFASSNKEDKSERERWQHLADLADFALAMKDTLTNINNQSFNNFMLRIGMNKGGVLAGVIGARKPHYDIWGNTVNVASRMESTGVMGNIQVVEETQVILREYGFRFVRRGPIFVKGKGELLTFFLKGRDKLATFPNGPSVTLPHQVVDNS

SEQ ID NO: 26394 - protein, 48 aa, Artificial Sequence
  Synthetic polypeptide
QEPWAGSHYLRLRVCDHVQATAGSGSICFLICEMRRTTPALADTHDCG

SEQ ID NO: 26395 - protein, 457 aa, Artificial Sequence
  Synthetic polypeptide
NEENNPCPSGHSRLWLMTNYVTFMVGEILLLILTICSLAAIFPRAFPKKLVAFSTWIDRTRWARNTWAMLAIFILVMANVVDMVSHMVKLTLMLLVAGAVATINLYAWRPVFDEYDHKRFREHDLPMVALEQMQGFNPGLNGTDRLPLVPSKYSMTVMVFLMMLSFYYFSRHVEKLARTLFLWKIEVHDQKERVYEMRRWNEALVTNMLPEHVARHFLGSKKRDEELYSQTYDEIGVMFASLPNFADFYTEESINNGGIECLRFLNEIISDFDSLLDNPKFRVITKIKTIGSTYMAASGVTPDVNTNGFASSNKEDKSERERWQHLADLADFALAMKDTLTNINNQSFNNFMLRIGMNKGGVLAGVIGARKPHYDIWGNTVNVASRMESTGVMGNIQVVEETQVILREYGFRFVRRGPIFVKGKGELLTFFLKGRDKLATFPNGPSVTLPHQVVDNS

SEQ ID NO: 26396 - protein, 25 aa, Artificial Sequence
  Synthetic polypeptide
VAHACNPSTLGGRGACTSPRAPWTA

SEQ ID NO: 26397 - protein, 29 aa, Artificial Sequence
  Synthetic polypeptide
WLTPVIPALWEAEARAHLPEHHGLPERGV

SEQ ID NO: 26398 - protein, 700 aa, Artificial Sequence
  Synthetic polypeptide
SQHFGRPRRVHISQSTMDCLKGEFDVEPGDGGSRCDYLEEKGIETYLIIASKPEVKKTATQNGLNGSALPNGAPASSKSSSPALIETKEPNGSAHSSGSTSEKPEEQDAQADNPSFPNPRRRLRLQDLADRVVDASEDEHELNQLLNEALLERESAQVVKKRNTFLLSMRFMDPEMETRYSVEKEKQSGAAFSCSCVVLLCTALVEILIDPWLMTNYVTFMVGEILLLILTICSLAAIFPRAFPKKLVAFSTWIDRTRWARNTWAMLAIFILVMANVVDMLSCLQYYTGPSNATAGMETEGSCLENPKYYNYVAVLSLIATIMLVQVSHMVKLTLMLLVAGAVATINLYAWRPVFDEYDHKRFREHDLPMVALEQMQGFNPGLNGTDRLPLVPSKYSMTVMVFLMMLSFYYFSRHVEKLARTLFLWKIEVHDQKERVYEMRRWNEALVTNMLPEHVARHFLGSKKRDEELYSQTYDEIGVMFASLPNFADFYTEESINNGGIECLRFLNEIISDFDSLLDNPKFRVITKIKTIGSTYMAASGVTPDVNTNGFASSNKEDKSERERWQHLADLADFALAMKDTLTNINNQSFNNFMLRIGMNKGGVLAGVIGARKPHYDIWGNTVNVASRMESTGVMGNIQVVEETQVILREYGFRFVRRGPIFVKGKGELLTFFLKGRDKLATFPNGPSVTLPHQVVDNS

SEQ ID NO: 26399 - protein, 654 aa, Artificial Sequence
  Synthetic polypeptide
SQHFGRPRRVHISQSTMDCLKGEFDVEPGDGGSRCDYLEEKGIETYLIIASKPEVKKTATQNGLNGSALPNGAPASSKSSSPALIETKEPNGSAHSSGSTSEKPEEQDAQADNPSFPNPRRRLRLQDLADRVVDASEDEHELNQLLNEALLERESAQVVKKRNTFLLSMRFMDPEMETRYSVEKEKQSGAAFSCSCVVLLCTALVEILIDPWLMTNYVTFMVGEILLLILTICSLAAIFPRAFPKKLVAFSTWIDRTRWARNTWAMLAIFILVMANVVDMVSHMVKLTLMLLVAGAVATINLYAWRPVFDEYDHKRFREHDLPMVALEQMQGFNPGLNGTDRLPLVPSKYSMTVMVFLMMLSFYYFSRHVEKLARTLFLWKIEVHDQKERVYEMRRWNEALVTNMLPEHVARHFLGSKKRDEELYSQTYDEIGVMFASLPNFADFYTEESINNGGIECLRFLNEIISDFDSLLDNPKFRVITKIKTIGSTYMAASGVTPDVNTNGFASSNKEDKSERERWQHLADLADFALAMKDTLTNINNQSFNNFMLRIGMNKGGVLAGVIGARKPHYDIWGNTVNVASRMESTGVMGNIQVVEETQVILREYGFRFVRRGPIFVKGKGELLTFFLKGRDKLATFPNGPSVTLPHQVVDNS

SEQ ID NO: 26400 - protein, 98 aa, Artificial Sequence
  Synthetic polypeptide
SQHFGRPRRVHISQSTMDCLKGEFDVEPGDGGSRCDYLEEKGIETYLIIASKPEVKKTATQNGLNGSALPNGAPASSKSSSPALIETKEPNGSAHSSG

SEQ ID NO: 26401 - protein, 88 aa, Artificial Sequence
  Synthetic polypeptide
SQHFGRPRRVHISQSTMDCLKGEFDVEPGDGGSRCDYLEEKGIETYLIIASKPEVKKTATQNGLNGSALPNGAPASSKSSSPALIETK

SEQ ID NO: 26402 - protein, 45 aa, Artificial Sequence
  Synthetic polypeptide
HVASTAESWPTSSSTCAPSLWASCPTTWLTASTARPSWRPASRWR

SEQ ID NO: 26403 - protein, 93 aa, Artificial Sequence
  Synthetic polypeptide
TYVLQLKPAETMEHAYVLKKYIQDEYLPYVFVSFAYLCVMPRQHGVLVNSQCLGVEQDAKQAQNNMSHPQLNPGQRLPLPVRHRCGHHVLLHG

SEQ ID NO: 26404 - protein, 943 aa, Artificial Sequence
  Synthetic polypeptide
KALASQSFDLNHQELPHLPTVRSGILANVFLYLCAIAVGIMSYYMADRKHRKAFLEARQSLEVKMNLEEQSQQQENLMLSILPKHVADEMLKDMKKDESQKDQQQFNTMYMYRHENVSILFADIVGFTQLSSACSAQELVKLLNELFARFDKLAAKYHQLRIKILGDCYYCICGLPDYREDHAVCSILMGLAMVEAISYVREKTKTGVDMRVGVHTGTVLGGVLGQKRWQYDVWSTDVTVANKMEAGGIPGRVHISQSTMDCLKGEFDVEPGDGGSRCDYLEEKGIETYLIIASKPEVKKTATQNGLNGSALPNGAPASSKSSSPALIETKEPNGSAHSSGSTSEKPEEQDAQADNPSFPNPRRRLRLQDLADRVVDASEDEHELNQLLNEALLERESAQVVKKRNTFLLSMRFMDPEMETRYSVEKEKQSGAAFSCSCVVLLCTALVEILIDPWLMTNYVTFMVGEILLLILTICSLAAIFPRAFPKKLVAFSTWIDRTRWARNTWAMLAIFILVMANVVDMLSCLQYYTGPSNATAGMETEGSCLENPKYYNYVAVLSLIATIMLVQVSHMVKLTLMLLVAGAVATINLYAWRPVFDEYDHKRFREHDLPMVALEQMQGFNPGLNGTDRLPLVPSKYSMTVMVFLMMLSFYYFSRHVEKLARTLFLWKIEVHDQKERVYEMRRWNEALVTNMLPEHVARHFLGSKKRDEELYSQTYDEIGVMFASLPNFADFYTEESINNGGIECLRFLNEIISDFDSLLDNPKFRVITKIKTIGSTYMAASGVTPDVNTNGFASSNKEDKSERERWQHLADLADFALAMKDTLTNINNQSFNNFMLRIGMNKGGVLAGVIGARKPHYDIWGNTVNVASRMESTGVMGNIQVVEETQVILREYGFRFVRRGPIFVKGKGELLTFFLKGRDKLATFPNGPSVTLPHQVVDNS

SEQ ID NO: 26405 - protein, 41 aa, Artificial Sequence
  Synthetic polypeptide
DLGSWPTSSSTCAPSLWASCPTTWLTASTARPSWRPASRWR

SEQ ID NO: 26406 - protein, 45 aa, Artificial Sequence
  Synthetic polypeptide
STGVTVIRLEPPGAPPLTNCEIWDPGQRLPLPVRHRCGHHVLLHG

SEQ ID NO: 26407 - protein, 175 aa, Artificial Sequence
  Synthetic polypeptide
KALASQSFDLNHQELPHLPTVRSGILANVFLYLCAIAVGIMSYYMADRKHRKAFLEARQSLEVKMNLEEQSQQQENLMLSILPKHVADEMLKDMKKDESQKDQQQFNTMYMYRHENVSILFADIVGFTQLSSACSAQELVKLLNELFARFDKLAAKYHQLRIKILGDCYYCICGL

SEQ ID NO: 26408 - protein, 471 aa, Artificial Sequence
  Synthetic polypeptide
GEARWLTPVIPALWKAKAGRSRGQEIETILANTKFGELVMTKESKALMGLYHGQVLCKKNKFGAPQKDVKHLAILGAGLMGAGIAQVSVDKGLKTILKDATLTALDRGQQQVFKGLNDKVKKKALTSFERDSIFSNLTGQLDYQGFEKADMVIEAVFEDLSLKHRVLKEVEAVIPDHCIFASNTSALPISEIAAVSKRPEKVIGMHYFSPVDKMQLLEIITTEKTSKDTSASAVAVGLKQGKVIIVVKDGPGFYTTRCLAPMMSEVIRILQEGVDPKKLDSLTTSFGFPVGAATLVDEVGVDVAKHVAEDLGKVFGERFGGGNPELLTQMVSKGFLGRKSGKGFYIYQEGVKRKDLNSDMDSILASLKLPPKSEVSSDEDIQFRLVTRFVNEAVMCLQEGILATPAEGDIGAVFGLGFPPCLGGPFRFVDLYGAQKIVDRLKKYEAAYGKQFTPCQLLADHANSPNKKFYQ

SEQ ID NO: 26409 - protein, 29 aa, Artificial Sequence
  Synthetic polypeptide
SQHFGRPRRADHEVRRSRPSWLTRNLESL

SEQ ID NO: 26410 - protein, 28 aa, Artificial Sequence
  Synthetic polypeptide
HEIWRACNDQRIKGLDGTLPWSGPVQEE

SEQ ID NO: 26411 - protein, 27 aa, Artificial Sequence
  Synthetic polypeptide
GGMTTKCNMVSWIESWNRKRTLVEQLI

SEQ ID NO: 26412 - protein, 16 aa, Artificial Sequence
  Synthetic polypeptide
ILEQKKDISGTTDIKT

SEQ ID NO: 26413 - protein, 62 aa, Artificial Sequence
  Synthetic polypeptide
AVITSLHSSLVQCCGYQSTFSVCHASILEHYSKGISYLAGAQSDNFFWLSAGRIQFSANGIL

SEQ ID NO: 26414 - protein, 375 aa, Artificial Sequence
  Synthetic polypeptide
SRHCIPAWYSAVDTNPLSLYVMHPFWNTIVKVFPTWLAPNLITFSGFLLVVFNFLLMAYFDPDFYASAPGHKHVPDWVWIVVGILNFVAYTLDGVDGKQARRTNSSTPLGELFDHGLDSWSCVYFVVTVYSIFGRGSTGVSVFVLYLLLWVVLFSFILSHWEKYNTGILFLPWGYDISQVTISFVYIVTAVVGVEAWYEPFLFNFLYRDLFTAMIIGCALCVTLPMSLLNFFRSYKNNTLKLNSVYEAMVPLFSPCLLFILSTAWILWSPSDILELHPRVFYFMVGTAFANSTCQLIVCQMSSTRCPTLNWLLVPLFLVVLVVNLGVASYVESILLYTLTTAFTLAHIHYGVRVVKQLSSHFQIYPFSLRKPNSD

SEQ ID NO: 26415 - protein, 68 aa, Artificial Sequence
  Synthetic polypeptide
FKKCKKFSRVWWCAPVVLATWETEARSPEPGEVEAAVSRDHVTAFQPGTVLWIPIHFLCMSCIHSGTL

SEQ ID NO: 26416 - protein, 169 aa, Artificial Sequence
  Synthetic polypeptide
SRHCIPAWYSAVDTNPLSLYVMHPFWNTIVKVFPTWLAPNLITFSGFLLVVFNFLLMAYFDPDFYASAPGHKHVPDWVWIVVGILNFVAYTLGCALCVTLPMSLLNFFRSYKNNTLKLNSVYEAMVPLFSPCLLFILSTAWILWSPSDILELHPRVFYFMVGTAFANST

SEQ ID NO: 26417 - protein, 356 aa, Artificial Sequence
  Synthetic polypeptide
RPQGPLPRKARWADNFMAEGCGGSKEHSFQHPFLQAVGMFLGEFSCLAAFYLLRCRAAGQSDSSVDPQQPFNPLLFLPPALCDMTGTSLMYVALNMTSASSFQMLRGAVIIFTGLFSVAFLGRRLVLSQWLGILATIAGLVVVGLADLLSKHDSQHKLSEVITGDLLIIMAQIIVAIQMVLEEKFVYKHNVHPLRAVGTEGLFGFVILSLLLVPMYYIPAGSFSGNPRGTLEDALDAFCQVGQQPLIAVALLGNISSIAFFNFAGISVTKELSATTRMVLDSLRTVVIWALSLALGWEAFHALQILGFLILLIGTALYNGLHRPLLGRLSRGRPLAEESEQERLLGGTRTPINDAS

SEQ ID NO: 26418 - protein, 82 aa, Artificial Sequence
  Synthetic polypeptide
ESSPLPNFQYPETRYTAEGRRDLCLGKPDGRTISWPRAVEGARSTASSIPSSRQWACSWENSPAWLPSTSSDAELQGNQTPA

SEQ ID NO: 26419 - protein, 74 aa, Artificial Sequence
  Synthetic polypeptide
ESQMGGQFHGRGLWREQGAQLPASLPPGSGHVPGRILLPGCLLPPPMQSCRAIRLQRRPPAALQPSSFPAPSAL

SEQ ID NO: 26420 - protein, 36 aa, Artificial Sequence
  Synthetic polypeptide
RPQGPLPRKARWADNFMAEGCGGSKEHSFQHPFLQL

SEQ ID NO: 26421 - protein, 106 aa, Artificial Sequence
  Synthetic polypeptide
ESSPLPNFQYPETRYTAEGRRDLCLGKPDGRTISWPRAVEGARSTASSIPSSSSEHDQCLQLPDAAGCSDHIHWPVLGGLPGPEAGAEPVAGHPSHHRGAGGRGPG

SEQ ID NO: 26422 - protein, 291 aa, Artificial Sequence
  Synthetic polypeptide
ESQMGGQFHGRGLWREQGAQLPASLPPALNMTSASSFQMLRGAVIIFTGLFSVAFLGRRLVLSQWLGILATIAGLVVVGLADLLSKHDSQHKLSEVITGDLLIIMAQIIVAIQMVLEEKFVYKHNVHPLRAVGTEGLFGFVILSLLLVPMYYIPAGSFSGNPRGTLEDALDAFCQVGQQPLIAVALLGNISSIAFFNFAGISVTKELSATTRMVLDSLRTVVIWALSLALGWEAFHALQILGFLILLIGTALYNGLHRPLLGRLSRGRPLAEESEQERLLGGTRTPINDAS

SEQ ID NO: 26423 - protein, 54 aa, Artificial Sequence
  Synthetic polypeptide
ESSPLPNFQYPETRYTAEGRRDLCLGKPDGRTISWPRAVEGARSTASSIPSSSS

SEQ ID NO: 26424 - protein, 29 aa, Artificial Sequence
  Synthetic polypeptide
ESQMGGQFHGRGLWREQGAQLPASLPPAL

SEQ ID NO: 26425 - protein, 389 aa, Artificial Sequence
  Synthetic polypeptide
TPVVSGVCPRANHFLSEHFLQLELINGRLSASLLHSHDTETRATMNLALAGDILAAGQDAHCQLLRFQAHQQQGNKAEKAGSKEQGPRQRKGAAPAEKKCGAETQHEGLELRVENLQAVQTDFSSDPLQKVVCFNHDNTLLATGGTDGYVRVWKVPSLEKVLEFKAHEGEIEDLALGPDGKLVTVGRDLKASVWQKDQLVTQLHWQENGPTFSSTPYRYQACRFGQVPDQPAGLRLFTVQIPHKRLRQPPPCYLTAWDGSNFLPLRTKSCGHEVVSCLDVSESGTFLGLGTVTGSVAIYIAFSLQCLYYVREAHGIVVTDVAFLPEKGRGPELLGSHETALFSVAVDSRCQLHLLPSRRSVPVWLLLLLCVGLIIVTILLLQSAFPGFL

SEQ ID NO: 26426 - protein, 21 aa, Artificial Sequence
  Synthetic polypeptide
LRWFLVCALGQITSSLSTFCS

SEQ ID NO: 26427 - protein, 331 aa, Artificial Sequence
  Synthetic polypeptide
TPVVSGVCPRANHFLSEHFLQLELINGRLSASLLHSHDTETRATMNLALAGDILAAGQDAHCQLLRFQAHQQQGNKAEKAGSKEQGPRQRKGAAPAEKKCGAETQHEGLELRVENLQAVQTDFSSDPLQKVVCFNHDNTLLATGGTDGYVRVWKVPSLEKVLEFKAHEGEIEDLALGPDGKLVTVGRDLKASVWQKDQLVTQLHWQENGPTFSSTPYRYQACSESGTFLGLGTVTGSVAIYIAFSLQCLYYVREAHGIVVTDVAFLPEKGRGPELLGSHETALFSVAVDSRCQLHLLPSRRSVPVWLLLLLCVGLIIVTILLLQSAFPGFL

SEQ ID NO: 26428 - protein, 61 aa, Artificial Sequence
  Synthetic polypeptide
YPETAPKALKSLLPFPTPYLCEAEFSAVTATKTRLWSRLDINNTLQSYFSFAKNWRNHPWT

SEQ ID NO: 26429 - protein, 297 aa, Artificial Sequence
  Synthetic polypeptide
TTHFSLTSRLPKTGETIHGHKFFIGFGGKGANQCVQAARLGAMTSMVCKVGKDSFGNDYIENLKQNDISTEFTYQTKDAATGTASIIVNNEGQNIIVIVAGANLLLNTEDLRAAANVISRAKVMVCQLEITPATSLEALTMARRSGVKTLFNPAPAIADLDPQFYTLSDVFCCNESEAEILTGLTVGSAADAGEAALVLLKRGCQVVIITLGAEGCVVLSQTEPEPKHIPTEKVKAVDTTGAGDSFVGALAFYLAYYPNLSLEDMLNRSNFIAAVSVQAAGTQSSYPYKKDLPLTLF

SEQ ID NO: 26430 - protein, 46 aa, Artificial Sequence
  Synthetic polypeptide
TGHKQHTSVLLLVCQKLEKPSMDISFLLALEGKVPTSVSKLLGLEQ

SEQ ID NO: 26431 - protein, 261 aa, Artificial Sequence
  Synthetic polypeptide
TTHFSLTSRLPKTGETIHGHKFFIGFGGKGANQCVQAARLGAMTSMVCKVGKDSFGNDYIENLKQNDISTEFTYQTKDAATGTASIIVNNEGQNIIVIVAGANLLLNTEDLRAAANVISRAKVMVCQLEITPATSLEALTMARRSGVKTLFNPAPAIADLDPQFYTLSDVFCCNESEAEILTGLTVGSAADAGEAALVLLKRGCQVVIITLGAEGCVVLSQTEPEPKHIPTEKVKAVDTTCRPGSRPKSEAASVKKQKHYK

SEQ ID NO: 26432 - protein, 31 aa, Artificial Sequence
  Synthetic polypeptide
QMSANYGLQDVLVRLGSGDLQVKLKCPQKWP

SEQ ID NO: 26433 - protein, 10 aa, Artificial Sequence
  Synthetic polypeptide
GLGVVIYKSS

SEQ ID NO: 26434 - protein, 17 aa, Artificial Sequence
  Synthetic polypeptide
DVCKLWPAGCSCKAWEW

SEQ ID NO: 26435 - protein, 87 aa, Artificial Sequence
  Synthetic polypeptide
CACSPFTSCHDCKLAEVFARSRCWHHASCTACRTNLASWNPSNPECLLLVVKELVQQYHQFQCSRLRESSRLMFEYQTLLEEPQYGE

SEQ ID NO: 26436 - protein, 90 aa, Artificial Sequence
  Synthetic polypeptide
MVWCCPCDNERVLALTSCEIWLFKRAWHLLLLSLPLSSCDVPALPSPPAMIVSLLRSLPEADAGTMLPVQPAELILPPGILQILNVSYLW

SEQ ID NO: 26437 - protein, 349 aa, Artificial Sequence
  Synthetic polypeptide
CACSPFTSCHDCKLAEVFARSRCWHHASCTACRTNLASWNPSNPECLLLVVKELVQQYHQFQCSRLRESSRLMFEYQTLLEEPQYGENMEIYAGKKNNWTGEFSARFLLKLPVDFSNIPTYLLKDVNEDPGEDVALLSVSFEDTEATQVYPKLYLSPRIEHALGGSSALHIPAFPGGGCLIDYVPQVCHLLTNKVQYVIQGYHKRREYIAAFLSHFGTGVVEYDAEGFTKLTLLLMWKDFCFLVHIDLPLFFPRDQPTLTFQSVYHFTNSGQLYSQAQKNYPYSPRWDGNEMAKRAKGCQGSRDACSPWEQVLAFAVAKTGCKLLQPQRNWPSSRGPPWRASEGERTAQ

SEQ ID NO: 26438 - protein, 317 aa, Artificial Sequence
  Synthetic polypeptide
CACSPFTSCHDCKLAEVFARSRCWHHASCTACRTNLASWNPSNPECLLLVVKELVQQYHQFQCSRLRESSRLMFEYQTLLEEPQYGENMEIYAGKKNNWTGEFSARFLLKLPVDFSNIPTYLLKDVNEDPGEDVALLSVSFEDTEATQVYPKLYLSPRIEHALGGSSALHIPAFPGGGCLIDYVPQVCHLLTNKVQYVIQGYHKRREYIAAFLSHFGTGVVEYDAEGFTKLTLLLMWKDFCFLVHIDLPLFFPRDQPTLTFQSVYHFTNSGQLYSQAQKNYPYSPRWDGNEMAKRAKAYFKTFVPQFQEAAFANGKL

SEQ ID NO: 26439 - protein, 310 aa, Artificial Sequence
  Synthetic polypeptide
CACSPFTSCHDCKLAEVFARSRCWHHASCTACRTNLASWNPSNPECLLLVVKELVQQYHQFQCSRLRESSRLMFEYQTLLEEPQYGENMEIYAGKKNNWTGEFSARFLLKLPVDFSNIPTYLLKDVNEDPGEDVALLSVSFEDTEATQVYPKLYLSPRIEHALGGSSALHIPAFPGGGCLIDYVPQVCHLLTNKVQYVIQGYHKRREYIAAFLSHFGTGVVEYDAEGFTKLTLLLMWKDFCFLVHIDLPLFFPRDQPTLTFQSVYHFTNSGQLYSQAQKNYPYSPRWDGNEMAKRAKRESNRDGEESSSA

SEQ ID NO: 26440 - protein, 218 aa, Artificial Sequence
  Synthetic polypeptide
CACSPFTSCHDCKLAEVFARSRCWHHASCTACRTNLASWNPSNPECLLLVVKELVQQYHQFQCSRLRESSRLMFEYQTLLEEPQYGENMEIYAGKKNNWTGEFSARFLLKLPVDFSNIPTYLLKDVNEDPGEDVALLSVSFEDTEATQVYPKLYLSPRIEQLSLSPCHTDFLLTRFLPAPLWGSEVSVPSGPFHLLIILPQPLSGLVRPCLLFSQPCS

SEQ ID NO: 26441 - protein, 121 aa, Artificial Sequence
  Synthetic polypeptide
CACSPFTSCHDCKLAEVFARSRCWHHASCTACRTNLASWNPSNPECLLLVVKELVQQYHQFQCSRLRESSRLMFEYQTLLEEPQYGENMEIYAGKKNNWVRIFENGKKDDFIHNKIINSYV

SEQ ID NO: 26442 - protein, 13 aa, Artificial Sequence
  Synthetic polypeptide
RVPESCLLESFKS

SEQ ID NO: 26443 - protein, 58 aa, Artificial Sequence
  Synthetic polypeptide
FEECLNLASWNPSNPECLLLVVKELVQQYHQFQCSRLRESSRLMFEYQTLLEEPQYGE

SEQ ID NO: 26444 - protein, 320 aa, Artificial Sequence
  Synthetic polypeptide
FEECLNLASWNPSNPECLLLVVKELVQQYHQFQCSRLRESSRLMFEYQTLLEEPQYGENMEIYAGKKNNWTGEFSARFLLKLPVDFSNIPTYLLKDVNEDPGEDVALLSVSFEDTEATQVYPKLYLSPRIEHALGGSSALHIPAFPGGGCLIDYVPQVCHLLTNKVQYVIQGYHKRREYIAAFLSHFGTGVVEYDAEGFTKLTLLLMWKDFCFLVHIDLPLFFPRDQPTLTFQSVYHFTNSGQLYSQAQKNYPYSPRWDGNEMAKRAKGCQGSRDACSPWEQVLAFAVAKTGCKLLQPQRNWPSSRGPPWRASEGERTAQ

SEQ ID NO: 26445 - protein, 288 aa, Artificial Sequence
  Synthetic polypeptide
FEECLNLASWNPSNPECLLLVVKELVQQYHQFQCSRLRESSRLMFEYQTLLEEPQYGENMEIYAGKKNNWTGEFSARFLLKLPVDFSNIPTYLLKDVNEDPGEDVALLSVSFEDTEATQVYPKLYLSPRIEHALGGSSALHIPAFPGGGCLIDYVPQVCHLLTNKVQYVIQGYHKRREYIAAFLSHFGTGVVEYDAEGFTKLTLLLMWKDFCFLVHIDLPLFFPRDQPTLTFQSVYHFTNSGQLYSQAQKNYPYSPRWDGNEMAKRAKAYFKTFVPQFQEAAFANGKL

SEQ ID NO: 26446 - protein, 281 aa, Artificial Sequence
  Synthetic polypeptide
FEECLNLASWNPSNPECLLLVVKELVQQYHQFQCSRLRESSRLMFEYQTLLEEPQYGENMEIYAGKKNNWTGEFSARFLLKLPVDFSNIPTYLLKDVNEDPGEDVALLSVSFEDTEATQVYPKLYLSPRIEHALGGSSALHIPAFPGGGCLIDYVPQVCHLLTNKVQYVIQGYHKRREYIAAFLSHFGTGVVEYDAEGFTKLTLLLMWKDFCFLVHIDLPLFFPRDQPTLTFQSVYHFTNSGQLYSQAQKNYPYSPRWDGNEMAKRAKRESNRDGEESSSA

SEQ ID NO: 26447 - protein, 189 aa, Artificial Sequence
  Synthetic polypeptide
FEECLNLASWNPSNPECLLLVVKELVQQYHQFQCSRLRESSRLMFEYQTLLEEPQYGENMEIYAGKKNNWTGEFSARFLLKLPVDFSNIPTYLLKDVNEDPGEDVALLSVSFEDTEATQVYPKLYLSPRIEQLSLSPCHTDFLLTRFLPAPLWGSEVSVPSGPFHLLIILPQPLSGLVRPCLLFSQPCS

SEQ ID NO: 26448 - protein, 92 aa, Artificial Sequence
  Synthetic polypeptide
FEECLNLASWNPSNPECLLLVVKELVQQYHQFQCSRLRESSRLMFEYQTLLEEPQYGENMEIYAGKKNNWVRIFENGKKDDFIHNKIINSYV

SEQ ID NO: 26449 - protein, 41 aa, Artificial Sequence
  Synthetic polypeptide
PLSTHAFNILCDTMRVHMEDYCIPKILPPGILQILNVSYLW

SEQ ID NO: 26450 - protein, 20 aa, Artificial Sequence
  Synthetic polypeptide
EYTWRTTAYLKSCLLESFKS

SEQ ID NO: 26451 - protein, 25 aa, Artificial Sequence
  Synthetic polypeptide
EKQHQCTWRLLSSSYPSFSRRRMSH

SEQ ID NO: 26452 - protein, 193 aa, Artificial Sequence
  Synthetic polypeptide
RNNISALGGSSALHIPAFPGGGCLIDYVPQVCHLLTNKVQYVIQGYHKRREYIAAFLSHFGTGVVEYDAEGFTKLTLLLMWKDFCFLVHIDLPLFFPRDQPTLTFQSVYHFTNSGQLYSQAQKNYPYSPRWDGNEMAKRAKGCQGSRDACSPWEQVLAFAVAKTGCKLLQPQRNWPSSRGPPWRASEGERTAQ

SEQ ID NO: 26453 - protein, 41 aa, Artificial Sequence
  Synthetic polypeptide
ETTSVHLEAPQLFISQLFQEEDVSLITFLKYATCSPTRCST

SEQ ID NO: 26454 - protein, 161 aa, Artificial Sequence
  Synthetic polypeptide
RNNISALGGSSALHIPAFPGGGCLIDYVPQVCHLLTNKVQYVIQGYHKRREYIAAFLSHFGTGVVEYDAEGFTKLTLLLMWKDFCFLVHIDLPLFFPRDQPTLTFQSVYHFTNSGQLYSQAQKNYPYSPRWDGNEMAKRAKAYFKTFVPQFQEAAFANGKL

SEQ ID NO: 26455 - protein, 154 aa, Artificial Sequence
  Synthetic polypeptide
RNNISALGGSSALHIPAFPGGGCLIDYVPQVCHLLTNKVQYVIQGYHKRREYIAAFLSHFGTGVVEYDAEGFTKLTLLLMWKDFCFLVHIDLPLFFPRDQPTLTFQSVYHFTNSGQLYSQAQKNYPYSPRWDGNEMAKRAKRESNRDGEESSSA

SEQ ID NO: 26456 - protein, 93 aa, Artificial Sequence
  Synthetic polypeptide
QGGGGELQFQQLDFQFDWKLINVFFSNASQCYLCPSAQQAPSLSTVLLSQNGLAAGGVDELMGVLDYLQQEVPRAFVNLVDLSEVAEVSRQYH

SEQ ID NO: 26457 - protein, 60 aa, Artificial Sequence
  Synthetic polypeptide
REVVESFSSSNLTFNLTGSSSMCSSVMQASVTCAPLLNRHPHLARFSSHRMGLRRAAWMS

SEQ ID NO: 26458 - protein, 11 aa, Artificial Sequence
  Synthetic polypeptide
GRWWRASVPAT

SEQ ID NO: 26459 - protein, 1312 aa, Artificial Sequence
  Synthetic polypeptide
QGGGGELQFQQLDFQFDWKLINVFFSNASQCYLCPSAQQNGLAAGGVDELMGVLDYLQQEVPRAFVNLVDLSEVAEVSRQYHGTWLSPAPEPCNCSEETTRLAKVVMQWSYQEAWNSLLASSRYSEQESFTVVFQPFFYETTPSLHSEDPRLQDSTTLAWHLWNRMMEPAGEKDEPLSVKHGRPMKCPSQESPYLFSYRNSNYLTRLQKPQDKLEVREGAEIRCPDKDPSDTVPTSVHRLKPADINVIGALGDSLTAGNGAGSTPGNVLDVLTQYRGLSWSVGGDENIGTVTTLANILREFNPSLKGFSVGTGKETSPNAFLNQAVAGGRAEDLPVQARRLVDLMKNDTRIHFQEDWKIITLFIGGNDLCDFCNDLVHYSPQNFTDNIGKALDILHAEVPRAFVNLVTVLEIVNLRELYQEKKVYCPRMILRSLCPCVLKFDDNSTELATLIEFNKKFQEKTHQLIESGRYDTREDFTVVVQPFFENVDMPKTSEGLPDNSFFAPDCFHFSSKSHSRAASALWNNMLEPVGQKTTRHKFENKINITCPNQVQPFLRTYKNSMQGHGTWLPCRDRAPSALHPTSVHALRPADIQVVAALGDSLTAGNGIGSKPDDLPDVTTQYRGLSYSAGGDGSLENVTTLPNILREFNRNLTGYAVGTGDANDTNAFLNQAVPGAKAEDLMSQVQTLMQKMKDDHRVNFHEDWKVITVLIGGSDLCDYCTDSNLYSAANFVHHLRNALDVLHREVPRVLVNLVDFLNPTIMRQVFLGNPDKCPVQQASVLCNCVLTLRENSQELARLEAFSRAYRSSMRELVGSGRYDTQEDFSVVLQPFFQNIQLPVLADGLPDTSFFAPDCIHPNQKFHSQLARALWTNMLEPLGSKTETLDLRAEMPITCPTQNEPFLRTPRNSNYTYPIKPAIENWGSDFLCTEWKASNSVPTSVHQLRPADIKVVAALGDSLTTAVGARPNNSSDLPTSWRGLSWSIGGDGNLETHTTLPNILKKFNPYLLGFSTSTWEGTAGLNVAAEGARARDMPAQAWDLVERMKNSPDINLEKDWKLVTLFIGVNDLCHYCENPEAHLATEYVQHIQQALDILSEELPRAFVNVVEVMELASLYQGQGGKCAMLAAQNNCTCLRHSQSSLEKQELKKVNWNLQHGISSFSYWHQYTQREDFAVVVQPFFQNTLTPLNERGDTDLTFFSEDCFHFSDRGHAEMAIALWNNMLEPVGRKTTSNNFTHSRAKLKCPSPESPYLYTLRNSRLLPDQAEEAPEVLYWAVPVAAGVGLVVGIIGTVVWRCRRGGRREDPPMSLRTVAL

SEQ ID NO: 26460 - protein, 49 aa, Artificial Sequence
  Synthetic polypeptide
REVVESFSSSNLTFNLTGSSSMCSSVMQASVTCAPLLNRMGLRRAAWMS

SEQ ID NO: 26461 - protein, 1301 aa, Artificial Sequence
  Synthetic polypeptide
QGGGGELQFQQLDFQFDWKLINVFFSNASQCYLCPSAQQAPSLSTVLLSQNGLAAGGVDELMGVLDYLQQEVPRAFVNLVDLSEVAEVSRQYHGTWLSPAPEPCNCSEETTRLAKVVMQWSYQEAWNSLLASSRYSEQESFTVVFQPFFYETTPSLHSEDPRLQDSTTLAWHLWNRMMEPAGEKDEPLSVKHGRPMKCPSQESPYLFSYRNSNYLTRLQKPQDKLEVREGAEIRCPDKDPSDTVPTSVHRLKPADINVIGALGDSLTAGNGAGSTPGNVLDVLTQYRGLSWSVGGDENIGTVTTLANILREFNPSLKGFSVGTGKETSPNAFLNQAVAGGRAEDLPVQARRLVDLMKNDTRIHFQEDWKIITLFIGGNDLCDFCNDLVPRAFVNLVTVLEIVNLRELYQEKKVYCPRMILRSLCPCVLKFDDNSTELATLIEFNKKFQEKTHQLIESGRYDTREDFTVVVQPFFENVDMPKTSEGLPDNSFFAPDCFHFSSKSHSRAASALWNNMLEPVGQKTTRHKFENKINITCPNQVQPFLRTYKNSMQGHGTWLPCRDRAPSALHPTSVHALRPADIQVVAALGDSLTAGNGIGSKPDDLPDVTTQYRGLSYSAGGDGSLENVTTLPNILREFNRNLTGYAVGTGDANDTNAFLNQAVPGAKAEDLMSQVQTLMQKMKDDHRVNFHEDWKVITVLIGGSDLCDYCTDSNLYSAANFVHHLRNALDVLHREVPRVLVNLVDFLNPTIMRQVFLGNPDKCPVQQASVLCNCVLTLRENSQELARLEAFSRAYRSSMRELVGSGRYDTQEDFSVVLQPFFQNIQLPVLADGLPDTSFFAPDCIHPNQKFHSQLARALWTNMLEPLGSKTETLDLRAEMPITCPTQNEPFLRTPRNSNYTYPIKPAIENWGSDFLCTEWKASNSVPTSVHQLRPADIKVVAALGDSLTTAVGARPNNSSDLPTSWRGLSWSIGGDGNLETHTTLPNILKKFNPYLLGFSTSTWEGTAGLNVAAEGARARDMPAQAWDLVERMKNSPDINLEKDWKLVTLFIGVNDLCHYCENPEAHLATEYVQHIQQALDILSEELPRAFVNVVEVMELASLYQGQGGKCAMLAAQNNCTCLRHSQSSLEKQELKKVNWNLQHGISSFSYWHQYTQREDFAVVVQPFFQNTLTPLNERGDTDLTFFSEDCFHFSDRGHAEMAIALWNNMLEPVGRKTTSNNFTHSRAKLKCPSPESPYLYTLRNSRLLPDQAEEAPEVLYWAVPVAAGVGLVVGIIGTVVWRCRRGGRREDPPMSLRTVAL

SEQ ID NO: 26462 - protein, 132 aa, Artificial Sequence
  Synthetic polypeptide
FNCLLCDLLWSDPDKDVQGWGENDRGVSFTFGADVVSKFLNRHDLDLICRAHQVVEDGYEFFAKRQLVTLFSAPNYCGEFDNAGGMMSVDETLMCSFQILKPSEKKAKYQYGGLNSGRPVTPPRTANPPKKR

SEQ ID NO: 26463 - protein, 70 aa, Artificial Sequence
  Synthetic polypeptide
HHHHLNIHPSFNITTVGLLPTPLPSITKKLALRSDDLIVCSVICYGLIQIRMCKAGEKMIVVFPLLLELM

SEQ ID NO: 26464 - protein, 212 aa, Artificial Sequence
  Synthetic polypeptide
DTVGSQGRVISFEVRKDHHDLAKKNYKHWRDSWKLSHVEEWPDNVDFIHKDISGATEDIKSLTFDAVALDMLNPHVTLPVFYPHLKHGGVCAVYVVNITQVIELLDGIRTCELALSCEKISEVIVRDWLVCLAKQKNGILAQKVESKINTDVQLDSQEKIGVKGELFQEDDHEESHSDFPYGSFPYVARPVHWQPGHTAFLVKLRKVKPQLN

SEQ ID NO: 26465 - protein, 10 aa, Artificial Sequence
  Synthetic polypeptide
EIQLDHKDES

SEQ ID NO: 26466 - protein, 12 aa, Artificial Sequence
  Synthetic polypeptide
RYSWITRTSHKF

SEQ ID NO: 26467 - protein, 101 aa, Artificial Sequence
  Synthetic polypeptide
DTVGSQGRVISFEVRKDHHDLAKKNYKHWRDSWKLSHVEEWPDNVDFIHKDISGATEDIKSLTFDAVALDMLNPHVTLPVFYPHLKHGGVCAVYVVKRIAF

SEQ ID NO: 26468 - protein, 652 aa, Artificial Sequence
  Synthetic polypeptide
LSSLLCPLLTGISPHSPLKLPTLELPMTFIFPNAATIQVTISKSAREKMQLKQMKEMELLRRLEEPRTGQELTSQCLGSQRAFMKEANSLPAVLTLGSPEWEEEEEMDLRACKELRPFSNPELGLRDALQCLNSSDWQMKEKGLVSIQRLAACHSEVLTGKLHDVCLVVTGEVTNLRSKVSHLAISTLGDLFQALKKNMDQEAEEIARCLLQKMADTNEFIQRAAGQSLRAMVENVTLARSLVVLTSAGVYHRNPLIRKYAAEHLSAVLEQIGAEKLLSGTRDSTDMLVHNLVRLAQDSNQDTRFYGRKMVNILMANTKFDAFLKQSLPSYDLQKVMAAIKQQGIEDNDELPSAKGRKVLRSLVVCENGLPIKEGLSCNGPRLVGLRSTLQGRGEMVEQLRELTRLLEAKDFRSRMEGVGQLLELCKAKTELVTAHLVQVFDAFTPRLQDSNKKVNQWALESFAKMIPLLRESLHPMLLSIIITVADNLNSKNSGIYAAAVAVLDAMVESLDNLCLLPALAGRVRFLSGRAVLDVTDRLAVLVASVYPRKPQAVERHVLPILWHFLNTATRNGTLPGPSGNIRGVVCRLSRSLQEHMGSRLLDFAASQPKHVLKTLQELLDSESLGGSRKATDRGVAPDSKTTGSSYPFQLD

SEQ ID NO: 26469 - protein, 23 aa, Artificial Sequence
  Synthetic polypeptide
PSSSQMQPRSKSPSPSLPGRRCS

SEQ ID NO: 26470 - protein, 74 aa, Artificial Sequence
  Synthetic polypeptide
STLPTETAHIGVANDLHLPKCSHDPSHHLQVCPGEDAAEADEGDGAASEAGGAQDRAGAHFPVPGLPESLHEGS

SEQ ID NO: 26471 - protein, 707 aa, Artificial Sequence
  Synthetic polypeptide
LSSLLCPLLTGISPHSPLKLPTLELPMTFIFPNAATIQVTISKSAREKMQLKQMKEMELLRRLEEPRTGQELTSQCLGSQRAFMKEGLLPLRGSGTLSVPTRLSGPCRNDVSIILRKWASRASLPSIPISRQEPRFARHASANSLPAVLTLGSPEWEEEEEMDLRACKELRPFSNPELGLRDALQCLNSSDWQMKEKGLVSIQRLAACHSEVLTGKLHDVCLVVTGEVTNLRSKVSHLAISTLGDLFQALKKNMDQEAEEIARCLLQKMADTNEFIQRAAGQSLRAMVENVTLARSLVVLTSAGVYHRNPLIRKYAAEHLSAVLEQIGAEKLLSGTRDSTDMLVHNLVRLAQDSNQDTRFYGRKMVNILMANTKFDAFLKQSLPSYDLQKVMAAIKQQGIEDNDELPSAKGRKVLRSLVVCENGLPIKEGLSCNGPRLVGLRSTLQGRGEMVEQLRELTRLLEAKDFRSRMEGVGQLLELCKAKTELVTAHLVQVFDAFTPRLQDSNKKVNQWALESFAKMIPLLRESLHPMLLSIIITVADNLNSKNSGIYAAAVAVLDAMVESLDNLCLLPALAGRVRFLSGRAVLDVTDRLAVLVASVYPRKPQAVERHVLPILWHFLNTATRNGTLPGPSGNIRGVVCRLSRSLQEHMGSRLLDFAASQPKHVLKTLQELLDSESLGGSRKATDRGVAPDSKTTGSSYPFQLD

SEQ ID NO: 26472 - protein, 88 aa, Artificial Sequence
  Synthetic polypeptide
STLPTETAHIGVANDLHLPKCSHDPSHHLQVCPGEDAAEADEGDGAASEAGGAQDRAGAHFPVPGLPESLHEGRPPSPPGQRDTVCAH

SEQ ID NO: 26473 - protein, 18 aa, Artificial Sequence
  Synthetic polypeptide
GAGKSGKPPEPLDPEIRG

SEQ ID NO: 26474 - protein, 116 aa, Artificial Sequence
  Synthetic polypeptide
GRGSQGSHRNPLIRKYAAEHLSAVLEQIGAEKLLSGTRDSTDMLVHNLVRLAQDSNQDTRFYGRKMVNILMANTKFDAFLKQSLPSYDLQKVMAAIKQQGIEDNDELPSAKGRKVL

SEQ ID NO: 26475 - protein, 11 aa, Artificial Sequence
  Synthetic polypeptide
GGEVREATGTP

SEQ ID NO: 26476 - protein, 408 aa, Artificial Sequence
  Synthetic polypeptide
GRGSQGSHRNPLIRKYAAEHLSAVLEQIGAEKLLSGTRDSTDMLVHNLVRLAQDSNQDTRFYGRKMVNILMANTKFDAFLKQSLPSYDLQKVMAAIKQQGIEDNDELPSAKGRKVLRSLVVCENGLPIKEGLSCNGPRLVGLRSTLQGRGEMVEQLRELTRLLEAKDFRSRMEGVGQLLELCKAKTELVTAHLVQVFDAFTPRLQDSNKKVNQWALESFAKMIPLLRESLHPMLLSIIITVADNLNSKNSGIYAAAVAVLDAMVESLDNLCLLPALAGRVRFLSGRAVLDVTDRLAVLVASVYPRKPQAVERHVLPILWHFLNTATRNGTLPGPSGNIRGVVCRLSRSLQEHMGSRLLDFAASQPKHVLKTLQELLDSESLGGSRKATDRGVAPDSKTTGSSYPFQLD

SEQ ID NO: 26477 - protein, 575 aa, Artificial Sequence
  Synthetic polypeptide
SHLRELWTSWNASKRIPQHAEFSFFDPNDASCQEILFDPKTSVSELFAILRQWVPQVQQNIDIIGNEILKRGCNVNDRDGLTDMTLLHYTCKSGAHGIGDVETAVKFATQLIDLGADISLRSRWTNMNALHYAAYFDVPELIRVILKTSKPKDVDATCSDFNFGTALHIAAYNLCAGAVKCLLEQGANPAFRNDKGQIPADVVPDPVDMPLEMADAAATAKEIKQMLLDAVPLSCNISKAMLPNYDHVTGKAMLTSLGLKLGDRVVIAGQKVGTLRFCGTTEFASGQWAGIELDEPEGKNNGSVGKVQYFKCAPKYGIFAPLSKISKAKGRRKNITHTPSTKAAVPLIRSQKIDVAHVTSKVNTGLMTSKKDSASESTLSLPPGEELKTVTEKDVALLGSVSSCSSTSSLEHRQSYPKKQNAISSNKKTMSKSPSLSSRASAGLNSSATSTANNSRCEGELRLGERVLVVGQRLGTIRFFGTTNFAPGYWYGIELEKPHGKNDGSVGGVQYFSCSPRYGIFAPPSRVQRVTDSLDTLSEISSNKQNHSYPGFRRSFSTTSASSQKEINRRNAFSK

SEQ ID NO: 26478 - protein, 46 aa, Artificial Sequence
  Synthetic polypeptide
ESSGQAGMHPRESLNMLNFLSLILMMHHARKFFLIPKLQFQNYLPF

SEQ ID NO: 26479 - protein, 471 aa, Artificial Sequence
  Synthetic polypeptide
SHLRELWTSWNASKRIPQHAEFSFFDPNDASCQEILFDPKTSVSELFAILRQWVPQVQQNIDIIGNEILKRGCNVNDRDGLTDMTLLHYTCKSGAHGIGDVETAVKFATQLIDLGADISLRSRWTNMNALHYAAYFDVPELIRVILKTSKPKDVDATCSDFNFGTALHIAAYNLCAGAVKCLLEQGANPAFRNDKGQIPADVVPDPVDMPLEMADAAATAKEIKQMLLDAVPLSCNISKAMLPNYDHVTGKAMLTSLGLKLGDRVVIAGQKVGTLRFCGTTEFASGQWAGIELDEPEGKNNGSVGKVQYFKCAPKYGIFAPLSKISKAKGRRKNITHTPSTKAAVPLIRSQKIDVAHVTSKVNTGLMTSKKDSASESTLSLPPGEELKTVTEKDVALLGSVSSCSSTSSLEHRQSYPKKQNAISSNKKTMSKSPSLSSRASAGIYGFFNQAFLVFFILVCLFEFLSNIYSK

SEQ ID NO: 26480 - protein, 681 aa, Artificial Sequence
  Synthetic polypeptide
SHLRELWTSWNASKRIPQHAEFSFFDPNDASCQEILFDPKTSVSELFAILRQWVPQVQQNIDIIGNEILKRGCNVNDRDGLTDMTLLHYTCKSGAHGIGDVETAVKFATQLIDLGADISLRSRWTNMNALHYAAYFDVPELIRVILKTSKPKDVDATCSDFNFGTALHIAAYNLCAGAVKCLLEQGANPAFRNDKGQIPADVVPDPVDMPLEMADAAATAKEIKQMLLDAVPLSCNISKAMLPNYDHVTGKAMLTSLGLKLGDRVVIAGQKVGTLRFCGTTEFASGQWAGIELDEPEGKNNGSVGKVQYFKCAPKYGIFAPLSKISKAKGRRKNITHTPSTKAAVPLIRSQKIDVAHVTSKVNTGLMTSKKDSASESTLSLPPGEELKTVTEKDVALLGSVSSCSSTSSLEHRQSYPKKQNAISSNKKTMSKSPSLSSRASAGLNSSATSTANNSRCEGELRLGERVLVVGQRLGTIRFFGTTNFAPGYWYGIELEKPHGKNDGSVGGVQYFSCSPRYGIFAPPSRVQRVTDSLDTLSEISSNKQNHSYPGFRRSFSTTSASSQKEINRRNAFSKSKAALRRSWSSTPTAGGIEGSVKLHEGSQVLLTSSNEMGTVRYVGPTDFASGIWLGLELRSAKGKNDGSVGDKRYFTCKPNHGVLVRPSRVTYRGINGSKLVDENC

SEQ ID NO: 26481 - protein, 73 aa, Artificial Sequence
  Synthetic polypeptide
SHLRELWTSWNASKRIPQHAEFSFFDPNDASCQEILFDPKTSVSELFAILRQWVPQVQQNIDIIGNEVMWKQL

SEQ ID NO: 26482 - protein, 190 aa, Artificial Sequence
  Synthetic polypeptide
SHLRELWTSWNASKRIPQHAEFSFFDPNDASCQEILFDPKTSVSELFAILRQWVPQVQQNIDIIGNEILKRGCNVNDRDGLTDMTLLHYTCKSGAHGIGDVETAVKFATQLIDLGADISLRSRWTNMNALHYAAYFDVPELIRVILKTSKPKDVDATCSDFNFGTALHIAAYNLCAGAVKCLLEQGANPA

SEQ ID NO: 26483 - protein, 30 aa, Artificial Sequence
  Synthetic polypeptide
DHLVSGKQAQNARRFYHYESWCHGKGFTLY

SEQ ID NO: 26484 - protein, 117 aa, Artificial Sequence
  Synthetic polypeptide
SQENKLRTLADSTIMNHGVMERDLLYTDSVLGKLFWKHFHAESLFTFDVCKPILVSLDQQPPCGNMAHPTCGIIGDHVWCKSDYNWGCICSWRKKCHYHEPSDKNGLDVPVELPDAI

SEQ ID NO: 26485 - protein, 297 aa, Artificial Sequence
  Synthetic polypeptide
LSPLWIWHRVRCASDPGRCPLPLPIRIMVSWKGIYFILTLFWGSFFGSIFMLSPFLPLMFVNPSWYRWINNRLVATWLTLPVALLETMFGVKVIITGDAFVPGERSVIIMNHRTRMDWMFLWNCLMRYSYLRLEKICLKASLKGVPGFGWAMQAAAYIFIHRKWKDDKSHFEDMIDYFCDIHEPLQLLIFPEGTDLTENSKSRSNAFAEKNGLQKYEYVLHPRTTGFTFVVDRLREGRRQSEGSKGPLQGELQITAQGNQRGHKQMEKHSMLMDWKNQYREIGHTAQSNLQIQCYSH

SEQ ID NO: 26486 - protein, 103 aa, Artificial Sequence
  Synthetic polypeptide
SGYKPRHSNQQWQAPLGPLPLYGSFGFTLLNLGTTHSSGPRLLLFELSFCSPSTTAECHLLRLAIDFHPSGSGTVSAALLIRGGAHCRSRSESWCHGKGFTLY

SEQ ID NO: 26487 - protein, 113 aa, Artificial Sequence
  Synthetic polypeptide
SGEVPIAAPDQNHGVMERDLLYTDSVLGKLFWKHFHAESLFTFDVCKPILVSLDQQPPCGNMAHPTCGIIGDHVWCKSDYNWGCICSWRKKCHYHEPSDKNGLDVPVELPDAI

SEQ ID NO: 26488 - protein, 403 aa, Artificial Sequence
  Synthetic polypeptide
LSPLWIWHRVRCASDPGRCPLPLPIRIMVSWKGIYFILTLFWGSFFGSIFMLSPFLPLMFVNPSWYRWINNRLVATWLTLPVALLETMFGVKVIITGDAFVPGERSVIIMNHRTRMDWMFLWNCLMRYSYLRLEKICLKASLKGVPGFGWAMQAAAYIFIHRKWKDDKSHFEDMIDYFCDIHEPLQLLIFPEGTDLTENSKSRSNAFAEKNGLQKYEYVLHPRTTGFTFVVDRLREGKNLDAVHDITVAYPHNIPQSEKHLLQGDFPREIHFHVHRYPIDTLPTSKEDLQLWCHKRWEEKEERLRSFYQGEKNFYFTGQSVIPPCKSELRVLVVKLLSILYWTLFSPAMCLLIYLYSLVKWYFIITIVIFVLQERIFGGLEIIELACYRLLHKQPHLNSKKNE

SEQ ID NO: 26489 - protein, 142 aa, Artificial Sequence
  Synthetic polypeptide
LSPLWIWHRVRCASDPGRCPLPLPIRIMVSWKGIYFILTLFWGSFFGSIFMLSPFLPLMFVNPSWYRWINNRLVATWLTLPVALLETMFGVKVIITGDAFVPGERSVIIMNHRTRMDWMFLWNCLMRYSYLRLEKICLKASL

SEQ ID NO: 26490 - protein, 66 aa, Artificial Sequence
  Synthetic polypeptide
AFTFTHPHSLTHPEQLPVLQTPFMVRTLMLSMISLWRILTTFLNQRSTSSKETFPGKSTFTSTGIQ

SEQ ID NO: 26491 - protein, 14 aa, Artificial Sequence
  Synthetic polypeptide
LTQSNFQSCRLHSW

SEQ ID NO: 26492 - protein, 210 aa, Artificial Sequence
  Synthetic polypeptide
CSLSVQCLLKSTVVYSGVLGLHIHSPSLTDSPRATSSPADSIHGKNLDAVHDITVAYPHNIPQSEKHLLQGDFPREIHFHVHRYPIDTLPTSKEDLQLWCHKRWEEKEERLRSFYQGEKNFYFTGQSVIPPCKSELRVLVVKLLSILYWTLFSPAMCLLIYLYSLVKWYFIITIVIFVLQERIFGGLEIIELACYRLLHKQPHLNSKKNE

SEQ ID NO: 26493 - protein, 24 aa, Artificial Sequence
  Synthetic polypeptide
SQHFGRPRRADHEVKRSRPSWPTW

SEQ ID NO: 26494 - protein, 199 aa, Artificial Sequence
  Synthetic polypeptide
PGTVAHACNLSTLGGRGGRITRSRDQDHPGQHGKNLDAVHDITVAYPHNIPQSEKHLLQGDFPREIHFHVHRYPIDTLPTSKEDLQLWCHKRWEEKEERLRSFYQGEKNFYFTGQSVIPPCKSELRVLVVKLLSILYWTLFSPAMCLLIYLYSLVKWYFIITIVIFVLQERIFGGLEIIELACYRLLHKQPHLNSKKNE

SEQ ID NO: 26495 - protein, 74 aa, Artificial Sequence
  Synthetic polypeptide
RAQWLTPVISALWEAEAGGSRGQEIKTILANMVRTLMLSMISLWRILTTFLNQRSTSSKETFPGKSTFTSTGIQ

SEQ ID NO: 26496 - protein, 34 aa, Artificial Sequence
  Synthetic polypeptide
LWAPQSHYWPENFHPWAFSSCAPLSMCTFQCGYI

SEQ ID NO: 26497 - protein, 239 aa, Artificial Sequence
  Synthetic polypeptide
NRSNSGPRSPIIGRRIFILGPSHHVPLSRCALSSVDIYRTPLYDLRIDQKIYGELWKTGMFERMSLQTDEDEHSIEMHLPYTAKAMESHKDEFTIIPVLVGALSESKEQEFGKLFSKYLADPSNLFVVSSDFCHWGQRFRYSYYDESQGEIYRSIEHLDKMGMSIIEQLDPVSFSNYLKKYHNTICGRHPIGVLLNAITELQKNGMNMSFSFLNYAQSSQCRNWQDSSVSYAAGALTVH

SEQ ID NO: 26498 - protein, 122 aa, Artificial Sequence
  Synthetic polypeptide
ECKLIQSLWKTVWRFLKELKTEVTLGPAVPLLAGEFSSLGLLIMCPSLDVHFPVWIYIGHLCMTFVLTKRFTENCGRQECLNACLCRQMKMNTVLKCICLIQLKPWKAIRMSLPLFLYWLEL

SEQ ID NO: 26499 - protein, 269 aa, Artificial Sequence
  Synthetic polypeptide
EANVGGLLEPRSLRPAWATCHAGYTYCGSCAAHAYKQVDPSITRRIFILGPSHHVPLSRCALSSVDIYRTPLYDLRIDQKIYGELWKTGMFERMSLQTDEDEHSIEMHLPYTAKAMESHKDEFTIIPVLVGALSESKEQEFGKLFSKYLADPSNLFVVSSDFCHWGQRFRYSYYDESQGEIYRSIEHLDKMGMSIIEQLDPVSFSNYLKKYHNTICGRHPIGVLLNAITELQKNGMNMSFSFLNYAQSSQCRNWQDSSVSYAAGALTVH

SEQ ID NO: 26500 - protein, 119 aa, Artificial Sequence
  Synthetic polypeptide
DQPGQHAMQDIRTVGLVLPMLINKWIRLLPGEFSSLGLLIMCPSLDVHFPVWIYIGHLCMTFVLTKRFTENCGRQECLNACLCRQMKMNTVLKCICLIQLKPWKAIRMSLPLFLYWLEL

SEQ ID NO: 26501 - protein, 26 aa, Artificial Sequence
  Synthetic polypeptide
AQEFETSLGNMPCRIYVLWVLCCPCL

SEQ ID NO: 26502 - protein, 72 aa, Artificial Sequence
  Synthetic polypeptide
EANVGGLLEPRSLRPAWATCHAGYTYCGSCAAHAYKQVDPSITFSRSALMLNILSLCLFIFSSIRKMPFLII

SEQ ID NO: 26503 - protein, 35 aa, Artificial Sequence
  Synthetic polypeptide
DQPGQHAMQDIRTVGLVLPMLINKWIRLLHFPGVL

SEQ ID NO: 26504 - protein, 18 aa, Artificial Sequence
  Synthetic polypeptide
PAVWCVLGCLQCCFIVSG

SEQ ID NO: 26505 - protein, 63 aa, Artificial Sequence
  Synthetic polypeptide
NQSAWATWRNSISTKFSQLFGVFWAAYSAASLLVGEEFKTKKPLLIYPIFLLYIYFLSLYTGV

SEQ ID NO: 26506 - protein, 37 aa, Artificial Sequence
  Synthetic polypeptide
AQEFEINQPGQRGETPSLQNLASCLVCFGLPTVLLHC

SEQ ID NO: 26507 - protein, 46 aa, Artificial Sequence
  Synthetic polypeptide
FLHFHLSNLPSSMYEWWPVQFKGQMSVPSKFHRKTLSDPSPWCQRA

SEQ ID NO: 26508 - protein, 14 aa, Artificial Sequence
  Synthetic polypeptide
GVPDSGRREMQLKT

SEQ ID NO: 26509 - protein, 25 aa, Artificial Sequence
  Synthetic polypeptide
FLHFHMRYRVHLTRECQTVGAGRCS

SEQ ID NO: 26510 - protein, 401 aa, Artificial Sequence
  Synthetic polypeptide
GTGFISLGSARQWAQGDAVKDLMLRFLGEKAAAKRQVLNADSVEQSFVGLKQLISCRNWRAAVDLCGRLLTAHGQGYGKSGLLTSHTTDSLQLWFVRLALLVKLGLFQNAEMEFEPFGNLDQPDLYYEYYPHVYPGRRGSMVPFSMRILHAELQQYLGNPQESLDRLHKVKTVCSKILANLEQGLAEDGGMSSVTQEGRQASIRLWRSRLGRVMYSMANCLLLMKDYVLAVEAYHSVIKYYPEQEPQLLSGIGRISLQIGDIKTAEKYFQDVEKVTQKLDGLQGKIMVLMNSAFLHLGQNNFAEAHRFFTEILRMDPRNAVANNNAAVCLLYLGKLKDSLRQLEAMVQQDPRHYLHESVLFNLTTMYELESSRSMQKKQALLEAVAGKEGDSFNTQCLKLA

SEQ ID NO: 26511 - protein, 55 aa, Artificial Sequence
  Synthetic polypeptide
GTGFISLGSARQWAQGDAVKDLMLRFLGEKAAAKRQVLNADSVEQSFVGLKQLIR

SEQ ID NO: 26512 - protein, 214 aa, Artificial Sequence
  Synthetic polypeptide
GTGFISLGSARQWAQGDAVKDLMLRFLGEKAAAKRQVLNADSVEQSFVGLKQLISCRNWRAAVDLCGRLLTAHGQGYGKSGLLTSHTTDSLQLWFVRLALLVKLGLFQNAEMEFEPFGNLDQPDLYYEYYPHVYPGRRGSMVPFSMRILHAELQQYLGNPQESLDRLHKVKTVCSKILANLEQGLAEDGGMSSVTQEGRQASIRLWRSRLGRVM

SEQ ID NO: 26513 - protein, 43 aa, Artificial Sequence
  Synthetic polypeptide
GRARWLTPVIPALWEAETVEPIVTNSAKTSWFWPAGDLPGRPP

SEQ ID NO: 26514 - protein, 52 aa, Artificial Sequence
  Synthetic polypeptide
SQHFGRLRLWSQLSQTVQRPPGSGLQEICPGALLEQWSWVTAWKPLAAPSAG

SEQ ID NO: 26515 - protein, 26 aa, Artificial Sequence
  Synthetic polypeptide
VPEGTCLNTSNCRNRCHSVFGWDAVS

SEQ ID NO: 26516 - protein, 423 aa, Artificial Sequence
  Synthetic polypeptide
YHSLWWTHLFTRPPFPLEFEFLKARALTPQTAETDAIRFLVGTQSLKYDNQIHIIDFDDENNIINKNVLLHQAGEIWHISASPADRGVLTTCYNRTFCCVLSLDSFGALGKSAAQLFIALATSSDSKVLTCAAVWRMPKELESGSHESPDDSSSTAQTLELLCHLDNTAHGNMACVVWEPMGDGKKIISLADNHILLWDLQESSSQAVLASSASLEGKGQLKFTSGRWSPHHNCTQVATANDTTLRGWDTRSMSQIYCIENAHGQLVRDLDFNPNKQYYLASCGDDCKVKFWDTRNVTEPVKTLEEHSHWVWNVRYNHSHDQLVLTGSSDSRVILSNMVSISSEPFGHLVDDDDISDQEDHRSEEKSKEPLQDNVIATYEEHEDSVYAVDWSSADPWLFASLSYDGRLVINRVPRALKYHILL

SEQ ID NO: 26517 - protein, 396 aa, Artificial Sequence
  Synthetic polypeptide
YHSLWWTHLFTRPPFPLEFEFLKARALTPQTAETDAIRFLVGTQSLKYDNQIHIIDFDDENNIINKNVLLHQAGEIWHISASPADRGVLTTCYNRTSDSKVLTCAAVWRMPKELESGSHESPDDSSSTAQTLELLCHLDNTAHGNMACVVWEPMGDGKKIISLADNHILLWDLQESSSQAVLASSASLEGKGQLKFTSGRWSPHHNCTQVATANDTTLRGWDTRSMSQIYCIENAHGQLVRDLDFNPNKQYYLASCGDDCKVKFWDTRNVTEPVKTLEEHSHWVWNVRYNHSHDQLVLTGSSDSRVILSNMVSISSEPFGHLVDDDDISDQEDHRSEEKSKEPLQDNVIATYEEHEDSVYAVDWSSADPWLFASLSYDGRLVINRVPRALKYHILL

SEQ ID NO: 26518 - protein, 67 aa, Artificial Sequence
  Synthetic polypeptide
YHSLWWTHLFTRPPFPLEFEFLKARALTPQTAETDAIRFLVGTQSLKYDNQCRVGANGRWEENHFLG

SEQ ID NO: 26519 - protein, 141 aa, Artificial Sequence
  Synthetic polypeptide
YHSLWWTHLFTRPPFPLEFEFLKARALTPQTAETDAIRFLVGTQSLKYDNQIHIIDFDDENNIINKNVLLHQAGEIWHISASPADRGVLTTCYNRMSCGSQWEMGRKSFPWLITISCCGIYRKARARLCWPAQRPWKGRDN

SEQ ID NO: 26520 - protein, 323 aa, Artificial Sequence
  Synthetic polypeptide
YHSLWWTHLFTRPPFPLEFEFLKARALTPQTAETDAIRFLVGTQSLKYDNQIHIIDFDDENNIINKNVLLHQAGEIWHISASPADRGVLTTCYNRTSDSKVLTCAAVWRMPKELESGSHESPDDSSSTAQTLELLCHLDNTAHGNMACVVWEPMGDGKKIISLADNHILLWDLQESSSQAVREESEHSEGACTDPVCAIIPRLEALWGRGTLESGNRDGPRHLHLPRASLTEGGPATSLTQGRRTRHGPHSQKDPPRASRMEEGPAECFLGELGLSYDCKKSAICQAYQNAMAKFIQQTLSELTLERVIRTFPNKWSFLTIFK

SEQ ID NO: 26521 - protein, 96 aa, Artificial Sequence
  Synthetic polypeptide
YHSLWWTHLFTRPPFPLEFEFLKARALTPQTAETDAIRFLVGTQSLKYDNQNKDWKEIGQKGLKIEPRVIFRCFSQGMCSKTTQRMPGNLDPYHRF

SEQ ID NO: 26522 - protein, 164 aa, Artificial Sequence
  Synthetic polypeptide
YHSLWWTHLFTRPPFPLEFEFLKARALTPQTAETDAIRFLVGTQSLKYDNQIHIIDFDDENNIINKNVLLHQAGEIWHISASPADRGVLTTCYNRRDIIESFGILPVAQSPTIVFVNTLHQVFFRGQVAASDSKVLTCAAVWRMPKELESGSHESPDDSSSTAQ

SEQ ID NO: 26523 - protein, 21 aa, Artificial Sequence
  Synthetic polypeptide
HRNRKPNSECFHISWPIWSKA

SEQ ID NO: 26524 - protein, 103 aa, Artificial Sequence
  Synthetic polypeptide
INTETENQIVNVFTYPGQFGARLSRRRRHEQRDSGGQTSLYPAVEVTSGPGDVLHGKLSAPDEGLCAGRGGVSFGYQVLPRARAPAAQRHRPDFPADWRHKNS

SEQ ID NO: 26525 - protein, 229 aa, Artificial Sequence
  Synthetic polypeptide
MFSHILANLEQGLAEDGGMSSVTQEGRQASIRLWRSRLGRVMYSMANCLLLMKDYVLAVEAYHSVIKYYPEQEPQLLSGIGRISLQIGDIKTAEKYFQDVEKVTQKLDGLQGKIMVLMNSAFLHLGQNNFAEAHRFFTEILRMDPRNAVANNNAAVCLLYLGKLKDSLRQLEAMVQQDPRHYLHESVLFNLTTMYELESSRSMQKKQALLEAVAGKEGDSFNTQCLKLA

SEQ ID NO: 26526 - protein, 52 aa, Artificial Sequence
  Synthetic polypeptide
INTETENQIVNVFTYPGQFGARLSRRRRHEQRDSGGQTSLYPAVEVTSGPGD

SEQ ID NO: 26527 - protein, 42 aa, Artificial Sequence
  Synthetic polypeptide
MFSHILANLEQGLAEDGGMSSVTQEGRQASIRLWRSRLGRVM

SEQ ID NO: 26528 - protein, 105 aa, Artificial Sequence
  Synthetic polypeptide
INTETENQIVNVFTYPGQFGARLSRRRRHEQRDSGGQTSLYPAVEVTSGPGDVLHGKLSAPDEGLCAGRGGVSFGYQVLPRARAPAAQRHRPDFPAARSFTSGRI

SEQ ID NO: 26529 - protein, 94 aa, Artificial Sequence
  Synthetic polypeptide
MFSHILANLEQGLAEDGGMSSVTQEGRQASIRLWRSRLGRVMYSMANCLLLMKDYVLAVEAYHSVIKYYPEQEPQLLSGIGRISLQRVPSPRAE

SEQ ID NO: 26530 - protein, 104 aa, Artificial Sequence
  Synthetic polypeptide
INTETENQIVNVFTYPGQFGARLSRRRRHEQRDSGGQTSLYPAVEVTSGPGDVLHGKLSAPDEGLCAGRGGVSFGYQVLPRARAPAAQRHRPDFPAADWRHKNS

SEQ ID NO: 26531 - protein, 230 aa, Artificial Sequence
  Synthetic polypeptide
MFSHILANLEQGLAEDGGMSSVTQEGRQASIRLWRSRLGRVMYSMANCLLLMKDYVLAVEAYHSVIKYYPEQEPQLLSGIGRISLQQIGDIKTAEKYFQDVEKVTQKLDGLQGKIMVLMNSAFLHLGQNNFAEAHRFFTEILRMDPRNAVANNNAAVCLLYLGKLKDSLRQLEAMVQQDPRHYLHESVLFNLTTMYELESSRSMQKKQALLEAVAGKEGDSFNTQCLKLA

SEQ ID NO: 26532 - protein, 24 aa, Artificial Sequence
  Synthetic polypeptide
RGPQPLVHRPVLELGHTTGGFGMP

SEQ ID NO: 26533 - protein, 26 aa, Artificial Sequence
  Synthetic polypeptide
GVPNPWSTDRYWNWATLQEDLECPDR

SEQ ID NO: 26534 - protein, 310 aa, Artificial Sequence
  Synthetic polypeptide
GSPTPGPQTGTGTGPHYRRIWNALTDNYGNVMPVDWKSSHTRTLHLLTLNLSEKGVSDSLLFDTSDDEELREQLDMHSIIVSCVNDEPLFTADQVIEEIEEMMQESPDPEDDETPTQSDRLSMLSQEIQTLKRSSTGSYEERVKRLSVSELNEILEEIETAIKEYSEELVQQLALRDELEFEKEVKNSFISVLIEVQNKQKEHKETAKKKKKLKNGSSQNGKNERSHMPGTRFSMEGISNVIQNGLRHTFGNSGGEKQYLTTVIPYEKKNGPPSVEDLQILTKILRAMKEDSEKVPSLLTDYILKVLCPT

SEQ ID NO: 26535 - protein, 283 aa, Artificial Sequence
  Synthetic polypeptide
GSPTPGPQTGTGTGPHYRRIWNALTDNYGNVMPVDWKSSHTRTLHLLTLNLSEKGVSDSLLFDTSDDEELREQLDMHSIIVSCVNDEPLFTADQVIEEIEEMMQESPDPEDDETPTQSDRLSMLSQEIQTLKRSSTGSYEERVKRLSVSELNEILEEIETAIKEYSEELVQQLALRDELEFEKEVKNSFISVLIEVQNKQKEHKETAKKKKKLKNGSSQNGKNERSHMPGTYLTTVIPYEKKNGPPSVEDLQILTKILRAMKEDSEKVPSLLTDYILKVLCPT

SEQ ID NO: 26536 - protein, 235 aa, Artificial Sequence
  Synthetic polypeptide
GSPTPGPQTGTGTGPHYRRIWNALTDNYGNVMPVDWKSSHTRTLHLLTLNLSEKGVSDSLLFDTSDDEELREQLDMHSIIVSCVNDEPLFTADQVIEEIEEMMQESPDPEDDETPTQSDRLSMLSQEIQTLKRSSTGSYEERVKRLSVSELNEILEEIETAIKEYSEELVQQLALRDELEFEKEVKNSFISVLIEVQNKQKEHKETAKKKKKLKNGSSQNGKNERSHMPGTFFVP

SEQ ID NO: 26537 - protein, 43 aa, Artificial Sequence
  Synthetic polypeptide
ARSSDFPGQYGSSQMLPASPLSLPAFQSCPFNSLYSFISSNSG

SEQ ID NO: 26538 - protein, 139 aa, Artificial Sequence
  Synthetic polypeptide
SQHFGRPRWEGCFRPEVRTFLGNMVQAKCYQLLLSVFQHSNRALSTPYIHSLAPIVVEKLKAVERNRPASNIELLAVQEGIKVLETLVALGEEQNILGSQPESTLRSLPPDPILLPPAHNSQAPVIYPPRPPKVLGLQA

SEQ ID NO: 26539 - protein, 54 aa, Artificial Sequence
  Synthetic polypeptide
TYNPSTLGGQGGRVALGQKFGLSWAIWFKPNVTSFSSQSSSIPIVPFQLLIFIH

SEQ ID NO: 26540 - protein, 196 aa, Artificial Sequence
  Synthetic polypeptide
SQHFGRPRWEGCFRPEVRTFLGNMVQAKCYQLLLSVFQHSNRALSTPYIHSLAPIVVEKLKAVERNRPASNIELLAVQEGIKVLETLVALGEEQNRVQLLALLVPTLISYLLDENSFASASSASKDLHEFALQNLMHIGPLYPHAFKTVMGAAPELKVRLETAVRASQASKAKAAARQPAPAIHSAPTIKLKTSFF

SEQ ID NO: 26541 - protein, 233 aa, Artificial Sequence
  Synthetic polypeptide
ARSSDFPGQYEDSVPTPDEVSMLTAIALFLWSASNEIIGVQSLQNGCMNRFKNALNSCDPWVQAKCYQLLLSVFQHSNRALSTPYIHSLAPIVVEKLKAVERNRPASNIELLAVQEGIKVLETLVALGEEQNRVQLLALLVPTLISYLLDENSFASASSASKDLHEFALQNLMHIGPLYPHAFKTVMGAAPELKVRLETAVRASQASKAKAAARQPAPAIHSAPTIKLKTSFF

SEQ ID NO: 26542 - protein, 33 aa, Artificial Sequence
  Synthetic polypeptide
SQHFGRPRWEGCFRPEVRTFLGNMKTLYLHLMK

SEQ ID NO: 26543 - protein, 16 aa, Artificial Sequence
  Synthetic polypeptide
FCCPIANYKNHGHGLS

SEQ ID NO: 26544 - protein, 1278 aa, Artificial Sequence
  Synthetic polypeptide
YHMPKLLRSTGRTNLLSEIMKKEKGICVSFAVPSQITKIMAMGLAENKSTLGPEEVRKSALTLVMGPLDNPNPILRCAAGEALGRMAQVVGEATFIARMAQYSFDKLKSARDVVSRTGHSLALGCLHRYVGGIGSGQHLKTSVSILLALAQDGTSPEVQTWSLHSLALIVDSSGPMYRGYVEPTLSLVLTLLLTVPPSHTEVHQCLGRCLGAIITTVGPELQGNGATTSTIRSSCLVGCAITQDHSDSLVQAAAISCLQQLHMFAPRHVNLSSLVPSLCVHLCSSHLLLRRAAVACLRQLAQREAAEVCEYAMSLAKNTGDKESSSANVSPFAPGVSSRTDIHCRHQGVNITETGLEGLLFGMLDRETDRKLCSDIHDTLGHMLSSLAVEKLSHWLMLCKDVLAASSDMSTATLLSSGKDEEAEKKDEMDDDTMFTTLGEEDKSKPFVAPRWATRVFAADCLCRIINLCENADQAHFDLALARSAKLRNPTNDLLVLHLSDLIRMAFMAATDHSNQLRMAGLQALEDIIKKFASVPEPEFPGHVILEQYQANVGAALRPAFSQDTPSDIIAKACQVCSTWIGSGVVSDLNDLRRVHNLLVSSLDKVQAGKGSSSQLYRESATTMEKLAVLKAWAEVYVVAMNIKKEAESKPKRAIKNTDDDDDDCGTIDELPPDSLITLVQPELPTLSRLWLAALKDYALLTLPAEFSSQLPPDGGAFYTPETIDTARLHYRNSWAPILHAVALWLNSTGFTCSESTEAAAISGLQKRSTSVNLNQASGAVGSAKSLPEINKDRMHLILGVSIQFLCSPRPEEPIEHVTACLQALHTLLDSPYARVHIAEDQLIGVELLSVLHRLLLTWNPSSVQLLVTGVVQQIVRAAQDYLQEKRNTLNEDDMEKEACTVLGEGGDSGGLIPGKSLVFATMELLMFILVRHMPHLSTKVSDSPSHIATKTRLSEESARLVAATVTILSDLPSLCSPAGCMTILPTILFLIARILKDTAIKSADNQVPPPVSAALQGIKSIVTLSMAKTEAGVQKQWTALIRSTLACILEYSQPEDSVPTPDEVSMLTAIALFLWSASNEIIGVQSLQNGCMNRFKNALNSCDPWVQAKCYQLLLSVFQHSNRALSTPYIHSLAPIVVEKLKAVERNRPASNIELLAVQEGIKVLETLVALGEEQNRVQLLALLVPTLISYLLDENSFASASSASKDLHEFALQNLMHIGPLYPHAFKTVMGAAPELKVRLETAVRASQASKAKAAARQPAPAIHSAPTIKLKTSFF

SEQ ID NO: 26545 - protein, 23 aa, Artificial Sequence
  Synthetic polypeptide
RRKKEFVLVLLSHRKLQKSWPWA

SEQ ID NO: 26546 - protein, 1189 aa, Artificial Sequence
  Synthetic polypeptide
YHMPKLLRSTGRTNLLSEIMKKEKGICVSFAVPSQITKIMAMGLAENKSTLGPEEVRKSALTLVMGPLDNPNPILRCAAGEALGRMAQVVGEATFIARMAQYSFDKLKSARDVVSRTGHSLALGCLHRYVGGIGSGQHLKTSVSILLALAQDGTSPEVQTWSLHSLALIVDSSGPMYRGYVEPTLSLVLTLLLTVPPSHTEVHQCLGRCLGAIITTVGPELQGNGATTSTIRSSCLVGCAITQDHSDSLVQAAAISCLQQLHMFAPRHVNLSSLVPSLCVHLCSSHLLLRRAAVACLRQLAQREAAEVCEYAMSLAKNTGDKESSSANVSPFAPGVSSRTDIHCRHQGVNITETGLEGLLFGMLDRETDRKLCSDIHDTLGHMLSSLAVEKLSHWLMLCKDVLAASSDMSTATLLSSGKDEEAEKKDEMDDDTMFTTLGEEDKSKPFVAPRWATRVFAADCLCRIINLCENADQAHFDLALARSAKLRNPTNDLLVLHLSDLIRMAFMAATDHSNQLRMAGLQALEDIIKKFASVPEPEFPGHVILEQYQANVGAALRPAFSQDTPSDIIAKACQVCSTWIGSGVVSDLNDLRRVHNLLVSSLDKVQAGKGSSSQLYRESATTMEKLAVLKAWAEVYVVAMNIKKEAESKPKRAIKNTDDDDDDCGTIDELPPDSLITLVQPELPTLSRLWLAALKDYALLTLPAEFSSQLPPDGGAFYTPETIDTARLHYRNSWAPILHAVALWLNSTGFTCSESTEAAAISGLQKRSTSVNLNQASGAVGSAKSLPEINKDRMHLILGVSIQFLCSPRPEEPIEHVTACLQALHTLLDSPYARVHIAEDQLIGVELLSVLHRLLLTWNPSSVQLLVTGVVQQIVRAAQDYLQEKRNTLRCMTILPTILFLIARILKDTAIKSADNQVPPPVSAALQGIKSIVTLSMAKTEAGVQKQWTALIRSTLACILEYSQPEDSVPTPDEVSMLTAIALFLWSASNEIIGVQSLQNGCMNRFKNALNSCDPWVQAKCYQLLLSVFQHSNRALSTPYIHSLAPIVVEKLKAVERNRPASNIELLAVQEGIKVLETLVALGEEQNRVQLLALLVPTLISYLLDENSFASASSASKDLHEFALQNLMHIGPLYPHAFKTVMGAAPELKVRLETAVRASQASKAKAAARQPAPAIHSAPTIKLKTSFF

SEQ ID NO: 26547 - protein, 48 aa, Artificial Sequence
  Synthetic polypeptide
HDAQRKCSLEYFRFWIWDTLPMVELHDLEYSVLDKKTGLQLTPKNLQT

SEQ ID NO: 26548 - protein, 44 aa, Artificial Sequence
  Synthetic polypeptide
KPQNLKCSKIQNFLSADMMLKGNAHWNISDFGFGTLYQWWNCTT

SEQ ID NO: 26549 - protein, 240 aa, Artificial Sequence
  Synthetic polypeptide
CSKEMLTGIFQILDLGHSTNGGIARLRVFGTGQKDWTATDPKEPADLVAIAFGGVCVGFSNAKFGHPNNIIGVGGAKSMADGWETARRLDRPPILENDENGILLVPGCEWAVFRLAHPGVITRIEIDTKYFEGNAPDSCKVDGCILTTQEEEAVIRQKWILPAHKWKPLLPVTKLSPNQSHLFDSLTLELQDVITHARLTIVPDGGVSRLRLRGFPSSICLLRPREKPMLKFSVSFKANP

SEQ ID NO: 26550 - protein, 41 aa, Artificial Sequence
  Synthetic polypeptide
GRAWWLTPVIQTLWETKTGGSLEVRSLRPAWPTWYWKNYKY

SEQ ID NO: 26551 - protein, 15 aa, Artificial Sequence
  Synthetic polypeptide
DQPGQHGTGKITNID

SEQ ID NO: 26552 - protein, 56 aa, Artificial Sequence
  Synthetic polypeptide
GQEFKTSLANMVLEKLQILTSYLREEHLYCIWCGTAYEDKEDLSSNCPGPTSADHD

SEQ ID NO: 26553 - protein, 552 aa, Artificial Sequence
  Synthetic polypeptide
AAIKNDEFMSFVGTWMKLETIILSKLSQGQKNQTPHVLTHRFTFQVIIDGREFPEGEGRSKKEAKNAAAKLAVEILNKEKKAVSPLLLTTTNSSEGLSMGNYIGLINRIAQKKRLTVNYEQCASGVHGPEGFHYKCKMGQKEYSIGTGSTKQEAKQLAAKLAYLQILSEETSVKSDYLSSGSFATTCESQSNSLVTSTLASESSSEGDFSADTSEINSNSDSLNSSSLLMNGLRNNQRKAKRSLAPRFDLPDMKETKYTVDKRFGMDFKEIELIGSGGFGQVFKAKHRIDGKTYVIKRVKYNNEKAEREVKALAKLDHVNIVHYNGCWDGFDYDPETSDDSLESSDYDPENSKNSSRSKTKCLFIQMEFCDKGTLEQWIEKRRGEKLDKVLALELFEQITKGVDYIHSKKLIHRDLKPSNIFLVDTKQVKIGDFGLVTSLKNDGKRTRSKGTLRYMSPEQISSQDYGKEVDLYALGLILAELLHVCDTAFETSKFFTDLRDGIISDIFDKKEKTLLQKLLSKKPEDRPNTSEILRTLTVWKKSPEKNERHTC

SEQ ID NO: 26554 - protein, 30 aa, Artificial Sequence
  Synthetic polypeptide
SWKPLFSANYRKDKKTKHRMFSLIGLHFKL

SEQ ID NO: 26555 - protein, 511 aa, Artificial Sequence
  Synthetic polypeptide
AAIKNDEFMSFVGTWMKLETIILSKLSQGQKNQTPHVLTHRFTFQVIIDGREFPEGEGRSKKEAKNAAAKLAVEILNKEKKAVSPLLLTTTNSSEGLSMGNYIGLINRIAQKKRLTVNYEQCASGVHGPEGFHYKCKMGQKEYSIGTGSTKQEAKQLAAKLAYLQILSEETSVKSDYLSSGSFATTCESQSNSLVTSTLASESSSEGDFSADTSEINSNSDSLNSSSLLMNGLRNNQRKAKRSLAPRFDLPDMKETKYTVDKRKAEREVKALAKLDHVNIVHYNGCWDGFDYDPETSDDSLESSDYDPENSKNSSRSKTKCLFIQMEFCDKGTLEQWIEKRRGEKLDKVLALELFEQITKGVDYIHSKKLIHRDLKPSNIFLVDTKQVKIGDFGLVTSLKNDGKRTRSKGTLRYMSPEQISSQDYGKEVDLYALGLILAELLHVCDTAFETSKFFTDLRDGIISDIFDKKEKTLLQKLLSKKPEDRPNTSEILRTLTVWKKSPEKNERHTC

SEQ ID NO: 26556 - protein, 142 aa, Artificial Sequence
  Synthetic polypeptide
AAIKNDEFMSFVGTWMKLETIILSKLSQGQKNQTPHVLTHRFTFQVIIDGREFPEGEGRSKKEAKNAAAKLAVEILNKEKKAVSPLLLTTTNSSEGLSMGNYIGLINRIAQKKRLTVNYEQCASGVHGPEGFHYKCKMGQKE

SEQ ID NO: 26557 - protein, 103 aa, Artificial Sequence
  Synthetic polypeptide
AAIKNDEFMSFVGTWMKLETIILSKLSQGQKNQTPHVLTHRFTFQVIIDGREFPEGEGRSKKEAKNAAAKLAVEILNKEKKAVSPLLLTTTNSSEGLSMGNYI

SEQ ID NO: 26558 - protein, 18 aa, Artificial Sequence
  Synthetic polypeptide
WCAPVVPATREVEISGKQ

SEQ ID NO: 26559 - protein, 28 aa, Artificial Sequence
  Synthetic polypeptide
SQLLGRLRFQANNEQEISLHLGSLLQIH

SEQ ID NO: 26560 - protein, 770 aa, Artificial Sequence
  Synthetic polypeptide
GLARWLTPVIPALWEAEAGGSRALATVEDFQIRPHTLYVHSYKAPTFCDYCGEMLWGLVRQGLKCEGCGLNYHKRCAFKIPNNCSGVRKRRLSNVSLPGPGLSVPRPLQPEYVALPSEESHVHQEPSKRIPSWSGRPIWMEKMVMCRVKVPHTFAVHSYTRPTICQYCKRLLKGLFRQGMQCKDCKFNCHKRCASKVPRDCLGEVTFNGEPSSLGTDTDIPMDIDNNDINSDSSRGLDDTEEPSPPEDKMFFLDPSDLDVERDEEAVKTISPSTSNNIPLMRVVQSIKHTKRKSSTMVKEGWMVHYTSRDNLRKRHYWRLDSKCLTLFQNESGSKYYKEIPLSEILRISSPRDFTNISQGSNPHCFEIITDTMVYFVGENNGDSSHNPVLAATGVGLDVAQSWEKAIRQALMPVTPQASVCTSPGQGKDHKDLSTSISVSNCQIQENVDISTVYQIFADEVLGSGQFGIVYGGKHRKTGRDVAIKVIDKMRFPTKQESQLRNEVAILQNLHHPGIVNLECMFETPERVFVVMEKLHGDMLEMILSSEKSRLPERITKFMVTQILVALRNLHFKNIVHCDLKPENVLLASAEPFPQVKLCDFGFARIIGEKSFRRSVVGTPAYLAPEVLRSKGYNRSLDMWSVGVIIYVSLSGTFPFNEDEDINDQIQNAAFMYPPNPWREISGEAIDLINNLLQVKMRKRYSVDKSLSHPWLQDYQTWLDLREFETRIGERYITHESDDARWEIHAYTHNLVYPKHFIMAPNPDDMEEDP

SEQ ID NO: 26561 - protein, 14 aa, Artificial Sequence
  Synthetic polypeptide
SQHFGRPRRADHEL

SEQ ID NO: 26562 - protein, 47 aa, Artificial Sequence
  Synthetic polypeptide
PGAVAHACNPSTLGGRGGRITSFSHSRRLPDSSTYSLCTFLQSSYFL

SEQ ID NO: 26563 - protein, 165 aa, Artificial Sequence
  Synthetic polypeptide
GLARWLTPVIPALWEAEAGGSRALATVEDFQIRPHTLYVHSYKAPTFCDYCGEMLWGLVRQGLKCEGCGLNYHKRCAFKIPNNCSGVRKRRLSNVSLPGPGLSVPRPLQPEYVALPSEESHVHQEPSKRIPSWSGRPIWMEKMVMCRVKVPHTFAVHSYTRPTIC

SEQ ID NO: 26564 - protein, 33 aa, Artificial Sequence
  Synthetic polypeptide
PGNGGSHLFSHSRRLPDSSTYSLCTFLQSSYFL

SEQ ID NO: 26565 - protein, 755 aa, Artificial Sequence
  Synthetic polypeptide
MATVAHTSLATVEDFQIRPHTLYVHSYKAPTFCDYCGEMLWGLVRQGLKCEGCGLNYHKRCAFKIPNNCSGVRKRRLSNVSLPGPGLSVPRPLQPEYVALPSEESHVHQEPSKRIPSWSGRPIWMEKMVMCRVKVPHTFAVHSYTRPTICQYCKRLLKGLFRQGMQCKDCKFNCHKRCASKVPRDCLGEVTFNGEPSSLGTDTDIPMDIDNNDINSDSSRGLDDTEEPSPPEDKMFFLDPSDLDVERDEEAVKTISPSTSNNIPLMRVVQSIKHTKRKSSTMVKEGWMVHYTSRDNLRKRHYWRLDSKCLTLFQNESGSKYYKEIPLSEILRISSPRDFTNISQGSNPHCFEIITDTMVYFVGENNGDSSHNPVLAATGVGLDVAQSWEKAIRQALMPVTPQASVCTSPGQGKDHKDLSTSISVSNCQIQENVDISTVYQIFADEVLGSGQFGIVYGGKHRKTGRDVAIKVIDKMRFPTKQESQLRNEVAILQNLHHPGIVNLECMFETPERVFVVMEKLHGDMLEMILSSEKSRLPERITKFMVTQILVALRNLHFKNIVHCDLKPENVLLASAEPFPQVKLCDFGFARIIGEKSFRRSVVGTPAYLAPEVLRSKGYNRSLDMWSVGVIIYVSLSGTFPFNEDEDINDQIQNAAFMYPPNPWREISGEAIDLINNLLQVKMRKRYSVDKSLSHPWLQDYQTWLDLREFETRIGERYITHESDDARWEIHAYTHNLVYPKHFIMAPNPDDMEEDP

SEQ ID NO: 26566 - protein, 8 aa, Artificial Sequence
  Synthetic polypeptide
WQRWLTPL

SEQ ID NO: 26567 - protein, 150 aa, Artificial Sequence
  Synthetic polypeptide
MATVAHTSLATVEDFQIRPHTLYVHSYKAPTFCDYCGEMLWGLVRQGLKCEGCGLNYHKRCAFKIPNNCSGVRKRRLSNVSLPGPGLSVPRPLQPEYVALPSEESHVHQEPSKRIPSWSGRPIWMEKMVMCRVKVPHTFAVHSYTRPTIC

SEQ ID NO: 26568 - protein, 870 aa, Artificial Sequence
  Synthetic polypeptide
FCSSIILNPSTPLSQLTFFIPPPSIIFYFNFVICLILYIFVFISVFLLDCKFLEDKDYSVFTNCGASILHLPDMQEFPECGFFGMYDKILLFRHDMNSENILQLITSADEIHEGDLVEVVLSALATVEDFQIRPHTLYVHSYKAPTFCDYCGEMLWGLVRQGLKCEGCGLNYHKRCAFKIPNNCSGVRKRRLSNVSLPGPGLSVPRPLQPEYVALPSEESHVHQEPSKRIPSWSGRPIWMEKMVMCRVKVPHTFAVHSYTRPTICQYCKRLLKGLFRQGMQCKDCKFNCHKRCASKVPRDCLGEVTFNGEPSSLGTDTDIPMDIDNNDINSDSSRGLDDTEEPSPPEDKMFFLDPSDLDVERDEEAVKTISPSTSNNIPLMRVVQSIKHTKRKSSTMVKEGWMVHYTSRDNLRKRHYWRLDSKCLTLFQNESGSKYYKEIPLSEILRISSPRDFTNISQGSNPHCFEIITDTMVYFVGENNGDSSHNPVLAATGVGLDVAQSWEKAIRQALMPVTPQASVCTSPGQGKDHKDLSTSISVSNCQIQENVDISTVYQIFADEVLGSGQFGIVYGGKHRKTGRDVAIKVIDKMRFPTKQESQLRNEVAILQNLHHPGIVNLECMFETPERVFVVMEKLHGDMLEMILSSEKSRLPERITKFMVTQILVALRNLHFKNIVHCDLKPENVLLASAEPFPQVKLCDFGFARIIGEKSFRRSVVGTPAYLAPEVLRSKGYNRSLDMWSVGVIIYVSLSGTFPFNEDEDINDQIQNAAFMYPPNPWREISGEAIDLINNLLQVKMRKRYSVDKSLSHPWLQDYQTWLDLREFETRIGERYITHESDDARWEIHAYTHNLVYPKHFIMAPNPDDMEEDP

SEQ ID NO: 26569 - protein, 47 aa, Artificial Sequence
  Synthetic polypeptide
IVSSWKIRTILSLQTVGPVSCTYRTCKNFQSVDSLACMTKFFSFAMT

SEQ ID NO: 26570 - protein, 30 aa, Artificial Sequence
  Synthetic polypeptide
GLFCLYKLWGQYLALTGHARISRVWILWHV

SEQ ID NO: 26571 - protein, 805 aa, Artificial Sequence
  Synthetic polypeptide
VQEMETSLGNMFPECGFFGMYDKILLFRHDMNSENILQLITSADEIHEGDLVEVVLSALATVEDFQIRPHTLYVHSYKAPTFCDYCGEMLWGLVRQGLKCEGCGLNYHKRCAFKIPNNCSGVRKRRLSNVSLPGPGLSVPRPLQPEYVALPSEESHVHQEPSKRIPSWSGRPIWMEKMVMCRVKVPHTFAVHSYTRPTICQYCKRLLKGLFRQGMQCKDCKFNCHKRCASKVPRDCLGEVTFNGEPSSLGTDTDIPMDIDNNDINSDSSRGLDDTEEPSPPEDKMFFLDPSDLDVERDEEAVKTISPSTSNNIPLMRVVQSIKHTKRKSSTMVKEGWMVHYTSRDNLRKRHYWRLDSKCLTLFQNESGSKYYKEIPLSEILRISSPRDFTNISQGSNPHCFEIITDTMVYFVGENNGDSSHNPVLAATGVGLDVAQSWEKAIRQALMPVTPQASVCTSPGQGKDHKDLSTSISVSNCQIQENVDISTVYQIFADEVLGSGQFGIVYGGKHRKTGRDVAIKVIDKMRFPTKQESQLRNEVAILQNLHHPGIVNLECMFETPERVFVVMEKLHGDMLEMILSSEKSRLPERITKFMVTQILVALRNLHFKNIVHCDLKPENVLLASAEPFPQVKLCDFGFARIIGEKSFRRSVVGTPAYLAPEVLRSKGYNRSLDMWSVGVIIYVSLSGTFPFNEDEDINDQIQNAAFMYPPNPWREISGEAIDLINNLLQVKMRKRYSVDKSLSHPWLQDYQTWLDLREFETRIGERYITHESDDARWEIHAYTHNLVYPKHFIMAPNPDDMEEDP

SEQ ID NO: 26572 - protein, 33 aa, Artificial Sequence
  Synthetic polypeptide
LLEFRRWRPAWAICFQSVDSLACMTKFFSFAMT

SEQ ID NO: 26573 - protein, 33 aa, Artificial Sequence
  Synthetic polypeptide
STWGGLRQNDCLSSGDGDQPGQYVSRVWILWHV

SEQ ID NO: 26574 - protein, 399 aa, Artificial Sequence
  Synthetic polypeptide
VVDTGDALPRSAPREGPCSSCWRPAGPQPLAVKLFWLESRLQEITPWRCRDKAPDILAQYGTTLTVFFSFRTPMELGENYHQPAILNSSALRQIAEGTSISEMWQNDLQPLLIERYPGSPGSYAARQHIMQRIQRLQADWVLEIDTFLSQTPYGYRSFSNIISTLNPTAKRHLVLACHYDSKYFSHWNNRVFVGATDSAVPCAMMLELARALDKKLLSLKTVSDSKPDLSLQLIFFDGEEAFLHWSPQDSLYGSRHLAAKMASTPHPPGARGTSQLHGMDLLVLLDLIGAPNPTFPNFFPNSARWFERLQAIEHELHELGLLKDHSLEGRYFQNYSYGGVIQDDHIPFLRRGVPVLHLIPSPFPEVWHTMDDNEENLDESTIDNLNKILQVFVLEYLHL

SEQ ID NO: 26575 - protein, 21 aa, Artificial Sequence
  Synthetic polypeptide
PSFSASGLPWSWVRITTSQPF

SEQ ID NO: 26576 - protein, 101 aa, Artificial Sequence
  Synthetic polypeptide
SSLSNKVSKLSWIEKKMAATLFGKIPSSTVQEALHNFLKAEELCPGYSNPNYMYLAKCYTDLEENQNALKFCNLALLLPTVTKEDKEAQKEMQKIMTSLKR

SEQ ID NO: 26577 - protein, 6 aa, Artificial Sequence
  Synthetic polypeptide
ATRSQN

SEQ ID NO: 26578 - protein, 22 aa, Artificial Sequence
  Synthetic polypeptide
AMIVPLYGMIQPEQQGLKTELD

SEQ ID NO: 26579 - protein, 84 aa, Artificial Sequence
  Synthetic polypeptide
SSLSNKVSKLSWIEKKMAATLFGKIPSSTVQEALHNFLKAEELCPGYSNPNYMYLAKCYTDLEENQNALKFCNLALLLPTVTKE

SEQ ID NO: 26580 - protein, 86 aa, Artificial Sequence
  Synthetic polypeptide
SSLSNKVSKLSWIEKKMAATLFGKIPSSTVQEALHNFLKAEELCPGYSNPNYMYLAKCYTDLEENQNALKFCNLALLLPTVTKEEL

SEQ ID NO: 26581 - protein, 74 aa, Artificial Sequence
  Synthetic polypeptide
SSLSNKVSKLSWIEKKMAATLFGKIPSSTVQEALHNFLKAEELCPGYSNPNYMYLAKCYTDLEENQNALKFCNL

SEQ ID NO: 26582 - protein, 106 aa, Artificial Sequence
  Synthetic polypeptide
SSLSNKVSKLSWIEKKMAATLFGKIPSSTVQEALHNFLKAEELCPGYSNPNYMYLAKCYTDLEENQNALKFCNLALLLPTVTKEDKEAQKEMQKIMTSLKRLRKTK

SEQ ID NO: 26583 - protein, 63 aa, Artificial Sequence
  Synthetic polypeptide
KLHHKRSDRRTWRIFRLKSKLRRQVEVIIKFLFHPSSMFEDSVNLWWKQTSWKRWKNLGQYAM

SEQ ID NO: 26584 - protein, 11 aa, Artificial Sequence
  Synthetic polypeptide
RVNLGGRWKSS

SEQ ID NO: 26585 - protein, 483 aa, Artificial Sequence
  Synthetic polypeptide
HTICEAGGSHHKVSVSPVVHVRGLCESVVEADLVEALEKFGTICYVMMMPFKRQALVEFENIDSAKECVTFAADEPVYIAGQQAFFNYSTSKRITRPGNTDDPSGGNKVLLLSIQNPLYPITVDVLYTVCNPVGKVQRIVIFKRNGIQAMVEFESVLCAQKAKAALNGADIYAGCCTLKIEYARPTRLNVIRNDNDSWDYTKPYLGRRDRGKGRQRQAILGEHPSSFRHDGYGSHGPLLPLPSRYRMGSRDTPELVAYPLPQASSSYMHGGNPSGSVVMVSGLHQLKMNCSRVFNLFCLYGNIEKVKFMKTIPGTALVEMGDEYAVERAVTHLNNVKLFGKRLNVCVSKQHSVVPSQIFELEDGTSSYKDFAMSKNNRFTSAGQASKNIIQPPSCVLHYYNVPLCVTEETFTKLCNDHEVLTFIKYKVFDAKPSAKTLSGLLEWECKTDAVEALTALNHYQIRVPNGSNPYTLKLCFSTSSHL

SEQ ID NO: 26586 - protein, 46 aa, Artificial Sequence
  Synthetic polypeptide
SIQFVRQVEVIIKFLFHPSSMFEDSVNLWWKQTSWKRWKNLGQYAM

SEQ ID NO: 26587 - protein, 449 aa, Artificial Sequence
  Synthetic polypeptide
HTICEAGGSHHKVSVSPVVHVRGLCESVVEADLVEALEKFGTICYVMMMPFKRQALVEFENIDSAKECVTFAADEPVYIAGQQAFFNYSTSKRITRPGNTDDPSGGNKVLLLSIQNPLYPITVDVLYTVCNPVGKVQRIVIFKRNGIQAMPTRLNVIRNDNDSWDYTKPYLGRRDRGKGRQRQAILGEHPSSFRHDGYGSHGPLLPLPSRYRMGSRDTPELVAYPLPQASSSYMHGGNPSGSVVMVSGLHQLKMNCSRVFNLFCLYGNIEKVKFMKTIPGTALVEMGDEYAVERAVTHLNNVKLFGKRLNVCVSKQHSVVPSQIFELEDGTSSYKDFAMSKNNRFTSAGQASKNIIQPPSCVLHYYNVPLCVTEETFTKLCNDHEVLTFIKYKVFDAKPSAKTLSGLLEWECKTDAVEALTALNHYQIRVPNGSNPYTLKLCFSTSSHL

SEQ ID NO: 26588 - protein, 483 aa, Artificial Sequence
  Synthetic polypeptide
HTICEAGGSHHKVSVSPVVHVRGLCESVVEADLVEALEKFGTICYVMMMPFKRQALVEFENIDSAKECVTFAADEPVYIAGQQAFFNYSTSKRITRPGNTDDPSGGNKVLLLSIQNPLYPITVDVLYTVCNPVGKVQRIVIFKRNGIQAMLMFESVLCAQKAKAALNGADIYAGCCTLKIEYARPTRLNVIRNDNDSWDYTKPYLGRRDRGKGRQRQAILGEHPSSFRHDGYGSHGPLLPLPSRYRMGSRDTPELVAYPLPQASSSYMHGGNPSGSVVMVSGLHQLKMNCSRVFNLFCLYGNIEKVKFMKTIPGTALVEMGDEYAVERAVTHLNNVKLFGKRLNVCVSKQHSVVPSQIFELEDGTSSYKDFAMSKNNRFTSAGQASKNIIQPPSCVLHYYNVPLCVTEETFTKLCNDHEVLTFIKYKVFDAKPSAKTLSGLLEWECKTDAVEALTALNHYQIRVPNGSNPYTLKLCFSTSSHL

SEQ ID NO: 26589 - protein, 449 aa, Artificial Sequence
  Synthetic polypeptide
HTICEAGGSHHKVSVSPVVHVRGLCESVVEADLVEALEKFGTICYVMMMPFKRQALVEFENIDSAKECVTFAADEPVYIAGQQAFFNYSTSKRITRPGNTDDPSGGNKVLLLSIQNPLYPITVDVLYTVCNPVGKVQRIVIFKRNGIQAMVDRLNVIRNDNDSWDYTKPYLGRRDRGKGRQRQAILGEHPSSFRHDGYGSHGPLLPLPSRYRMGSRDTPELVAYPLPQASSSYMHGGNPSGSVVMVSGLHQLKMNCSRVFNLFCLYGNIEKVKFMKTIPGTALVEMGDEYAVERAVTHLNNVKLFGKRLNVCVSKQHSVVPSQIFELEDGTSSYKDFAMSKNNRFTSAGQASKNIIQPPSCVLHYYNVPLCVTEETFTKLCNDHEVLTFIKYKVFDAKPSAKTLSGLLEWECKTDAVEALTALNHYQIRVPNGSNPYTLKLCFSTSSHL

SEQ ID NO: 26590 - protein, 223 aa, Artificial Sequence
  Synthetic polypeptide
HTICEAGGSHHKVSVSPVVHVRGLCESVVEADLVEALEKFGTICYVMMMPFKRQALVEFENIDSAKECVTFAADEPVYIAGQQAFFNYSTSKRITRPGNTDDPSGGNKVLLLSIQNPLYPITVDVLYTVCNPVGKVQRIVIFKRNGIQAMLMFESVLCAQKAKAALNGADIYAGCCTLKIEYARPTRLNVIRNDNDSWDYTKPYLGRRGCCWLMLKLLERSPL

SEQ ID NO: 26591 - protein, 221 aa, Artificial Sequence
  Synthetic polypeptide
HTICEAGGSHHKVSVSPVVHVRGLCESVVEADLVEALEKFGTICYVMMMPFKRQALVEFENIDSAKECVTFAADEPVYIAGQQAFFNYSTSKRITRPGNTDDPSGGNKVLLLSIQNPLYPITVDVLYTVCNPVGKVQRIVIFKRNGIQAMVEFESVLCAQKAKAALNGADIYAGCCTLKIEYARPTRLNVIRNDNDSWDYTKPYLGRRGRYFIHFRMYLIC

SEQ ID NO: 26592 - protein, 151 aa, Artificial Sequence
  Synthetic polypeptide
HTICEAGGSHHKVSVSPVVHVRGLCESVVEADLVEALEKFGTICYVMMMPFKRQALVEFENIDSAKECVTFAADEPVYIAGQQAFFNYSTSKRITRPGNTDDPSGGNKVLLLSIQNPLYPITVDVLYTVCNPVGKVQRIVIFKRNGIQAMV

SEQ ID NO: 26593 - protein, 518 aa, Artificial Sequence
  Synthetic polypeptide
WVYKGFPLLLLPHFLLLPPCKKCLSPPTMILRPHQPCGTEAGGSHHKVSVSPVVHVRGLCESVVEADLVEALEKFGTICYVMMMPFKRQALVEFENIDSAKECVTFAADEPVYIAGQQAFFNYSTSKRITRPGNTDDPSGGNKVLLLSIQNPLYPITVDVLYTVCNPVGKVQRIVIFKRNGIQAMVEFESVLCAQKAKAALNGADIYAGCCTLKIEYARPTRLNVIRNDNDSWDYTKPYLGRRDRGKGRQRQAILGEHPSSFRHDGYGSHGPLLPLPSRYRMGSRDTPELVAYPLPQASSSYMHGGNPSGSVVMVSGLHQLKMNCSRVFNLFCLYGNIEKVKFMKTIPGTALVEMGDEYAVERAVTHLNNVKLFGKRLNVCVSKQHSVVPSQIFELEDGTSSYKDFAMSKNNRFTSAGQASKNIIQPPSCVLHYYNVPLCVTEETFTKLCNDHEVLTFIKYKVFDAKPSAKTLSGLLEWECKTDAVEALTALNHYQIRVPNGSNPYTLKLCFSTSSHL

SEQ ID NO: 26594 - protein, 49 aa, Artificial Sequence
  Synthetic polypeptide
GLTSHVELRQVEVIIKFLFHPSSMFEDSVNLWWKQTSWKRWKNLGQYAM

SEQ ID NO: 26595 - protein, 484 aa, Artificial Sequence
  Synthetic polypeptide
WVYKGFPLLLLPHFLLLPPCKKCLSPPTMILRPHQPCGTEAGGSHHKVSVSPVVHVRGLCESVVEADLVEALEKFGTICYVMMMPFKRQALVEFENIDSAKECVTFAADEPVYIAGQQAFFNYSTSKRITRPGNTDDPSGGNKVLLLSIQNPLYPITVDVLYTVCNPVGKVQRIVIFKRNGIQAMPTRLNVIRNDNDSWDYTKPYLGRRDRGKGRQRQAILGEHPSSFRHDGYGSHGPLLPLPSRYRMGSRDTPELVAYPLPQASSSYMHGGNPSGSVVMVSGLHQLKMNCSRVFNLFCLYGNIEKVKFMKTIPGTALVEMGDEYAVERAVTHLNNVKLFGKRLNVCVSKQHSVVPSQIFELEDGTSSYKDFAMSKNNRFTSAGQASKNIIQPPSCVLHYYNVPLCVTEETFTKLCNDHEVLTFIKYKVFDAKPSAKTLSGLLEWECKTDAVEALTALNHYQIRVPNGSNPYTLKLCFSTSSHL

SEQ ID NO: 26596 - protein, 518 aa, Artificial Sequence
  Synthetic polypeptide
WVYKGFPLLLLPHFLLLPPCKKCLSPPTMILRPHQPCGTEAGGSHHKVSVSPVVHVRGLCESVVEADLVEALEKFGTICYVMMMPFKRQALVEFENIDSAKECVTFAADEPVYIAGQQAFFNYSTSKRITRPGNTDDPSGGNKVLLLSIQNPLYPITVDVLYTVCNPVGKVQRIVIFKRNGIQAMLMFESVLCAQKAKAALNGADIYAGCCTLKIEYARPTRLNVIRNDNDSWDYTKPYLGRRDRGKGRQRQAILGEHPSSFRHDGYGSHGPLLPLPSRYRMGSRDTPELVAYPLPQASSSYMHGGNPSGSVVMVSGLHQLKMNCSRVFNLFCLYGNIEKVKFMKTIPGTALVEMGDEYAVERAVTHLNNVKLFGKRLNVCVSKQHSVVPSQIFELEDGTSSYKDFAMSKNNRFTSAGQASKNIIQPPSCVLHYYNVPLCVTEETFTKLCNDHEVLTFIKYKVFDAKPSAKTLSGLLEWECKTDAVEALTALNHYQIRVPNGSNPYTLKLCFSTSSHL

SEQ ID NO: 26597 - protein, 484 aa, Artificial Sequence
  Synthetic polypeptide
WVYKGFPLLLLPHFLLLPPCKKCLSPPTMILRPHQPCGTEAGGSHHKVSVSPVVHVRGLCESVVEADLVEALEKFGTICYVMMMPFKRQALVEFENIDSAKECVTFAADEPVYIAGQQAFFNYSTSKRITRPGNTDDPSGGNKVLLLSIQNPLYPITVDVLYTVCNPVGKVQRIVIFKRNGIQAMVDRLNVIRNDNDSWDYTKPYLGRRDRGKGRQRQAILGEHPSSFRHDGYGSHGPLLPLPSRYRMGSRDTPELVAYPLPQASSSYMHGGNPSGSVVMVSGLHQLKMNCSRVFNLFCLYGNIEKVKFMKTIPGTALVEMGDEYAVERAVTHLNNVKLFGKRLNVCVSKQHSVVPSQIFELEDGTSSYKDFAMSKNNRFTSAGQASKNIIQPPSCVLHYYNVPLCVTEETFTKLCNDHEVLTFIKYKVFDAKPSAKTLSGLLEWECKTDAVEALTALNHYQIRVPNGSNPYTLKLCFSTSSHL

SEQ ID NO: 26598 - protein, 258 aa, Artificial Sequence
  Synthetic polypeptide
WVYKGFPLLLLPHFLLLPPCKKCLSPPTMILRPHQPCGTEAGGSHHKVSVSPVVHVRGLCESVVEADLVEALEKFGTICYVMMMPFKRQALVEFENIDSAKECVTFAADEPVYIAGQQAFFNYSTSKRITRPGNTDDPSGGNKVLLLSIQNPLYPITVDVLYTVCNPVGKVQRIVIFKRNGIQAMLMFESVLCAQKAKAALNGADIYAGCCTLKIEYARPTRLNVIRNDNDSWDYTKPYLGRRGCCWLMLKLLERSPL

SEQ ID NO: 26599 - protein, 256 aa, Artificial Sequence
  Synthetic polypeptide
WVYKGFPLLLLPHFLLLPPCKKCLSPPTMILRPHQPCGTEAGGSHHKVSVSPVVHVRGLCESVVEADLVEALEKFGTICYVMMMPFKRQALVEFENIDSAKECVTFAADEPVYIAGQQAFFNYSTSKRITRPGNTDDPSGGNKVLLLSIQNPLYPITVDVLYTVCNPVGKVQRIVIFKRNGIQAMVEFESVLCAQKAKAALNGADIYAGCCTLKIEYARPTRLNVIRNDNDSWDYTKPYLGRRGRYFIHFRMYLIC

SEQ ID NO: 26600 - protein, 186 aa, Artificial Sequence
  Synthetic polypeptide
WVYKGFPLLLLPHFLLLPPCKKCLSPPTMILRPHQPCGTEAGGSHHKVSVSPVVHVRGLCESVVEADLVEALEKFGTICYVMMMPFKRQALVEFENIDSAKECVTFAADEPVYIAGQQAFFNYSTSKRITRPGNTDDPSGGNKVLLLSIQNPLYPITVDVLYTVCNPVGKVQRIVIFKRNGIQAMV

SEQ ID NO: 26601 - protein, 233 aa, Artificial Sequence
  Synthetic polypeptide
KRGKETKVYVGNLGTGAGKGELERAFSYYGPLRTVWIARNPPGFAFVEFEDPRDAEDAVRGLDGKVICGSRVRVELSTGMPRRSRFDRPPARRPFDPNDRCYECGEKGHYAYDCHRYSRRRRSRSRSRSHSRSRGRRYSRSRSRSRGRRSRSASPRRSRSISLRRSRSASLRRSRSGSIKGSRYFQSPSRSRSRSRSISRPRSSRSKSRSPSPKRSRSPSGSPRRSASPERMD

SEQ ID NO: 26602 - protein, 34 aa, Artificial Sequence
  Synthetic polypeptide
ERAMMTMAVLWNRKGGKKPRCMLVTWELALAKES

SEQ ID NO: 26603 - protein, 18 aa, Artificial Sequence
  Synthetic polypeptide
QWRFCGIEKGERNQGVCW

SEQ ID NO: 26604 - protein, 132 aa, Artificial Sequence
  Synthetic polypeptide
KRGKETKVYVGNLGTGAGKGELERAFSYYGPLRTVWIARNPPGFAFVEFEDPRDAEDAVRGLDGKVICGSRVRVELSTGMPRRSRFDRPPARRPFDPNDRCYECGEKGHYAYDCHRYSRRRRSRFLRLSQSP

SEQ ID NO: 26605 - protein, 221 aa, Artificial Sequence
  Synthetic polypeptide
KRGKETKVYVGNLGTGAGKGELERAFSYYGPLRTVWIARNPPGFAFVEFEDPRDAEDAVRGLDGKVICGSRVRVELSTGMPRRSRFDRPPARRPFDPNDRCYECGEKGHYAYDCHRYSRRRRSRSRSRSHSRSRGRRYSRSRSRSRGRRSRSASPRRSRSISLRRSRSASLRRSRSGSIKGSRYFQSPSRSRSRSRSISRPRSSRSPSGSPRRSASPERMD

SEQ ID NO: 26606 - protein, 230 aa, Artificial Sequence
  Synthetic polypeptide
KRGKETKVYVGNLGTGAGKGELERAFSYYGPLRTVWIARNPPGFAFVEFEDPRDAEDAVRGLDGKVICGSRVRVELSTGMPRRSRFDRPPARRPFDPNDRCYECGEKGHYAYDCHRYSRRRRSRSRSRSHSRSRGRRYSRSRSRSRGRRSRSASPRRSRSISLRRSRSASLRRSRSGSIKGSRSPSRSRSRSRSISRPRSSRSKSRSPSPKRSRSPSGSPRRSASPERMD

SEQ ID NO: 26607 - protein, 127 aa, Artificial Sequence
  Synthetic polypeptide
KRGKETKVYVGNLGTGAGKGELERAFSYYGPLRTVWIARNPPGFAFVEFEDPRDAEDAVRGLDGKVICGSRVRVELSTGMPRRSRFDRPPARRPFDPNDRCYECGEKGHYAYDCHRYSRRRRSRYLF

SEQ ID NO: 26608 - protein, 34 aa, Artificial Sequence
  Synthetic polypeptide
GQAQWLTPVIPAIWEAKAEGLLEPRSSRPAWATW

SEQ ID NO: 26609 - protein, 28 aa, Artificial Sequence
  Synthetic polypeptide
SQQFGRPRQKDCWSPGVRDQPGQHGETL

SEQ ID NO: 26610 - protein, 147 aa, Artificial Sequence
  Synthetic polypeptide
PGTVAHTCNPSNLGGQGRRIAGAQEFETSLGNMVRHFDSPYLLYHEKIKTSRVFIRDCSMVSVYPLVLFGGGQVNVQLQRGEFVVSLDDGWIRFVAASHQVAELVKELRCELDQLLQDKIKNPSIDLCTCPRGSRIISTIVKLVTTQ

SEQ ID NO: 26611 - protein, 713 aa, Artificial Sequence
  Synthetic polypeptide
HYKCDFLLLVLKDIVSQRPGLQVILMSATLNAELFSDYFNSCPVITIPGRTFPVDQFFLEDAIAVTRYVLQDGSPYMRSMKQISKEKLKARRNRTAFEEVEEDLRLSLHLQDQDSVKDAVPDQQLDFKQLLARYKGVSKSVIKTMSIMDFEKVNLELIEALLEWIVDGKHSYPPGAILVFLPGLAEIKMLYEQLQSNSLFNNRRSNRCVIHPLHSSLSSEEQQAVFVKPPAGVTKIIISTNIAETSITIDDVVYVIDSGKMKEKRYDASKGMESLEDTFVSQANALQRKGRAGRVASGVCFHLFTSHHYNHQLLKQQLPEIQRVPLEQLCLRIKILEMFSAHNLQSVFSRLIEPPHTDSLRASKIRLRDLGALTPDERLTPLGYHLASLPVDVRIGKLMLFGSIFRCLDPALTIAASLAFKSPFVSPWDKKEEANQKKLEFAFANSDYLALLQAYKGWQLSTKEGVRASYNYCRQNFLSGRVLQEMASLKRQFTELLSDIGFAREGLRAREIEKRAQGGDGVLDATGEEANSNAENPKLISAMLCAALYPNVVQVKSPEGKFQKTSTGAVRMQPKSAELKFVTKNDGYVHIHPSSVNYQVRHFDSPYLLYHEKIKTSRVFIRDCSMVSVYPLVLFGGGQVNVQLQRGEFVVSLDDGWIRFVAASHQVAELVKELRCELDQLLQDKIKNPSIDLCTCPRGSRIISTIVKLVTTQ

SEQ ID NO: 26612 - protein, 10 aa, Artificial Sequence
  Synthetic polypeptide
HDTTSVTSCC

SEQ ID NO: 26613 - protein, 668 aa, Artificial Sequence
  Synthetic polypeptide
HYKCDFLLLVLKDIVSQRPGLQVILMSATLNAELFSDYFNSCPVITIPGRTFPVDQFFLEDAIAVTRYVLQDGSPYMRSMKQISKEKLKARRNRTAFEEVEEDLRLSLHLQDQDSVKDAVPDQQLDFKQLLARYKGVSKSVIKTMSIMDFEKVNLELIEALLEWIVDGKHSYPPGAILVFLPGLAEIKMLYEQLQSNSLFNNRRSNRCVIHPLHSSLSSEEQQAVFVKPPAGVTKIIISTNIAETSITIDDVVYVIDSGKMKEKRYDASKGMESLEDTFVSQANALQRKGRAGRVASGVCFHLFTSHHYNHQLLKQQLPEIQRVPLEQLCLRIKILEMFSAHNLQSVFSRLIEPPHTDSLRASKIRLRDLGALTPDERLTPLGYHLASLPVDVRIGKLMLFGSIFRCLDPALTIAASLAFKSPFVSPWDKKEEANQKKLEFAFANSDYLALLQAYKGWQLSTKEGVRASYNYCRQNFLSGRVLQEMASLKRQFTELLSDIGFAREGLRAREIEKRAQGGDGVLDATGEEANSNAENPKLISAMLCAALYPNVVQVRHFDSPYLLYHEKIKTSRVFIRDCSMVSVYPLVLFGGGQVNVQLQRGEFVVSLDDGWIRFVAASHQVAELVKELRCELDQLLQDKIKNPSIDLCTCPRGSRIISTIVKLVTTQ

SEQ ID NO: 26614 - protein, 26 aa, Artificial Sequence
  Synthetic polypeptide
AMITPLHSSLGDRAKPCLKKKVTSCC

SEQ ID NO: 26615 - protein, 719 aa, Artificial Sequence
  Synthetic polypeptide
QSETLSQKKSDFLLLVLKDIVSQRPGLQVILMSATLNAELFSDYFNSCPVITIPGRTFPVDQFFLEDAIAVTRYVLQDGSPYMRSMKQISKEKLKARRNRTAFEEVEEDLRLSLHLQDQDSVKDAVPDQQLDFKQLLARYKGVSKSVIKTMSIMDFEKVNLELIEALLEWIVDGKHSYPPGAILVFLPGLAEIKMLYEQLQSNSLFNNRRSNRCVIHPLHSSLSSEEQQAVFVKPPAGVTKIIISTNIAETSITIDDVVYVIDSGKMKEKRYDASKGMESLEDTFVSQANALQRKGRAGRVASGVCFHLFTSHHYNHQLLKQQLPEIQRVPLEQLCLRIKILEMFSAHNLQSVFSRLIEPPHTDSLRASKIRLRDLGALTPDERLTPLGYHLASLPVDVRIGKLMLFGSIFRCLDPALTIAASLAFKSPFVSPWDKKEEANQKKLEFAFANSDYLALLQAYKGWQLSTKEGVRASYNYCRQNFLSGRVLQEMASLKRQFTELLSDIGFAREGLRAREIEKRAQGGDGVLDATGEEANSNAENPKLISAMLCAALYPNVVQVKSPEGKFQKTSTGAVRMQPKSAELKFVTKNDGYVHIHPSSVNYQVRHFDSPYLLYHEKIKTSRVFIRDCSMVSVYPLVLFGGGQVNVQLQRGEFVVSLDDGWIRFVAASHQVAELVKELRCELDQLLQDKIKNPSIDLCTCPRGSRIISTIVKLVTTQ

SEQ ID NO: 26616 - protein, 674 aa, Artificial Sequence
  Synthetic polypeptide
QSETLSQKKSDFLLLVLKDIVSQRPGLQVILMSATLNAELFSDYFNSCPVITIPGRTFPVDQFFLEDAIAVTRYVLQDGSPYMRSMKQISKEKLKARRNRTAFEEVEEDLRLSLHLQDQDSVKDAVPDQQLDFKQLLARYKGVSKSVIKTMSIMDFEKVNLELIEALLEWIVDGKHSYPPGAILVFLPGLAEIKMLYEQLQSNSLFNNRRSNRCVIHPLHSSLSSEEQQAVFVKPPAGVTKIIISTNIAETSITIDDVVYVIDSGKMKEKRYDASKGMESLEDTFVSQANALQRKGRAGRVASGVCFHLFTSHHYNHQLLKQQLPEIQRVPLEQLCLRIKILEMFSAHNLQSVFSRLIEPPHTDSLRASKIRLRDLGALTPDERLTPLGYHLASLPVDVRIGKLMLFGSIFRCLDPALTIAASLAFKSPFVSPWDKKEEANQKKLEFAFANSDYLALLQAYKGWQLSTKEGVRASYNYCRQNFLSGRVLQEMASLKRQFTELLSDIGFAREGLRAREIEKRAQGGDGVLDATGEEANSNAENPKLISAMLCAALYPNVVQVRHFDSPYLLYHEKIKTSRVFIRDCSMVSVYPLVLFGGGQVNVQLQRGEFVVSLDDGWIRFVAASHQVAELVKELRCELDQLLQDKIKNPSIDLCTCPRGSRIISTIVKLVTTQ

SEQ ID NO: 26617 - protein, 1105 aa, Artificial Sequence
  Synthetic polypeptide
PQTGNNPNVHQQDVENIFSRIVDIHELSVKLLGHIEDTVEMTDEGSPHPLVGSCFEDLAEELAFDPYESYARDILRPGFHDRFLSQLSKPGAALYLQSIGEGFKEAVQYVLPRLLLAPVYHCLHYFELLKQLEEKSEDQEDKECLKQAITALLNVQSGMEKICSKSLAKRRLSESACRFYSQQMKGKQLAIKKMNEIQKNIDGWEGKDIGQCCNEFIMEGTLTRVGAKHERHIFLFDGLMICCKSNHGQPRLPGASNAEYRLKEKFFMRKVQINDKDDTNEYKHAFEIILKDENSVIFSAKSAEEKNNWMAALISLQYRSTLERMLDVTMLQEEKEEQMRLPSADVYRFAEPDSEENIIFEENMQPKAGIPIIKAGTVIKLIERLTYHMYADPNFVRTFLTTYRSFCKPQELLSLIIERFEIPEPEPTEADRIAIENGDQPLSAELKRFRKEYIQPVQLRVLNVCRHWVEHHFYDFERDAYLLQRMEEFIGTVRGKAMKKWVESITKIIQRKKIARDNGPGHNITFQSSPPTVEWHISRPGHIETFDLLTLHPIEIARQLTLLESDLYRAVQPSELVGSVWTKEDKEINSPNLLKMIRHTTNLTLWFEKCIVETENLEERVAVVSRIIEILQVFQELNNFNGVLEVVSAMNSSPVYRLDHTFEQIPSRQKKILEEAHELSEDHYKKYLAKLRSINPPCVPFFGIYLTNILKTEEGNPEVLKRHGKELINFSKRRKVAEITGEIQQYQNQPYCLRVESDIKRFFENLNPMGNSMEKEFTDYLFNKSLEIEPRNPKPLPRFPKKYSYPLKSPGVRPSNPRPGTMRHPTPLQQEPRKISYSRIPESETESTASAPNSPRTPLTPPPASGASSTTDVCSVFDSDHSSPFHSSNDTVFIQVTLPHGPRSASVSSISLTKGTDEVPVPPPVPPRRRPESAPAESSPSKIMSKHLDSPPAIPPRQPTSKAYSPRYSISDRTSISDPPESPPLLPPREPVRTPDVFSSSPLHLQPPPLGKKSDHGNAFFPNSPSPFTPPPPQTPSPHGTRRHLPSPPLTQEVDLHSIAGPPVPPRQSTSQHIPKLPPKTYKREHTHPSMHRDGPPLLENAHSS

SEQ ID NO: 26618 - protein, 49 aa, Artificial Sequence
  Synthetic polypeptide
PYCPAILLLGFYPEEMKTCPCKNWFMNVHSGFICNSPKLETTQMSISRM

SEQ ID NO: 26619 - protein, 27 aa, Artificial Sequence
  Synthetic polypeptide
MFIAALFVIAPNWKQPKCPSAGCRKYI

SEQ ID NO: 26620 - protein, 1090 aa, Artificial Sequence
  Synthetic polypeptide
PQTGNNPNVHQQDVENIFSRIVDIHELSVKLLGHIEDTVEMTDEGSPHPLVGSCFEDLAEELAFDPYESYARDILRPGFHDRFLSQLSKPGAALYLQSIGEGFKEAVQYVLPRLLLAPVYHCLHYFELLKQLEEKSEDQEDKECLKQAITALLNVQSGMEKICSKSLAKRRLSESACRFYSQQMKGKQLAIKKMNEIQKNIDGWEGKDIGQCCNEFIMEGTLTRVGAKHERHIFLFDGLMICCKSNHGQPRLPGASNAEYRLKEKFFMRKVQINDKDDTNEYKHAFEIILKDENSVIFSAKSAEEKNNWMAALISLQYRSTLERMLDVTMLQEEKEEQMRLPSADVYRFAEPDSEENIIFEENMQPKAGIPIIKAGTVIKLIERLTYHMYADPNFVRTFLTTYRSFCKPQELLSLIIERFEIPEPEPTEADRIAIENGDQPLSAELKRFRKEYIQPVQLRVLNVCRHWVEHHFYDFERDAYLLQRMEEFIGTVRGKAMKKWVESITKIIQRKKIARDNGPGHNITFQSSPPTVEWHISRPGHIETFDLLTLHPIEIARQLTLLESDLYRAVQPSELVGSVWTKEDKEINSPNLLKMIRHTTNLTLWFEKCIVETENLEERVAVVSRIIEILQVFQELNNFNGVLEVVSAMNSSPVYRLDHTFEQIPSRQKKILEEAHELSEDHYKKYLAKLRSINPPCVPFFGIYLTNILKTEEGNPEVLKRHGKELINFSKRRKVAEITGEIQQYQNQPYCLRVESDIKRFFENLNPMGNSMEKEFTDYLFNKSLEIEPRNPKPLPRFPKKYSYPLKSPGVRPSNPRPGTMRHPTPLQQEPRKISYSRIPESETESTASAPNSPRTPLTPPPASGASSTTDVCSVFDSDHSSPFHSRSASVSSISLTKGTDEVPVPPPVPPRRRPESAPAESSPSKIMSKHLDSPPAIPPRQPTSKAYSPRYSISDRTSISDPPESPPLLPPREPVRTPDVFSSSPLHLQPPPLGKKSDHGNAFFPNSPSPFTPPPPQTPSPHGTRRHLPSPPLTQEVDLHSIAGPPVPPRQSTSQHIPKLPPKTYKREHTHPSMHRDGPPLLENAHSS

SEQ ID NO: 26621 - protein, 143 aa, Artificial Sequence
  Synthetic polypeptide
PQTGNNPNVHQQDVENIFSRIVDIHELSVKLLGHIEDTVEMTDEGSPHPLVGSCFEDLAEELAFDPYESYARDILRPGFHDRFLSQLSKPGAALYLQSIGEGFKEAVQYVLPRLLLAPVYHCLHYFELLKFPFGDLSRLRDSV

SEQ ID NO: 26622 - protein, 43 aa, Artificial Sequence
  Synthetic polypeptide
AWWHVPVVPATQDAESGGSLEPRRSKLRNVFKKVSLIQLINGQ

SEQ ID NO: 26623 - protein, 31 aa, Artificial Sequence
  Synthetic polypeptide
SQLLRTLSQEDHLSPGDRSYGTCSKKFPSSN

SEQ ID NO: 26624 - protein, 1269 aa, Artificial Sequence
  Synthetic polypeptide
AQEIEATERVQKSFPHPIDKWAIADAQSAIEKRKRRNPLSLPVEKIHPLLKEVLGYKIDHQVSVYIVAVLEYISADILKLVGNYVRNIRHYEITKQDIKVAMCADKVLMDMFHQDVEDINILSLTDEEPSTSGEQTYYDLVKAFMAEIRQYIRELNLIIKVFREPFVSNSKLFSANDVENIFSRIVDIHELSVKLLGHIEDTVEMTDEGSPHPLVGSCFEDLAEELAFDPYESYARDILRPGFHDRFLSQLSKPGAALYLQSIGEGFKEAVQYVLPRLLLAPVYHCLHYFELLKQLEEKSEDQEDKECLKQAITALLNVQSGMEKICSKSLAKRRLSESACRFYSQQMKGKQLAIKKMNEIQKNIDGWEGKDIGQCCNEFIMEGTLTRVGAKHERHIFLFDGLMICCKSNHGQPRLPGASNAEYRLKEKFFMRKVQINDKDDTNEYKHAFEIILKDENSVIFSAKSAEEKNNWMAALISLQYRSTLERMLDVTMLQEEKEEQMRLPSADVYRFAEPDSEENIIFEENMQPKAGIPIIKAGTVIKLIERLTYHMYADPNFVRTFLTTYRSFCKPQELLSLIIERFEIPEPEPTEADRIAIENGDQPLSAELKRFRKEYIQPVQLRVLNVCRHWVEHHFYDFERDAYLLQRMEEFIGTVRGKAMKKWVESITKIIQRKKIARDNGPGHNITFQSSPPTVEWHISRPGHIETFDLLTLHPIEIARQLTLLESDLYRAVQPSELVGSVWTKEDKEINSPNLLKMIRHTTNLTLWFEKCIVETENLEERVAVVSRIIEILQVFQELNNFNGVLEVVSAMNSSPVYRLDHTFEQIPSRQKKILEEAHELSEDHYKKYLAKLRSINPPCVPFFGIYLTNILKTEEGNPEVLKRHGKELINFSKRRKVAEITGEIQQYQNQPYCLRVESDIKRFFENLNPMGNSMEKEFTDYLFNKSLEIEPRNPKPLPRFPKKYSYPLKSPGVRPSNPRPGTMRHPTPLQQEPRKISYSRIPESETESTASAPNSPRTPLTPPPASGASSTTDVCSVFDSDHSSPFHSSNDTVFIQVTLPHGPRSASVSSISLTKGTDEVPVPPPVPPRRRPESAPAESSPSKIMSKHLDSPPAIPPRQPTSKAYSPRYSISDRTSISDPPESPPLLPPREPVRTPDVFSSSPLHLQPPPLGKKSDHGNAFFPNSPSPFTPPPPQTPSPHGTRRHLPSPPLTQEVDLHSIAGPPVPPRQSTSQHIPKLPPKTYKREHTHPSMHRDGPPLLENAHSS

SEQ ID NO: 26625 - protein, 1254 aa, Artificial Sequence
  Synthetic polypeptide
AQEIEATERVQKSFPHPIDKWAIADAQSAIEKRKRRNPLSLPVEKIHPLLKEVLGYKIDHQVSVYIVAVLEYISADILKLVGNYVRNIRHYEITKQDIKVAMCADKVLMDMFHQDVEDINILSLTDEEPSTSGEQTYYDLVKAFMAEIRQYIRELNLIIKVFREPFVSNSKLFSANDVENIFSRIVDIHELSVKLLGHIEDTVEMTDEGSPHPLVGSCFEDLAEELAFDPYESYARDILRPGFHDRFLSQLSKPGAALYLQSIGEGFKEAVQYVLPRLLLAPVYHCLHYFELLKQLEEKSEDQEDKECLKQAITALLNVQSGMEKICSKSLAKRRLSESACRFYSQQMKGKQLAIKKMNEIQKNIDGWEGKDIGQCCNEFIMEGTLTRVGAKHERHIFLFDGLMICCKSNHGQPRLPGASNAEYRLKEKFFMRKVQINDKDDTNEYKHAFEIILKDENSVIFSAKSAEEKNNWMAALISLQYRSTLERMLDVTMLQEEKEEQMRLPSADVYRFAEPDSEENIIFEENMQPKAGIPIIKAGTVIKLIERLTYHMYADPNFVRTFLTTYRSFCKPQELLSLIIERFEIPEPEPTEADRIAIENGDQPLSAELKRFRKEYIQPVQLRVLNVCRHWVEHHFYDFERDAYLLQRMEEFIGTVRGKAMKKWVESITKIIQRKKIARDNGPGHNITFQSSPPTVEWHISRPGHIETFDLLTLHPIEIARQLTLLESDLYRAVQPSELVGSVWTKEDKEINSPNLLKMIRHTTNLTLWFEKCIVETENLEERVAVVSRIIEILQVFQELNNFNGVLEVVSAMNSSPVYRLDHTFEQIPSRQKKILEEAHELSEDHYKKYLAKLRSINPPCVPFFGIYLTNILKTEEGNPEVLKRHGKELINFSKRRKVAEITGEIQQYQNQPYCLRVESDIKRFFENLNPMGNSMEKEFTDYLFNKSLEIEPRNPKPLPRFPKKYSYPLKSPGVRPSNPRPGTMRHPTPLQQEPRKISYSRIPESETESTASAPNSPRTPLTPPPASGASSTTDVCSVFDSDHSSPFHSRSASVSSISLTKGTDEVPVPPPVPPRRRPESAPAESSPSKIMSKHLDSPPAIPPRQPTSKAYSPRYSISDRTSISDPPESPPLLPPREPVRTPDVFSSSPLHLQPPPLGKKSDHGNAFFPNSPSPFTPPPPQTPSPHGTRRHLPSPPLTQEVDLHSIAGPPVPPRQSTSQHIPKLPPKTYKREHTHPSMHRDGPPLLENAHSS

SEQ ID NO: 26626 - protein, 307 aa, Artificial Sequence
  Synthetic polypeptide
AQEIEATERVQKSFPHPIDKWAIADAQSAIEKRKRRNPLSLPVEKIHPLLKEVLGYKIDHQVSVYIVAVLEYISADILKLVGNYVRNIRHYEITKQDIKVAMCADKVLMDMFHQDVEDINILSLTDEEPSTSGEQTYYDLVKAFMAEIRQYIRELNLIIKVFREPFVSNSKLFSANDVENIFSRIVDIHELSVKLLGHIEDTVEMTDEGSPHPLVGSCFEDLAEELAFDPYESYARDILRPGFHDRFLSQLSKPGAALYLQSIGEGFKEAVQYVLPRLLLAPVYHCLHYFELLKFPFGDLSRLRDSV

SEQ ID NO: 26627 - protein, 95 aa, Artificial Sequence
  Synthetic polypeptide
AQEIEATERVQKSFPHPIDKWAIADAQSAIEKRKRRNPLSLPVEKIHPLLKEVLGYKIDHQVSVYIVAVLEYISADILKLVGNYVRNIRHYEITK

SEQ ID NO: 26628 - protein, 1320 aa, Artificial Sequence
  Synthetic polypeptide
PGAVAHACNSSTWEPEVQGQVHPTLESNDDALQYVEELILQLLNMLCQAQPRSASDVEERVQKSFPHPIDKWAIADAQSAIEKRKRRNPLSLPVEKIHPLLKEVLGYKIDHQVSVYIVAVLEYISADILKLVGNYVRNIRHYEITKQDIKVAMCADKVLMDMFHQDVEDINILSLTDEEPSTSGEQTYYDLVKAFMAEIRQYIRELNLIIKVFREPFVSNSKLFSANDVENIFSRIVDIHELSVKLLGHIEDTVEMTDEGSPHPLVGSCFEDLAEELAFDPYESYARDILRPGFHDRFLSQLSKPGAALYLQSIGEGFKEAVQYVLPRLLLAPVYHCLHYFELLKQLEEKSEDQEDKECLKQAITALLNVQSGMEKICSKSLAKRRLSESACRFYSQQMKGKQLAIKKMNEIQKNIDGWEGKDIGQCCNEFIMEGTLTRVGAKHERHIFLFDGLMICCKSNHGQPRLPGASNAEYRLKEKFFMRKVQINDKDDTNEYKHAFEIILKDENSVIFSAKSAEEKNNWMAALISLQYRSTLERMLDVTMLQEEKEEQMRLPSADVYRFAEPDSEENIIFEENMQPKAGIPIIKAGTVIKLIERLTYHMYADPNFVRTFLTTYRSFCKPQELLSLIIERFEIPEPEPTEADRIAIENGDQPLSAELKRFRKEYIQPVQLRVLNVCRHWVEHHFYDFERDAYLLQRMEEFIGTVRGKAMKKWVESITKIIQRKKIARDNGPGHNITFQSSPPTVEWHISRPGHIETFDLLTLHPIEIARQLTLLESDLYRAVQPSELVGSVWTKEDKEINSPNLLKMIRHTTNLTLWFEKCIVETENLEERVAVVSRIIEILQVFQELNNFNGVLEVVSAMNSSPVYRLDHTFEQIPSRQKKILEEAHELSEDHYKKYLAKLRSINPPCVPFFGIYLTNILKTEEGNPEVLKRHGKELINFSKRRKVAEITGEIQQYQNQPYCLRVESDIKRFFENLNPMGNSMEKEFTDYLFNKSLEIEPRNPKPLPRFPKKYSYPLKSPGVRPSNPRPGTMRHPTPLQQEPRKISYSRIPESETESTASAPNSPRTPLTPPPASGASSTTDVCSVFDSDHSSPFHSSNDTVFIQVTLPHGPRSASVSSISLTKGTDEVPVPPPVPPRRRPESAPAESSPSKIMSKHLDSPPAIPPRQPTSKAYSPRYSISDRTSISDPPESPPLLPPREPVRTPDVFSSSPLHLQPPPLGKKSDHGNAFFPNSPSPFTPPPPQTPSPHGTRRHLPSPPLTQEVDLHSIAGPPVPPRQSTSQHIPKLPPKTYKREHTHPSMHRDGPPLLENAHSS

SEQ ID NO: 26629 - protein, 37 aa, Artificial Sequence
  Synthetic polypeptide
QVRWLMPAIPALGSLRSRGKFILLSSLMMMLFSMLKN

SEQ ID NO: 26630 - protein, 1305 aa, Artificial Sequence
  Synthetic polypeptide
PGAVAHACNSSTWEPEVQGQVHPTLESNDDALQYVEELILQLLNMLCQAQPRSASDVEERVQKSFPHPIDKWAIADAQSAIEKRKRRNPLSLPVEKIHPLLKEVLGYKIDHQVSVYIVAVLEYISADILKLVGNYVRNIRHYEITKQDIKVAMCADKVLMDMFHQDVEDINILSLTDEEPSTSGEQTYYDLVKAFMAEIRQYIRELNLIIKVFREPFVSNSKLFSANDVENIFSRIVDIHELSVKLLGHIEDTVEMTDEGSPHPLVGSCFEDLAEELAFDPYESYARDILRPGFHDRFLSQLSKPGAALYLQSIGEGFKEAVQYVLPRLLLAPVYHCLHYFELLKQLEEKSEDQEDKECLKQAITALLNVQSGMEKICSKSLAKRRLSESACRFYSQQMKGKQLAIKKMNEIQKNIDGWEGKDIGQCCNEFIMEGTLTRVGAKHERHIFLFDGLMICCKSNHGQPRLPGASNAEYRLKEKFFMRKVQINDKDDTNEYKHAFEIILKDENSVIFSAKSAEEKNNWMAALISLQYRSTLERMLDVTMLQEEKEEQMRLPSADVYRFAEPDSEENIIFEENMQPKAGIPIIKAGTVIKLIERLTYHMYADPNFVRTFLTTYRSFCKPQELLSLIIERFEIPEPEPTEADRIAIENGDQPLSAELKRFRKEYIQPVQLRVLNVCRHWVEHHFYDFERDAYLLQRMEEFIGTVRGKAMKKWVESITKIIQRKKIARDNGPGHNITFQSSPPTVEWHISRPGHIETFDLLTLHPIEIARQLTLLESDLYRAVQPSELVGSVWTKEDKEINSPNLLKMIRHTTNLTLWFEKCIVETENLEERVAVVSRIIEILQVFQELNNFNGVLEVVSAMNSSPVYRLDHTFEQIPSRQKKILEEAHELSEDHYKKYLAKLRSINPPCVPFFGIYLTNILKTEEGNPEVLKRHGKELINFSKRRKVAEITGEIQQYQNQPYCLRVESDIKRFFENLNPMGNSMEKEFTDYLFNKSLEIEPRNPKPLPRFPKKYSYPLKSPGVRPSNPRPGTMRHPTPLQQEPRKISYSRIPESETESTASAPNSPRTPLTPPPASGASSTTDVCSVFDSDHSSPFHSRSASVSSISLTKGTDEVPVPPPVPPRRRPESAPAESSPSKIMSKHLDSPPAIPPRQPTSKAYSPRYSISDRTSISDPPESPPLLPPREPVRTPDVFSSSPLHLQPPPLGKKSDHGNAFFPNSPSPFTPPPPQTPSPHGTRRHLPSPPLTQEVDLHSIAGPPVPPRQSTSQHIPKLPPKTYKREHTHPSMHRDGPPLLENAHSS

SEQ ID NO: 26631 - protein, 30 aa, Artificial Sequence
  Synthetic polypeptide
KERVGHVTYKFPSSLNVLKSSHRFSYTMST

SEQ ID NO: 26632 - protein, 184 aa, Artificial Sequence
  Synthetic polypeptide
NHHIDFPIPCPLRMFEMLVVPEQEYPLVCVGVSRGRDFNQVVRFETVNPNSTSSWFTESDTPQTNVTHVTQLERDTILVCLDCCIKIVNLQGRLKSSRKLSSELTFDFQIESIVCLQDSVLAFWKHGMQGRSFRSNEVTQEISDSTRIFRLLGSDRVVVLESRPTDNPTANSNLYILAGHENSY

SEQ ID NO: 26633 - protein, 6 aa, Artificial Sequence
  Synthetic polypeptide
CPKIIT

SEQ ID NO: 26634 - protein, 593 aa, Artificial Sequence
  Synthetic polypeptide
GYNAKPLVAVPHRIHSTSRNVREEKTRSEITFGQVKFDPPLRKETEPHHELPDSDGFLDSSEEIYYTARSNLDLQLEYGQGHQGGYFLGANKSLLKSVEEELHQRGHVAHLEDDEGDDDESKHSTLKAKIPPPLPPKPKSIFIPQEMHSTEDENQGTIKRCPMSGSPAKPSQVPPRPPPPRLPPHKPVALGNGMSSFQLNGERDGSLCQQQNEHRGTNLSRKEKKDVPKPISNGLPPTPKVHMGACFSKVFNGCPLKIHCASSWINPDTRDQYLIFGAEEGIYTLNLNELHETSMEQLFPRRCTWLYVMNNCLLSISGKASQLYSHNLPGLFDYARQMQKLPVAIPAHKLPDRILPRKFSVSAKIPETKWCQKCCVVRNPYTGHKYLCGALQTSIVLLEWVEPMQKFMLIKHIDFPIPCPLRMFEMLVVPEQEYPLVCVGVSRGRDFNQVVRFETVNPNSTSSWFTESDTPQTNVTHVTQLERDTILVCLDCCIKIVNLQGRLKSSRKLSSELTFDFQIESIVCLQDSVLAFWKHGMQGRSFRSNEVTQEISDSTRIFRLLGSDRVVVLESRPTDNPTANSNLYILAGHENSY

SEQ ID NO: 26635 - protein, 27 aa, Artificial Sequence
  Synthetic polypeptide
CLFHEFKDIMLSLLLLYHIEFTQQVET

SEQ ID NO: 26636 - protein, 572 aa, Artificial Sequence
  Synthetic polypeptide
GYNAKPLVAVPHRIHSTSRNVREEKTRSEITFGQVKFDPPLRKETEPHHELDLQLEYGQGHQGGYFLGANKSLLKSVEEELHQRGHVAHLEDDEGDDDESKHSTLKAKIPPPLPPKPKSIFIPQEMHSTEDENQGTIKRCPMSGSPAKPSQVPPRPPPPRLPPHKPVALGNGMSSFQLNGERDGSLCQQQNEHRGTNLSRKEKKDVPKPISNGLPPTPKVHMGACFSKVFNGCPLKIHCASSWINPDTRDQYLIFGAEEGIYTLNLNELHETSMEQLFPRRCTWLYVMNNCLLSISGKASQLYSHNLPGLFDYARQMQKLPVAIPAHKLPDRILPRKFSVSAKIPETKWCQKCCVVRNPYTGHKYLCGALQTSIVLLEWVEPMQKFMLIKHIDFPIPCPLRMFEMLVVPEQEYPLVCVGVSRGRDFNQVVRFETVNPNSTSSWFTESDTPQTNVTHVTQLERDTILVCLDCCIKIVNLQGRLKSSRKLSSELTFDFQIESIVCLQDSVLAFWKHGMQGRSFRSNEVTQEISDSTRIFRLLGSDRVVVLESRPTDNPTANSNLYILAGHENSY

SEQ ID NO: 26637 - protein, 72 aa, Artificial Sequence
  Synthetic polypeptide
GYNAKPLVAVPHRIHSTSRNVREEKTRSEITFGQVKFDPPLRKETEPHHELPDSDGFLDSSEEIYYTARSNL

SEQ ID NO: 26638 - protein, 16 aa, Artificial Sequence
  Synthetic polypeptide
HHDSKASPAMWNCTEC

SEQ ID NO: 26639 - protein, 874 aa, Artificial Sequence
  Synthetic polypeptide
TMIVRPPQPCGTARNVNTGELAAIKVIKLEPGEDFAVVQQEIIMMKDCKHPNIVAYFGSYLRRDKLWICMEFCGGGSLQDIYHVTGPLSELQIAYVSRETLQGLYYLHSKGKMHRDIKGANILLTDNGHVKLADFGVSAQITATIAKRKSFIGTPYWMAPEVAAVERKGGYNQLCDLWAVGITAIELAELQPPMFDLHPMRALFLMTKSNFQPPKLKDKMKWSNSFHHFVKMALTKNPKKRPTAEKLLQHPFVTQHLTRSLAIELLDKVNNPDHSTYHDFDDDDPEPLVAVPHRIHSTSRNVREEKTRSEITFGQVKFDPPLRKETEPHHELPDSDGFLDSSEEIYYTARSNLDLQLEYGQGHQGGYFLGANKSLLKSVEEELHQRGHVAHLEDDEGDDDESKHSTLKAKIPPPLPPKPKSIFIPQEMHSTEDENQGTIKRCPMSGSPAKPSQVPPRPPPPRLPPHKPVALGNGMSSFQLNGERDGSLCQQQNEHRGTNLSRKEKKDVPKPISNGLPPTPKVHMGACFSKVFNGCPLKIHCASSWINPDTRDQYLIFGAEEGIYTLNLNELHETSMEQLFPRRCTWLYVMNNCLLSISGKASQLYSHNLPGLFDYARQMQKLPVAIPAHKLPDRILPRKFSVSAKIPETKWCQKCCVVRNPYTGHKYLCGALQTSIVLLEWVEPMQKFMLIKHIDFPIPCPLRMFEMLVVPEQEYPLVCVGVSRGRDFNQVVRFETVNPNSTSSWFTESDTPQTNVTHVTQLERDTILVCLDCCIKIVNLQGRLKSSRKLSSELTFDFQIESIVCLQDSVLAFWKHGMQGRSFRSNEVTQEISDSTRIFRLLGSDRVVVLESRPTDNPTANSNLYILAGHENSY

SEQ ID NO: 26640 - protein, 16 aa, Artificial Sequence
  Synthetic polypeptide
GLPSHVELHGMLTLVN

SEQ ID NO: 26641 - protein, 853 aa, Artificial Sequence
  Synthetic polypeptide
TMIVRPPQPCGTARNVNTGELAAIKVIKLEPGEDFAVVQQEIIMMKDCKHPNIVAYFGSYLRRDKLWICMEFCGGGSLQDIYHVTGPLSELQIAYVSRETLQGLYYLHSKGKMHRDIKGANILLTDNGHVKLADFGVSAQITATIAKRKSFIGTPYWMAPEVAAVERKGGYNQLCDLWAVGITAIELAELQPPMFDLHPMRALFLMTKSNFQPPKLKDKMKWSNSFHHFVKMALTKNPKKRPTAEKLLQHPFVTQHLTRSLAIELLDKVNNPDHSTYHDFDDDDPEPLVAVPHRIHSTSRNVREEKTRSEITFGQVKFDPPLRKETEPHHELDLQLEYGQGHQGGYFLGANKSLLKSVEEELHQRGHVAHLEDDEGDDDESKHSTLKAKIPPPLPPKPKSIFIPQEMHSTEDENQGTIKRCPMSGSPAKPSQVPPRPPPPRLPPHKPVALGNGMSSFQLNGERDGSLCQQQNEHRGTNLSRKEKKDVPKPISNGLPPTPKVHMGACFSKVFNGCPLKIHCASSWINPDTRDQYLIFGAEEGIYTLNLNELHETSMEQLFPRRCTWLYVMNNCLLSISGKASQLYSHNLPGLFDYARQMQKLPVAIPAHKLPDRILPRKFSVSAKIPETKWCQKCCVVRNPYTGHKYLCGALQTSIVLLEWVEPMQKFMLIKHIDFPIPCPLRMFEMLVVPEQEYPLVCVGVSRGRDFNQVVRFETVNPNSTSSWFTESDTPQTNVTHVTQLERDTILVCLDCCIKIVNLQGRLKSSRKLSSELTFDFQIESIVCLQDSVLAFWKHGMQGRSFRSNEVTQEISDSTRIFRLLGSDRVVVLESRPTDNPTANSNLYILAGHENSY

SEQ ID NO: 26642 - protein, 111 aa, Artificial Sequence
  Synthetic polypeptide
TMIVRPPQPCGTARNVNTGELAAIKVIKLEPGEDFAVVQQEIIMMKDCKHPNIVAYFGSYLRRDKLWICMEFCGGGSLQDIYHGWLQKLQLLRGRGVTINSVISGQWESLP

SEQ ID NO: 26643 - protein, 72 aa, Artificial Sequence
  Synthetic polypeptide
TMIVRPPQPCGTARNVNTGELAAIKVIKLEPGEDFAVVQQEIIMMKDCKHPNIVAYFGSYLRYTVCFPFEKQ

SEQ ID NO: 26644 - protein, 66 aa, Artificial Sequence
  Synthetic polypeptide
CLCWLGLGVLARCLIWPTPYSARFMKLPGCPFGKSEGNVESDGNCHCLQKVLILLFLTFHLGKSLS

SEQ ID NO: 26645 - protein, 26 aa, Artificial Sequence
  Synthetic polypeptide
SCQAAHLGNQREMWKVMGIAIAFRKC

SEQ ID NO: 26646 - protein, 145 aa, Artificial Sequence
  Synthetic polypeptide
WELPLPSESVDIIISDIPFGKKFKLGKDIKSILQEMERVLHVGGTIVLLLSEDHHRRLTDCKESNIPFNSKDSHTDEPGIKKCLNPEEKTGAFKTASTSFEASNHKFLDRMSPFGSLVPVECYKVSLGKTDAFICKYKKSHSSGL

SEQ ID NO: 26647 - protein, 51 aa, Artificial Sequence
  Synthetic polypeptide
GQAWWLTSVIPGVWEDHTDTLQGRSLPLEYLTVRNMRKSAVSPLCLRNQNG

SEQ ID NO: 26648 - protein, 18 aa, Artificial Sequence
  Synthetic polypeptide
SQEFGRTTQTRCKEDHYH

SEQ ID NO: 26649 - protein, 356 aa, Artificial Sequence
  Synthetic polypeptide
PGMVAHICNPRSLGGPHRHVARKIITIRIFDREEYEKECSFSLVLEEPKWIRRGMKGGFTITDEYDDKQPLTSKEEEERRIAEMGRPILGEHTKLEVIIEESYEFKSTVDKLIKKTNLALVVGTNSWREQFIEAITVSAGEDDDDDECGEEKLPSCFDYVMHFLTVFWKVLFAFVPPTEYWNGWACFIVSILMIGLLTAFIGDLASHFGCTIGLKDSVTAVVFVALGTSVPDTFASKVAATQDQYADASIGNVTGSNAVNVFLGIGVAWSIAAIYHAANGEQFKVSPGTLAFSVTLFTIFAFINVGVLLYRRRPEIGGELGGPRTAKLLTSCLFVLLWLLYIFFSSLEAYCHIKGF

SEQ ID NO: 26650 - protein, 51 aa, Artificial Sequence
  Synthetic polypeptide
PGMVAHICNPRSLGGPHRHVARKIITIRIFDREEYEKECSFSLVLEEPKWI

SEQ ID NO: 26651 - protein, 384 aa, Artificial Sequence
  Synthetic polypeptide
PGMVAHICNPRSLGGPHRHVARKIITIRIFDREEYEKECSFSLVLEEPKWIRRGMKGGFTITGKYLFGQPVFRKVHAREHPILSTVITIADEYDDKQPLTSKEEEERRIAEMGRPILGEHTKLEVIIEESYEFKSTVDKLIKKTNLALVVGTNSWREQFIEAITVSAGEDDDDDECGEEKLPSCFDYVMHFLTVFWKVLFAFVPPTEYWNGWACFIVSILMIGLLTAFIGDLASHFGCTIGLKDSVTAVVFVALGTSVPDTFASKVAATQDQYADASIGNVTGSNAVNVFLGIGVAWSIAAIYHAANGEQFKVSPGTLAFSVTLFTIFAFINVGVLLYRRRPEIGGELGGPRTAKLLTSCLFVLLWLLYIFFSSLEAYCHIKGF

SEQ ID NO: 26652 - protein, 356 aa, Artificial Sequence
  Synthetic polypeptide
PGMVAHICNPRSLGGPHRHVARKIITIRIFDREEYEKECSFSLVLEEPKWIRRGMKEGFCFTDEYDDKQPLTSKEEEERRIAEMGRPILGEHTKLEVIIEESYEFKSTVDKLIKKTNLALVVGTNSWREQFIEAITVSAGEDDDDDECGEEKLPSCFDYVMHFLTVFWKVLFAFVPPTEYWNGWACFIVSILMIGLLTAFIGDLASHFGCTIGLKDSVTAVVFVALGTSVPDTFASKVAATQDQYADASIGNVTGSNAVNVFLGIGVAWSIAAIYHAANGEQFKVSPGTLAFSVTLFTIFAFINVGVLLYRRRPEIGGELGGPRTAKLLTSCLFVLLWLLYIFFSSLEAYCHIKGF

SEQ ID NO: 26653 - protein, 35 aa, Artificial Sequence
  Synthetic polypeptide
RSQDGRIGTAPVYSSQRERRRRRAISAFPSEVASQ

SEQ ID NO: 26654 - protein, 32 aa, Artificial Sequence
  Synthetic polypeptide
EQLRSTAPSVSDAEDGRFLHFHLRWLHNNRRI

SEQ ID NO: 26655 - protein, 39 aa, Artificial Sequence
  Synthetic polypeptide
EQLRSTAPSVSDAEDGRFLHFHLRWLHNNRPTCLQEGSC

SEQ ID NO: 26656 - protein, 44 aa, Artificial Sequence
  Synthetic polypeptide
EQLRSTAPSVSDAEDGRFLHFHLRWLHNNRKIPVWPTCLQEGSC

SEQ ID NO: 26657 - protein, 39 aa, Artificial Sequence
  Synthetic polypeptide
RSQDGRIGTAPVYSSQRERRRRRAISAFPSEQNNISQGN

SEQ ID NO: 26658 - protein, 88 aa, Artificial Sequence
  Synthetic polypeptide
EQLRSTAPSVSDAEDGRFLHFHLSKTISVKVIDDEEYEKNKTFFLEIGEPRLVEMSEKKGRSLPLEYLTVRNMRKSAVSPLCLRNQNG

SEQ ID NO: 26659 - protein, 394 aa, Artificial Sequence
  Synthetic polypeptide
EQLRSTAPSVSDAEDGRFLHFHLSKTISVKVIDDEEYEKNKTFFLEIGEPRLVEMSEKKALLLNELGGFTITGKYLFGQPVFRKVHAREHPILSTVITIADEYDDKQPLTSKEEEERRIAEMGRPILGEHTKLEVIIEESYEFKSTVDKLIKKTNLALVVGTNSWREQFIEAITVSAGEDDDDDECGEEKLPSCFDYVMHFLTVFWKVLFAFVPPTEYWNGWACFIVSILMIGLLTAFIGDLASHFGCTIGLKDSVTAVVFVALGTSVPDTFASKVAATQDQYADASIGNVTGSNAVNVFLGIGVAWSIAAIYHAANGEQFKVSPGTLAFSVTLFTIFAFINVGVLLYRRRPEIGGELGGPRTAKLLTSCLFVLLWLLYIFFSSLEAYCHIKGF

SEQ ID NO: 26660 - protein, 389 aa, Artificial Sequence
  Synthetic polypeptide
EQLRSTAPSVSDAEDGRFLHFHLSKTISVKVIDDEEYEKNKTFFLEIGEPRLVEMSEKKALLLNELGGFTITGQPVFRKVHAREHPILSTVITIADEYDDKQPLTSKEEEERRIAEMGRPILGEHTKLEVIIEESYEFKSTVDKLIKKTNLALVVGTNSWREQFIEAITVSAGEDDDDDECGEEKLPSCFDYVMHFLTVFWKVLFAFVPPTEYWNGWACFIVSILMIGLLTAFIGDLASHFGCTIGLKDSVTAVVFVALGTSVPDTFASKVAATQDQYADASIGNVTGSNAVNVFLGIGVAWSIAAIYHAANGEQFKVSPGTLAFSVTLFTIFAFINVGVLLYRRRPEIGGELGGPRTAKLLTSCLFVLLWLLYIFFSSLEAYCHIKGF

SEQ ID NO: 26661 - protein, 49 aa, Artificial Sequence
  Synthetic polypeptide
WFYKGLFPLLLGTSPLCHHVKKDVFASLSAMIISFLRPPQPCRTEDHYH

SEQ ID NO: 26662 - protein, 342 aa, Artificial Sequence
  Synthetic polypeptide
GLHSPAELKIITIRIFDREEYEKECSFSLVLEEPKWIRRGMKGGFTITDEYDDKQPLTSKEEEERRIAEMGRPILGEHTKLEVIIEESYEFKSTVDKLIKKTNLALVVGTNSWREQFIEAITVSAGEDDDDDECGEEKLPSCFDYVMHFLTVFWKVLFAFVPPTEYWNGWACFIVSILMIGLLTAFIGDLASHFGCTIGLKDSVTAVVFVALGTSVPDTFASKVAATQDQYADASIGNVTGSNAVNVFLGIGVAWSIAAIYHAANGEQFKVSPGTLAFSVTLFTIFAFINVGVLLYRRRPEIGGELGGPRTAKLLTSCLFVLLWLLYIFFSSLEAYCHIKGF

SEQ ID NO: 26663 - protein, 37 aa, Artificial Sequence
  Synthetic polypeptide
GLHSPAELKIITIRIFDREEYEKECSFSLVLEEPKWI

SEQ ID NO: 26664 - protein, 370 aa, Artificial Sequence
  Synthetic polypeptide
GLHSPAELKIITIRIFDREEYEKECSFSLVLEEPKWIRRGMKGGFTITGKYLFGQPVFRKVHAREHPILSTVITIADEYDDKQPLTSKEEEERRIAEMGRPILGEHTKLEVIIEESYEFKSTVDKLIKKTNLALVVGTNSWREQFIEAITVSAGEDDDDDECGEEKLPSCFDYVMHFLTVFWKVLFAFVPPTEYWNGWACFIVSILMIGLLTAFIGDLASHFGCTIGLKDSVTAVVFVALGTSVPDTFASKVAATQDQYADASIGNVTGSNAVNVFLGIGVAWSIAAIYHAANGEQFKVSPGTLAFSVTLFTIFAFINVGVLLYRRRPEIGGELGGPRTAKLLTSCLFVLLWLLYIFFSSLEAYCHIKGF

SEQ ID NO: 26665 - protein, 342 aa, Artificial Sequence
  Synthetic polypeptide
GLHSPAELKIITIRIFDREEYEKECSFSLVLEEPKWIRRGMKEGFCFTDEYDDKQPLTSKEEEERRIAEMGRPILGEHTKLEVIIEESYEFKSTVDKLIKKTNLALVVGTNSWREQFIEAITVSAGEDDDDDECGEEKLPSCFDYVMHFLTVFWKVLFAFVPPTEYWNGWACFIVSILMIGLLTAFIGDLASHFGCTIGLKDSVTAVVFVALGTSVPDTFASKVAATQDQYADASIGNVTGSNAVNVFLGIGVAWSIAAIYHAANGEQFKVSPGTLAFSVTLFTIFAFINVGVLLYRRRPEIGGELGGPRTAKLLTSCLFVLLWLLYIFFSSLEAYCHIKGF

SEQ ID NO: 26666 - protein, 47 aa, Artificial Sequence
  Synthetic polypeptide
GAFPAFTRHFSFMPPCEEGCICVPFCHDYKFPKASTALQNSKQYQSR

SEQ ID NO: 26667 - protein, 52 aa, Artificial Sequence
  Synthetic polypeptide
WFYKGLFPLLLGTSPLCHHVKKDVFASLSAMIISFLRPPQPCRTQNNISQGN

SEQ ID NO: 26668 - protein, 72 aa, Artificial Sequence
  Synthetic polypeptide
GLHSPAELKTISVKVIDDEEYEKNKTFFLEIGEPRLVEMSEKKGRSLPLEYLTVRNMRKSAVSPLCLRNQNG

SEQ ID NO: 26669 - protein, 378 aa, Artificial Sequence
  Synthetic polypeptide
GLHSPAELKTISVKVIDDEEYEKNKTFFLEIGEPRLVEMSEKKALLLNELGGFTITGKYLFGQPVFRKVHAREHPILSTVITIADEYDDKQPLTSKEEEERRIAEMGRPILGEHTKLEVIIEESYEFKSTVDKLIKKTNLALVVGTNSWREQFIEAITVSAGEDDDDDECGEEKLPSCFDYVMHFLTVFWKVLFAFVPPTEYWNGWACFIVSILMIGLLTAFIGDLASHFGCTIGLKDSVTAVVFVALGTSVPDTFASKVAATQDQYADASIGNVTGSNAVNVFLGIGVAWSIAAIYHAANGEQFKVSPGTLAFSVTLFTIFAFINVGVLLYRRRPEIGGELGGPRTAKLLTSCLFVLLWLLYIFFSSLEAYCHIKGF

SEQ ID NO: 26670 - protein, 373 aa, Artificial Sequence
  Synthetic polypeptide
GLHSPAELKTISVKVIDDEEYEKNKTFFLEIGEPRLVEMSEKKALLLNELGGFTITGQPVFRKVHAREHPILSTVITIADEYDDKQPLTSKEEEERRIAEMGRPILGEHTKLEVIIEESYEFKSTVDKLIKKTNLALVVGTNSWREQFIEAITVSAGEDDDDDECGEEKLPSCFDYVMHFLTVFWKVLFAFVPPTEYWNGWACFIVSILMIGLLTAFIGDLASHFGCTIGLKDSVTAVVFVALGTSVPDTFASKVAATQDQYADASIGNVTGSNAVNVFLGIGVAWSIAAIYHAANGEQFKVSPGTLAFSVTLFTIFAFINVGVLLYRRRPEIGGELGGPRTAKLLTSCLFVLLWLLYIFFSSLEAYCHIKGF

SEQ ID NO: 26671 - protein, 25 aa, Artificial Sequence
  Synthetic polypeptide
LLKTTLDPYRHGDGTRRIYINEPWD

SEQ ID NO: 26672 - protein, 40 aa, Artificial Sequence
  Synthetic polypeptide
RQLWTLIGMEMVPEESTLTSLGIKACGFHRSTTYHICHTN

SEQ ID NO: 26673 - protein, 78 aa, Artificial Sequence
  Synthetic polypeptide
RALGLKPVVSTEAPPIIFATPTKLTSDSTVYDYAGKNKVPELQKFFQETYLQTILFLWLLETPVVGILDKGTFPAGLQ

SEQ ID NO: 26674 - protein, 93 aa, Artificial Sequence
  Synthetic polypeptide
RALGLKPVVSTEAPPIIFATPTKLTSDSTVYDYAGKNKVPELQKFFQKADGVPVYLKRGLPDQMLYRTTMALTVGGTIYCLIALYMASQPKNK

SEQ ID NO: 26675 - protein, 58 aa, Artificial Sequence
  Synthetic polypeptide
RALGLKPVVSTEAPPIIFATPTKLTSDSTVYDYAGKNKVPELQKFFQVREDTLQQKSL

SEQ ID NO: 26676 - protein, 227 aa, Artificial Sequence
  Synthetic polypeptide
LVNSLWLSLLICRIIEAICIGWFTAECIVRFIVSKNKCEFVKRPLNIIDLLAITPYYISVLMTVFTGENSQLQRAGVTLRVLRMMRIFWVIKLARHFIGLQTLGLTLKRCYREMVMLLVFICVAMAIFSALSQLLEHGLDLETSNKDFTSIPAACWWVIISMTTVGYGDMYPITVPGRILGGVCVVSGIVLLALPITFIYHSFVQCYHELKFRSARYSRSLSTEFLN

SEQ ID NO: 26677 - protein, 12 aa, Artificial Sequence
  Synthetic polypeptide
SILFGLVSSFVG

SEQ ID NO: 26678 - protein, 57 aa, Artificial Sequence
  Synthetic polypeptide
AAISQEILTATSRWKRSRWDSAVESLENDRERVFLSFPRTLSFSSQTVGNCSQYSRQ

SEQ ID NO: 26679 - protein, 27 aa, Artificial Sequence
  Synthetic polypeptide
SYKPRNTDSHQQVEEIKMGFCCRVSRE

SEQ ID NO: 26680 - protein, 146 aa, Artificial Sequence
  Synthetic polypeptide
FLVCFLLLEYQLFGGWVFASFSVLSSTPRAVPDIAEAQMTGREFFSRFPELYPFLLKQLETVANTVDSDMGEPNRHPSMFLLLLVLERLYASPMDGTSSALSMGPFVPFIMRVLLCCPGWSAVARSQLTATSTSWVQAILLPQPPE

SEQ ID NO: 26681 - protein, 4 aa, Artificial Sequence
  Synthetic polypeptide
QKLK

SEQ ID NO: 26682 - protein, 35 aa, Artificial Sequence
  Synthetic polypeptide
HSRSSNDRERVFLSFPRTLSFSSQTVGNCSQYSRQ

SEQ ID NO: 26683 - protein, 712 aa, Artificial Sequence
  Synthetic polypeptide
FLVCFLLLEYQLFGGWVFASFSVLSSTPRAVPDIAEAQMTGREFFSRFPELYPFLLKQLETVANTVDSDMGEPNRHPSMFLLLLVLERLYASPMDGTSSALSMGPFVPFIMRCGHSPVYHSREMAARALVPFVMIDHIPNTIRTLLSTLPSCTDQCFRQNHIHGTLLQVFHLLQAYSDSKHGTNSDFQHELTDITVCTKAKLWLAKRQNPCLVTRAVYIDILFLLTCCLNRSAKDNQPVLESLGFWEEVRGIISGSELITGFPWAFKVPGLPQYLQSLTRLAIAAVWAAAAKSGERETNVPISFSQLLESAFPEVRSLTLEALLEKFLAAASGLGEKGVPPLLCNMGEKFLLLAMKENHPECFCKILKILHCMDPGEWLPQTEHCVHLTPKEFLIWTMDIASNERSEIQSVALRLASKVISHHMQTCVENRELIAAELKQWVQLVILSCEDHLPTESRLAVVEVLTSTTPLFLTNPHPILELQDTLALWKCVLTLLQSEEQAVRDAATETVTTAMSQENTCQSTEFAFCQVDASIALALALAVLCDLLQQWDQLAPGLPILLGWLLGESDDLVACVESMHQVEEDYLFEKAEVNFWAETLIFVKYLCKHLFCLLSKSGWRPPSPEMLCHLQRMVSEQCHLLSQFFRELPPAAEFVKTVEFTRLRIQEERTLACLRLLAFLEGKEGEDTLVLSVWDSYAESRQLTLPRTEAAC

SEQ ID NO: 26684 - protein, 499 aa, Artificial Sequence
  Synthetic polypeptide
LLTVIKCLMENLEEEVSQAENSLLQAAAAFPMYGRVHCITGALQKLSLNSLQLVSEWRPVVEKLLLMSYRLSTVVSPVIQSSSPEGLIPMDTDSESASRLQMILNEIQPRDTNDYFNQAKILKEHDSFDMKDLNASVVNIDTSTEIKGKEVKTCDVTAQMVLVCCWRSMKEVALLLGMLCQLLPMQPVPESSDGLLTVEQVKEIGDYFKQHLLQSRHRGAFELAYTGFVKLTEVLNRCPNVSLQKLPEQWLWSVLEEIKCSDPSSKLCATRRSAGIPFYIQALLASEPKKGRMDLLKITMKELISLAGPTDDIQSTVPQVHALNILRALFRDTRLGENIIPYVADGAKAAILGFTSPVWAVRNSSTLLFSALITRIFGVKRAKDEHSKTNRMTGREFFSRFPELYPFLLKQLETVANTVDSDMGEPNRHPSMFLLLLVLERLYASPMDGTSSALSMGPFVPFIMRVLLCCPGWSAVARSQLTATSTSWVQAILLPQPPE

SEQ ID NO: 26685 - protein, 5 aa, Artificial Sequence
  Synthetic polypeptide
RLSNA

SEQ ID NO: 26686 - protein, 42 aa, Artificial Sequence
  Synthetic polypeptide
ICLLWTYHKWNHTICDPLGLEKGRGARRAVTANGYQMLDGKS

SEQ ID NO: 26687 - protein, 1065 aa, Artificial Sequence
  Synthetic polypeptide
LLTVIKCLMENLEEEVSQAENSLLQAAAAFPMYGRVHCITGALQKLSLNSLQLVSEWRPVVEKLLLMSYRLSTVVSPVIQSSSPEGLIPMDTDSESASRLQMILNEIQPRDTNDYFNQAKILKEHDSFDMKDLNASVVNIDTSTEIKGKEVKTCDVTAQMVLVCCWRSMKEVALLLGMLCQLLPMQPVPESSDGLLTVEQVKEIGDYFKQHLLQSRHRGAFELAYTGFVKLTEVLNRCPNVSLQKLPEQWLWSVLEEIKCSDPSSKLCATRRSAGIPFYIQALLASEPKKGRMDLLKITMKELISLAGPTDDIQSTVPQVHALNILRALFRDTRLGENIIPYVADGAKAAILGFTSPVWAVRNSSTLLFSALITRIFGVKRAKDEHSKTNRMTGREFFSRFPELYPFLLKQLETVANTVDSDMGEPNRHPSMFLLLLVLERLYASPMDGTSSALSMGPFVPFIMRCGHSPVYHSREMAARALVPFVMIDHIPNTIRTLLSTLPSCTDQCFRQNHIHGTLLQVFHLLQAYSDSKHGTNSDFQHELTDITVCTKAKLWLAKRQNPCLVTRAVYIDILFLLTCCLNRSAKDNQPVLESLGFWEEVRGIISGSELITGFPWAFKVPGLPQYLQSLTRLAIAAVWAAAAKSGERETNVPISFSQLLESAFPEVRSLTLEALLEKFLAAASGLGEKGVPPLLCNMGEKFLLLAMKENHPECFCKILKILHCMDPGEWLPQTEHCVHLTPKEFLIWTMDIASNERSEIQSVALRLASKVISHHMQTCVENRELIAAELKQWVQLVILSCEDHLPTESRLAVVEVLTSTTPLFLTNPHPILELQDTLALWKCVLTLLQSEEQAVRDAATETVTTAMSQENTCQSTEFAFCQVDASIALALALAVLCDLLQQWDQLAPGLPILLGWLLGESDDLVACVESMHQVEEDYLFEKAEVNFWAETLIFVKYLCKHLFCLLSKSGWRPPSPEMLCHLQRMVSEQCHLLSQFFRELPPAAEFVKTVEFTRLRIQEERTLACLRLLAFLEGKEGEDTLVLSVWDSYAESRQLTLPRTEAAC

SEQ ID NO: 26688 - protein, 1036 aa, Artificial Sequence
  Synthetic polypeptide
LLTVIKCLMENLEEEVSQAENSLLQAAAAFPMYGRVHCITGALQKLSLNSLQLVSEWRPVVEKLLLMSYRLSTVVSPVIQSSSPEGLIPMDTDSESASRLQMILNEIQPRDTNDYFNQAKILKEHDSFDMKDLNASVVNIDTSTEIKGKEVKTCDVTAQMVLVCCWRSMKEVALLLGMLCQLLPMQPVPESSDGLLTVEQVKEIGDYFKQHLLQSRHRGAFELAYTGFVKLTEVLNRCPNVSLQKLPEQWLWSVLEEIKCSDPSSKLCATRRSAGIPFYIQALLASEPKKGRMDLLKITMKELISLAGPTDDIQSTVPQVHALNILRALFRDTRLGENIIPYVADGAKAAILGFTSPVWASQMTGREFFSRFPELYPFLLKQLETVANTVDSDMGEPNRHPSMFLLLLVLERLYASPMDGTSSALSMGPFVPFIMRCGHSPVYHSREMAARALVPFVMIDHIPNTIRTLLSTLPSCTDQCFRQNHIHGTLLQVFHLLQAYSDSKHGTNSDFQHELTDITVCTKAKLWLAKRQNPCLVTRAVYIDILFLLTCCLNRSAKDNQPVLESLGFWEEVRGIISGSELITGFPWAFKVPGLPQYLQSLTRLAIAAVWAAAAKSGERETNVPISFSQLLESAFPEVRSLTLEALLEKFLAAASGLGEKGVPPLLCNMGEKFLLLAMKENHPECFCKILKILHCMDPGEWLPQTEHCVHLTPKEFLIWTMDIASNERSEIQSVALRLASKVISHHMQTCVENRELIAAELKQWVQLVILSCEDHLPTESRLAVVEVLTSTTPLFLTNPHPILELQDTLALWKCVLTLLQSEEQAVRDAATETVTTAMSQENTCQSTEFAFCQVDASIALALALAVLCDLLQQWDQLAPGLPILLGWLLGESDDLVACVESMHQVEEDYLFEKAEVNFWAETLIFVKYLCKHLFCLLSKSGWRPPSPEMLCHLQRMVSEQCHLLSQFFRELPPAAEFVKTVEFTRLRIQEERTLACLRLLAFLEGKEGEDTLVLSVWDSYAESRQLTLPRTEAAC

SEQ ID NO: 26689 - protein, 991 aa, Artificial Sequence
  Synthetic polypeptide
LLTVIKCLMENLEEEVSQAENSLLQAAAAFPMYGRVHCITGALQKLSLNSLQLVSEWRPVVEKLLLMSYRLSTVVSPVIQSSSPEGLIPMDTDSESASRLQMILNEIQPRDTNDYFNQAKILKEHDSFDMKDLNASVVNIDTSTEIKGKEVKTCDVTAQMVLVCCWRSMKEVALLLGMLCQLLPMQPVPESSDGLLTVEQVKEIGDYFKQHLLQSRHRGAFELAYTGFVKLTEVLNRCPNVSLQKLPEQWLWSVLEEIKCSDPSSKLCATRRSAGIPFYIQALLASEPKKGRMDLLKITMKELISLAGPTDDIQSTVPQVHALNILRALFRDTRLGENIIPYVADGAKAAILGFTSPVWAVRNSSTLLFSALITRIFGVKRAKDEHSKTNRCGHSPVYHSREMAARALVPFVMIDHIPNTIRTLLSTLPSCTDQCFRQNHIHGTLLQVFHLLQAYSDSKHGTNSDFQHELTDITVCTKAKLWLAKRQNPCLVTRAVYIDILFLLTCCLNRSAKDNQPVLESLGFWEEVRGIISGSELITGFPWAFKVPGLPQYLQSLTRLAIAAVWAAAAKSGERETNVPISFSQLLESAFPEVRSLTLEALLEKFLAAASGLGEKGVPPLLCNMGEKFLLLAMKENHPECFCKILKILHCMDPGEWLPQTEHCVHLTPKEFLIWTMDIASNERSEIQSVALRLASKVISHHMQTCVENRELIAAELKQWVQLVILSCEDHLPTESRLAVVEVLTSTTPLFLTNPHPILELQDTLALWKCVLTLLQSEEQAVRDAATETVTTAMSQENTCQSTEFAFCQVDASIALALALAVLCDLLQQWDQLAPGLPILLGWLLGESDDLVACVESMHQVEEDYLFEKAEVNFWAETLIFVKYLCKHLFCLLSKSGWRPPSPEMLCHLQRMVSEQCHLLSQFFRELPPAAEFVKTVEFTRLRIQEERTLACLRLLAFLEGKEGEDTLVLSVWDSYAESRQLTLPRTEAAC

SEQ ID NO: 26690 - protein, 8 aa, Artificial Sequence
  Synthetic polypeptide
LLTVIKCL

SEQ ID NO: 26691 - protein, 38 aa, Artificial Sequence
  Synthetic polypeptide
ICLLWTYHKWNHTICDPLGLEKGRGARRAVTANGYQML

SEQ ID NO: 26692 - protein, 49 aa, Artificial Sequence
  Synthetic polypeptide
LLTVIKCLMENLEEEVSQAENSLLQAAAAFPMYGRVHCITGALQKLSLK

SEQ ID NO: 26693 - protein, 38 aa, Artificial Sequence
  Synthetic polypeptide
KTVWRFLKKLKIELPCDPAVSLGVYPNENLPAFYKCCS

SEQ ID NO: 26694 - protein, 528 aa, Artificial Sequence
  Synthetic polypeptide
NYHVIQQSHWEYIQMKTCQLFINAAVDSPAIDYHISLAQSALQICLTHPELQNEICCQLIKQTRRRQPQNQPGPLQGWQLLALCVGLFLPHHPFLWLLRLHLKRNADSRTEFGKYAIYCQRCVERTQQNGDREARPSRMEILSTLLRNPYHHSLPFSIPVHFMNGIYQVVGFDASTTVEEFLNTLNQDTGMRKPAQSGFALFTDDPSGRDLEHCLQGNIKICDIISKWEQASKEQQPGKCEGTRTVRLTYKNRLYFSVQARGETDREKLLLMYQTNDQIINGLFPLNKDLALEMAALLSQVEIGDFERPFSTPAGHVTNQCKVNQTLKQVIEKFYPKRYRDGCSEEQLRQLCQRLSTRWMALRGHSAADCVRIYLTVARKWPFFGAKLFLAKPITPSSLGSTFLWLAVHEDGLSLLEYNSMRLIVSYVYKSLMTFGGYQDDFMVVINNTHSKDKPTEKLLFAMAKPKILEITLLIASYINNFHQQKAAFHHLSAPALLSAQTRGPQARMMGSQPLLSSSRPTKGPTLL

SEQ ID NO: 26695 - protein, 518 aa, Artificial Sequence
  Synthetic polypeptide
LHMFRKTCQLFINAAVDSPAIDYHISLAQSALQICLTHPELQNEICCQLIKQTRRRQPQNQPGPLQGWQLLALCVGLFLPHHPFLWLLRLHLKRNADSRTEFGKYAIYCQRCVERTQQNGDREARPSRMEILSTLLRNPYHHSLPFSIPVHFMNGIYQVVGFDASTTVEEFLNTLNQDTGMRKPAQSGFALFTDDPSGRDLEHCLQGNIKICDIISKWEQASKEQQPGKCEGTRTVRLTYKNRLYFSVQARGETDREKLLLMYQTNDQIINGLFPLNKDLALEMAALLSQVEIGDFERPFSTPAGHVTNQCKVNQTLKQVIEKFYPKRYRDGCSEEQLRQLCQRLSTRWMALRGHSAADCVRIYLTVARKWPFFGAKLFLAKPITPSSLGSTFLWLAVHEDGLSLLEYNSMRLIVSYVYKSLMTFGGYQDDFMVVINNTHSKDKPTEKLLFAMAKPKILEITLLIASYINNFHQQKAAFHHLSAPALLSAQTRGPQARMMGSQPLLSSSRPTKGPTLL

SEQ ID NO: 26696 - protein, 11 aa, Artificial Sequence
  Synthetic polypeptide
FTCSGRPASFL

SEQ ID NO: 26697 - protein, 15 aa, Artificial Sequence
  Synthetic polypeptide
SHVQEDLPAFYKCCS

SEQ ID NO: 26698 - protein, 28 aa, Artificial Sequence
  Synthetic polypeptide
RQRTTEPSQAVCHCCQRKRYSRGVHFFF

SEQ ID NO: 26699 - protein, 1354 aa, Artificial Sequence
  Synthetic polypeptide
HSGKGKTRDRGLLSPARLYAIAAKEKDIQEESTFSSRKISNQFDWALMRLDLSVRRTGRIPKKLLQKVFNDTCRSGGLGGSHALLLLRSCGSLLPELKLEERTEFAHRIWDTLQKLGAVYDVSHYNALLKVYLQNEYKFSPTDFLAKMEEANIQPNRVTYQRLIASYCNVGDIEGASKILGFMKTKDLPVTEAVFSALVTGHARAGDMENAENILTVMRDAGIEPGPDTYLALLNAYAEKGDIDHVKQTLEKVEKSELHLMDRDLLQIIFSFSKAGYPQYVSEILEKVTCERRYIPDAMNLILLLVTEKLEDVALQILLACPVSKEDGPSVFGSFFLQHCVTMNTPVEKLTDYCKKLKEVQMHSFPLQFTLHCALLANKTDLAKALMKAVKEEGFPIRPHYFWPLLVGRRKEKNVQGIIEILKGMQELGVHPDQETYTDYVIPCFDSVNSARAILQENGCLSDSDMFSQAGLRSEAANGNLDFVLSFLKSNTLPISLQSIRSSLLLGFRRSMNINLWSEITELLYKDGRYCQEPRGPTEAVGYFLYNLIDSMSDSEVQAKEEHLRQYFHQLEKMNVKIPENIYRGIRNLLESYHVPELIKDAHLLVESKNLDFQKTVQLTSSELESTLETLKAENQPIRDVLKQLILVLCSEENMQKALELKAKYESDMVTGGYAALINLCCRHDKVEDALNLKEEFDRLDSSAVLDTGKYVGLVRVLAKHGKLQDAINILKEMKEKDVLIKDTTALSFFHMLNGAALRGEIETVKQLHEAIVTLGLAEPSTNISFPLVTVHLEKGDLSTALEVAIDCYEKYKVLPRIHDVLCKLVEKGETDLIQKAMDFVSQEQGEMVMLYDLFFAFLQTGNYKEAKKIIETPGIRARSARLQWFCDRCVANNQVETLEKLVELTQKLFECDRDQMYYNLLKLYKINGDWQRADAVWNKIQEENVIPREKTLRLLAEILREGNQEVPFDVPELWYEDEKHSLNSSSASTTEPDFQKDILIACRLNQKKGAYDIFLNAKEQNIVFNAETYSNLIKLLMSEDYFTQAMEVKAFAETHIKGFTLNDAANSRLIITQVRRDYLKEAVTTLKTVLDQQQTPSRLAVTRVIQALAMKGDVENIEVVQKMLNGLEDSIGLSKMVFINNIALAQIKNNNIDAAIENIENMLTSENKVIEPQYFGLAYLFRKVIEEQLEPAVEKISIMAERLANQFAIYKPVTDFFLQLVDAGKVDDARALLQRCGAIAEQTPILLLFLLRNSRKQGKASTVKSVLELIPELNEKEEAYNSLMKSYVSEKDVTSAKALYEHLTAKNTKLDDLFLKRYASLLKYAGEPVPFIEPPESFEFYAQQLRKLRENSS

SEQ ID NO: 26700 - protein, 121 aa, Artificial Sequence
  Synthetic polypeptide
FDSFLRKLNIDLPLGIYPNEFKMHVHTKTFTQMLIAALFIIVKNWKQPGCPSVGKWVNKSCISTKEHYSTMKRSAPSCCEKTWRNLKCVLLGERSQSERAACCMMQLYDILGKAKLETEDY

SEQ ID NO: 26701 - protein, 491 aa, Artificial Sequence
  Synthetic polypeptide
HSGKGKTRDRGLLSPARLYAIAAKEKDIQEESTFSSRKISNQFDWALMRLDLSVRRTGRIPKKLLQKVFNDTCRSGGLGGSHALLLLRSCGSLLPELKLEERTEFAHRIWDTLQKLGAVYDVSHYNALLKVYLQNEYKFSPTDFLAKMEEANIQPNRVTYQRLIASYCNVGDIEGASKILGFMKTKDLPVTEAVFSALVTGHARAGDMENAENILTVMRDAGIEPGPDTYLALLNAYAEKGDIDHVKQTLEKVEKSELHLMDRDLLQIIFSFSKAGYPQYVSEILEKVTCERRYIPDAMNLILLLVTEKLEDVALQILLACPVSKEDGPSVFGSFFLQHCVTMNTPVEKLTDYCKKLKEVQMHSFPLQFTLHCALLANKTDLAKALMKAVKEEGFPIRPHYFWPLLVGRRKEKNVQGIIEILKGMQELGVHPDQETYTDYVIPCFDSVNSARAILQENGCLSDSDMFSQAGLRSEAANGNLDFVLSFYFPI

SEQ ID NO: 26702 - protein, 464 aa, Artificial Sequence
  Synthetic polypeptide
HSGKGKTRDRGLLSPARLYAIAAKEKDIQEESTFSSRKISNQFDWALMRLDLSVRRTGRIPKKLLQKVFNDTCRSGGLGGSHALLLLRSCGSLLPELKLEERTEFAHRIWDTLQKLGAVYDVSHYNALLKVYLQNEYKFSPTDFLAKMEEANIQPNRVTYQRLIASYCNVGDIEGASKILGFMKTKDLPVTEAVFSALVTGHARAGDMENAENILTVMRDAGIEPGPDTYLALLNAYAEKGDIDHVKQTLEKVEKSELHLMDRDLLQIIFSFSKAGYPQYVSEILEKVTCERRYIPDAMNLILLLVTEKLEDVALQILLACPVSKEDGPSVFGSFFLQHCVTMNTPVEKLTDYCKKLKEVQMHSFPLQFTLHCALLANKTDLAKALMKAVKEEGFPIRPHYFWPLLVGRRKEKNVQGIIEILKGMQELGVHPDQETYTDYVIPCFDSVNSARAILQVSTSVVLI

SEQ ID NO: 26703 - protein, 345 aa, Artificial Sequence
  Synthetic polypeptide
HSGKGKTRDRGLLSPARLYAIAAKEKDIQEESTFSSRKISNQFDWALMRLDLSVRRTGRIPKKLLQKVFNDTCRSGGLGGSHALLLLRSCGSLLPELKLEERTEFAHRIWDTLQKLGAVYDVSHYNALLKVYLQNEYKFSPTDFLAKMEEANIQPNRVTYQRLIASYCNVGDIEGASKILGFMKTKDLPVTEAVFSALVTGHARAGDMENAENILTVMRDAGIEPGPDTYLALLNAYAEKGDIDHVKQTLEKVEKSELHLMDRDLLQIIFSFSKAGYPQYVSEILEKVTCERRYIPDAMNLILLLVTEKLEDVALQILLACPVSKEDGPSVFGSFFLQHCVTMNT

SEQ ID NO: 26704 - protein, 18 aa, Artificial Sequence
  Synthetic polypeptide
ELCGACDGNFTVLAHKGC

SEQ ID NO: 26705 - protein, 395 aa, Artificial Sequence
  Synthetic polypeptide
SCAVPVTEILRFWLTKGVDGFSLDAVKFLLEAKHLRDEIQVNKTQIPDTVTQYSELYHDFTTTQVGMHDIVRSFRQTMDQYSTEPGRYRFMGTEAYAESIDRTVMYYGLPFIQEADFPFNNYLSMLDTVSGNSVYEVITSWMENMPEGKWPNWMIGGPDSSRLTSRLGNQYVNVMNMLLFTLPGTPITYYGEEIGMGNIVAANLNESYDINTLRSKSPMQWDNSSNAGFSEASNTWLPTNSDYHTVNVDVQKTQPRSALKLYQDLSLLHANELLLNRGWFCHLRNDSHYVVYTRELDGIDRIFIVVLNFGESTLLNLHNMISGLPAKMRIRLSTNSADKGSKVDTSGIFLDKGEGLIFEHNTKNLLHRQTAFRDRCFVSNRACYSSVLNILYTSC

SEQ ID NO: 26706 - protein, 274 aa, Artificial Sequence
  Synthetic polypeptide
SCAVPVTEILRFWLTKGVDGFSLDAVKFLLEAKHLRDEIQVNKTQIPDTVTQYSELYHDFTTTQVGMHDIVRSFRQTMDQYSTEPGRYRFMGTEAYAESIDRTVMYYGLPFIQEADFPFNNYLSMLDTVSGNSVYEVITSWMENMPEGKWPNWMIGGPDSSRLTSRLGNQYVNVMNMLLFTLPGTPITYYGEEIGMGNIVAANLNESYDINTLRSKSPMQWDNSSNAGFSEASNTWLPTNSDYHTVNVDSCSVTHARVQWRDLGTLQPLLPGFK

SEQ ID NO: 26707 - protein, 101 aa, Artificial Sequence
  Synthetic polypeptide
SCAVPVTEILRFWLTKGVDGFSLDAVKFLLEAKHLRDEIQVNKTQIPDTVTQYSELYHDFTTTQVGMHDIVRSFRQTMDQYSTEPGRYRLTTAYALISSQA

SEQ ID NO: 26708 - protein, 212 aa, Artificial Sequence
  Synthetic polypeptide
SCAVPVTEILRFWLTKGVDGFSLDAVKFLLEAKHLRDEIQVNKTQIPDTVTQYSELYHDFTTTQVGMHDIVRSFRQTMDQYSTEPGRYRFMGTEAYAESIDRTVMYYGLPFIQEADFPFNNYLSMLDTVSGNSVYEVITSWMENMPEGKWPNWMIGGPDSSRLTSRLGNQYVNVMNMLLFTLPGTPITYYGEEIGMGNIVAANLNESYDIVS

SEQ ID NO: 26709 - protein, 274 aa, Artificial Sequence
  Synthetic polypeptide
SCAVPVTEILRFWLTKGVDGFSLDAVKFLLEAKHLRDEIQVNKTQIPDTVTQYSELYHDFTTTQVGMHDIVRSFRQTMDQYSTEPGRYRFMGTEAYAESIDRTVMYYGLPFIQEADFPFNNYLSMLDTVSGNSVYEVITSWMENMPEGKWPNWMIGGPDSSRLTSRLGNQYVNVMNMLLFTLPGTPITYYGEEIGMGNIVAANLNESYDINTLRSKSPMQWDNSSNAGFSEASNTWLPTNSDYHTVNVDVSISENFMLILETKKWVSTESTHSP

SEQ ID NO: 26710 - protein, 75 aa, Artificial Sequence
  Synthetic polypeptide
SCAVPVTEILRFWLTKGVDGFSLDAVKFLLEAKHLRDEIQVNKTQIPDTVTQYSELYHDFTTTQVGMHDIVRSFR

SEQ ID NO: 26711 - protein, 26 aa, Artificial Sequence
  Synthetic polypeptide
ELCGACDGELCGACDGNFTVLAHKGC

SEQ ID NO: 26712 - protein, 403 aa, Artificial Sequence
  Synthetic polypeptide
SCAVPVTVSCAVPVTEILRFWLTKGVDGFSLDAVKFLLEAKHLRDEIQVNKTQIPDTVTQYSELYHDFTTTQVGMHDIVRSFRQTMDQYSTEPGRYRFMGTEAYAESIDRTVMYYGLPFIQEADFPFNNYLSMLDTVSGNSVYEVITSWMENMPEGKWPNWMIGGPDSSRLTSRLGNQYVNVMNMLLFTLPGTPITYYGEEIGMGNIVAANLNESYDINTLRSKSPMQWDNSSNAGFSEASNTWLPTNSDYHTVNVDVQKTQPRSALKLYQDLSLLHANELLLNRGWFCHLRNDSHYVVYTRELDGIDRIFIVVLNFGESTLLNLHNMISGLPAKMRIRLSTNSADKGSKVDTSGIFLDKGEGLIFEHNTKNLLHRQTAFRDRCFVSNRACYSSVLNILYTSC

SEQ ID NO: 26713 - protein, 282 aa, Artificial Sequence
  Synthetic polypeptide
SCAVPVTVSCAVPVTEILRFWLTKGVDGFSLDAVKFLLEAKHLRDEIQVNKTQIPDTVTQYSELYHDFTTTQVGMHDIVRSFRQTMDQYSTEPGRYRFMGTEAYAESIDRTVMYYGLPFIQEADFPFNNYLSMLDTVSGNSVYEVITSWMENMPEGKWPNWMIGGPDSSRLTSRLGNQYVNVMNMLLFTLPGTPITYYGEEIGMGNIVAANLNESYDINTLRSKSPMQWDNSSNAGFSEASNTWLPTNSDYHTVNVDSCSVTHARVQWRDLGTLQPLLPGFK

SEQ ID NO: 26714 - protein, 109 aa, Artificial Sequence
  Synthetic polypeptide
SCAVPVTVSCAVPVTEILRFWLTKGVDGFSLDAVKFLLEAKHLRDEIQVNKTQIPDTVTQYSELYHDFTTTQVGMHDIVRSFRQTMDQYSTEPGRYRLTTAYALISSQA

SEQ ID NO: 26715 - protein, 220 aa, Artificial Sequence
  Synthetic polypeptide
SCAVPVTVSCAVPVTEILRFWLTKGVDGFSLDAVKFLLEAKHLRDEIQVNKTQIPDTVTQYSELYHDFTTTQVGMHDIVRSFRQTMDQYSTEPGRYRFMGTEAYAESIDRTVMYYGLPFIQEADFPFNNYLSMLDTVSGNSVYEVITSWMENMPEGKWPNWMIGGPDSSRLTSRLGNQYVNVMNMLLFTLPGTPITYYGEEIGMGNIVAANLNESYDIVS

SEQ ID NO: 26716 - protein, 282 aa, Artificial Sequence
  Synthetic polypeptide
SCAVPVTVSCAVPVTEILRFWLTKGVDGFSLDAVKFLLEAKHLRDEIQVNKTQIPDTVTQYSELYHDFTTTQVGMHDIVRSFRQTMDQYSTEPGRYRFMGTEAYAESIDRTVMYYGLPFIQEADFPFNNYLSMLDTVSGNSVYEVITSWMENMPEGKWPNWMIGGPDSSRLTSRLGNQYVNVMNMLLFTLPGTPITYYGEEIGMGNIVAANLNESYDINTLRSKSPMQWDNSSNAGFSEASNTWLPTNSDYHTVNVDVSISENFMLILETKKWVSTESTHSP

SEQ ID NO: 26717 - protein, 83 aa, Artificial Sequence
  Synthetic polypeptide
SCAVPVTVSCAVPVTEILRFWLTKGVDGFSLDAVKFLLEAKHLRDEIQVNKTQIPDTVTQYSELYHDFTTTQVGMHDIVRSFR

SEQ ID NO: 26718 - protein, 34 aa, Artificial Sequence
  Synthetic polypeptide
ELCGACDGELCGACDGELCGACDGNFTVLAHKGC

SEQ ID NO: 26719 - protein, 411 aa, Artificial Sequence
  Synthetic polypeptide
SCAVPVTVSCAVPVTVSCAVPVTEILRFWLTKGVDGFSLDAVKFLLEAKHLRDEIQVNKTQIPDTVTQYSELYHDFTTTQVGMHDIVRSFRQTMDQYSTEPGRYRFMGTEAYAESIDRTVMYYGLPFIQEADFPFNNYLSMLDTVSGNSVYEVITSWMENMPEGKWPNWMIGGPDSSRLTSRLGNQYVNVMNMLLFTLPGTPITYYGEEIGMGNIVAANLNESYDINTLRSKSPMQWDNSSNAGFSEASNTWLPTNSDYHTVNVDVQKTQPRSALKLYQDLSLLHANELLLNRGWFCHLRNDSHYVVYTRELDGIDRIFIVVLNFGESTLLNLHNMISGLPAKMRIRLSTNSADKGSKVDTSGIFLDKGEGLIFEHNTKNLLHRQTAFRDRCFVSNRACYSSVLNILYTSC

SEQ ID NO: 26720 - protein, 290 aa, Artificial Sequence
  Synthetic polypeptide
SCAVPVTVSCAVPVTVSCAVPVTEILRFWLTKGVDGFSLDAVKFLLEAKHLRDEIQVNKTQIPDTVTQYSELYHDFTTTQVGMHDIVRSFRQTMDQYSTEPGRYRFMGTEAYAESIDRTVMYYGLPFIQEADFPFNNYLSMLDTVSGNSVYEVITSWMENMPEGKWPNWMIGGPDSSRLTSRLGNQYVNVMNMLLFTLPGTPITYYGEEIGMGNIVAANLNESYDINTLRSKSPMQWDNSSNAGFSEASNTWLPTNSDYHTVNVDSCSVTHARVQWRDLGTLQPLLPGFK

SEQ ID NO: 26721 - protein, 117 aa, Artificial Sequence
  Synthetic polypeptide
SCAVPVTVSCAVPVTVSCAVPVTEILRFWLTKGVDGFSLDAVKFLLEAKHLRDEIQVNKTQIPDTVTQYSELYHDFTTTQVGMHDIVRSFRQTMDQYSTEPGRYRLTTAYALISSQA

SEQ ID NO: 26722 - protein, 228 aa, Artificial Sequence
  Synthetic polypeptide
SCAVPVTVSCAVPVTVSCAVPVTEILRFWLTKGVDGFSLDAVKFLLEAKHLRDEIQVNKTQIPDTVTQYSELYHDFTTTQVGMHDIVRSFRQTMDQYSTEPGRYRFMGTEAYAESIDRTVMYYGLPFIQEADFPFNNYLSMLDTVSGNSVYEVITSWMENMPEGKWPNWMIGGPDSSRLTSRLGNQYVNVMNMLLFTLPGTPITYYGEEIGMGNIVAANLNESYDIVS

SEQ ID NO: 26723 - protein, 290 aa, Artificial Sequence
  Synthetic polypeptide
SCAVPVTVSCAVPVTVSCAVPVTEILRFWLTKGVDGFSLDAVKFLLEAKHLRDEIQVNKTQIPDTVTQYSELYHDFTTTQVGMHDIVRSFRQTMDQYSTEPGRYRFMGTEAYAESIDRTVMYYGLPFIQEADFPFNNYLSMLDTVSGNSVYEVITSWMENMPEGKWPNWMIGGPDSSRLTSRLGNQYVNVMNMLLFTLPGTPITYYGEEIGMGNIVAANLNESYDINTLRSKSPMQWDNSSNAGFSEASNTWLPTNSDYHTVNVDVSISENFMLILETKKWVSTESTHSP

SEQ ID NO: 26724 - protein, 91 aa, Artificial Sequence
  Synthetic polypeptide
SCAVPVTVSCAVPVTVSCAVPVTEILRFWLTKGVDGFSLDAVKFLLEAKHLRDEIQVNKTQIPDTVTQYSELYHDFTTTQVGMHDIVRSFR

SEQ ID NO: 26725 - protein, 42 aa, Artificial Sequence
  Synthetic polypeptide
ELCGACDGELCGACDGELCGACDGELCGVCDGNFTVLAHKGC

SEQ ID NO: 26726 - protein, 419 aa, Artificial Sequence
  Synthetic polypeptide
SCAVPVTVSCAVPVTVSCAVPVTVSCAVSVTEILRFWLTKGVDGFSLDAVKFLLEAKHLRDEIQVNKTQIPDTVTQYSELYHDFTTTQVGMHDIVRSFRQTMDQYSTEPGRYRFMGTEAYAESIDRTVMYYGLPFIQEADFPFNNYLSMLDTVSGNSVYEVITSWMENMPEGKWPNWMIGGPDSSRLTSRLGNQYVNVMNMLLFTLPGTPITYYGEEIGMGNIVAANLNESYDINTLRSKSPMQWDNSSNAGFSEASNTWLPTNSDYHTVNVDVQKTQPRSALKLYQDLSLLHANELLLNRGWFCHLRNDSHYVVYTRELDGIDRIFIVVLNFGESTLLNLHNMISGLPAKMRIRLSTNSADKGSKVDTSGIFLDKGEGLIFEHNTKNLLHRQTAFRDRCFVSNRACYSSVLNILYTSC

SEQ ID NO: 26727 - protein, 298 aa, Artificial Sequence
  Synthetic polypeptide
SCAVPVTVSCAVPVTVSCAVPVTVSCAVSVTEILRFWLTKGVDGFSLDAVKFLLEAKHLRDEIQVNKTQIPDTVTQYSELYHDFTTTQVGMHDIVRSFRQTMDQYSTEPGRYRFMGTEAYAESIDRTVMYYGLPFIQEADFPFNNYLSMLDTVSGNSVYEVITSWMENMPEGKWPNWMIGGPDSSRLTSRLGNQYVNVMNMLLFTLPGTPITYYGEEIGMGNIVAANLNESYDINTLRSKSPMQWDNSSNAGFSEASNTWLPTNSDYHTVNVDSCSVTHARVQWRDLGTLQPLLPGFK

SEQ ID NO: 26728 - protein, 125 aa, Artificial Sequence
  Synthetic polypeptide
SCAVPVTVSCAVPVTVSCAVPVTVSCAVSVTEILRFWLTKGVDGFSLDAVKFLLEAKHLRDEIQVNKTQIPDTVTQYSELYHDFTTTQVGMHDIVRSFRQTMDQYSTEPGRYRLTTAYALISSQA

SEQ ID NO: 26729 - protein, 236 aa, Artificial Sequence
  Synthetic polypeptide
SCAVPVTVSCAVPVTVSCAVPVTVSCAVSVTEILRFWLTKGVDGFSLDAVKFLLEAKHLRDEIQVNKTQIPDTVTQYSELYHDFTTTQVGMHDIVRSFRQTMDQYSTEPGRYRFMGTEAYAESIDRTVMYYGLPFIQEADFPFNNYLSMLDTVSGNSVYEVITSWMENMPEGKWPNWMIGGPDSSRLTSRLGNQYVNVMNMLLFTLPGTPITYYGEEIGMGNIVAANLNESYDIVS

SEQ ID NO: 26730 - protein, 298 aa, Artificial Sequence
  Synthetic polypeptide
SCAVPVTVSCAVPVTVSCAVPVTVSCAVSVTEILRFWLTKGVDGFSLDAVKFLLEAKHLRDEIQVNKTQIPDTVTQYSELYHDFTTTQVGMHDIVRSFRQTMDQYSTEPGRYRFMGTEAYAESIDRTVMYYGLPFIQEADFPFNNYLSMLDTVSGNSVYEVITSWMENMPEGKWPNWMIGGPDSSRLTSRLGNQYVNVMNMLLFTLPGTPITYYGEEIGMGNIVAANLNESYDINTLRSKSPMQWDNSSNAGFSEASNTWLPTNSDYHTVNVDVSISENFMLILETKKWVSTESTHSP

SEQ ID NO: 26731 - protein, 99 aa, Artificial Sequence
  Synthetic polypeptide
SCAVPVTVSCAVPVTVSCAVPVTVSCAVSVTEILRFWLTKGVDGFSLDAVKFLLEAKHLRDEIQVNKTQIPDTVTQYSELYHDFTTTQVGMHDIVRSFR

SEQ ID NO: 26732 - protein, 404 aa, Artificial Sequence
  Synthetic polypeptide
LSCAVSVTVSCAVPVTEILRFWLTKGVDGFSLDAVKFLLEAKHLRDEIQVNKTQIPDTVTQYSELYHDFTTTQVGMHDIVRSFRQTMDQYSTEPGRYRFMGTEAYAESIDRTVMYYGLPFIQEADFPFNNYLSMLDTVSGNSVYEVITSWMENMPEGKWPNWMIGGPDSSRLTSRLGNQYVNVMNMLLFTLPGTPITYYGEEIGMGNIVAANLNESYDINTLRSKSPMQWDNSSNAGFSEASNTWLPTNSDYHTVNVDVQKTQPRSALKLYQDLSLLHANELLLNRGWFCHLRNDSHYVVYTRELDGIDRIFIVVLNFGESTLLNLHNMISGLPAKMRIRLSTNSADKGSKVDTSGIFLDKGEGLIFEHNTKNLLHRQTAFRDRCFVSNRACYSSVLNILYTSC

SEQ ID NO: 26733 - protein, 34 aa, Artificial Sequence
  Synthetic polypeptide
LSCAVPVTELCGVCDGELCGACDGNFTVLAHKGC

SEQ ID NO: 26734 - protein, 283 aa, Artificial Sequence
  Synthetic polypeptide
LSCAVSVTVSCAVPVTEILRFWLTKGVDGFSLDAVKFLLEAKHLRDEIQVNKTQIPDTVTQYSELYHDFTTTQVGMHDIVRSFRQTMDQYSTEPGRYRFMGTEAYAESIDRTVMYYGLPFIQEADFPFNNYLSMLDTVSGNSVYEVITSWMENMPEGKWPNWMIGGPDSSRLTSRLGNQYVNVMNMLLFTLPGTPITYYGEEIGMGNIVAANLNESYDINTLRSKSPMQWDNSSNAGFSEASNTWLPTNSDYHTVNVDSCSVTHARVQWRDLGTLQPLLPGFK

SEQ ID NO: 26735 - protein, 110 aa, Artificial Sequence
  Synthetic polypeptide
LSCAVSVTVSCAVPVTEILRFWLTKGVDGFSLDAVKFLLEAKHLRDEIQVNKTQIPDTVTQYSELYHDFTTTQVGMHDIVRSFRQTMDQYSTEPGRYRLTTAYALISSQA

SEQ ID NO: 26736 - protein, 221 aa, Artificial Sequence
  Synthetic polypeptide
LSCAVSVTVSCAVPVTEILRFWLTKGVDGFSLDAVKFLLEAKHLRDEIQVNKTQIPDTVTQYSELYHDFTTTQVGMHDIVRSFRQTMDQYSTEPGRYRFMGTEAYAESIDRTVMYYGLPFIQEADFPFNNYLSMLDTVSGNSVYEVITSWMENMPEGKWPNWMIGGPDSSRLTSRLGNQYVNVMNMLLFTLPGTPITYYGEEIGMGNIVAANLNESYDIVS

SEQ ID NO: 26737 - protein, 283 aa, Artificial Sequence
  Synthetic polypeptide
LSCAVSVTVSCAVPVTEILRFWLTKGVDGFSLDAVKFLLEAKHLRDEIQVNKTQIPDTVTQYSELYHDFTTTQVGMHDIVRSFRQTMDQYSTEPGRYRFMGTEAYAESIDRTVMYYGLPFIQEADFPFNNYLSMLDTVSGNSVYEVITSWMENMPEGKWPNWMIGGPDSSRLTSRLGNQYVNVMNMLLFTLPGTPITYYGEEIGMGNIVAANLNESYDINTLRSKSPMQWDNSSNAGFSEASNTWLPTNSDYHTVNVDVSISENFMLILETKKWVSTESTHSP

SEQ ID NO: 26738 - protein, 84 aa, Artificial Sequence
  Synthetic polypeptide
LSCAVSVTVSCAVPVTEILRFWLTKGVDGFSLDAVKFLLEAKHLRDEIQVNKTQIPDTVTQYSELYHDFTTTQVGMHDIVRSFR

SEQ ID NO: 26739 - protein, 412 aa, Artificial Sequence
  Synthetic polypeptide
LSCAVSVTVSCAVPVTVSCAVPVTEILRFWLTKGVDGFSLDAVKFLLEAKHLRDEIQVNKTQIPDTVTQYSELYHDFTTTQVGMHDIVRSFRQTMDQYSTEPGRYRFMGTEAYAESIDRTVMYYGLPFIQEADFPFNNYLSMLDTVSGNSVYEVITSWMENMPEGKWPNWMIGGPDSSRLTSRLGNQYVNVMNMLLFTLPGTPITYYGEEIGMGNIVAANLNESYDINTLRSKSPMQWDNSSNAGFSEASNTWLPTNSDYHTVNVDVQKTQPRSALKLYQDLSLLHANELLLNRGWFCHLRNDSHYVVYTRELDGIDRIFIVVLNFGESTLLNLHNMISGLPAKMRIRLSTNSADKGSKVDTSGIFLDKGEGLIFEHNTKNLLHRQTAFRDRCFVSNRACYSSVLNILYTSC

SEQ ID NO: 26740 - protein, 42 aa, Artificial Sequence
  Synthetic polypeptide
LSCAVPVTELCGVCDGELCGACDGELCGACDGNFTVLAHKGC

SEQ ID NO: 26741 - protein, 291 aa, Artificial Sequence
  Synthetic polypeptide
LSCAVSVTVSCAVPVTVSCAVPVTEILRFWLTKGVDGFSLDAVKFLLEAKHLRDEIQVNKTQIPDTVTQYSELYHDFTTTQVGMHDIVRSFRQTMDQYSTEPGRYRFMGTEAYAESIDRTVMYYGLPFIQEADFPFNNYLSMLDTVSGNSVYEVITSWMENMPEGKWPNWMIGGPDSSRLTSRLGNQYVNVMNMLLFTLPGTPITYYGEEIGMGNIVAANLNESYDINTLRSKSPMQWDNSSNAGFSEASNTWLPTNSDYHTVNVDSCSVTHARVQWRDLGTLQPLLPGFK

SEQ ID NO: 26742 - protein, 118 aa, Artificial Sequence
  Synthetic polypeptide
LSCAVSVTVSCAVPVTVSCAVPVTEILRFWLTKGVDGFSLDAVKFLLEAKHLRDEIQVNKTQIPDTVTQYSELYHDFTTTQVGMHDIVRSFRQTMDQYSTEPGRYRLTTAYALISSQA

SEQ ID NO: 26743 - protein, 229 aa, Artificial Sequence
  Synthetic polypeptide
LSCAVSVTVSCAVPVTVSCAVPVTEILRFWLTKGVDGFSLDAVKFLLEAKHLRDEIQVNKTQIPDTVTQYSELYHDFTTTQVGMHDIVRSFRQTMDQYSTEPGRYRFMGTEAYAESIDRTVMYYGLPFIQEADFPFNNYLSMLDTVSGNSVYEVITSWMENMPEGKWPNWMIGGPDSSRLTSRLGNQYVNVMNMLLFTLPGTPITYYGEEIGMGNIVAANLNESYDIVS

SEQ ID NO: 26744 - protein, 291 aa, Artificial Sequence
  Synthetic polypeptide
LSCAVSVTVSCAVPVTVSCAVPVTEILRFWLTKGVDGFSLDAVKFLLEAKHLRDEIQVNKTQIPDTVTQYSELYHDFTTTQVGMHDIVRSFRQTMDQYSTEPGRYRFMGTEAYAESIDRTVMYYGLPFIQEADFPFNNYLSMLDTVSGNSVYEVITSWMENMPEGKWPNWMIGGPDSSRLTSRLGNQYVNVMNMLLFTLPGTPITYYGEEIGMGNIVAANLNESYDINTLRSKSPMQWDNSSNAGFSEASNTWLPTNSDYHTVNVDVSISENFMLILETKKWVSTESTHSP

SEQ ID NO: 26745 - protein, 92 aa, Artificial Sequence
  Synthetic polypeptide
LSCAVSVTVSCAVPVTVSCAVPVTEILRFWLTKGVDGFSLDAVKFLLEAKHLRDEIQVNKTQIPDTVTQYSELYHDFTTTQVGMHDIVRSFR

SEQ ID NO: 26746 - protein, 420 aa, Artificial Sequence
  Synthetic polypeptide
LSCAVSVTVSCAVPVTVSCAVPVTVSCAVPVMEILRFWLTKGVDGFSLDAVKFLLEAKHLRDEIQVNKTQIPDTVTQYSELYHDFTTTQVGMHDIVRSFRQTMDQYSTEPGRYRFMGTEAYAESIDRTVMYYGLPFIQEADFPFNNYLSMLDTVSGNSVYEVITSWMENMPEGKWPNWMIGGPDSSRLTSRLGNQYVNVMNMLLFTLPGTPITYYGEEIGMGNIVAANLNESYDINTLRSKSPMQWDNSSNAGFSEASNTWLPTNSDYHTVNVDVQKTQPRSALKLYQDLSLLHANELLLNRGWFCHLRNDSHYVVYTRELDGIDRIFIVVLNFGESTLLNLHNMISGLPAKMRIRLSTNSADKGSKVDTSGIFLDKGEGLIFEHNTKNLLHRQTAFRDRCFVSNRACYSSVLNILYTSC

SEQ ID NO: 26747 - protein, 50 aa, Artificial Sequence
  Synthetic polypeptide
LSCAVPVTELCGVCDGELCGACDGELCGACDGELCGACDGNFTVLAHKGC

SEQ ID NO: 26748 - protein, 299 aa, Artificial Sequence
  Synthetic polypeptide
LSCAVSVTVSCAVPVTVSCAVPVTVSCAVPVMEILRFWLTKGVDGFSLDAVKFLLEAKHLRDEIQVNKTQIPDTVTQYSELYHDFTTTQVGMHDIVRSFRQTMDQYSTEPGRYRFMGTEAYAESIDRTVMYYGLPFIQEADFPFNNYLSMLDTVSGNSVYEVITSWMENMPEGKWPNWMIGGPDSSRLTSRLGNQYVNVMNMLLFTLPGTPITYYGEEIGMGNIVAANLNESYDINTLRSKSPMQWDNSSNAGFSEASNTWLPTNSDYHTVNVDSCSVTHARVQWRDLGTLQPLLPGFK

SEQ ID NO: 26749 - protein, 126 aa, Artificial Sequence
  Synthetic polypeptide
LSCAVSVTVSCAVPVTVSCAVPVTVSCAVPVMEILRFWLTKGVDGFSLDAVKFLLEAKHLRDEIQVNKTQIPDTVTQYSELYHDFTTTQVGMHDIVRSFRQTMDQYSTEPGRYRLTTAYALISSQA

SEQ ID NO: 26750 - protein, 237 aa, Artificial Sequence
  Synthetic polypeptide
LSCAVSVTVSCAVPVTVSCAVPVTVSCAVPVMEILRFWLTKGVDGFSLDAVKFLLEAKHLRDEIQVNKTQIPDTVTQYSELYHDFTTTQVGMHDIVRSFRQTMDQYSTEPGRYRFMGTEAYAESIDRTVMYYGLPFIQEADFPFNNYLSMLDTVSGNSVYEVITSWMENMPEGKWPNWMIGGPDSSRLTSRLGNQYVNVMNMLLFTLPGTPITYYGEEIGMGNIVAANLNESYDIVS

SEQ ID NO: 26751 - protein, 299 aa, Artificial Sequence
  Synthetic polypeptide
LSCAVSVTVSCAVPVTVSCAVPVTVSCAVPVMEILRFWLTKGVDGFSLDAVKFLLEAKHLRDEIQVNKTQIPDTVTQYSELYHDFTTTQVGMHDIVRSFRQTMDQYSTEPGRYRFMGTEAYAESIDRTVMYYGLPFIQEADFPFNNYLSMLDTVSGNSVYEVITSWMENMPEGKWPNWMIGGPDSSRLTSRLGNQYVNVMNMLLFTLPGTPITYYGEEIGMGNIVAANLNESYDINTLRSKSPMQWDNSSNAGFSEASNTWLPTNSDYHTVNVDVSISENFMLILETKKWVSTESTHSP

SEQ ID NO: 26752 - protein, 100 aa, Artificial Sequence
  Synthetic polypeptide
LSCAVSVTVSCAVPVTVSCAVPVTVSCAVPVMEILRFWLTKGVDGFSLDAVKFLLEAKHLRDEIQVNKTQIPDTVTQYSELYHDFTTTQVGMHDIVRSFR

SEQ ID NO: 26753 - protein, 16 aa, Artificial Sequence
  Synthetic polypeptide
RGNNNGNFTVLAHKGC

SEQ ID NO: 26754 - protein, 410 aa, Artificial Sequence
  Synthetic polypeptide
PCQRHIIFLSHSFLTGKGGTIMEILRFWLTKGVDGFSLDAVKFLLEAKHLRDEIQVNKTQIPDTVTQYSELYHDFTTTQVGMHDIVRSFRQTMDQYSTEPGRYRFMGTEAYAESIDRTVMYYGLPFIQEADFPFNNYLSMLDTVSGNSVYEVITSWMENMPEGKWPNWMIGGPDSSRLTSRLGNQYVNVMNMLLFTLPGTPITYYGEEIGMGNIVAANLNESYDINTLRSKSPMQWDNSSNAGFSEASNTWLPTNSDYHTVNVDVQKTQPRSALKLYQDLSLLHANELLLNRGWFCHLRNDSHYVVYTRELDGIDRIFIVVLNFGESTLLNLHNMISGLPAKMRIRLSTNSADKGSKVDTSGIFLDKGEGLIFEHNTKNLLHRQTAFRDRCFVSNRACYSSVLNILYTSC

SEQ ID NO: 26755 - protein, 289 aa, Artificial Sequence
  Synthetic polypeptide
PCQRHIIFLSHSFLTGKGGTIMEILRFWLTKGVDGFSLDAVKFLLEAKHLRDEIQVNKTQIPDTVTQYSELYHDFTTTQVGMHDIVRSFRQTMDQYSTEPGRYRFMGTEAYAESIDRTVMYYGLPFIQEADFPFNNYLSMLDTVSGNSVYEVITSWMENMPEGKWPNWMIGGPDSSRLTSRLGNQYVNVMNMLLFTLPGTPITYYGEEIGMGNIVAANLNESYDINTLRSKSPMQWDNSSNAGFSEASNTWLPTNSDYHTVNVDSCSVTHARVQWRDLGTLQPLLPGFK

SEQ ID NO: 26756 - protein, 116 aa, Artificial Sequence
  Synthetic polypeptide
PCQRHIIFLSHSFLTGKGGTIMEILRFWLTKGVDGFSLDAVKFLLEAKHLRDEIQVNKTQIPDTVTQYSELYHDFTTTQVGMHDIVRSFRQTMDQYSTEPGRYRLTTAYALISSQA

SEQ ID NO: 26757 - protein, 227 aa, Artificial Sequence
  Synthetic polypeptide
PCQRHIIFLSHSFLTGKGGTIMEILRFWLTKGVDGFSLDAVKFLLEAKHLRDEIQVNKTQIPDTVTQYSELYHDFTTTQVGMHDIVRSFRQTMDQYSTEPGRYRFMGTEAYAESIDRTVMYYGLPFIQEADFPFNNYLSMLDTVSGNSVYEVITSWMENMPEGKWPNWMIGGPDSSRLTSRLGNQYVNVMNMLLFTLPGTPITYYGEEIGMGNIVAANLNESYDIVS

SEQ ID NO: 26758 - protein, 289 aa, Artificial Sequence
  Synthetic polypeptide
PCQRHIIFLSHSFLTGKGGTIMEILRFWLTKGVDGFSLDAVKFLLEAKHLRDEIQVNKTQIPDTVTQYSELYHDFTTTQVGMHDIVRSFRQTMDQYSTEPGRYRFMGTEAYAESIDRTVMYYGLPFIQEADFPFNNYLSMLDTVSGNSVYEVITSWMENMPEGKWPNWMIGGPDSSRLTSRLGNQYVNVMNMLLFTLPGTPITYYGEEIGMGNIVAANLNESYDINTLRSKSPMQWDNSSNAGFSEASNTWLPTNSDYHTVNVDVSISENFMLILETKKWVSTESTHSP

SEQ ID NO: 26759 - protein, 90 aa, Artificial Sequence
  Synthetic polypeptide
PCQRHIIFLSHSFLTGKGGTIMEILRFWLTKGVDGFSLDAVKFLLEAKHLRDEIQVNKTQIPDTVTQYSELYHDFTTTQVGMHDIVRSFR

SEQ ID NO: 26760 - protein, 23 aa, Artificial Sequence
  Synthetic polypeptide
FEHGLNVSMTYPRLYSRQHWTVL

SEQ ID NO: 26761 - protein, 3 aa, Artificial Sequence
  Synthetic polypeptide
MLA

SEQ ID NO: 26762 - protein, 82 aa, Artificial Sequence
  Synthetic polypeptide
KEKKKEDRWRKSWNLGKSRSKRTERGKGNSQDARAGTPQHSSFAAVLGGSKKMEGAGRRNQAFRELHPYGRIVSRSLQFLAL

SEQ ID NO: 26763 - protein, 24 aa, Artificial Sequence
  Synthetic polypeptide
VAPKRWKERGEEIKHLESYIHMGE

SEQ ID NO: 26764 - protein, 8 aa, Artificial Sequence
  Synthetic polypeptide
GFPSYVEL

SEQ ID NO: 26765 - protein, 110 aa, Artificial Sequence
  Synthetic polypeptide
ISQDLMVFKMGVSLHKLSLPAAIHIRCDLLLLAFHHDCEASPATWNYDSNVQPMMSSCWAEGTGAILYQDVTQKCLKSKEQLSECLVTQLLLSWFLRHGLHIQQIHEVFP

SEQ ID NO: 26766 - protein, 28 aa, Artificial Sequence
  Synthetic polypeptide
DVTCSSLPSTMIVRLPQLRGTMIPMYSQ

SEQ ID NO: 26767 - protein, 39 aa, Artificial Sequence
  Synthetic polypeptide
AQWLMPIIPALWEVEAGGSLEPRSSRPTWAAWKGVNRHH

SEQ ID NO: 26768 - protein, 36 aa, Artificial Sequence
  Synthetic polypeptide
AKHSGSCLLSQHFGRLRQEDRLSPGVQDQPGQHGRE

SEQ ID NO: 26769 - protein, 54 aa, Artificial Sequence
  Synthetic polypeptide
AQEFKTNLGSMEGSEQAPLMSEDELINIIDGVLRDDDKNNDGYIDYAEFAKSLQ

SEQ ID NO: 26770 - protein, 17 aa, Artificial Sequence
  Synthetic polypeptide
ALGVWLVHIEMCSTVHV

SEQ ID NO: 26771 - protein, 748 aa, Artificial Sequence
  Synthetic polypeptide
STLRCAPQYMCEAMLILGKLHYVEGSYRDAISMYARAGIDDMSMENKPLYQMRLLSEAFVIKGLSLERLPNSIASRFRLTEREEEVITCFERASWIAQVFLQELEKTTNNSTSRHLKGCHPLDYELTYFLEAALQSAYVKNLKKGNIVKGMRELREVLRTVETKATQNFKVMAAKHLAGVLLHSLSEECYWSPLSHPLPEFMGKEESSFATQALRKPHLYEGDNLYCPKDNIEEALLLLLISESMATRDVVLSRVPEQEEDRTVSLQNAAAIYDLLSITLGRRGQYVMLSECLERAMKFAFGEFHLWYQVALSMVACGKSAYAVSLLRECVKLRPSDPTVPLMAAKVCIGSLRWLEEAEHFAMMVISLGEEAGEFLPKGYLALGLTYSLQATDATLKSKQDELHRKALQTLERAQQLAPSDPQVILYVSLQLALVRQISSAMEQLQEALKVRKDDAHALHLLALLFSAQKHHQHALDVVNMAITEHPENFNLMFTKVKLEQVLKGPEEALVTCRQVLRLWQTLYSFSQLGGLEKDGSFGEGLTMKKQSGMHLTLPDAHDADSGSRRASSIAASRLEEAMSELTMPSSVLKQGPMQLWTTLEQIWLQAAELFMEQQHLKEAGFCIQEAAGLFPTSHSVLYMRGRLAEVKGNLEEAKQLYKEALTVNPDGVRIMHSLGLMLSRLGHKSLAQKVLRDAVERQSTCHEAWQGLGEVLQAQGQNEAAVDCFLTALELEASSPVLPFSIIPREL

SEQ ID NO: 26772 - protein, 11 aa, Artificial Sequence
  Synthetic polypeptide
DVLHSTCVRPC

SEQ ID NO: 26773 - protein, 772 aa, Artificial Sequence
  Synthetic polypeptide
STLRCAPQYMCEAMLILGKLHYVEGSYRDAISMYARAGIDDMSMENKPLYQMRLLSEAFVIKGLSLERLPNSIASRFRLTEREEEVITCFERASWIAQVFLQELEKTTNNSTSRHLKGCHPLDYELTYFLEAALQSAYVKNLKKGNIVKGMRELREVLRTVETKATQNFKVMAAKHLAGVLLHSLSEECYWSPLSHPLPEFMGKEESSFATQALRKPHLYEGDNLYCPKDNIEEALLLLLISESMATRDVVLSRVPEQEEDRTVSLQNAAAIYDLLSITLGRRGQYVMLSECLERAMKFAFGEFHLWYQVALSMVACGKSAYAVSLLRECVKLRPSDPTVPLMAAKVCIGSLRWLEEAEHFAMMVISLGEEAGEFLPKGYLALGLTYSLQATDATLKSKQDELHRKALQTLERAQQLAPSDPQVILYVSLQLALVRQISSAMEQLQEALKVRKDDAHALHLLALLFSAQKHHQHALDVVNMAITEHPENFNLMFTKVKLEQVLKGPEEALVTCRQVLRLWQTLYSFSQLGDFRSPEGFQTPQRNICNSEIYRGGGLEKDGSFGEGLTMKKQSGMHLTLPDAHDADSGSRRASSIAASRLEEAMSELTMPSSVLKQGPMQLWTTLEQIWLQAAELFMEQQHLKEAGFCIQEAAGLFPTSHSVLYMRGRLAEVKGNLEEAKQLYKEALTVNPDGVRIMHSLGLMLSRLGHKSLAQKVLRDAVERQSTCHEAWQGLGEVLQAQGQNEAAVDCFLTALELEASSPVLPFSIIPREL

SEQ ID NO: 26774 - protein, 220 aa, Artificial Sequence
  Synthetic polypeptide
STLRCAPQYMCEAMLILGKLHYVEGSYRDAISMYARAGIDDMSMENKPLYQMRLLSEAFVIKGLSLERLPNSIASRFRLTEREEEVITCFERASWIAQVFLQELEKTTNNSTSRHLKGCHPLDYELTYFLEAALQSAYVKNLKKGNIVKGMRELREVLRTVETKATQNFKVPLLPQGQHRGSPPAPPHQRIHGNSRCGAEPGAGAGGGPDSELAECRSHL

SEQ ID NO: 26775 - protein, 609 aa, Artificial Sequence
  Synthetic polypeptide
LLGRLRNIVKGMRELREVLRTVETKATQNFKVMAAKHLAGVLLHSLSEECYWSPLSHPLPEFMGKEESSFATQALRKPHLYEGDNLYCPKDNIEEALLLLLISESMATRDVVLSRVPEQEEDRTVSLQNAAAIYDLLSITLGRRGQYVMLSECLERAMKFAFGEFHLWYQVALSMVACGKSAYAVSLLRECVKLRPSDPTVPLMAAKVCIGSLRWLEEAEHFAMMVISLGEEAGEFLPKGYLALGLTYSLQATDATLKSKQDELHRKALQTLERAQQLAPSDPQVILYVSLQLALVRQISSAMEQLQEALKVRKDDAHALHLLALLFSAQKHHQHALDVVNMAITEHPENFNLMFTKVKLEQVLKGPEEALVTCRQVLRLWQTLYSFSQLGGLEKDGSFGEGLTMKKQSGMHLTLPDAHDADSGSRRASSIAASRLEEAMSELTMPSSVLKQGPMQLWTTLEQIWLQAAELFMEQQHLKEAGFCIQEAAGLFPTSHSVLYMRGRLAEVKGNLEEAKQLYKEALTVNPDGVRIMHSLGLMLSRLGHKSLAQKVLRDAVERQSTCHEAWQGLGEVLQAQGQNEAAVDCFLTALELEASSPVLPFSIIPREL

SEQ ID NO: 26776 - protein, 69 aa, Artificial Sequence
  Synthetic polypeptide
DRLYKKKLFLISWTSWCAPVVLAAREAEEHREGHERAPGGAADCGDQSNSELQSDGGQAPGGGPAALPE

SEQ ID NO: 26777 - protein, 633 aa, Artificial Sequence
  Synthetic polypeptide
LLGRLRNIVKGMRELREVLRTVETKATQNFKVMAAKHLAGVLLHSLSEECYWSPLSHPLPEFMGKEESSFATQALRKPHLYEGDNLYCPKDNIEEALLLLLISESMATRDVVLSRVPEQEEDRTVSLQNAAAIYDLLSITLGRRGQYVMLSECLERAMKFAFGEFHLWYQVALSMVACGKSAYAVSLLRECVKLRPSDPTVPLMAAKVCIGSLRWLEEAEHFAMMVISLGEEAGEFLPKGYLALGLTYSLQATDATLKSKQDELHRKALQTLERAQQLAPSDPQVILYVSLQLALVRQISSAMEQLQEALKVRKDDAHALHLLALLFSAQKHHQHALDVVNMAITEHPENFNLMFTKVKLEQVLKGPEEALVTCRQVLRLWQTLYSFSQLGDFRSPEGFQTPQRNICNSEIYRGGGLEKDGSFGEGLTMKKQSGMHLTLPDAHDADSGSRRASSIAASRLEEAMSELTMPSSVLKQGPMQLWTTLEQIWLQAAELFMEQQHLKEAGFCIQEAAGLFPTSHSVLYMRGRLAEVKGNLEEAKQLYKEALTVNPDGVRIMHSLGLMLSRLGHKSLAQKVLRDAVERQSTCHEAWQGLGEVLQAQGQNEAAVDCFLTALELEASSPVLPFSIIPREL

SEQ ID NO: 26778 - protein, 81 aa, Artificial Sequence
  Synthetic polypeptide
LLGRLRNIVKGMRELREVLRTVETKATQNFKVPLLPQGQHRGSPPAPPHQRIHGNSRCGAEPGAGAGGGPDSELAECRSHL

SEQ ID NO: 26779 - protein, 82 aa, Artificial Sequence
  Synthetic polypeptide
DRLYKKKLFLISWTSWCAPVVLAAREAEEHREGHERAPGGAADCGDQSNSELQSASTAPRTTSRKPSCSSSSANPWQLEMWC

SEQ ID NO: 26780 - protein, 14 aa, Artificial Sequence
  Synthetic polypeptide
DPISTKIQRSFFTI

SEQ ID NO: 26781 - protein, 151 aa, Artificial Sequence
  Synthetic polypeptide
DQPGQHSETPSLQKFKEAFSLFDKDGDGTITTKELGTVMRSLGQNPTEAELQDMINEVDADGNGTIDFPEFLTMMARKMKDTDSEEEIREAFRVFDKDGNGYISAAELRHVMTNLGEKLTDEEVDEMIREADIDGDGQVNYEEFVQMMTAK

SEQ ID NO: 26782 - protein, 34 aa, Artificial Sequence
  Synthetic polypeptide
AQEFETSLGNIVRPHLYKNSKKLFHYLTKMVMEL

SEQ ID NO: 26783 - protein, 67 aa, Artificial Sequence
  Synthetic polypeptide
DQPGQHSETPSLQKFKEAFSLFDKDGDGTITTKELGTVMRSLGQNPTEAELQDMINEVDADGWQWLY

SEQ ID NO: 26784 - protein, 144 aa, Artificial Sequence
  Synthetic polypeptide
DQPGQHKFKEAFSLFDKDGDGTITTKELGTVMRSLGQNPTEAELQDMINEVDADGNGTIDFPEFLTMMARKMKDTDSEEEIREAFRVFDKDGNGYISAAELRHVMTNLGEKLTDEEVDEMIREADIDGDGQVNYEEFVQMMTAK

SEQ ID NO: 26785 - protein, 27 aa, Artificial Sequence
  Synthetic polypeptide
AQEFETSLGNINSKKLFHYLTKMVMEL

SEQ ID NO: 26786 - protein, 60 aa, Artificial Sequence
  Synthetic polypeptide
DQPGQHKFKEAFSLFDKDGDGTITTKELGTVMRSLGQNPTEAELQDMINEVDADGWQWLY

SEQ ID NO: 26787 - protein, 33 aa, Artificial Sequence
  Synthetic polypeptide
CTPVVPATREAEAWTLANRLNWIPVHSLDITFV

SEQ ID NO: 26788 - protein, 36 aa, Artificial Sequence
  Synthetic polypeptide
TTFLPKIKRKKLAGCGDAHLWSQLLGRLRLGPWQTD

SEQ ID NO: 26789 - protein, 17 aa, Artificial Sequence
  Synthetic polypeptide
AQLSKEILISQGNALTL

SEQ ID NO: 26790 - protein, 81 aa, Artificial Sequence
  Synthetic polypeptide
YHKEMPSLCDFSPGDLVWAKMEGYPWWPCLVYNHPFDGTFIREKGKSVRVHVQFFDDSPTRGWVSKRLLKPYTGRHNLRNR

SEQ ID NO: 26791 - protein, 84 aa, Artificial Sequence
  Synthetic polypeptide
CNILEPLSSVVQRDFNITRKCPHFVTSHQEIWFGPRWRVTPGGLVWFTTTPLMEHSSARKGNQSVFMYSFLMTAQQGAGLAKGF

SEQ ID NO: 26792 - protein, 1281 aa, Artificial Sequence
  Synthetic polypeptide
YHKEMPSLCDFSPGDLVWAKMEGYPWWPCLVYNHPFDGTFIREKGKSVRVHVQFFDDSPTRGWVSKRLLKPYTGSKSKEAQKGGHFYSAKPEILRAMQRADEALNKDKIKRLELAVCDEPSEPEEEEEMEVGTTYVTDKSEEDNEIESEEEVQPKTQGSRRSSRQIKKRRVISDSESDIGGSDVEFKPDTKEEGSSDEISSGVGDSESEGLNSPVKVARKRKRMVTGNGSLKRKSSRKETPSATKQATSISSETKNTLRAFSAPQNSESQAHVSGGGDDSSRPTVWYHETLEWLKEEKRRDEHRRRPDHPDFDASTLYVPEDFLNSCTPGMRKWWQIKSQNFDLVICYKVGKFYELYHMDALIGVSELGLVFMKGNWAHSGFPEIAFGRYSDSLVQKGYKVARVEQTETPEMMEARCRKMAHISKYDRVVRREICRIITKGTQTYSVLEGDPSENYSKYLLSLKEKEEDSSGHTRAYGVCFVDTSLGKFFIGQFSDDRHCSRFRTLVAHYPPVQVLFEKGNLSKETKTILKSSLSCSLQEGLIPGSQFWDASKTLRTLLEEEYFREKLSDGIGVMLPQVLKGMTSESDSIGLTPGEKSELALSALGGCVFYLKKCLIDQELLSMANFEEYIPLDSDTVSTTRSGAIFTKAYQRMVLDAVTLNNLEIFLNGTNGSTEGTLLERVDTCHTPFGKRLLKQWLCAPLCNHYAINDRLDAIEDLMVVPDKISEVVELLKKLPDLERLLSKIHNVGSPLKSQNHPDSRAIMYEETTYSKKKIIDFLSALEGFKVMCKIIGIMEEVADGFKSKILKQVISLQTKNPEGRFPDLTVELNRWDTAFDHEKARKTGLITPKAGFDSDYDQALADIRENEQSLLEYLEKQRNRIGCRTIVYWGIGRNRYQLEIPENFTTRNLPEEYELKSTKKGCKRYWTKTIEKKLANLINAEERRDVSLKDCMRRLFYNFDKNYKDWQSAVECIAVLDVLLCLANYSRGGDGPMCRPVILLPEDTPPFLELKGSRHPCITKTFFGDDFIPNDILIGCEEEEQENGKAYCVLVTGPNMGGKSTLMRQAGLLAVMAQMGCYVPAEVCRLTPIDRVFTRLGASDRIMSGESTFFVELSETASILMHATAHSLVLVDELGRGTATFDGTAIANAVVKELAETIKCRTLFSTHYHSLVEDYSQNVAVRLGHMACMVENECEDPSQETITFLYKFIKGACPKSYGFNAARLANLPEEVIQKGHRKAREFEKMNQSLRLFREVCLASERSTVDAEAVHKLLTLIKEL

SEQ ID NO: 26793 - protein, 83 aa, Artificial Sequence
  Synthetic polypeptide
HRNSFDLQPSCDFSPGDLVWAKMEGYPWWPCLVYNHPFDGTFIREKGKSVRVHVQFFDDSPTRGWVSKRLLKPYTGRHNLRNR

SEQ ID NO: 26794 - protein, 82 aa, Artificial Sequence
  Synthetic polypeptide
NIPLLPGASYFDTETALIYNPVVTSHQEIWFGPRWRVTPGGLVWFTTTPLMEHSSARKGNQSVFMYSFLMTAQQGAGLAKGF

SEQ ID NO: 26795 - protein, 5 aa, Artificial Sequence
  Synthetic polypeptide
FTTQL

SEQ ID NO: 26796 - protein, 1283 aa, Artificial Sequence
  Synthetic polypeptide
HRNSFDLQPSCDFSPGDLVWAKMEGYPWWPCLVYNHPFDGTFIREKGKSVRVHVQFFDDSPTRGWVSKRLLKPYTGSKSKEAQKGGHFYSAKPEILRAMQRADEALNKDKIKRLELAVCDEPSEPEEEEEMEVGTTYVTDKSEEDNEIESEEEVQPKTQGSRRSSRQIKKRRVISDSESDIGGSDVEFKPDTKEEGSSDEISSGVGDSESEGLNSPVKVARKRKRMVTGNGSLKRKSSRKETPSATKQATSISSETKNTLRAFSAPQNSESQAHVSGGGDDSSRPTVWYHETLEWLKEEKRRDEHRRRPDHPDFDASTLYVPEDFLNSCTPGMRKWWQIKSQNFDLVICYKVGKFYELYHMDALIGVSELGLVFMKGNWAHSGFPEIAFGRYSDSLVQKGYKVARVEQTETPEMMEARCRKMAHISKYDRVVRREICRIITKGTQTYSVLEGDPSENYSKYLLSLKEKEEDSSGHTRAYGVCFVDTSLGKFFIGQFSDDRHCSRFRTLVAHYPPVQVLFEKGNLSKETKTILKSSLSCSLQEGLIPGSQFWDASKTLRTLLEEEYFREKLSDGIGVMLPQVLKGMTSESDSIGLTPGEKSELALSALGGCVFYLKKCLIDQELLSMANFEEYIPLDSDTVSTTRSGAIFTKAYQRMVLDAVTLNNLEIFLNGTNGSTEGTLLERVDTCHTPFGKRLLKQWLCAPLCNHYAINDRLDAIEDLMVVPDKISEVVELLKKLPDLERLLSKIHNVGSPLKSQNHPDSRAIMYEETTYSKKKIIDFLSALEGFKVMCKIIGIMEEVADGFKSKILKQVISLQTKNPEGRFPDLTVELNRWDTAFDHEKARKTGLITPKAGFDSDYDQALADIRENEQSLLEYLEKQRNRIGCRTIVYWGIGRNRYQLEIPENFTTRNLPEEYELKSTKKGCKRYWTKTIEKKLANLINAEERRDVSLKDCMRRLFYNFDKNYKDWQSAVECIAVLDVLLCLANYSRGGDGPMCRPVILLPEDTPPFLELKGSRHPCITKTFFGDDFIPNDILIGCEEEEQENGKAYCVLVTGPNMGGKSTLMRQAGLLAVMAQMGCYVPAEVCRLTPIDRVFTRLGASDRIMSGESTFFVELSETASILMHATAHSLVLVDELGRGTATFDGTAIANAVVKELAETIKCRTLFSTHYHSLVEDYSQNVAVRLGHMACMVENECEDPSQETITFLYKFIKGACPKSYGFNAARLANLPEEVIQKGHRKAREFEKMNQSLRLFREVCLASERSTVDAEAVHKLLTLIKEL

SEQ ID NO: 26797 - protein, 106 aa, Artificial Sequence
  Synthetic polypeptide
IYPKLHPLPPFCSLVRHPHGSSAVEAPPLQPAKQTLTLADYRLVPVVTSHQEIWFGPRWRVTPGGLVWFTTTPLMEHSSARKGNQSVFMYSFLMTAQQGAGLAKGF

SEQ ID NO: 26798 - protein, 10 aa, Artificial Sequence
  Synthetic polypeptide
LWQTTGLSLL

SEQ ID NO: 26799 - protein, 106 aa, Artificial Sequence
  Synthetic polypeptide
FGETPPWFVCCGGSPVATSKTNPDFGRLQACPCCDFSPGDLVWAKMEGYPWWPCLVYNHPFDGTFIREKGKSVRVHVQFFDDSPTRGWVSKRLLKPYTGRHNLRNR

SEQ ID NO: 26800 - protein, 1306 aa, Artificial Sequence
  Synthetic polypeptide
FGETPPWFVCCGGSPVATSKTNPDFGRLQACPCCDFSPGDLVWAKMEGYPWWPCLVYNHPFDGTFIREKGKSVRVHVQFFDDSPTRGWVSKRLLKPYTGSKSKEAQKGGHFYSAKPEILRAMQRADEALNKDKIKRLELAVCDEPSEPEEEEEMEVGTTYVTDKSEEDNEIESEEEVQPKTQGSRRSSRQIKKRRVISDSESDIGGSDVEFKPDTKEEGSSDEISSGVGDSESEGLNSPVKVARKRKRMVTGNGSLKRKSSRKETPSATKQATSISSETKNTLRAFSAPQNSESQAHVSGGGDDSSRPTVWYHETLEWLKEEKRRDEHRRRPDHPDFDASTLYVPEDFLNSCTPGMRKWWQIKSQNFDLVICYKVGKFYELYHMDALIGVSELGLVFMKGNWAHSGFPEIAFGRYSDSLVQKGYKVARVEQTETPEMMEARCRKMAHISKYDRVVRREICRIITKGTQTYSVLEGDPSENYSKYLLSLKEKEEDSSGHTRAYGVCFVDTSLGKFFIGQFSDDRHCSRFRTLVAHYPPVQVLFEKGNLSKETKTILKSSLSCSLQEGLIPGSQFWDASKTLRTLLEEEYFREKLSDGIGVMLPQVLKGMTSESDSIGLTPGEKSELALSALGGCVFYLKKCLIDQELLSMANFEEYIPLDSDTVSTTRSGAIFTKAYQRMVLDAVTLNNLEIFLNGTNGSTEGTLLERVDTCHTPFGKRLLKQWLCAPLCNHYAINDRLDAIEDLMVVPDKISEVVELLKKLPDLERLLSKIHNVGSPLKSQNHPDSRAIMYEETTYSKKKIIDFLSALEGFKVMCKIIGIMEEVADGFKSKILKQVISLQTKNPEGRFPDLTVELNRWDTAFDHEKARKTGLITPKAGFDSDYDQALADIRENEQSLLEYLEKQRNRIGCRTIVYWGIGRNRYQLEIPENFTTRNLPEEYELKSTKKGCKRYWTKTIEKKLANLINAEERRDVSLKDCMRRLFYNFDKNYKDWQSAVECIAVLDVLLCLANYSRGGDGPMCRPVILLPEDTPPFLELKGSRHPCITKTFFGDDFIPNDILIGCEEEEQENGKAYCVLVTGPNMGGKSTLMRQAGLLAVMAQMGCYVPAEVCRLTPIDRVFTRLGASDRIMSGESTFFVELSETASILMHATAHSLVLVDELGRGTATFDGTAIANAVVKELAETIKCRTLFSTHYHSLVEDYSQNVAVRLGHMACMVENECEDPSQETITFLYKFIKGACPKSYGFNAARLANLPEEVIQKGHRKAREFEKMNQSLRLFREVCLASERSTVDAEAVHKLLTLIKEL

SEQ ID NO: 26801 - protein, 102 aa, Artificial Sequence
  Synthetic polypeptide
EAKAGESFEVRSLRRAWPTWQNPDSTKKSCDFSPGDLVWAKMEGYPWWPCLVYNHPFDGTFIREKGKSVRVHVQFFDDSPTRGWVSKRLLKPYTGRHNLRNR

SEQ ID NO: 26802 - protein, 76 aa, Artificial Sequence
  Synthetic polypeptide
DEPGQHGKTLTLQKKVVTSHQEIWFGPRWRVTPGGLVWFTTTPLMEHSSARKGNQSVFMYSFLMTAQQGAGLAKGF

SEQ ID NO: 26803 - protein, 6 aa, Artificial Sequence
  Synthetic polypeptide
LYKKKL

SEQ ID NO: 26804 - protein, 1302 aa, Artificial Sequence
  Synthetic polypeptide
EAKAGESFEVRSLRRAWPTWQNPDSTKKSCDFSPGDLVWAKMEGYPWWPCLVYNHPFDGTFIREKGKSVRVHVQFFDDSPTRGWVSKRLLKPYTGSKSKEAQKGGHFYSAKPEILRAMQRADEALNKDKIKRLELAVCDEPSEPEEEEEMEVGTTYVTDKSEEDNEIESEEEVQPKTQGSRRSSRQIKKRRVISDSESDIGGSDVEFKPDTKEEGSSDEISSGVGDSESEGLNSPVKVARKRKRMVTGNGSLKRKSSRKETPSATKQATSISSETKNTLRAFSAPQNSESQAHVSGGGDDSSRPTVWYHETLEWLKEEKRRDEHRRRPDHPDFDASTLYVPEDFLNSCTPGMRKWWQIKSQNFDLVICYKVGKFYELYHMDALIGVSELGLVFMKGNWAHSGFPEIAFGRYSDSLVQKGYKVARVEQTETPEMMEARCRKMAHISKYDRVVRREICRIITKGTQTYSVLEGDPSENYSKYLLSLKEKEEDSSGHTRAYGVCFVDTSLGKFFIGQFSDDRHCSRFRTLVAHYPPVQVLFEKGNLSKETKTILKSSLSCSLQEGLIPGSQFWDASKTLRTLLEEEYFREKLSDGIGVMLPQVLKGMTSESDSIGLTPGEKSELALSALGGCVFYLKKCLIDQELLSMANFEEYIPLDSDTVSTTRSGAIFTKAYQRMVLDAVTLNNLEIFLNGTNGSTEGTLLERVDTCHTPFGKRLLKQWLCAPLCNHYAINDRLDAIEDLMVVPDKISEVVELLKKLPDLERLLSKIHNVGSPLKSQNHPDSRAIMYEETTYSKKKIIDFLSALEGFKVMCKIIGIMEEVADGFKSKILKQVISLQTKNPEGRFPDLTVELNRWDTAFDHEKARKTGLITPKAGFDSDYDQALADIRENEQSLLEYLEKQRNRIGCRTIVYWGIGRNRYQLEIPENFTTRNLPEEYELKSTKKGCKRYWTKTIEKKLANLINAEERRDVSLKDCMRRLFYNFDKNYKDWQSAVECIAVLDVLLCLANYSRGGDGPMCRPVILLPEDTPPFLELKGSRHPCITKTFFGDDFIPNDILIGCEEEEQENGKAYCVLVTGPNMGGKSTLMRQAGLLAVMAQMGCYVPAEVCRLTPIDRVFTRLGASDRIMSGESTFFVELSETASILMHATAHSLVLVDELGRGTATFDGTAIANAVVKELAETIKCRTLFSTHYHSLVEDYSQNVAVRLGHMACMVENECEDPSQETITFLYKFIKGACPKSYGFNAARLANLPEEVIQKGHRKAREFEKMNQSLRLFREVCLASERSTVDAEAVHKLLTLIKEL

SEQ ID NO: 26805 - protein, 36 aa, Artificial Sequence
  Synthetic polypeptide
CQGSLNPEVWHLGMRTTLTQRRLEGLRSQDWKQPQN

SEQ ID NO: 26806 - protein, 269 aa, Artificial Sequence
  Synthetic polypeptide
PRGDWKASEARTGSNPKIRRNKIWGGQNGGILVYNSGLGCIEDNEIFDNAMAGVWIKTDSNPTLRRNKIHDGRDGGICIFNGGRGLLEENDIFRNAQAGVLISTNSHPILRKNRIFDGFAAGIEITNHATATLEGNQIFNNRFGGLFLASGVNVTMKDNKIMNNQDAIEKAVSRGQCLYKISSYTSYPMHDFYRCHTCNTTDRNAICVNCIKKCHQGHDVEFIRHDRFFCDCGAGTLSNPCTLAGEPTHDTDTLYDSAPPIESNTLQHN

SEQ ID NO: 26807 - protein, 49 aa, Artificial Sequence
  Synthetic polypeptide
SGLIKPRSMAPWHADYSDPEETGRPQKPGLEATPKLDATKSGEDRMVEF

SEQ ID NO: 26808 - protein, 112 aa, Artificial Sequence
  Synthetic polypeptide
PRGDWKASEARTGSNPKIRRNKIWGGQNGGILVYNSGLGCIEDNEIFDNAMAGVWIKTDSNPTLRRNKIHDGRDGGICIFNGGRGIVVNFALVKNPVFHYSSISLMINDIAN

SEQ ID NO: 26809 - protein, 91 aa, Artificial Sequence
  Synthetic polypeptide
LGLVMMMCLQIWLQKNQVLVHKIVHTNFVEKLFCRKEQRVPQRTVWRAPQLQLQKTLVIVQNVQECLENHKIYQQHLLNSIFRRNCQMKWF

SEQ ID NO: 26810 - protein, 898 aa, Artificial Sequence
  Synthetic polypeptide
PGTVAHACNLSTVGGRGRWITRSEVRDQPGQRGEAPSVLKIQRLAGLGDDDVPADMVAEESGPGAQNSPYQLRRKTLLPKRTACPTKNSMEGASTSTTENFGHRAKRARVSGKSQDLSAAPAEQYLQEKLPDEVVLKIFSYLLEQDLCRAACVCKRFSELANDPILWKRLYMEVFEYTRPMMHPEPGKFYQINPEEYEHPNPWKESFQQLYKGAHVKPGFAEHFYSNPARYKGRENMLYYDTIEDALGGVQEAHFDGLIFVHSGIYTDEWIYIESPITMIGAAPGKVADKVIIENTRDSTFVFMEGSEDAYVGYMTIRFNPDDKSAQHHNAHHCLEITVNCSPIIDHCIIRSTCTVGSAVCVSGQGACPTIKHCNISDCENVGLYITDHAQGIYEDNEISNNALAGIWVKNHGNPIIRRNHIHHGRDVGVFTFDHGMGYFESCNIHRNRIAGFEVKAYANPTVVRCEIHHGQTGGIYVHEKGRGQFIENKIYANNFAGVWITSNSDPTIRGNSIFNGNQGGVYIFGDGRGLIEGNDIYGNALAGIQIRTNSCPIVRHNKIHDGQHGGIYVHEKGQGVIEENEVYSNTLAGVWVTTGSTPVLRRNRIHSGKQVGVYFYDNGHGVLEDNDIYNHMYSGVQIRTGSNPKIRRNKIWGGQNGGILVYNSGLGCIEDNEIFDNAMAGVWIKTDSNPTLRRNKIHDGRDGGICIFNGGRGLLEENDIFRNAQAGVLISTNSHPILRKNRIFDGFAAGIEITNHATATLEGNQIFNNRFGGLFLASGVNVTMKDNKIMNNQDAIEKAVSRGQCLYKISSYTSYPMHDFYRCHTCNTTDRNAICVNCIKKCHQGHDVEFIRHDRFFCDCGAGTLSNPCTLAGEPTHDTDTLYDSAPPIESNTLQHN

SEQ ID NO: 26811 - protein, 26 aa, Artificial Sequence
  Synthetic polypeptide
GWAQWLTPIIPALWEAENLILMLLLQ

SEQ ID NO: 26812 - protein, 9 aa, Artificial Sequence
  Synthetic polypeptide
SQHFGRPRI

SEQ ID NO: 26813 - protein, 28 aa, Artificial Sequence
  Synthetic polypeptide
MGTVAHAYNPSTLGGRESDIDAAAAMML

SEQ ID NO: 26814 - protein, 213 aa, Artificial Sequence
  Synthetic polypeptide
MGTVAHAYNPSTLGGRESDIDAAAAMMLLNTSIEQGILECEKPLPLKTALQKKRSYGNAFHHPSAVRLQESDSLATSIDPKEDHNYSASSMAAQRCASRSSVSSLSSVDEVYEFIPKNSHVGSDGSEGFHSEEDTDVDYEDDPLGDSGYASQPCAKISEKGQSGKKMRKQTCQEIDEELKEAAGSLLHLAGIRTCLGSLISTAKTQNQKQRKK

SEQ ID NO: 26815 - protein, 50 aa, Artificial Sequence
  Synthetic polypeptide
DVTCSSLLSTMIVRPPQPHGTEVCPHQASSHPKRCIFRIWGPGENRDLSE

SEQ ID NO: 26816 - protein, 590 aa, Artificial Sequence
  Synthetic polypeptide
GLLSHMELRFVLTKLRVIQKGAFSGFGDLEKIEISQNDVLEVIEADVFSNLPKLHEIRIEKANNLLYINPEAFQNLPNLQYLLISNTGIKHLPDVHKIHSLQKVLLDIQDNINIHTIERNSFVGLSFESVILWLNKNGIQEIHNCAFNGTQLDELNLSDNNNLEELPNDVFHGASGPVILSELHPICNKSILRQEVDYMTQARGQRSSLAEDNESSYSRGFDMTYTEFDYDLCNEVVDVTCSPKPDAFNPCEDIMGYNILRVLIWFISILAITGNIIVLVILTTSQYKLTVPRFLMCNLAFADLCIGIYLLLIASVDIHTKSQYHNYAIDWQTGAGCDAAGFFTVFASELSVYTLTAITLERWHTITHAMQLDCKVQLRHAASVMVMGWIFAFAAALFPIFGISSYMKVSICLPMDIDSPLSQLYVMSLLVLNVLAFVVICGCYIHIYLTVRNPNIVSSSSDTRIAKRMAMLIFTDFLCMAPISFFAISASLKVPLITVSKAKILLVLFHPINSCANPFLYAIFTKNFRRDFFILLSKCGCYEMQAQIYRTETSSTVHNTHPRNGHCSSAPRVTSGSTYILVPLSHLAQN

SEQ ID NO: 26817 - protein, 652 aa, Artificial Sequence
  Synthetic polypeptide
GLLSHMELRFVLTKLRVIQKGAFSGFGDLEKIEISQNDVLEVIEADVFSNLPKLHEIRIEKANNLLYINPEAFQNLPNLQYLLISNTGIKHLPDVHKIHSLQKVLLDIQDNINIHTIERNSFVGLSFESVILWLNKNGIQEIHNCAFNGTQLDELNLSDNNNLEELPNDVFHGASGPVILDISRTRIHSLPSYGLENLKKLRARSTYNLKKLPTLEKLVALMEASLTYPSHCCAFANWRRQISELHPICNKSILRQEVDYMTQARGQRSSLAEDNESSYSRGFDMTYTEFDYDLCNEVVDVTCSPKPDAFNPCEDIMGYNILRVLIWFISILAITGNIIVLVILTTSQYKLTVPRFLMCNLAFADLCIGIYLLLIASVDIHTKSQYHNYAIDWQTGAGCDAAGFFTVFASELSVYTLTAITLERWHTITHAMQLDCKVQLRHAASVMVMGWIFAFAAALFPIFGISSYMKVSICLPMDIDSPLSQLYVMSLLVLNVLAFVVICGCYIHIYLTVRNPNIVSSSSDTRIAKRMAMLIFTDFLCMAPISFFAISASLKVPLITVSKAKILLVLFHPINSCANPFLYAIFTKNFRRDFFILLSKCGCYEMQAQIYRTETSSTVHNTHPRNGHCSSAPRVTSGSTYILVPLSHLAQN

SEQ ID NO: 26818 - protein, 626 aa, Artificial Sequence
  Synthetic polypeptide
GLLSHMELRFVLTKLRVIQKGAFSGFGDLEKIEISQNDVLEVIEADVFSNLPKLHEIRIEKANNLLYINPEAFQNLPNLQYLLISNTGIKHLPDVHKIHSLQKVLLWLNKNGIQEIHNCAFNGTQLDELNLSDNNNLEELPNDVFHGASGPVILDISRTRIHSLPSYGLENLKKLRARSTYNLKKLPTLEKLVALMEASLTYPSHCCAFANWRRQISELHPICNKSILRQEVDYMTQARGQRSSLAEDNESSYSRGFDMTYTEFDYDLCNEVVDVTCSPKPDAFNPCEDIMGYNILRVLIWFISILAITGNIIVLVILTTSQYKLTVPRFLMCNLAFADLCIGIYLLLIASVDIHTKSQYHNYAIDWQTGAGCDAAGFFTVFASELSVYTLTAITLERWHTITHAMQLDCKVQLRHAASVMVMGWIFAFAAALFPIFGISSYMKVSICLPMDIDSPLSQLYVMSLLVLNVLAFVVICGCYIHIYLTVRNPNIVSSSSDTRIAKRMAMLIFTDFLCMAPISFFAISASLKVPLITVSKAKILLVLFHPINSCANPFLYAIFTKNFRRDFFILLSKCGCYEMQAQIYRTETSSTVHNTHPRNGHCSSAPRVTSGSTYILVPLSHLAQN

SEQ ID NO: 26819 - protein, 235 aa, Artificial Sequence
  Synthetic polypeptide
GLLSHMELRFVLTKLRVIQKGAFSGFGDLEKIEISQNDVLEVIEADVFSNLPKLHEIRIEKANNLLYINPEAFQNLPNLQYLLISNTGIKHLPDVHKIHSLQKVLLDIQDNINIHTIERNSFVGLSFESVILWLNKNGIQEIHNCAFNGTQLDELNLSDNNNLEELPNDVFHGASGPVILSELHPICNKSILRQEVDYMTQARGQRSSLAEDNESSYSRGFDMTYTEFDYDLCNE

SEQ ID NO: 26820 - protein, 109 aa, Artificial Sequence
  Synthetic polypeptide
GLLSHMELRFVLTKLRVIQKGAFSGFGDLEKIEISQNDVLEVIEADVFSNLPKLHEIRIEKANNLLYINPEAFQNLPNLQYLSFSSFVLENAKVENGDHRAFSDRTNAL

SEQ ID NO: 26821 - protein, 26 aa, Artificial Sequence
  Synthetic polypeptide
EGCVCFPFHDDCKFPEASVALRNYHR

SEQ ID NO: 26822 - protein, 135 aa, Artificial Sequence
  Synthetic polypeptide
PCGTTTDDILVASAECPSDDEDIDPCEPSSGGLANPTRAGGREPYPGSAEVIRESSSTTGMVVGIVAAAALCILILLYAMYKYRNRDEGSYHVDESRNYISNSAQSNGAVVKEKQPSSAKSSNKNKKNKDKEYYV

SEQ ID NO: 26823 - protein, 36 aa, Artificial Sequence
  Synthetic polypeptide
GLRSPAELPQMTSLWPQQSVPAMMRTLTPVSRAQVG

SEQ ID NO: 26824 - protein, 179 aa, Artificial Sequence
  Synthetic polypeptide
GRAQRLTPVIPALWEAKAGGLLEPTSWRSAWATKKKVREMAATTLSGLLQCNFLTMDSPMQIHFEQLCKTKLPKKRKRDPGSVGDTIPSAELVKRHAGVLGLGACVLSSPYDVPTWMPQLLMNLSAHLNDPQPIEMTVKKTLSNFRRTHHDNWQEHKQQFTDDQLLVLTDLLVSPCYYA

SEQ ID NO: 26825 - protein, 35 aa, Artificial Sequence
  Synthetic polypeptide
SQHFGRPRQEDCLSPRVGDQPGQQKKKFEKWLLLP

SEQ ID NO: 26826 - protein, 28 aa, Artificial Sequence
  Synthetic polypeptide
AHELEISLGNKKKSSRNGCYYLKRSATV

SEQ ID NO: 26827 - protein, 27 aa, Artificial Sequence
  Synthetic polypeptide
LEPRSLRPAWATWRDPVQENKSKRWTK

SEQ ID NO: 26828 - protein, 1541 aa, Artificial Sequence
  Synthetic polypeptide
DQPGPHGETLYKKTKVKGGPSKLVQKHLAGLFNSITSFYHPSNNGRWLNKLMKLLQRLPNSVVRRLHRERYKKPSWLTPVPDSHKLTDQDVTDFVQCIIQPVLLAMFSKTGSLEAAQALQNLALMRPELVIPPVLERTYPALETLTEPHQLTATLSCVIGVARSLVSGGRWFPEGPTHMLPLLMRALPGVDPNDFSKCMITFQFIATFSTLVPLVDCSSVLQERNDLTEVERELCSATAEFEDFVLQFMDRCFGLIESSTLEQTREETETEKMTHLESLVELGLSSTFSTILTQCSKEIFMVALQKVFNFSTSHIFETRVAGRMVADMCRAAVKCCPEESLKLFVPHCCSVITQLTMNDDVLNDEELDKELLWNLQLLSEITRVDGRKLLLYREQLVKILQRTLHLTCKQGYTLSCNLLHHLLRSTTLIYPTEYCSVPGGFDKPPSEYFPIKDWGKPGDLWNLGIQWHVPSSEEVSFAFYLLDSFLQPELVKLQHCGDGKLEMSRDDILQSLTIVHNCLIGSGNLLPPLKGEPVTNLVPSMVSLEETKLYTGLEYDLSRENHREVIATVIRKLLNHILDNSEDDTKSLFLIIKIIGDLLQFQGSHKHEFDSRWKSFNLVKKSMENRLHGKKQHIRALLIDRVMLQHELRTLTVEGCEYKKIHQDMIRDLLRLSTSSYSQVRNKAQQTFFAALGAYNFCCRDIIPLVLEFLRPDRQGVTQQQFKGALYCLLGNHSGVCLANLHDWDCIVQTWPAIVSSGLSQAMSLEKPSIVRLFDDLAEKIHRQYETIGLDFTIPKSCVEIAELLQQSKNPSINQILLSPEKIKEGIKRQQEKNADALRNYENLVDTLLDGVEQRNLPWKFEHIGIGLLSLLLRDDRVLPLRAIRFFVENLNHDAIVVRKMAISAVAGILKQLKRTHKKLTINPCEISGCPKPTQIIAGDRPDNHWLHYDSKTIPRTKKEWESSCFVEKTHWGYYTWPKNMVVYAGVEEQPKLGRSREDMTEAEQIIFDHFSDPKFVEQLITFLSLEDRKGKDKFNPRRFCLFKGIFRNFDDAFLPVLKPHLEHLVADSHESTQRCVAEIIAGLIRGSKHWTFEKVEKLWELLCPLLRTALSNITVETYNDWGACIATSCESRDPRKLHWLFELLLESPLSGEGGSFVDACRLYVLQGGLAQQEWRVPELLHRLLKYLEPKLTQVYKNVRERIGSVLTYIFMIDVSLPNTTPTISPHVPEFTARILEKLKPLMDVDEEIQNHVMEENGIGEEDERTQGIKLLKTILKWLMASAGRSFSTAVTEQLQLLPLFFKIAPVENDNSYDELKRDAKLCLSLMSQGLLYPHQVPLVLQVLKQTARSSSWHARYTVLTYLQTMVFYNLFIFLNNEDAVKDIRWLVISLLEDEQLEVREMAATTLSGLLQCNFLTMDSPMQIHFEQLCKTKLPKKRKRDPGSVGDTIPSAELVKRHAGVLGLGACVLSSPYDVPTWMPQLLMNLSAHLNDPQPIEMTVKKTLSNFRRTHHDNWQEHKQQFTDDQLLVLTDLLVSPCYYA

SEQ ID NO: 26829 - protein, 269 aa, Artificial Sequence
  Synthetic polypeptide
DQPGPHGETLYKKTKVKGGPSKLVQKHLAGLFNSITSFYHPSNNGRWLNKLMKLLQRLPNSVVRRLHRERYKKPSWLTPVPDSHKLTDQDVTDFVQCIIQPVLLAMFSKTGSLEAAQALQNLALMRPELVIPPVLERTYPALETLTEPHQLTATLSCVIGVARSLVSGGRWFPEGPTHMLPLLMRALPGVDPNDFSKCMITFQFIATFSTLVPLVDCSSVLQERNDLTEVERELCSATAEFEDFVLQFMDRWPFRRFLIFLLHIYLKQE

SEQ ID NO: 26830 - protein, 157 aa, Artificial Sequence
  Synthetic polypeptide
TQQKCVYKVSLFYLGCSRTPNVKLSSCLGLPCCWDYSYKFIQLSEFGFGQVIIVSEEPWKENISCSSTTFIKSTICLSVCFRMYTEDEARKIGVVGWVKNTSKGTVTGQVQGPEDKVNSMKSWLSKVGSPSSRIDRTNFSNEKTISKLEYSNFSIRY

SEQ ID NO: 26831 - protein, 13 aa, Artificial Sequence
  Synthetic polypeptide
PNRNVYTRSRCST

SEQ ID NO: 26832 - protein, 16 aa, Artificial Sequence
  Synthetic polypeptide
PTEMCIQGLAVLPRLF

SEQ ID NO: 26833 - protein, 101 aa, Artificial Sequence
  Synthetic polypeptide
TQQKCVYKVSLFYLGCSRTPNVKLSSCLGLPCCWDYSYKFIQLSEFGFGQVIIVSEEPWKENISCSSTTFIKSTICLNPDSEFRPCFNAWLSLIRENAVGL

SEQ ID NO: 26834 - protein, 20 aa, Artificial Sequence
  Synthetic polypeptide
VQLLCEGFFHPKDTRSRCST

SEQ ID NO: 26835 - protein, 42 aa, Artificial Sequence
  Synthetic polypeptide
DALIFGLVDTSSFSKIHIKFSFSVKASFTLRIQGLAVLPRLF

SEQ ID NO: 26836 - protein, 65 aa, Artificial Sequence
  Synthetic polypeptide
DTFWTPDFQNSLPYTQTKLSLQLAKSGRSHIYAYGIPIMSRLCLFLKMSIHMELPAWLLTQMDSV

SEQ ID NO: 26837 - protein, 42 aa, Artificial Sequence
  Synthetic polypeptide
FSFIETHFGHLTFRTPCLTPRQNSRCNWPSREGAIYMHMGFL

SEQ ID NO: 26838 - protein, 1896 aa, Artificial Sequence
  Synthetic polypeptide
LSELLALHPDKTLVATGQVGKEPYICIWDSYNVQTVSLLKDVHTHGVACLAFDSDGQRLASVGLDAKNTVCIWDWRKGKLLASATGHSDRIFDISWDPYQPNRVVSCGVKHIKFWTLCGNALTAKRGIFGKTGDLQTILCLACAKEDITYSGALNGDIYVWKGLNLVRTIQGAHSAGIFSMYACEEGFATGGRDGCIRLWDTDFKPITKIDLRETEQGYKGLSIRSVCWKADRLLAGTQDSEIFEVIVRERDKPMLILQGHCEGELWALALHPKKPLAVTGSDDRSVRLWSLADHALIARCNMEEAVRSVAFSPDGSQLALGMKDGSFIVLRVRDMTEVVHIKDRKEVIHEMKFSPDGSYLAVGSNDGPVDVYAVAQRYKKIGECSKSLSFITHIDWSLDSKYLQTNDGAGERLFYRMPSGKPLTSKEEIKGIPWASWTCVKGPEVSGIWPKYTEVTDINSVDANYNSSVLVSGDDFGLVKLFKFPCLKRGAKFRKYVGHSAHVTNVRWSHDFQWVLSTGGADHSVFQWRFIPEGVSNGMLETAPQEGGADSYSEESDSDLSDVPELDSDIEQEAQINYDRQVYKEDLPQLKQQSKEKNHAVPFLKREKAPEDSLKLQFIHGYRGYDCRNNLFYTQAGEVVYHIAAVAVVYNRQQHSQRLYLGHDDDILSLTIHPVKDYVATGQVGRDAAIHVWDTQTLKCLSLLKGQHQRGVCALDFSADGKCLVSVGLDDFHSIVFWDWKKGEKIATTRGHKDKIFVVKCNPHHVDKLVTVGIKHIKFWQQAGGGFTSKRGTFGSVGKLETMMCVSYGRMEDLVFSGAATGDIFIWKDILLLKTVKAHDGPVFAMYALDKGFVTGGKDGIVELWDDMFERCLKTYAIKRSALSTSSKGLLLEDNPSIRAITLGHGHILVGTKNGEILEIDKSGPMTLLVQGHMEGEVWGLAAHPLLPICATVSDDKTLRIWELSAQHRMLAVRKLKKGGRCCAFSPDGKALAVGLNDGSFLVVNADTVEDMVSFHHRKEMISDIKFSKDTGKYLAVASHDNFVDIYNVLTSKRVGICKGASSYITHIDWDSRGKLLQVNSGAREQLFFEAPRGKRHIIRPSEIEKIEWDTWTCVLGPTCEGIWPAHSDITDVNAASLTKDCSLLATGDDFGFVKLFSYPVKGQHARFKKYVGHSAHVTNVRWLHNDSVLLTVGGADTALMIWTREFVGTQESKLVDSEESDTDVEEDGGYDSDVAREKAIDYTTKIYAVSIREMEGTKPHQQLKEVSVEERPPVSRAAPQPEKLQKNNITKKKKLVEELALDHVFGYRGFDCRNNLHYLNDGADIIFHTAAAGIVQNLSTGSQSFYLEHTDDILCLTVNQHPKYRNVVATSQIGTTPSIHIWDAMTKHTLSMLRCFHSKGVNYINFSATGKLLVSVGVDPEHTITVWRWQEGAKVASRGGHLERIFVVEFRPDSDTQFVSVGVKHMKFWTLAGSALLYKKGVIGSLGAAKMQTMLSVAFGANNLTFTGAINGDVYVWKDHFLIRLVAKAHTGPVFTMYTTLRDGLIVTGGKERPTKEGGAVKLWDQEMKRCRAFQLETGQLVECVRSVCRGKGKILVGTKDGEIIEVGEKNAASNILIDGHMEGEIWGLATHPSKDLFISASNDGTARIWDLADKKLLNKVSLGHAARCAAYSPDGEMVAIGMKNGEFVILLVNSLKVWGKKRDRKSAIQDIRISPDNRFLAVGSSEHTVDFYDLTQGTNLNRIGYCKDIPSFVIQMDFSADGKYIQVSTGAYKRQVHEVPLGKQVTEAVVIEKITWASWTSVLGDEVIGIWPRNADKADVNCACVTHAGLNIVTGDDFGLVKLFDFPCTEKFAKHKRYFGHSAHVTNIRFSYDDKYVVSTGGDDCSVFVWRCL

SEQ ID NO: 26839 - protein, 69 aa, Artificial Sequence
  Synthetic polypeptide
NFPHLCGGFCCSLPVPHLADPKTQHTPQLLTMMKPDGQHQSQPCLTPRQNSRCNWPSREGAIYMHMGFL

SEQ ID NO: 26840 - protein, 1901 aa, Artificial Sequence
  Synthetic polypeptide
NLMVNIRVSLALHPDKTLVATGQVGKEPYICIWDSYNVQTVSLLKDVHTHGVACLAFDSDGQRLASVGLDAKNTVCIWDWRKGKLLASATGHSDRIFDISWDPYQPNRVVSCGVKHIKFWTLCGNALTAKRGIFGKTGDLQTILCLACAKEDITYSGALNGDIYVWKGLNLVRTIQGAHSAGIFSMYACEEGFATGGRDGCIRLWDTDFKPITKIDLRETEQGYKGLSIRSVCWKADRLLAGTQDSEIFEVIVRERDKPMLILQGHCEGELWALALHPKKPLAVTGSDDRSVRLWSLADHALIARCNMEEAVRSVAFSPDGSQLALGMKDGSFIVLRVRDMTEVVHIKDRKEVIHEMKFSPDGSYLAVGSNDGPVDVYAVAQRYKKIGECSKSLSFITHIDWSLDSKYLQTNDGAGERLFYRMPSGKPLTSKEEIKGIPWASWTCVKGPEVSGIWPKYTEVTDINSVDANYNSSVLVSGDDFGLVKLFKFPCLKRGAKFRKYVGHSAHVTNVRWSHDFQWVLSTGGADHSVFQWRFIPEGVSNGMLETAPQEGGADSYSEESDSDLSDVPELDSDIEQEAQINYDRQVYKEDLPQLKQQSKEKNHAVPFLKREKAPEDSLKLQFIHGYRGYDCRNNLFYTQAGEVVYHIAAVAVVYNRQQHSQRLYLGHDDDILSLTIHPVKDYVATGQVGRDAAIHVWDTQTLKCLSLLKGQHQRGVCALDFSADGKCLVSVGLDDFHSIVFWDWKKGEKIATTRGHKDKIFVVKCNPHHVDKLVTVGIKHIKFWQQAGGGFTSKRGTFGSVGKLETMMCVSYGRMEDLVFSGAATGDIFIWKDILLLKTVKAHDGPVFAMYALDKGFVTGGKDGIVELWDDMFERCLKTYAIKRSALSTSSKGLLLEDNPSIRAITLGHGHILVGTKNGEILEIDKSGPMTLLVQGHMEGEVWGLAAHPLLPICATVSDDKTLRIWELSAQHRMLAVRKLKKGGRCCAFSPDGKALAVGLNDGSFLVVNADTVEDMVSFHHRKEMISDIKFSKDTGKYLAVASHDNFVDIYNVLTSKRVGICKGASSYITHIDWDSRGKLLQVNSGAREQLFFEAPRGKRHIIRPSEIEKIEWDTWTCVLGPTCEGIWPAHSDITDVNAASLTKDCSLLATGDDFGFVKLFSYPVKGQHARFKKYVGHSAHVTNVRWLHNDSVLLTVGGADTALMIWTREFVGTQESKLVDSEESDTDVEEDGGYDSDVAREKAIDYTTKIYAVSIREMEGTKPHQQLKEVSVEERPPVSRAAPQPEKLQKNNITKKKKLVEELALDHVFGYRGFDCRNNLHYLNDGADIIFHTAAAGIVQNLSTGSQSFYLEHTDDILCLTVNQHPKYRNVVATSQIGTTPSIHIWDAMTKHTLSMLRCFHSKGVNYINFSATGKLLVSVGVDPEHTITVWRWQEGAKVASRGGHLERIFVVEFRPDSDTQFVSVGVKHMKFWTLAGSALLYKKGVIGSLGAAKMQTMLSVAFGANNLTFTGAINGDVYVWKDHFLIRLVAKAHTGPVFTMYTTLRDGLIVTGGKERPTKEGGAVKLWDQEMKRCRAFQLETGQLVECVRSVCRGKGKILVGTKDGEIIEVGEKNAASNILIDGHMEGEIWGLATHPSKDLFISASNDGTARIWDLADKKLLNKVSLGHAARCAAYSPDGEMVAIGMKNGEFVILLVNSLKVWGKKRDRKSAIQDIRISPDNRFLAVGSSEHTVDFYDLTQGTNLNRIGYCKDIPSFVIQMDFSADGKYIQVSTGAYKRQVHEVPLGKQVTEAVVIEKITWASWTSVLGDEVIGIWPRNADKADVNCACVTHAGLNIVTGDDFGLVKLFDFPCTEKFAKHKRYFGHSAHVTNIRFSYDDKYVVSTGGDDCSVFVWRCL

SEQ ID NO: 26841 - protein, 61 aa, Artificial Sequence
  Synthetic polypeptide
WSTSESALPYTQTKLSLQLAKSGRSHIYAYGIPIMSRLCLFLKMSIHMELPAWLLTQMDSV

SEQ ID NO: 26842 - protein, 1933 aa, Artificial Sequence
  Synthetic polypeptide
VARFSLTRSLAAHLLVEHIGSRWLPLPVGLQGGLPSSLWHLLALHPDKTLVATGQVGKEPYICIWDSYNVQTVSLLKDVHTHGVACLAFDSDGQRLASVGLDAKNTVCIWDWRKGKLLASATGHSDRIFDISWDPYQPNRVVSCGVKHIKFWTLCGNALTAKRGIFGKTGDLQTILCLACAKEDITYSGALNGDIYVWKGLNLVRTIQGAHSAGIFSMYACEEGFATGGRDGCIRLWDTDFKPITKIDLRETEQGYKGLSIRSVCWKADRLLAGTQDSEIFEVIVRERDKPMLILQGHCEGELWALALHPKKPLAVTGSDDRSVRLWSLADHALIARCNMEEAVRSVAFSPDGSQLALGMKDGSFIVLRVRDMTEVVHIKDRKEVIHEMKFSPDGSYLAVGSNDGPVDVYAVAQRYKKIGECSKSLSFITHIDWSLDSKYLQTNDGAGERLFYRMPSGKPLTSKEEIKGIPWASWTCVKGPEVSGIWPKYTEVTDINSVDANYNSSVLVSGDDFGLVKLFKFPCLKRGAKFRKYVGHSAHVTNVRWSHDFQWVLSTGGADHSVFQWRFIPEGVSNGMLETAPQEGGADSYSEESDSDLSDVPELDSDIEQEAQINYDRQVYKEDLPQLKQQSKEKNHAVPFLKREKAPEDSLKLQFIHGYRGYDCRNNLFYTQAGEVVYHIAAVAVVYNRQQHSQRLYLGHDDDILSLTIHPVKDYVATGQVGRDAAIHVWDTQTLKCLSLLKGQHQRGVCALDFSADGKCLVSVGLDDFHSIVFWDWKKGEKIATTRGHKDKIFVVKCNPHHVDKLVTVGIKHIKFWQQAGGGFTSKRGTFGSVGKLETMMCVSYGRMEDLVFSGAATGDIFIWKDILLLKTVKAHDGPVFAMYALDKGFVTGGKDGIVELWDDMFERCLKTYAIKRSALSTSSKGLLLEDNPSIRAITLGHGHILVGTKNGEILEIDKSGPMTLLVQGHMEGEVWGLAAHPLLPICATVSDDKTLRIWELSAQHRMLAVRKLKKGGRCCAFSPDGKALAVGLNDGSFLVVNADTVEDMVSFHHRKEMISDIKFSKDTGKYLAVASHDNFVDIYNVLTSKRVGICKGASSYITHIDWDSRGKLLQVNSGAREQLFFEAPRGKRHIIRPSEIEKIEWDTWTCVLGPTCEGIWPAHSDITDVNAASLTKDCSLLATGDDFGFVKLFSYPVKGQHARFKKYVGHSAHVTNVRWLHNDSVLLTVGGADTALMIWTREFVGTQESKLVDSEESDTDVEEDGGYDSDVAREKAIDYTTKIYAVSIREMEGTKPHQQLKEVSVEERPPVSRAAPQPEKLQKNNITKKKKLVEELALDHVFGYRGFDCRNNLHYLNDGADIIFHTAAAGIVQNLSTGSQSFYLEHTDDILCLTVNQHPKYRNVVATSQIGTTPSIHIWDAMTKHTLSMLRCFHSKGVNYINFSATGKLLVSVGVDPEHTITVWRWQEGAKVASRGGHLERIFVVEFRPDSDTQFVSVGVKHMKFWTLAGSALLYKKGVIGSLGAAKMQTMLSVAFGANNLTFTGAINGDVYVWKDHFLIRLVAKAHTGPVFTMYTTLRDGLIVTGGKERPTKEGGAVKLWDQEMKRCRAFQLETGQLVECVRSVCRGKGKILVGTKDGEIIEVGEKNAASNILIDGHMEGEIWGLATHPSKDLFISASNDGTARIWDLADKKLLNKVSLGHAARCAAYSPDGEMVAIGMKNGEFVILLVNSLKVWGKKRDRKSAIQDIRISPDNRFLAVGSSEHTVDFYDLTQGTNLNRIGYCKDIPSFVIQMDFSADGKYIQVSTGAYKRQVHEVPLGKQVTEAVVIEKITWASWTSVLGDEVIGIWPRNADKADVNCACVTHAGLNIVTGDDFGLVKLFDFPCTEKFAKHKRYFGHSAHVTNIRFSYDDKYVVSTGGDDCSVFVWRCL

SEQ ID NO: 26843 - protein, 76 aa, Artificial Sequence
  Synthetic polypeptide
VPDGSRFLLACKAGCPLLSGISLPYTQTKLSLQLAKSGRSHIYAYGIPIMSRLCLFLKMSIHMELPAWLLTQMDSV

SEQ ID NO: 26844 - protein, 51 aa, Artificial Sequence
  Synthetic polypeptide
AHRFQMAPASCWPARRAALFSLASPCLTPRQNSRCNWPSREGAIYMHMGFL

SEQ ID NO: 26845 - protein, 72 aa, Artificial Sequence
  Synthetic polypeptide
VSLTRADGFIRGFRFCIFFIFLLPLPCKKCLLPPAMILRPPQPCGTLLTSCTGETLRRLEWCLVPAYSCCFH

SEQ ID NO: 26846 - protein, 9 aa, Artificial Sequence
  Synthetic polypeptide
GLPSHVELC

SEQ ID NO: 26847 - protein, 206 aa, Artificial Sequence
  Synthetic polypeptide
EMPFTSCHDSEASPAMWNFVDLLYWRDIKKTGVVFGASLFLLLSLTVFSIVSVTAYIALALLSVTISFRIYKGVIQAIQKSDEGHPFRAYLESEVAISEELVQKYSNSALGHVNCTIKELRRLFLVDDLVDSLKFAVLMWVFTYVGALFNGLTLLILALISLFSVPVIYERHQAQIDHYLGLANKNVKDAMAKIQAKIPGLKRKAE

SEQ ID NO: 26848 - protein, 193 aa, Artificial Sequence
  Synthetic polypeptide
EMPFTSCHDSEASPAMWNFVDLLYWRDIKKTGVVFGASLFLLLSLTVFSIVSVTAYIALALLSVTISFRIYKGVIQAIQKSDEGHPFRAYLESEVAISEELVQKYSNSALGHVNCTIKELRRLFLVDDLVDSLKFAVLMWVFTYVGALFNGLTLLILALISLFSVPVIYERHQAQIDHYLGLANKNVKDAMAK

SEQ ID NO: 26849 - protein, 36 aa, Artificial Sequence
  Synthetic polypeptide
GQAVGKIRGKPLPLLLFFEALFITSHAFPCPVDAAL

SEQ ID NO: 26850 - protein, 58 aa, Artificial Sequence
  Synthetic polypeptide
SHLYVESKKVEFIEAESGMVVTKDRLLEKLEESLFHYSYFLRPSLSQVMLFHVLLMQL

SEQ ID NO: 26851 - protein, 8 aa, Artificial Sequence
  Synthetic polypeptide
LRTGCWKN

SEQ ID NO: 26852 - protein, 253 aa, Artificial Sequence
  Synthetic polypeptide
GQAVGKIRGKPLPLLLFFEALFITSHAFPCPVDAALTLEGIKCGLSEKRLDLVTNWVTQERLTFSEEAGDVICDYGEQDTYNKAKCLALAQIVYSECGLHKKAILCLCKQGQTHRVMEYIQQLKDFTTDDLLQLLMSCPQVELIQCLTKELNEKQPSLSFGLAILHLFSADMKKVGIKLLQEINKGGIDAVESLMINDSFCSIEKWQEVANICSQNGFDKLSNDITSILRSQAAVTEISEEDDAVNLMEHVFW

SEQ ID NO: 26853 - protein, 25 aa, Artificial Sequence
  Synthetic polypeptide
SKFSQNPPSMTCDPPTILQNEDYRK

SEQ ID NO: 26854 - protein, 473 aa, Artificial Sequence
  Synthetic polypeptide
HVIPQPSSRMRIIESNSSKIQSQIDHIKQCRAEYDTKEVKYCTFSKDPSKPIPGMTLQESMNLDALTKYMKHLEDKYAEIKQAMLIKYVPAQRKADLDEEMIVLLKRRDVAENLNKKLQFCHQRLQIISQALSSWVKSDMSSPFQDFVEQIQKTKYLQGDQGIVEELMEDDPRRAKEAEIMLHYIERFNELISLGEYEKAACYAANSPRRILRNIGTMNTFKAVGKIRGKPLPLLLFFEALFITSHAFPCPVDAALTLEGIKCGLSEKRLDLVTNWVTQERLTFSEEAGDVICDYGEQDTYNKAKCLALAQIVYSECGLHKKAILCLCKQGQTHRVMEYIQQLKDFTTDDLLQLLMSCPQVELIQCLTKELNEKQPSLSFGLAILHLFSADMKKVGIKLLQEINKGGIDAVESLMINDSFCSIEKWQEVANICSQNGFDKLSNDITSILRSQAAVTEISEEDDAVNLMEHVFW

SEQ ID NO: 26855 - protein, 7 aa, Artificial Sequence
  Synthetic polypeptide
SPNHPPE

SEQ ID NO: 26856 - protein, 228 aa, Artificial Sequence
  Synthetic polypeptide
LLLFVFRHDCEASPAMWKCVLPDCLTDGSDVVSDLEHEEMKILREVLRKSKEEYDQEEERKRKKQLSEAKTEEPTVHSSEAAIMNNSQGDGEHFAHPPSEVKMHFANQSIEPLGRKVERSETSSLPQKDLKIPGLEHASIEGPIANLSVLGTEELRQREHYLKQKRDKLMSMRKDMRTKQIQNMEQKGKPTGEVEEMTEKPEMTAEEKQTLLKRRLLAEKLKEEVINK

SEQ ID NO: 26857 - protein, 50 aa, Artificial Sequence
  Synthetic polypeptide
DLMVLGKGSLPAQALSLPAVIHVRRDCSCLSSAMIVRLPQPCGNVYYLTA

SEQ ID NO: 26858 - protein, 11 aa, Artificial Sequence
  Synthetic polypeptide
GFPSHVEMCIT

SEQ ID NO: 26859 - protein, 104 aa, Artificial Sequence
  Synthetic polypeptide
LLLFVFRHDCEASPAMWKCVLPDCLTDGSDVVSDLEHEEMKILREVLRKSKEEYDQEEERKRKKQLSEAKTEEPTVHSSEAAIMNNSQGDGEHFAHPPSEIQGS

SEQ ID NO: 26860 - protein, 199 aa, Artificial Sequence
  Synthetic polypeptide
LLLFVFRHDCEASPAMWKCVLPDCLTDGSDVVSDLEHEEMKILREVLRKSKEEYDQEEERKRKKQLSEAKTEEPTVHSSEAAIMNNSQGDGEHFAHPPSDLKIPGLEHASIEGPIANLSVLGTEELRQREHYLKQKRDKLMSMRKDMRTKQIQNMEQKGKPTGEVEEMTEKPEMTAEEKQTLLKRRLLAEKLKEEVINK

SEQ ID NO: 26861 - protein, 109 aa, Artificial Sequence
  Synthetic polypeptide
LLLFVFRHDCEASPAMWKCVLPDCLTDGSDVVSDLEHEEMKILREVLRKSKEEYDQEEERKRKKQVPTEHITEVFYCCYLLLSLHLDLTIKIYTYVELHNFKYNVNIDQ

SEQ ID NO: 26862 - protein, 51 aa, Artificial Sequence
  Synthetic polypeptide
RTNIAGMGSRRLRSQLLGRLRITTLGIKDKSKYCISETTGYINCLVRSREL

SEQ ID NO: 26863 - protein, 31 aa, Artificial Sequence
  Synthetic polypeptide
VLKNEYSGDGEQASTVPATREAEDHYSWNQR

SEQ ID NO: 26864 - protein, 299 aa, Artificial Sequence
  Synthetic polypeptide
RAPELIPITKEVLIRVPISSAVAGVAIGLVTKTDPEKGEIEDYRLLTDILGIEDYNGDMDFKIAGTNKGITALQADIKLPGIPIKIVMEAIQQASVAKKEILQIMNKTISKPRASRKENGPVVETVQVPLSKRAKFVGPGGYNLKKLQAETGVTISQVDEETFSVFAPTPSAMHEARDFITEICKDDQEQQLEFGAVYTATITEIRDTGVMVKLYPNMTAVLLHNTQLDQRKIKHPTALGLEVGQEIQVKYFGRDPADGRMRLSRKVLQSPATTVVRTLNDRSSIVMGEPISQSSSNSQ

SEQ ID NO: 26865 - protein, 11 aa, Artificial Sequence
  Synthetic polypeptide
LGFQFHLLLQA

SEQ ID NO: 26866 - protein, 17 aa, Artificial Sequence
  Synthetic polypeptide
KSSKNQPCPMLGSWRQE

SEQ ID NO: 26867 - protein, 12 aa, Artificial Sequence
  Synthetic polypeptide
IRKALRINLVLC

SEQ ID NO: 26868 - protein, 65 aa, Artificial Sequence
  Synthetic polypeptide
GWSQCLTPVIPTLQEAETRRLIEPSSWRPSGQHGETSSLQKIQKSAGCGGNVSVVPQLLRRLRAP

SEQ ID NO: 26869 - protein, 195 aa, Artificial Sequence
  Synthetic polypeptide
NLVSTKNTKISWVWGQRVCSPPATQEAESSLISIYSQFLAAIESLKAFWDVMDEIDEKTWVLEPEKPPRSATARRIALVVKPLGIKLSRNIHLWDPENSVLQNLKDVLEIDFPARAILEKSDFTMDCGICYAYQLDGTIPDQVCDNSQCGQPFHQICLYEWLRGLLTSRQSFNIIFGECPYCSKPITLKMSGRKH

SEQ ID NO: 26870 - protein, 223 aa, Artificial Sequence
  Synthetic polypeptide
NLVSTKNTKISWVWGQRVCSPPATQEAESSLISIYSQFLAAIESLKAFWDVMDEIDEKTWVLEPEKPPRSATARRIALGNNVSINIEVDPRHPTMLPECFFLGADHVVKPLGIKLSRNIHLWDPENSVLQNLKDVLEIDFPARAILEKSDFTMDCGICYAYQLDGTIPDQVCDNSQCGQPFHQICLYEWLRGLLTSRQSFNIIFGECPYCSKPITLKMSGRKH

SEQ ID NO: 26871 - protein, 208 aa, Artificial Sequence
  Synthetic polypeptide
NLVSTKNTKISWVWGQRVCSPPATQEAESSLISIYSQFLAAIESLKAFWDVMDEIDEKTWVLEPEKPPRSATARRIALGNNVSINIEVDPRHPTMLPECFFLGADHVVKPLGIKLSRNIHLWDPENSVLQNLKDVLEIDFPARAILEKSDFTMDCGICYAYQLDGTIPDQVCDNSQCGQPFHQICLYEWLRGLLTSRQSFNIIFGECP

SEQ ID NO: 26872 - protein, 154 aa, Artificial Sequence
  Synthetic polypeptide
NLVSTKNTKISWVWGQRVCSPPATQEAESSLISIYSQFLAAIESLKAFWDVMDEIDEKTWVLEPEKPPRSATARRIALGNNVSINIEVDPRHPTMLPECFFLGADHVVKPLGIKLSRNIHLWDPENSVLQNLKDVLEIDFPARAILEKSDFTMD

SEQ ID NO: 26873 - protein, 121 aa, Artificial Sequence
  Synthetic polypeptide
NLVSTKNTKISWVWGQRVCSPPATQEAESSLISIYSQFLAAIESLKAFWDVMDEIDEKTWVLEPEKPPRSATARRIALGNNVSINIEVDPRHPTMLPECFFLGADHVVKPLGIKLSRNIHL

SEQ ID NO: 26874 - protein, 31 aa, Artificial Sequence
  Synthetic polypeptide
NLVSTKNTKISWVWGQRVCSPPATQEAESSL

SEQ ID NO: 26875 - protein, 105 aa, Artificial Sequence
  Synthetic polypeptide
NLVSTKNTKISWVWGQRVCSPPATQEAESSLISIYSQFLAAIESLKAFWDVMDEIDEKTWVLEPEKPPRSATARRIALGNNVSINIEVDPRHPTMLPECFFLGAD

SEQ ID NO: 26876 - protein, 40 aa, Artificial Sequence
  Synthetic polypeptide
GWSQCLTPVIPTLQEAETRRLIEPSSWRPSGQHELLNKHL

SEQ ID NO: 26877 - protein, 179 aa, Artificial Sequence
  Synthetic polypeptide
LSPAVGDHLGNMSSLISIYSQFLAAIESLKAFWDVMDEIDEKTWVLEPEKPPRSATARRIALVVKPLGIKLSRNIHLWDPENSVLQNLKDVLEIDFPARAILEKSDFTMDCGICYAYQLDGTIPDQVCDNSQCGQPFHQICLYEWLRGLLTSRQSFNIIFGECPYCSKPITLKMSGRKH

SEQ ID NO: 26878 - protein, 207 aa, Artificial Sequence
  Synthetic polypeptide
LSPAVGDHLGNMSSLISIYSQFLAAIESLKAFWDVMDEIDEKTWVLEPEKPPRSATARRIALGNNVSINIEVDPRHPTMLPECFFLGADHVVKPLGIKLSRNIHLWDPENSVLQNLKDVLEIDFPARAILEKSDFTMDCGICYAYQLDGTIPDQVCDNSQCGQPFHQICLYEWLRGLLTSRQSFNIIFGECPYCSKPITLKMSGRKH

SEQ ID NO: 26879 - protein, 192 aa, Artificial Sequence
  Synthetic polypeptide
LSPAVGDHLGNMSSLISIYSQFLAAIESLKAFWDVMDEIDEKTWVLEPEKPPRSATARRIALGNNVSINIEVDPRHPTMLPECFFLGADHVVKPLGIKLSRNIHLWDPENSVLQNLKDVLEIDFPARAILEKSDFTMDCGICYAYQLDGTIPDQVCDNSQCGQPFHQICLYEWLRGLLTSRQSFNIIFGECP

SEQ ID NO: 26880 - protein, 138 aa, Artificial Sequence
  Synthetic polypeptide
LSPAVGDHLGNMSSLISIYSQFLAAIESLKAFWDVMDEIDEKTWVLEPEKPPRSATARRIALGNNVSINIEVDPRHPTMLPECFFLGADHVVKPLGIKLSRNIHLWDPENSVLQNLKDVLEIDFPARAILEKSDFTMD

SEQ ID NO: 26881 - protein, 105 aa, Artificial Sequence
  Synthetic polypeptide
LSPAVGDHLGNMSSLISIYSQFLAAIESLKAFWDVMDEIDEKTWVLEPEKPPRSATARRIALGNNVSINIEVDPRHPTMLPECFFLGADHVVKPLGIKLSRNIHL

SEQ ID NO: 26882 - protein, 36 aa, Artificial Sequence
  Synthetic polypeptide
GWSQCLTPVIPTLQEAETRRLIEPSSWRPSGQHELL

SEQ ID NO: 26883 - protein, 15 aa, Artificial Sequence
  Synthetic polypeptide
LSPAVGDHLGNMSSL

SEQ ID NO: 26884 - protein, 89 aa, Artificial Sequence
  Synthetic polypeptide
LSPAVGDHLGNMSSLISIYSQFLAAIESLKAFWDVMDEIDEKTWVLEPEKPPRSATARRIALGNNVSINIEVDPRHPTMLPECFFLGAD

SEQ ID NO: 26885 - protein, 40 aa, Artificial Sequence
  Synthetic polypeptide
GWARWLTPVIPALWEAEVGGSLDVRSSRPAWPTCMLHGCW

SEQ ID NO: 26886 - protein, 45 aa, Artificial Sequence
  Synthetic polypeptide
SQHFGRPRWADHLMSGVRDQPGQHACCMVAGKTGNGKAESVAGKR

SEQ ID NO: 26887 - protein, 384 aa, Artificial Sequence
  Synthetic polypeptide
CQEFETSLANMHAAWLLVKQEMGKQSLSLGRDDIVQLKEAYKWITHPLFSEELGVPIDGKSLFEVSVVFAHPETVEDCHFLAAICPDCFKPAKNKQSVFTRMAVMKALNKIKEEDFLKQFPCPPNSPKAVCAVLEIECAHGAVFVAGRYNKYSRNLPQTPWIIDGERKLESSVEELISDHLLAVFKAESFNFSSSGREDVDVRTLGNGRPFAIELVNPHRVHFTSQEIKELQQKINNSSNKIQVRDLQLVTREAIGHMKEGEEEKTKTYSALIWTNKAIQKKDIEFLNDIKDLKIDQKTPLRVLHRRPLAVRARVIHFMETQYVDEHHFRLHLKTQAGTYIKEFVHGDFGRTKPNIGSLMNVTADILELDVESVDVDWPPALDD

SEQ ID NO: 26888 - protein, 4 aa, Artificial Sequence
  Synthetic polypeptide
NKIC

SEQ ID NO: 26889 - protein, 391 aa, Artificial Sequence
  Synthetic polypeptide
FNQVEKRISVIEDQIDEIKSADLGPTLMTRPGQPALTRVPPPILPRPSQQTGSSSVNTFRPAYSSFSSGYGAYGNSFYGGYSPYSYGYNGLGYNRLRVDDLPPSRFVQQAEESSRGAFQSIESIVHAFASVSMMMDATFSAVYNSFRAVLDVANHFSRLKIHFTKVFSAFALVRTIRYLYRRLQRMLGLRRGSENEDLWAESEGTVACLGAEDRAATSAKSWPIFLFFAVILGGPYLIWKLLSTHSDEVTDSINWASGEDDHVVARAEYDFAAVSEEEISFRAGDMLNLALKEQQPKVRGWLLASLDGQTTGLIPANYVKILGKRKGRKTVESSKVSKQQQSFTNPTLTKGATVADSLDEQEAAFESVFVETNKVPVAPDSIGKDGEKQDL

SEQ ID NO: 26890 - protein, 16 aa, Artificial Sequence
  Synthetic polypeptide
DQPDQHEIRHGMFMSI

SEQ ID NO: 26891 - protein, 12 aa, Artificial Sequence
  Synthetic polypeptide
GEEFETSLTNMR

SEQ ID NO: 26892 - protein, 25 aa, Artificial Sequence
  Synthetic polypeptide
SQLLSGLKWENHLNPGGRGCGLSLY

SEQ ID NO: 26893 - protein, 321 aa, Artificial Sequence
  Synthetic polypeptide
TREAEVAAFLCIEFSHCQYHSETVVYPTAASSLNTVGTGIYPCCNQKVLRFDPTQLTKGCKVRDHMVTLRDQGEGGDLPSCPTARMLDDLHKYRDVIVVPFSKDTVSDVGVGLCDEKGIECDVLLEPNTPWGPKTGELNAFLSLKNWTLQLKQQSLFSEEEEYTTGSEVTEDEVGDEEEVSKKQRKKEKPKKFTRQPKKQVSSPCAQRKEKALEKSASRDVSPFVMSMQKNKWDATRSLRFNQDAQREDDQRRMTEITGHLIKMRLGDLDRVKSKEAKEFAGGIYSRLEAQIKASVPVSARQSSSEKNTRSKSRFGQGRPA

SEQ ID NO: 26894 - protein, 59 aa, Artificial Sequence
  Synthetic polypeptide
KRKISQAWWRMPVIPATQWAEVGESLEPGRQRLRPFSVLNFHIVNTTQKQWFILLQQVH

SEQ ID NO: 26895 - protein, 310 aa, Artificial Sequence
  Synthetic polypeptide
TREAEVAAFLCIEFSHCQYHSETVVYPTAASSLNTVGTGIYPCCNQKVLRFDPTQLTKGCKVRDHMVTLRDQGEGGDLPSCPTARMLDDLHKYRDVIVVPFSKDTVSDVGVGLCDEKGIECDVLLEPNTPWGPKTGELNAFLSLKNWTLQLKQQSLFSEEEEYTTGSEVTEDEVGDEEEVSKKQRKKEKPKKFTRQPKKQVSSPCAQRKEKALEKSASRDVSPFVMSMQKNKWDATRSLRFNQDAQREDDQRRMTEITGHLIKMRLGDLDRVKSKEAKETDKLRPRDGTVSKSNRKSGLSSVLLMTVLLC

SEQ ID NO: 26896 - protein, 53 aa, Artificial Sequence
  Synthetic polypeptide
RGPEGTRFAPVSTHSQTVKPSSNSNSARAFKQMQDLSATEKLTPRARSQRKKN

SEQ ID NO: 26897 - protein, 277 aa, Artificial Sequence
  Synthetic polypeptide
AGHGGSCLQSKHFGRSRPVDNEDLRALALLLSVHTPKQLNPALIPTLQELLSKCRTCLQQRNSLQEQEAKERKTKDDEGATPIKRRRVSSDEEHTVDSCISDMKTETREVLTPTSTSDNETRDSSIIDPGTEQDLPSPENSSVKEYRMEVPSSFSEDMSNIRSQHAEEQSNNGRYDDCKEFKDLHCSKDSTLAEEESEFPSTSISAVLSDLADLRSCDGQALPSQDPEVALSLSCGHSRGLFSHMQQHDILDTLCRTIESTIHVVTRISGKGNQAAS

SEQ ID NO: 26898 - protein, 23 aa, Artificial Sequence
  Synthetic polypeptide
MGTVAHACNPSILGGRGRWITRT

SEQ ID NO: 26899 - protein, 1237 aa, Artificial Sequence
  Synthetic polypeptide
GWARWLMPVIPALWEAEAGGSRGPEIETILPNMWIWHDNMQFLQDKNIFEHTYFGFMWQLCSCIPSTLPDPKAVSLMTAKLSTSFVLETFIHSKEKPTMLQWIELLTKQFNNSQAACEWFLDRMADDDWWPMQILIKCPNQIVRQMFQRLCIHVIQRLRPVHAHLYLQPGMEDGSDDMDTSVEDIGGRSCVTRFVRTLLLIMEHGVKPHSKHLTEYFAFLYEFAKMGEEESQFLLSLQAISTMVHFYMGTKGPENPQVEVLSEEEGEEEEEEEDILSLAEEKYRPAALEKMIALVALLVEQSRSERHLTLSQTDMAALTGGKGFPFLFQHIRDGINIRQTCNLIFSLCRYNNRLAEHIVSMLFTSIAKLTPEAANPFFKLLTMLMEFAGGPPGMPPFASYILQRIWEVIEYNPSQCLDWLAVQTPRNKLAHSWVLQNMENWVERFLLAHNYPRVRTSAAYLLVSLIPSNSFRQMFRSTRSLHIPTRDLPLSPDTTVVLHQVYNVLLGLLSRAKLYVDAAVHGTTKLVPYFSFMTYCLISKTEKLMFSTYFMDLWNLFQPKLSEPAIATNHNKQALLSFWYNVCADCPENIRLIVQNPVVTKNIAFNYILADHDDQDVVLFNRGMLPAYYGILRLCCEQSPAFTRQLASHQNIQWAFKNLTPHASQYPGAVEELFNLMQLFIAQRPDMREEELEDIKQFKKTTISCYLRCLDGRSCWTTLISAFRILLESDEDRLLVVFNRGLILMTESFNTLHMMYHEATACHVTGDLVELLSIFLSVLKSTRPYLQRKDVKQALIQWQERIEFAHKLLTLLNSYSPPELRNACIDVLKELVLLSPHDFLHTLVPFLQHNHCTYHHSNIPSVLVAYEGLPLHLALFPKLWTELCQTQSAMSKNCIKLLCEDPVFAEYIKCILMDERTFLNNNIVYTFMTHFLLKVQSQVFSEANCANLISTLITNLISQYQNLQSDFSNRVEISKASASLNGDLRALALLLSVHTPKQLNPALIPTLQELLSKCRTCLQQRNSLQEQEAKERKTKDDEGATPIKRRRVSSDEEHTVDSCISDMKTETREVLTPTSTSDNETRDSSIIDPGTEQDLPSPENSSVKEYRMEVPSSFSEDMSNIRSQHAEEQSNNGRYDDCKEFKDLHCSKDSTLAEEESEFPSTSISAVLSDLADLRSCDGQALPSQDPEVALSLSCGHSRGLFSHMQQHDILDTLCRTIESTIHVVTRISGKGNQAAS

SEQ ID NO: 26900 - protein, 66 aa, Artificial Sequence
  Synthetic polypeptide
SQHFGRPRRADHEVRRLRPSCLTCGFGMITCSFFKTKTFLNIHILDLCGNCVVVFPVHYQILKLCP

SEQ ID NO: 26901 - protein, 5 aa, Artificial Sequence
  Synthetic polypeptide
HVDLA

SEQ ID NO: 26902 - protein, 1320 aa, Artificial Sequence
  Synthetic polypeptide
GWARWLMPVIPALWEAEAGGSRGPEIETILPNMWIWHDNMQFLQDKNIFEHTYFGFMWQLCSCIPSTLPDPKAVSLMTAKLSTSFVLETFIHSKEKPTMLQWIELLTKQFNNSQAACEWFLDRMADDDWWPMQILIKCPNQIVRQMFQRLCIHVIQRLRPVHAHLYLQPGMEDGSDDMDTSVEDIGGRSCVTRFVRTLLLIMEHGVKPHSKHLTEYFAFLYEFAKMGEEESQFLLSLQAISTMVHFYMGTKGPENPQVEVLSEEEGEEEEEEEDILSLAEEKYRPAALEKMIALVALLVEQSRSERHLTLSQTDMAALTGGKGFPFLFQHIRDGINIRQTCNLIFSLCRYNNRLAEHIVSMLFTSIAKLTPEAANPFFKLLTMLMEFAGGPPGMPPFASYILQRIWEVIEYNPSQCLDWLAVQTPRNKLAHSWVLQNMENWVERFLLAHNYPRVRTSAAYLLVSLIPSNSFRQMFRSTRSLHIPTRDLPLSPDTTVVLHQVYNVLLGLLSRAKLYVDAAVHGTTKLVPYFSFMTYCLISKTEKLMFSTYFMDLWNLFQPKLSEPAIATNHNKQALLSFWYNVCADCPENIRLIVQNPVVTKNIAFNYILADHDDQDVVLFNRGMLPAYYGILRLCCEQSPAFTRQLASHQNIQWAFKNLTPHASQYPGAVEELFNLMQLFIAQRPDMREEELEDIKQFKKTTISCYLRCLDGRSCWTTLISAFRILLESDEDRLLVVFNRGLILMTESFNTLHMMYHEATACHVTGDLVELLSIFLSVLKSTRPYLQRKDVKQALIQWQERIEFAHKLLTLLNSYSPPELRNACIDVLKELVLLSPHDFLHTLVPFLQHNHCTYHHSNIPMSLGPYFPCRENIKLIGGKSNIRPPRPELNMCLLPTMVETSKGKDDVYDRMLLDYFFSYHQFIHLLCRVAINCEKFTETLVKLSVLVAYEGLPLHLALFPKLWTELCQTQSAMSKNCIKLLCEDPVFAEYIKCILMDERTFLNNNIVYTFMTHFLLKVQSQVFSEANCANLISTLITNLISQYQNLQSDFSNRVEISKASASLNGDLRALALLLSVHTPKQLNPALIPTLQELLSKCRTCLQQRNSLQEQEAKERKTKDDEGATPIKRRRVSSDEEHTVDSCISDMKTETREVLTPTSTSDNETRDSSIIDPGTEQDLPSPENSSVKEYRMEVPSSFSEDMSNIRSQHAEEQSNNGRYDDCKEFKDLHCSKDSTLAEEESEFPSTSISAVLSDLADLRSCDGQALPSQDPEVALSLSCGHSRGLFSHMQQHDILDTLCRTIESTIHVVTRISGKGNQAAS

SEQ ID NO: 26903 - protein, 306 aa, Artificial Sequence
  Synthetic polypeptide
GWARWLMPVIPALWEAEAGGSRGPEIETILPNMWIWHDNMQFLQDKNIFEHTYFGFMWQLCSCIPSTLPDPKAVSLMTAKLSTSFVLETFIHSKEKPTMLQWIELLTKQFNNSQAACEWFLDRMADDDWWPMQILIKCPNQIVRQMFQRLCIHVIQRLRPVHAHLYLQPGMEDGSDDMDTSVEDIGGRSCVTRFVRTLLLIMEHGVKPHSKHLTEYFAFLYEFAKMGEEESQFLLSLQAISTMVHFYMGTKGPENPQVEVLSEEEGEEEEEEEDILSLAEEKYRPAALEKMIALVALLVEQSRSER

SEQ ID NO: 26904 - protein, 991 aa, Artificial Sequence
  Synthetic polypeptide
SQLLGRLRQENRLNPGGRGRGIKKYVVGLIIKTSSDPTCVEKEKVYIGKLNMILVQILKQEWPKHWPTFISDIVGASRTSESLCQNNMVILKLLSEEVFDFSSGQITQVKSKHLKDSMCNEFSQIFQLCQFVMENSQNAPLVHATLETLLRFLNWIPLGYIFETKLISTLIYKFLNVPMFRNVSLKCLTEIAGVSVSQYEEQFVTLFTLTMMQLKQMLPLNTNIRLAYSNGKDDEQNFIQNLSLFLCTFLKEHDQLIEKRLNLRETLMEALHYMLLVSEVEETEIFKICLEYWNHLAAELYRESPFSTSASPLLSGSQHFDVPPRRQLYLPMLFKVRLLMVSRMAKPEEVLVVENDQGEVVREFMKDTDSINLYKNMRETLVYLTHLDYVDTERIMTEKLHNQVNGTEWSWKNLNTLCWAIGSISGAMHEEDEKRFLVTVIKDLLGLCEQKRGKDNKAIIASNIMYIVGQYPRFLRAHWKFLKTVVNKLFEFMHETHDGVQDMACDTFIKIAQKCRRHFVQVQVGEVMPFIDEILNNINTIICDLQPQQVHTFYEAVGYMIGAQTDQTVQEHLIEKYMLLPNQVWDSIIQQATKNVDILKDPETVKQLGSILKTNVRACKAVGHPFVIQLGRIYLDMLNVYKCLSENISAAIQANGEMVTKQPLIRSMRTVKRETLKLISGWVSRSNDPQMVAENFVPPLLDAVLIDYQRNVPAAREPEVLSTMAIIVNKLGGHITAEIPQIFDAVFECTLNMINKDFEEYPEHRTNFFLLLQAVNSHCFPAFLAIPPTQFKLVLDSIIWAFKHTMRNVADTGLQILFTLLQNVAQEEAAAQSFYQTYFCDILQHIFSVVTDTSHTAGLTMHASILAYMFNLVEEGKISTSLNPGNPVNNQIFLQEYVANLLKSAFPHLQDAQVKLFVTGLFSLNQDIPAFKEHLRDFLVQIKEFAGEDTSDLFLEEREIALRQADEEKHKRQMSVPGIFNPHEIPEEMCD

SEQ ID NO: 26905 - protein, 8 aa, Artificial Sequence
  Synthetic polypeptide
TREAEVAE

SEQ ID NO: 26906 - protein, 66 aa, Artificial Sequence
  Synthetic polypeptide
GPEFETSLTNMEKPHLYYKYKISQAWWRMPVIPAIGEAEAGESLEPGRQRSRNKKIRCWPHYQDVI

SEQ ID NO: 26907 - protein, 99 aa, Artificial Sequence
  Synthetic polypeptide
SQLLGRLRQENRLNPGGRGRGIKKYVVGLIIKTSSDPTCVEKEKVYIGKLNMILVQILKQEWPKHWPTFISDIVGASRTSESLCQNNMVILKLLSEEVF

SEQ ID NO: 26908 - protein, 52 aa, Artificial Sequence
  Synthetic polypeptide
SQLLGRLRQENRLNPGGRGRGIKKYVVGLIIKTSSDPTCVEKEKVYIGKLNM

SEQ ID NO: 26909 - protein, 114 aa, Artificial Sequence
  Synthetic polypeptide
SQPAFWEAEAGGSPKKNARMAAEKHYSNTLKALGISDEFVSKKGQSGKVLEYFNNQETKSVTEDKESFNEEEKIEERENGEENYFIDTNSQDSYKEKDEANEESEEEKSVEESH

SEQ ID NO: 26910 - protein, 38 aa, Artificial Sequence
  Synthetic polypeptide
PGAVAHTCNPSQHFGRPKQVDHLRKMQEWQQKSIILIP

SEQ ID NO: 26911 - protein, 70 aa, Artificial Sequence
  Synthetic polypeptide
SQLFGKLRHENCMNPGGRSCSELRLCHRTSLSNRMRLHLKTKKERKGKDERIPTRTRRKRRKIKKEATAI

SEQ ID NO: 26912 - protein, 139 aa, Artificial Sequence
  Synthetic polypeptide
DSISKQKKSEKERMREYQRELEEREEKLKKRPLLFERVAQKNARMAAEKHYSNTLKALGISDEFVSKKGQSGKVLEYFNNQETKSVTEDKESFNEEEKIEERENGEENYFIDTNSQDSYKEKDEANEESEEEKSVEESH

SEQ ID NO: 26913 - protein, 27 aa, Artificial Sequence
  Synthetic polypeptide
AEIVPPHQPEQQNETPSQNKKRAKRKG

SEQ ID NO: 26914 - protein, 10 aa, Artificial Sequence
  Synthetic polypeptide
DQPERAKRKG

SEQ ID NO: 26915 - protein, 36 aa, Artificial Sequence
  Synthetic polypeptide
AQEFETSLKERKGKDERIPTRTRRKRRKIKKEATAI

SEQ ID NO: 26916 - protein, 18 aa, Artificial Sequence
  Synthetic polypeptide
KNSMRLRTPGTLGQRGYA

SEQ ID NO: 26917 - protein, 14 aa, Artificial Sequence
  Synthetic polypeptide
GSELLGPLDRGDML

SEQ ID NO: 26918 - protein, 28 aa, Artificial Sequence
  Synthetic polypeptide
FLCSPLNANMKKFNEAQNSWDPWTEGIC

SEQ ID NO: 26919 - protein, 19 aa, Artificial Sequence
  Synthetic polypeptide
KNSMRLRTPGTLGQRGYAK

SEQ ID NO: 26920 - protein, 110 aa, Artificial Sequence
  Synthetic polypeptide
GSELLGPLDRGDMLNEAFIGLSLAPQGEDSFPDNLPPSCPTHRHILQQRILNGSSNRQIIDRRNELEKDICSGFLMTNTCNAEDGELREDGREQEIRDGGSLKMIHFGLV

SEQ ID NO: 26921 - protein, 187 aa, Artificial Sequence
  Synthetic polypeptide
VSQDLMGLSVVSVFASSSFFLLPRPCKKCLSPPVMILRPPQPYGADIHYLALDKGELALAEVARKRASDIDAESITSGVELLGPLDRGDMLNEAFIGLSLAPQGEDSFPDNLPPSCPTHRHILQQRILNGSSNRQIIDRRNELEKDICSGFLMTNTCNAEDGELREDGREQEIRDGGSLKMIHFGLV

SEQ ID NO: 26922 - protein, 14 aa, Artificial Sequence
  Synthetic polypeptide
GLPSHMELIFITLH

SEQ ID NO: 26923 - protein, 703 aa, Artificial Sequence
  Synthetic polypeptide
AKIVSLCSSPDRDIGIYQYYDKKDPPATEHGNLEKKQKLAESRDYPWTLKNRRPEKLRDSLKELEELMQNSRCVLSKWKNKYVCQLLFGSGVLVSLSLSGPQLEKVVIDRSLVGKLISDTISDALLTDSFIILSFLAQNKLCFIQFTKKMESSDVNKRLEKLSALDYKIFYYEIPGPINKTTERHLAINCVHDRVVCWWPLVNDDAWPWAPISSEKDRANLLLLGYAQGRLEVLSSVRTEWDPLDVRFGTKQPYQVFTVEHSVSVDKEPMADSCIYECIRNKIQCVSVTRIPLKSKAISCCRNVTEDKLILGCEDSSLILYETHRRVTLLAQTELLPSLISCHPSGAILLVGSNQGELQIFDMALSPINIQLLAEDRLPRETLQFSKLFDASSSLVQMQWIAPQVVSQKGEGSDIYDLLFLRFERGPLGVLLFKLGVFTRGQLGLIDIIFQYIHCDEIYEAINILSSMNWDTLGHQCFISMSAIVNHLLRQKLTPEREAQLETSLGTFYAPTRPLLDSTILEYRDQISKYARRFFHHLLRYQRFEKAFLLAVDVGARDLFMDIHYLALDKGELALAEVARKRASDIDAESITSGVELLGPLDRGDMLNEAFIGLSLAPQGEDSFPDNLPPSCPTHRHILQQRILNGSSNRQIIDRRNELEKDICSGFLMTNTCNAEDGELREDGREQEIRDGGSLKMIHFGLV

SEQ ID NO: 26924 - protein, 36 aa, Artificial Sequence
  Synthetic polypeptide
RCSEPRSCHYALAQIETLGSTSIMTRKIHQRQSMVT

SEQ ID NO: 26925 - protein, 2 aa, Artificial Sequence
  Synthetic polypeptide
PR

SEQ ID NO: 26926 - protein, 575 aa, Artificial Sequence
  Synthetic polypeptide
AKIVSLCSSPDRDIGIYQYYDKKDPPATEHGNLEKKQKLAESRDYPWTLKNRRPEKLRDSLKELEELMQNSRCVLSKWKNKYVCQLLFGSGVLVSLSLSGPQLEKVVIDRSLVGKLISDTISDALLTDSFIILSFLAQNKLCFIQFTKKMESSDVNKRLEKLSALDYKIFYYEIPGPINKTTERHLAINCVHDRVVCWWPLVNDDAWPWAPISSEKDRANLLLLGYAQGRLEVLSSVRTEWDPLDVRFGTKQPYQVFTVEHSVSVDKEPMADSCIYECIRNKIQCVSVTRIPLKSKAISCCRNVTEDKLILGCEDSSLILYETHRRVTLLAQTELLPSLISCHPSGAILLVGSNQGELQIFDMALSPINIQLLAEDRLPRETLQFSKLFDASSSLVQMQWIAPQVVSQKGEGSDIYDLLFLRFERGPLGVLLFKLGVFTRGQLGLIDIIFQYIHCDEIYEAINILSSMNWDTLGHQCFISMSAIVNHLLRQKLTPEREAQLETSLGTFYAPTRPLLDSTILEYRDQISKYARRFFHHLLRYQRFEKAFLLAVDVGARDLFMASCYLTSNYTTRLQ

SEQ ID NO: 26927 - protein, 90 aa, Artificial Sequence
  Synthetic polypeptide
AKIVSLCSSPDRDIGIYQYYDKKDPPATEHGNLEKKQKLAESRDYPWTLKNRRPEKLRDSLKELEELMQNSRCVLSKWKNKYVCQVCWCL

SEQ ID NO: 26928 - protein, 41 aa, Artificial Sequence
  Synthetic polypeptide
AKIVSLCSSPDRDIGIYQYYDKKDPPARDYPWTLKNRRPEK

SEQ ID NO: 26929 - protein, 45 aa, Artificial Sequence
  Synthetic polypeptide
RCSEPRSCHYALAQIETLGSTSIMTRKIHQHEIILGRSKTDAQKN

SEQ ID NO: 26930 - protein, 746 aa, Artificial Sequence
  Synthetic polypeptide
RKFFRLKGNDTRWKLGSEEWRTPEMDRDSFCHQMSFCLTELHLWSLKNTLHIADRDIGIYQYYDKKDPPATEHGNLEKKQKLAESRDYPWTLKNRRPEKLRDSLKELEELMQNSRCVLSKWKNKYVCQLLFGSGVLVSLSLSGPQLEKVVIDRSLVGKLISDTISDALLTDSFIILSFLAQNKLCFIQFTKKMESSDVNKRLEKLSALDYKIFYYEIPGPINKTTERHLAINCVHDRVVCWWPLVNDDAWPWAPISSEKDRANLLLLGYAQGRLEVLSSVRTEWDPLDVRFGTKQPYQVFTVEHSVSVDKEPMADSCIYECIRNKIQCVSVTRIPLKSKAISCCRNVTEDKLILGCEDSSLILYETHRRVTLLAQTELLPSLISCHPSGAILLVGSNQGELQIFDMALSPINIQLLAEDRLPRETLQFSKLFDASSSLVQMQWIAPQVVSQKGEGSDIYDLLFLRFERGPLGVLLFKLGVFTRGQLGLIDIIFQYIHCDEIYEAINILSSMNWDTLGHQCFISMSAIVNHLLRQKLTPEREAQLETSLGTFYAPTRPLLDSTILEYRDQISKYARRFFHHLLRYQRFEKAFLLAVDVGARDLFMDIHYLALDKGELALAEVARKRASDIDAESITSGVELLGPLDRGDMLNEAFIGLSLAPQGEDSFPDNLPPSCPTHRHILQQRILNGSSNRQIIDRRNELEKDICSGFLMTNTCNAEDGELREDGREQEIRDGGSLKMIHFGLV

SEQ ID NO: 26931 - protein, 31 aa, Artificial Sequence
  Synthetic polypeptide
KEMIPDGNLDLRNGELQKWIEIPSAIRCLSA

SEQ ID NO: 26932 - protein, 8 aa, Artificial Sequence
  Synthetic polypeptide
GMENSRNG

SEQ ID NO: 26933 - protein, 618 aa, Artificial Sequence
  Synthetic polypeptide
RKFFRLKGNDTRWKLGSEEWRTPEMDRDSFCHQMSFCLTELHLWSLKNTLHIADRDIGIYQYYDKKDPPATEHGNLEKKQKLAESRDYPWTLKNRRPEKLRDSLKELEELMQNSRCVLSKWKNKYVCQLLFGSGVLVSLSLSGPQLEKVVIDRSLVGKLISDTISDALLTDSFIILSFLAQNKLCFIQFTKKMESSDVNKRLEKLSALDYKIFYYEIPGPINKTTERHLAINCVHDRVVCWWPLVNDDAWPWAPISSEKDRANLLLLGYAQGRLEVLSSVRTEWDPLDVRFGTKQPYQVFTVEHSVSVDKEPMADSCIYECIRNKIQCVSVTRIPLKSKAISCCRNVTEDKLILGCEDSSLILYETHRRVTLLAQTELLPSLISCHPSGAILLVGSNQGELQIFDMALSPINIQLLAEDRLPRETLQFSKLFDASSSLVQMQWIAPQVVSQKGEGSDIYDLLFLRFERGPLGVLLFKLGVFTRGQLGLIDIIFQYIHCDEIYEAINILSSMNWDTLGHQCFISMSAIVNHLLRQKLTPEREAQLETSLGTFYAPTRPLLDSTILEYRDQISKYARRFFHHLLRYQRFEKAFLLAVDVGARDLFMASCYLTSNYTTRLQ

SEQ ID NO: 26934 - protein, 133 aa, Artificial Sequence
  Synthetic polypeptide
RKFFRLKGNDTRWKLGSEEWRTPEMDRDSFCHQMSFCLTELHLWSLKNTLHIADRDIGIYQYYDKKDPPATEHGNLEKKQKLAESRDYPWTLKNRRPEKLRDSLKELEELMQNSRCVLSKWKNKYVCQVCWCL

SEQ ID NO: 26935 - protein, 84 aa, Artificial Sequence
  Synthetic polypeptide
RKFFRLKGNDTRWKLGSEEWRTPEMDRDSFCHQMSFCLTELHLWSLKNTLHIADRDIGIYQYYDKKDPPARDYPWTLKNRRPEK

SEQ ID NO: 26936 - protein, 434 aa, Artificial Sequence
  Synthetic polypeptide
GQEIETILANKIQPYEKIKARGLPDNISSVLNKLVVVKLNGGLGTSMGCKGPKSLIGVRNENTFLDLTVQQIEHLNKTYNTDVPLVLMNSFNTDEDTKKILQKYNHCRVKIYTFNQSRYPRINKESLLPVAKDVSYSGENTEAWYPPGHGDIYASFYNSGLLDTFIGEGKEYIFVSNIDNLGATVDLYILNHLMNPPNGKRCEFVMEVTNKTRADVKGGTLTQYEGKLRLVEIAQVPKAHVDEFKSVSKFKIFNTNNLWISLAAVKRLQEQNAIDMEIIVNAKTLDGGLNVIQLETAVGAAIKSFENSLGINVPRSRFLPVKTTSDLLLVMSNLYSLNAGSLTMSEKREFPTVPLVKLGSSFTKVQDYLRRFESIPDMLELDHLTVSGDVTFGKNVSLKGTVIIIANHGDRIDIPPGAVLENKIVSGNLRILDH

SEQ ID NO: 26937 - protein, 30 aa, Artificial Sequence
  Synthetic polypeptide
SQHLGRPRRVDHEVRRSRPSWLTRFNPMKR

SEQ ID NO: 26938 - protein, 5 aa, Artificial Sequence
  Synthetic polypeptide
QDSTL

SEQ ID NO: 26939 - protein, 41 aa, Artificial Sequence
  Synthetic polypeptide
GQEIETILANKIQPYEKIKARGLPDNISSVLNKLVVVKLNG

SEQ ID NO: 26940 - protein, 72 aa, Artificial Sequence
  Synthetic polypeptide
GQEIETILANKIQPYEKIKARGLPDNISSVLNKLVVVKLNGGLGTSMGCKGPKSLIGVRNENTFLDLTVQQI

SEQ ID NO: 26941 - protein, 109 aa, Artificial Sequence
  Synthetic polypeptide
GQEIETILANKIQPYEKIKARGLPDNISSVLNKLVVVKLNGGLGTSMGCKGPKSLIGVRNENTFLDLTVQQIEHLNKTYNTDVPLVLMNSFNTDEDTKKILQKYNHCRV

SEQ ID NO: 26942 - protein, 107 aa, Artificial Sequence
  Synthetic polypeptide
GQEIETILANKIQPYEKIKARGLPDNISSVLNKLVVVKLNGGLGTSMGCKGPKSLIGVRNENTFLDLTVQQIEHLNKTYNTDVPLVLMNSFNTDEDTKKILQKYNHC

SEQ ID NO: 26943 - protein, 149 aa, Artificial Sequence
  Synthetic polypeptide
GQEIETILANKIQPYEKIKARGLPDNISSVLNKLVVVKLNGGLGTSMGCKGPKSLIGVRNENTFLDLTVQQIEHLNKTYNTDVPLVLMNSFNTDEDTKKILQKYNHCRVKIYTFNQSRYPRINKESLLPVAKDVSYSGENTEAWYPPGH

SEQ ID NO: 26944 - protein, 87 aa, Artificial Sequence
  Synthetic polypeptide
GQEIETILANKIQPYEKIKARGLPDNISSVLNKLVVVKLNGGLGTSMGCKGPKSLIGVRNENTFLDLTVQQIEHLNKTYNTDVPLVL

SEQ ID NO: 26945 - protein, 22 aa, Artificial Sequence
  Synthetic polypeptide
HLKTSLHFSLTLAGRLKAPLIL

SEQ ID NO: 26946 - protein, 339 aa, Artificial Sequence
  Synthetic polypeptide
HKDQQPCIPLVAPEDITAFQLNIGRSTESPIDFVVTDTVPGSQSNSDTQSVQSTISRFACRIICERNPPFTARIYAAGFDSSKNIFLGEKAAKWKTSDGQMDGLTTNGVLVMHPRNGFTEDSKPGIWREISVCGNVFSLRETRSAQQRGKMVEIETNQLQDGSLIDLCGATLLWRTAEGLSHTPTVKHLEALRQEINAARPQCPVGFNTLAFPSMKRKDVVDEKQPWVYLNCGHVHGYHNWGNKEERDGKDRECPMCRSVGPYVPLWLGCEAGFYVDAGPPTHAFSPCGHVCSEKTTAYWSQIPLPHGTHTFHAACPFCAHQLAGEQGYIRLIFQGPLD

SEQ ID NO: 26947 - protein, 52 aa, Artificial Sequence
  Synthetic polypeptide
GPGKRRTATVGKEDQKLSMTSPRLSASQPEAAQSWETDRSSKSVCEVWICRL

SEQ ID NO: 26948 - protein, 402 aa, Artificial Sequence
  Synthetic polypeptide
LLPDCRLPSLKQLRAGRLTEAPNQFVKCGYAGSNFPEHIFPALVGRPIIRSTTKVGNIEIKDLMVGDEASELRSMLEVNYPMENGIVRNWDDMKHLWDYTFGPEKLNIDTRNCKILLTEPPMNPTKNREKIVEVMFETYQFSGVYVAIQAVLTLYAQGLLTGVVVDSGDGVTHICPVYEGFSLPHLTRRLDIAGRDITRYLIKLLLLRGYAFNHSADFETVRMIKEKLCYVGYNIEQEQKLALETTVLVESYTLPDGRIIKVGGERFEAPEALFQPHLINVEGVGVAELLFNTIQAADIDTRSEFYKHIVLSGGSTMYPGLPSRLERELKQLYLERVLKGDVEKLSKFKIRIEDPPRRKHMVFLGGAVLADIMKDKDNFWMTRQEYQEKGVRVLEKLGVTVR

SEQ ID NO: 26949 - protein, 7 aa, Artificial Sequence
  Synthetic polypeptide
QKLQISL

SEQ ID NO: 26950 - protein, 407 aa, Artificial Sequence
  Synthetic polypeptide
LLPDCRLPSLKQLRAGRLTEAPNQFVKCGYAGSNFPEHIFPALVGRPIIRSTTKVGNIEIKNNKKMDLMVGDEASELRSMLEVNYPMENGIVRNWDDMKHLWDYTFGPEKLNIDTRNCKILLTEPPMNPTKNREKIVEVMFETYQFSGVYVAIQAVLTLYAQGLLTGVVVDSGDGVTHICPVYEGFSLPHLTRRLDIAGRDITRYLIKLLLLRGYAFNHSADFETVRMIKEKLCYVGYNIEQEQKLALETTVLVESYTLPDGRIIKVGGERFEAPEALFQPHLINVEGVGVAELLFNTIQAADIDTRSEFYKHIVLSGGSTMYPGLPSRLERELKQLYLERVLKGDVEKLSKFKIRIEDPPRRKHMVFLGGAVLADIMKDKDNFWMTRQEYQEKGVRVLEKLGVTVR

SEQ ID NO: 26951 - protein, 31 aa, Artificial Sequence
  Synthetic polypeptide
QNGCGFMICWEMRQVILWKCAHTLMRMKLKG

SEQ ID NO: 26952 - protein, 4 aa, Artificial Sequence
  Synthetic polypeptide
YVGK

SEQ ID NO: 26953 - protein, 178 aa, Artificial Sequence
  Synthetic polypeptide
EWLRLYDMLGNEASYPLEMCSHFDADEIKRLGKRFKKLDLDNSGSLSVEEFMSLPELQQNPLVQRVIDIFDTDGNGEVDFKEFIEGVSQFSVKGDKEQKLRFAFRIYDMDKDGYISNGELFQVLKMMVGNNLKDTQLQQIVDKTIINADKDGDGRISFEEFCAVVGGLDIHKKMVVDV

SEQ ID NO: 26954 - protein, 46 aa, Artificial Sequence
  Synthetic polypeptide
AMITPLHSSLGDKIHRHWDLRDSVASQVLQLPQAGSLPVGKPLLCH

SEQ ID NO: 26955 - protein, 65 aa, Artificial Sequence
  Synthetic polypeptide
SHHCTPASVTRFTDIGTFETVWQVKFYNYHKRDHCQWGSPFSVIEYECKPNETRSLMWVNKESFL

SEQ ID NO: 26956 - protein, 46 aa, Artificial Sequence
  Synthetic polypeptide
QDSQTLGPSRQCGKSSSTITTSGITASGEAPSLSLSMNASPTRHAV

SEQ ID NO: 26957 - protein, 11 aa, Artificial Sequence
  Synthetic polypeptide
SPTPSRVPSIE

SEQ ID NO: 26958 - protein, 203 aa, Artificial Sequence
  Synthetic polypeptide
LQHPVEYLASSNCVIDWLVSNQSVRNRQEGLMIASSLLNEGYLQPAGDMSKSAVDGTAENPFLDNPDAFYYFPDSGFFCEENSSDDDVILKEEFRGVIIKQGCLLKQGHRRKNWKVRKFILREDPAYLHYYDPAGAEDPLGAIHLRGCVVTSVESNSNGRKSEEENLFEIITADEVHYFLQAATPKERTEWIRAIQMASRTGK

SEQ ID NO: 26959 - protein, 23 aa, Artificial Sequence
  Synthetic polypeptide
HRVTASLIGWYPTSLLGIARKAS

SEQ ID NO: 26960 - protein, 9 aa, Artificial Sequence
  Synthetic polypeptide
SFHCSYASR

SEQ ID NO: 26961 - protein, 29 aa, Artificial Sequence
  Synthetic polypeptide
KKEKEIHEAFTAAMPADNRQESIQKTCHS

SEQ ID NO: 26962 - protein, 503 aa, Artificial Sequence
  Synthetic polypeptide
IQHMDDCKKRKRKFMKLSLQLCQQITDKRVSRRHAILEVAGGQLRIKPIHTNPCFYQSSEKSQLLPLKPNLWCYLNPGDSFSLLVDKYIFRILSIPSEVEMQCTLRNSQVLDEDNILNETPKSPVINLPHETTGASQLEGSTEIAKTQMTPTNSVSFLGENRDCNKQQPILAERKRILPTWMLAEHLSDQNLSVPAISGGNVIQGSGKEEICKDKSQLNTTQQGRRQLISSGSSENTSAEQDTGEECKNTDQEESTISSKEMPQSFSAITLSNTEMNNIKTNAQRNKLPIEELGKVSKHKIATKRTPHKEDEAMSCSENCSSAQGDSLQDESQGSHSESSSNPSNPETLHAKATDSVLQGSEGNKVKRTSCMYGANCYRKNPVHFQHFSHPGDSDYGGVQIVGQDETDDRPECPYGPSCYRKNPQHKIEYRHNTLPVRNVLDEDNDNVGQPNEYDLNDSFLDDEEEDYEPTDEDSDWEPGKEDEEKEDVEELLKEAKRFMKRK

SEQ ID NO: 26963 - protein, 272 aa, Artificial Sequence
  Synthetic polypeptide
IQHMDDCKKRKRKFMKLSLQLCQQITDKRVSRRHAILEVAGGQLRIKPIHTNPCFYQSSEKSQLLPLKPNLWCYLNPGDSFSLLVDKYIFRILSIPSEVEMQCTLRNSQVLDEDNILNETPKSPVINLPHETTGASQLEGSTEIAKTQMTPTNSVSFLGENRDCNKQQPILAERKRILPTWMLAEHLSDQNLSVPAISGGNVIQGSGKEEICKDKSQLNTTQQGRRQLISSGSSENTSAEQDTGEECKNTDQEESTISSKMLIVKNGSIRSI

SEQ ID NO: 26964 - protein, 76 aa, Artificial Sequence
  Synthetic polypeptide
IPTVSCSELPDFGKCLRLSVFNSKQCLASAWMRLWPMNRNSAPIWCPSWWRNVQSSSWSTAGMKRASSVCLGRTTW

SEQ ID NO: 26965 - protein, 15 aa, Artificial Sequence
  Synthetic polypeptide
GSVSLTVSSVWPALG

SEQ ID NO: 26966 - protein, 17 aa, Artificial Sequence
  Synthetic polypeptide
ASWGQGLPSPVWHQAHG

SEQ ID NO: 26967 - protein, 421 aa, Artificial Sequence
  Synthetic polypeptide
PLKSELPGDRDCLLQYGTRHMANRSRDLGAIVYCVGVKDFNETQLARIADSKDHVFPVNDGFQALQGIIHSILKKSCIEILAAEPSTICAGESFQVVVRGNGFRHARNVDRVLCSFKINDSVTLNEKPFSVEDTYLLCPAPILKEVGMKAALQVSMNDGLSFISSSVIITTTHCSDGSILAIALLILFLLLALALLWWFWPLCCTVIIKEVPPPPAEESEEEDDDGLPKKKWPTVDASYYGGRGVGGIKRMEVRWGEKGSTEEGAKLEKAKNARVKMPEQEYEFPEPRNLNNNMRRPSSPRKWYSPIKGKLDALWVLLRKGYDRVSVMRPQPGDTGRCINFTRVKNNQPAKYPLNNAYHTSSPPPAPIYTPPPPAPHCPPPPPSAPTPPIPSPPSTLPPPPQAPPPNRAPPPSRPPPRPSV

SEQ ID NO: 26968 - protein, 34 aa, Artificial Sequence
  Synthetic polypeptide
SLSFLGTGIAFSSMAPGTWLIGLEILVQLFTVLV

SEQ ID NO: 26969 - protein, 190 aa, Artificial Sequence
  Synthetic polypeptide
PLKSELPGDRDCLLQYGTRHMANRSRDLGAIVYCVGVKDFNETQLARIADSKDHVFPVNDGFQALQGIIHSILKKSCIEILAAEPSTICAGESFQVVVRGNGFRHARNVDRVLCSFKINDSVTLNEKPFSVEDTYLLCPAPILKEVGMKAALQVSMNDGLSFISSSVIITTTHCSLHKIASGPTTAACME

SEQ ID NO: 26970 - protein, 225 aa, Artificial Sequence
  Synthetic polypeptide
PLKSELPGDRDCLLQYGTRHMANRSRDLGAIVYCVGVKDFNETQLARIADSKDHVFPVNDGFQALQGIIHSILKKSCIEILAAEPSTICAGESFQVVVRGNGFRHARNVDRVLCSFKINDSVTLNEKPFSVEDTYLLCPAPILKEVGMKAALQVSMNDGLSFISSSVIITTTHCSDGSILAIALLILFLLLALALLWWFWPLCCTVIIKEVPPPPAEESEENKIK

SEQ ID NO: 26971 - protein, 8 aa, Artificial Sequence
  Synthetic polypeptide
LRWHFWWC

SEQ ID NO: 26972 - protein, 201 aa, Artificial Sequence
  Synthetic polypeptide
FPGTCEYVTLHGRKDFANVIKVAFLVVLTIFGIQSHGYEVFNIISPSNNGGNVQETVTIDNEKNTAIINIHAGSCSSTTIFDYKHGYIASRVLSRRACFILKMDHQNIPPLNNLQWYIYEKQALDNMFSSKYTWVKYNPLESLIKDVDWFLLGSPIEKLCKHIPLYKGEVVENTHNVGAGGCAKAGLLGILGISICADIHV

SEQ ID NO: 26973 - protein, 178 aa, Artificial Sequence
  Synthetic polypeptide
FPGTCEYVTLHGRKDFANVIKVAFLVVLTIFGIQSHGYEVFNIISPSNNGGNVQETVTIDNEKNTAIINIHAGSCSSTTIFDYKHGYIASRVLSRRACFILKMDHQNIPPLNNLQWYIYEKQALDNMFSSKYTWVKYNPLESLIKDVDWFLLGSPIEKLCKHIPLYKGEVVENTREYQ

SEQ ID NO: 26974 - protein, 90 aa, Artificial Sequence
  Synthetic polypeptide
YIYRGAASTSPGSRTTSQPSTHSTTPTTPPRRLLPPSTLPHLLRPTALPRPPAPLPLPSRPHLPPFPLLPRLHLPTGHLLPPALLQGLLS

SEQ ID NO: 26975 - protein, 90 aa, Artificial Sequence
  Synthetic polypeptide
IYTGALHQLHQGQEQPASQVPTQQRLPHLLAASCPHLHSPTSCAPLPSPAPQRPYPSHPVPTFHPSPSSPGSTSQQGTSSLPPSSKAFCL

SEQ ID NO: 26976 - protein, 89 aa, Artificial Sequence
  Synthetic polypeptide
YIQGRCINFTRVKNNQPAKYPLNNAYHTSSPPPAPIYTPPPPAPHCPPPPPSAPTPPIPSPPSTLPPPPQAPPPNRAPPPSRPPPRPSV

SEQ ID NO: 26977 - protein, 25 aa, Artificial Sequence
  Synthetic polypeptide
GRALWLTPVILAFWEVEAGGSSEAR

SEQ ID NO: 26978 - protein, 509 aa, Artificial Sequence
  Synthetic polypeptide
HFGRSRQADHLRRGSPLLIGVRSEHKLSTDHIPILYRTARTQIGSKFTRWGSQGERGKDKKGSCNLSRVDSTTCLFPVEEKAVEYYFASDASAVIEHTNRVIFLEDDDVAAVVDGRLSIHRIKRTAGDHPGRAVQTLQMELQQIMKGNFSSFMQKEIFEQPESVVNTMRGRVNFDDYTVNLGGLKDHIKEIQRCRRLILIACGTSYHAGVATRQVLEELTELPVMVELASDFLDRNTPVFRDDVCFFLSQSGETADTLMGLRYCKERGALTVGITNTVGSSISRETDCGVHINAGPEIGVASTKAYTSQFVSLVMFALMMCDDRISMQERRKEIMLGLKRLPDLIKEVLSMDDEIQKLATELYHQKSVLIMGRGYHYATCLEGALKIKEITYMHSEGILAGELKHGPLALVDKLMPVIMIIMRDHTYAKCQNALQQVVARQGRPVVICDKEDTETIKNTKRTIKVPHSVDCLQGILSVIPLQLLAFHLAVLRGYDVDFPRNLAKSVTVE

SEQ ID NO: 26979 - protein, 491 aa, Artificial Sequence
  Synthetic polypeptide
HFGRSRQADHLRRGSPLLIGVRSEHKLSTDHIPILYRTGKDKKGSCNLSRVDSTTCLFPVEEKAVEYYFASDASAVIEHTNRVIFLEDDDVAAVVDGRLSIHRIKRTAGDHPGRAVQTLQMELQQIMKGNFSSFMQKEIFEQPESVVNTMRGRVNFDDYTVNLGGLKDHIKEIQRCRRLILIACGTSYHAGVATRQVLEELTELPVMVELASDFLDRNTPVFRDDVCFFLSQSGETADTLMGLRYCKERGALTVGITNTVGSSISRETDCGVHINAGPEIGVASTKAYTSQFVSLVMFALMMCDDRISMQERRKEIMLGLKRLPDLIKEVLSMDDEIQKLATELYHQKSVLIMGRGYHYATCLEGALKIKEITYMHSEGILAGELKHGPLALVDKLMPVIMIIMRDHTYAKCQNALQQVVARQGRPVVICDKEDTETIKNTKRTIKVPHSVDCLQGILSVIPLQLLAFHLAVLRGYDVDFPRNLAKSVTVE

SEQ ID NO: 26980 - protein, 38 aa, Artificial Sequence
  Synthetic polypeptide
ERKPGQCLTWSTSAQNRSRKESSRLLPSKDWMPRVKPR

SEQ ID NO: 26981 - protein, 14 aa, Artificial Sequence
  Synthetic polypeptide
QRCGAVKSASPGSA

SEQ ID NO: 26982 - protein, 143 aa, Artificial Sequence
  Synthetic polypeptide
SVVEQLRAQARAVLDLVDQCPKQIQKGKFQVVAIEGLDATGKTTVTQSVADSLKAVLLKSPPSCIGQWRKIFDDEPTIIRRAFYSLGNYIVASEIAKESAKSPVIVDRSQLGGTLYHPSLHLLGSEVCGTGILDSSHSSQGLE

SEQ ID NO: 26983 - protein, 226 aa, Artificial Sequence
  Synthetic polypeptide
SVVEQLRAQARAVLDLVDQCPKQIQKGKFQVVAIEGLDATGKTTVTQSVADSLKAVLLKSPPSCIGQWRKIFDDEPTIIRRAFYSLGNYIVASEIAKESAKSPVIVDRYWHSTATYAIATEVSGGLQHLPPAHHPVYQWPEDLLKPDLILLLTVSPEERLQRLQGRGMEKTREEAELEANSVFRQKVEMSYQRMENPGCHVVDASPSREKVLQTVLSLIQNSFSEP

SEQ ID NO: 26984 - protein, 186 aa, Artificial Sequence
  Synthetic polypeptide
SVVEQLRAQARAVLDLVDQCPKQIQKGKFQVVAIEGLDATGKTTVTQSVADSLKAVLLKSPPSCIGQWRKIFDDEPTIIRRAFYSLGNYIVASEIAKESAKSPVIVDRYWHSTATYAIATEVSGGLQHLPPAHHPVYQWPEDLLKPDLILLLTVSPEERLQRLQGRGMEKTREEAELEANSVFRQK

SEQ ID NO: 26985 - protein, 122 aa, Artificial Sequence
  Synthetic polypeptide
AEIMPLHSSLGDKYCWRWTGFNFGFDLLVTYTNRYIIFKRNTLNQPCSGSVSLQPRRSIAFRLRLASFDSSGKLICSRTTGYQILTLEKDQEQVVMNLDSRLLIFPLYICCNFLYISPEKKN

SEQ ID NO: 26986 - protein, 50 aa, Artificial Sequence
  Synthetic polypeptide
TQLPGRLRHENHLNSGGRGCSKPRSCHCTPAWATNTAGVGQVLTSASTYL

SEQ ID NO: 26987 - protein, 29 aa, Artificial Sequence
  Synthetic polypeptide
TREAEVAVSRDHATALQPGRQILLALDRF

SEQ ID NO: 26988 - protein, 29 aa, Artificial Sequence
  Synthetic polypeptide
LKTNTVPHWVPLECGNHELEVVLLALDRF

SEQ ID NO: 26989 - protein, 17 aa, Artificial Sequence
  Synthetic polypeptide
SSTAGVGQVLTSASTYL

SEQ ID NO: 26990 - protein, 241 aa, Artificial Sequence
  Synthetic polypeptide
VMIKPLYSSLGDKDAENAIQQMGGQWLGGRQIRTNWATRKPPAPKSTYESNTKQLSYDEVVNQSSPSNCTVYCGGVTSGLTEQLMRQTFSPFGQIMEIRVFPDKGYSFVRFNSHESAAHAIVSVNGTTIEGHVVKCYWGKETLDMINPVQQQNQIGYPQPYGQWGQWYGNAQQIGQYMPNGWQVPAYGMYGQAWNQQGFNQTQSSAPWMGPNYGVQPPQGQNGSMLPNQPSGYRVAGYETQ

SEQ ID NO: 26991 - protein, 58 aa, Artificial Sequence
  Synthetic polypeptide
SSHCTPAWVTKMLKTPFNRWVASGLVEDKSELTGQPESLPLQRVHMSQIPNSYHMMRL

SEQ ID NO: 26992 - protein, 3 aa, Artificial Sequence
  Synthetic polypeptide
QRC

SEQ ID NO: 26993 - protein, 240 aa, Artificial Sequence
  Synthetic polypeptide
VMIKPLYSSLGDKDAENAIQQMGGQWLGGRQIRTNWATRKPPAPKSTYESNTKQLSYDEVVNQSSPSNCTVYCGGVTSGLTEQLMRQTFSPFGQIMEIRVFPDKGYSFVRFNSHESAAHAIVSVNGTTIEGHVVKCYWGKETLDMINPVQQNQIGYPQPYGQWGQWYGNAQQIGQYMPNGWQVPAYGMYGQAWNQQGFNQTQSSAPWMGPNYGVQPPQGQNGSMLPNQPSGYRVAGYETQ

SEQ ID NO: 26994 - protein, 151 aa, Artificial Sequence
  Synthetic polypeptide
VMIKPLYSSLGDKDAENAIQQMGGQWLGGRQIRTNWATRKPPAPKSTYESNTKQLSYDEVVNQSSPSNCTVYCGGVTSGLTEQLMRQTFSPFGQIMEIRVFPDKGYSFVRQTQSSAPWMGPNYGVQPPQGQNGSMLPNQPSGYRVAGYETQ

SEQ ID NO: 26995 - protein, 69 aa, Artificial Sequence
  Synthetic polypeptide
VMIKPLYSSLGDKDAENAIQQMGGQWLGGRQIRTNWATRKPPAPKSTYECRCIGEEKEMWNFGEKYARF

SEQ ID NO: 26996 - protein, 67 aa, Artificial Sequence
  Synthetic polypeptide
SSHCTPAWVTKMLKTPFNRWVASGLVEDKSELTGQPESLPLQRVHMSVGVLEKKRKCGILEKNTLDF

SEQ ID NO: 26997 - protein, 84 aa, Artificial Sequence
  Synthetic polypeptide
TREAEVAVSQDRAIALQPGFMDKKLSLKLNGGRHVQGILRGFDPFMNLVIDECVEMATSGQQNNIGMVVIRGNSIIMLEALERV

SEQ ID NO: 26998 - protein, 18 aa, Artificial Sequence
  Synthetic polypeptide
VKIAPLPSSLDLWTRSYH

SEQ ID NO: 26999 - protein, 55 aa, Artificial Sequence
  Synthetic polypeptide
SQLFRRLRQENRLNPGSGGCSESRSRHCPPAWIYGQEVIIEIKWWQTCPRNIAGI

SEQ ID NO: 27000 - protein, 104 aa, Artificial Sequence
  Synthetic polypeptide
TREAEVAVSQDRAIALQPGFMDKKLSLKLNGGRHVQGILRGFDPFMNLVIDECVEMATSGQQNNIGMVDNIPNKAVSPKFLKKVNQKGQLTFSKLLSIKTSKEW

SEQ ID NO: 27001 - protein, 130 aa, Artificial Sequence
  Synthetic polypeptide
DTDPPVAAAVVSHFNDCPDSHTQFCFHGTCRFLVQEDKPACVCHSGYVGARCEHADLLAVVAASQKKQAITALVVVSIVALAVLIITCVLIHCCQVRKHCEWCRALICRHEKPSALLKGRTACCHSETVV

SEQ ID NO: 27002 - protein, 104 aa, Artificial Sequence
  Synthetic polypeptide
ENIRKALRTGRGLHRTQTRPWLQQWCPILMTAQIPTLSSASMEPAGFWCRRTSQHVSAILGTLVHAVSMRTSWPWWLPARRSRPSPPWWWSPSWPWLSLSSHVC

SEQ ID NO: 27003 - protein, 30 aa, Artificial Sequence
  Synthetic polypeptide
NERIYVKHLEQGEAYIGHRPARGCSSGVPF

SEQ ID NO: 27004 - protein, 133 aa, Artificial Sequence
  Synthetic polypeptide
DTDPPVAAAVVSHFNDCPDSHTQFCFHGTCRFLVQEDKPACVCHSGYVGARCEHADLLAVVAASQKKQAITALVVVSIVALAVLIITCVLIHCCQVRKHCEWCRALICRHEKPSALLKGRTACCHSETGCRLY

SEQ ID NO: 27005 - protein, 132 aa, Artificial Sequence
  Synthetic polypeptide
DTDPPVAAAVVSHFNDCPDSHTQFCFHGTCRFLVQEDKPACVCHSGYVGARCEHADLLAVVAASQKKQAITALVVVSIVALAVLIITCVLIHCCQVRKHCEWCRALICRHEKPSALLKGRTACCHSETATLG

SEQ ID NO: 27006 - protein, 91 aa, Artificial Sequence
  Synthetic polypeptide
DTDPPVAAAVVSHFNDCPDSHTQFCFHGTCRFLVQEDKPACVCHSGYVGARCEHADLLAVVAASQKKQAITALVVVSIVALAVLIITCVLI

SEQ ID NO: 27007 - protein, 131 aa, Artificial Sequence
  Synthetic polypeptide
DTADPPVAAAVVSHFNDCPDSHTQFCFHGTCRFLVQEDKPACVCHSGYVGARCEHADLLAVVAASQKKQAITALVVVSIVALAVLIITCVLIHCCQVRKHCEWCRALICRHEKPSALLKGRTACCHSETVV

SEQ ID NO: 27008 - protein, 105 aa, Artificial Sequence
  Synthetic polypeptide
ENIRKALRTGRGLHRTQQTRPWLQQWCPILMTAQIPTLSSASMEPAGFWCRRTSQHVSAILGTLVHAVSMRTSWPWWLPARRSRPSPPWWWSPSWPWLSLSSHVC

SEQ ID NO: 27009 - protein, 31 aa, Artificial Sequence
  Synthetic polypeptide
NERIYVKHLEQGEAYIGHSRPARGCSSGVPF

SEQ ID NO: 27010 - protein, 216 aa, Artificial Sequence
  Synthetic polypeptide
DNLEHVKPDAKGTIREIVLPKGLDLDRPKRTRTSFTAEQLYRLEMEFQRCQYVVGRERTELARQLNLSETQVKVWFQNRRTKQKKDQSRDLEKRASSSASEAFATSNILRLLEQGRLLSVPRAPSLLALTPSLPGLPASHRGTSLGDPRNSSPRLNPLSSASASPPLPPPLPAVCFSSAPLLDLPAGYELGSSAFEPYSWLERKVGSASSCKKANT

SEQ ID NO: 27011 - protein, 58 aa, Artificial Sequence
  Synthetic polypeptide
NQMPKGQFGKLSCLRAWTWTGPSGHVHPSLPSSCTAWRWSSSAASMWWAASALSWPAS

SEQ ID NO: 27012 - protein, 22 aa, Artificial Sequence
  Synthetic polypeptide
FMRQFGTCKTRCQRDNSGNCPA

SEQ ID NO: 27013 - protein, 72 aa, Artificial Sequence
  Synthetic polypeptide
GRVQWLTPVIPALWEAEAGSPEVDNINAAVMDLKKKKIRSLSEEVKIGAHGKPVIFLHPKDCGGVLVELEQA

SEQ ID NO: 27014 - protein, 20 aa, Artificial Sequence
  Synthetic polypeptide
SQHFGRPRQDHLRWIILMQL

SEQ ID NO: 27015 - protein, 30 aa, Artificial Sequence
  Synthetic polypeptide
SHHFGRPKRVDHLKSGVKSSLANEGNQQVL

SEQ ID NO: 27016 - protein, 25 aa, Artificial Sequence
  Synthetic polypeptide
SQELSPAWPTREISKFCKICGNGSC

SEQ ID NO: 27017 - protein, 336 aa, Artificial Sequence
  Synthetic polypeptide
VQLGQRGKSASSVKSVVTVAVKGNKASIKTAKSGGKKSLEAKKTGNVKNKDSNKPVTIPENSEIKTSIEVKATENCAKEAISDAALEATENEPLNKETEEMCVMLVSNLPNKGYSVEEVYDLAKPFGGLKDILILSSHKKAYIEINRKAAESMVKFYTCFPVLMDGNQLSISMAPENMNIKDEEAIFITLVKENDPEANIDTIYDRFVHLDNLPEDGLQCVLCVGLQFGKVDHHVFISNRNKAILQLDSPESAQSMYSFLKQNPQNIGDHMLTCSLSPKIDLPEVQIEHDPELEKERLWLSKTLRILKALLVEVPNLKRSHYFHLIWMNLLLWMRL

SEQ ID NO: 27018 - protein, 1175 aa, Artificial Sequence
  Synthetic polypeptide
VQLGQRGKSASSVKSVVTVAVKGNKASIKTAKSGGKKSLEAKKTGNVKNKDSNKPVTIPENSEIKTSIEVKATENCAKEAISDAALEATENEPLNKETEEMCVMLVSNLPNKGYSVEEVYDLAKPFGGLKDILILSSHKKAYIEINRKAAESMVKFYTCFPVLMDGNQLSISMAPENMNIKDEEAIFITLVKENDPEANIDTIYDRFVHLDNLPEDGLQCVLCVGLQFGKVDHHVFISNRNKAILQLDSPESAQSMYSFLKQNPQNIGDHMLTCSLSPKIDLPEVQIEHDPELEKESPGLKNSPIDESEVQTATDSPSVKPNELEEESTPSIQTETLVQQEEPCEEEAEKATCDSDFAVETLELETQGEEVKEEIPLVASASVSIEQFTENAEECALNQQMFNSDLEKKGAEIINPKTALLPSDSVFAEERNLKGILEESPSEAEDFISGITQTMVEAVAEVEKNETVSEILPSTCIVTLVPGIPTGDEKTVDKKNISEKKGNMDEKEEKEFNTKETRMDLQIGTEKAEKNEGRMDAEKVEKMAAMKEKPAENTLFKAYPNKGVGQANKPDETSKTSILAVSDVSSSKPSIKAVIVSSPKAKATVSKTENQKSFPKSVPRDQINAEKKLSAKEFGLLKPTSARSGLAESSSKFKPTQSSLTRGGSGRISALQGKLSKLDYRDITKQSQETEARPSIMKRDDSNNKTLAEQNTKNPKSTTGRSSKSKEEPLFPFNLDEFVTVDEVIEEVNPSQAKQNPLKGKRKETLKNVPFSELNLKKKKGKTSTPRGVEGELSFVTLDEIGEEEDAAAHLAQALVTVDEVIDEEELNMEEMVKNSNSLFTLDELIDQDDCISHSEPKDVTVLSVAEEQDLLKQERLVTVDEIGEVEELPLNESADITFATLNTKGNEGDTVRDSIGFISSQVPEDPSTLVTVDEIQDDSSDLHLVTLDEVTEEDEDSLADFNNLKEELNFVTVDEVGEEEDGDNDLKVELAQSKNDHPTDKKGNRKKRAVDTKKTKLESLSQVGPVNENVMEEDLKTMIERHLTAKTPTKRVRIGKTLPSEKAVVTEPAKGEEAFQMSEVDEESGLKDSEPERKRKKTEDSSSGKSVASDVPEELDFLVPKAGFFCPICSLFYSGEKAMTNHCKSTRHKQNTEKFMAKQRKEKEQNEAEERSSR

SEQ ID NO: 27019 - protein, 22 aa, Artificial Sequence
  Synthetic polypeptide
LAGPEGAHPWSQLLRMLRKLYL

SEQ ID NO: 27020 - protein, 166 aa, Artificial Sequence
  Synthetic polypeptide
RRTPVVPAPQDAEEAIFITLVKENDPEANIDTIYDRFVHLDNLPEDGLQCVLCVGLQFGKVDHHVFISNRNKAILQLDSPESAQSMYSFLKQNPQNIGDHMLTCSLSPKIDLPEVQIEHDPELEKERLWLSKTLRILKALLVEVPNLKRSHYFHLIWMNLLLWMRL

SEQ ID NO: 27021 - protein, 1005 aa, Artificial Sequence
  Synthetic polypeptide
RRTPVVPAPQDAEEAIFITLVKENDPEANIDTIYDRFVHLDNLPEDGLQCVLCVGLQFGKVDHHVFISNRNKAILQLDSPESAQSMYSFLKQNPQNIGDHMLTCSLSPKIDLPEVQIEHDPELEKESPGLKNSPIDESEVQTATDSPSVKPNELEEESTPSIQTETLVQQEEPCEEEAEKATCDSDFAVETLELETQGEEVKEEIPLVASASVSIEQFTENAEECALNQQMFNSDLEKKGAEIINPKTALLPSDSVFAEERNLKGILEESPSEAEDFISGITQTMVEAVAEVEKNETVSEILPSTCIVTLVPGIPTGDEKTVDKKNISEKKGNMDEKEEKEFNTKETRMDLQIGTEKAEKNEGRMDAEKVEKMAAMKEKPAENTLFKAYPNKGVGQANKPDETSKTSILAVSDVSSSKPSIKAVIVSSPKAKATVSKTENQKSFPKSVPRDQINAEKKLSAKEFGLLKPTSARSGLAESSSKFKPTQSSLTRGGSGRISALQGKLSKLDYRDITKQSQETEARPSIMKRDDSNNKTLAEQNTKNPKSTTGRSSKSKEEPLFPFNLDEFVTVDEVIEEVNPSQAKQNPLKGKRKETLKNVPFSELNLKKKKGKTSTPRGVEGELSFVTLDEIGEEEDAAAHLAQALVTVDEVIDEEELNMEEMVKNSNSLFTLDELIDQDDCISHSEPKDVTVLSVAEEQDLLKQERLVTVDEIGEVEELPLNESADITFATLNTKGNEGDTVRDSIGFISSQVPEDPSTLVTVDEIQDDSSDLHLVTLDEVTEEDEDSLADFNNLKEELNFVTVDEVGEEEDGDNDLKVELAQSKNDHPTDKKGNRKKRAVDTKKTKLESLSQVGPVNENVMEEDLKTMIERHLTAKTPTKRVRIGKTLPSEKAVVTEPAKGEEAFQMSEVDEESGLKDSEPERKRKKTEDSSSGKSVASDVPEELDFLVPKAGFFCPICSLFYSGEKAMTNHCKSTRHKQNTEKFMAKQRKEKEQNEAEERSSR

SEQ ID NO: 27022 - protein, 187 aa, Artificial Sequence
  Synthetic polypeptide
GASPFSQHSFSLLLSYEEVLSAMIVSFLRPDQPCRIGKVAQTACMSACKHLATSLMQLLLEAEVRQLTLGALQQFNLDVRECEQFARSGPVPGFQEDTLQLAFIDLRQLLDLFIQWDWSTYLADYGQPNCKYLRVNPVTALTLLEKMKDTSRKNNMFAQFRKNERDKQKLIDTVAKQLRGLISSHHS

SEQ ID NO: 27023 - protein, 22 aa, Artificial Sequence
  Synthetic polypeptide
GLTSHAELERWPRQRVCQLASI

SEQ ID NO: 27024 - protein, 31 aa, Artificial Sequence
  Synthetic polypeptide
PAMQNWKGGPDSVYVSLQAFSHILDATFVGS

SEQ ID NO: 27025 - protein, 25 aa, Artificial Sequence
  Synthetic polypeptide
PQFPEWQLRPSSKETWITSSCNNPE

SEQ ID NO: 27026 - protein, 592 aa, Artificial Sequence
  Synthetic polypeptide
VAIKAQQQRNLDNIVLQQPRIGSKRKSKKDAYIIFDTEIESTSPKSEQDSGILDVEDEEDDEEVPGAQDLVDFSPVYRCLHIYSVLGARETFENYYRKQRRKQARLVLQPPSNMHETLDGYRKYFNQIVGFFVVEDHILHTTQGLVNRAYIDELWEMALSKTIAALRTHSSYCSDPNLVLDLKNLIVLFADTLQVYGFPVNQLFDMLLEIRDQYSETLLKKWAGIFRNILDSDNYSPIPVTSEEMYKKVVGQFPFQDIELEKQPFPKKFPFSEFVPKVYNQIKEFIYACLKFSEDLHLSSTEVDDMIRKSTNLLLTRTLSNSLQNVIKRKNIGLTELVQIIINTTHLEKSCKYLEEFITNITNVLPETVHTTKLYGTTTFKDARHAAEEEIYTNLNQKIDQFLQLADYDWMTGDLGNKASDYLVDLIAFLRSTFAVFTHLPGKVAQTACMSACKHLATSLMQLLLEAEVRQLTLGALQQFNLDVRECEQFARSGPVPGFQEDTLQLAFIDLRQLLDLFIQWDWSTYLADYGQPNCKYLRVNPVTALTLLEKMKDTSRKNNMFAQFRKNERDKQKLIDTVAKQLRGLISSHHS

SEQ ID NO: 27027 - protein, 462 aa, Artificial Sequence
  Synthetic polypeptide
VAIKAQQQRNLDNIVLQQPRIGSKRKSKKDAYIIFDTEIESTSPKSEQDSGILDVEDEEDDEEVPGAQDLVDFSPVYRCLHIYSVLGARETFENYYRKQRRKQARLVLQPPSNMHETLDGYRKYFNQIVGFFVVEDHILHTTQGLVNRAYIDELWEMALSKTIAALRTHSSYCSDPNLVLDLKNLIVLFADTLQVYGFPVNQLFDMLLEIRDQYSETLLKKWAGIFRNILDSDNYSPIPVTSEEMYKKVVGQFPFQDIELEKQPFPKKFPFSEFVPKVYNQIKEFIYACLKFSEDLHLSSTEVDDMIRKSTNLLLTRTLSNSLQNVIKRKNIGLTELVQIIINTTHLEKSCKYLEEFITNITNVLPETVHTTKLYGTTTFKDARHAAEEEIYTNLNQKIDQFLQLADYDWMTGDLGNKASDYLVDLIAFLRSTFAVFTHLPVSGSCLLCPLYIKRFPYNLVW

SEQ ID NO: 27028 - protein, 845 aa, Artificial Sequence
  Synthetic polypeptide
YSHYGKQYGGFSKIELSCDPAVSLQCIYWKEKKPVYQRDNCTSMLFCRAKNIAKLQNQPKCISMDEWIKKTRSVYDGEEHGRFMEKLETRIRNHDREIEKMCNFHYQGFVDSITELLKVRGEAQKLKNQVTDTNRKLQHEGKELVIAMEELKQCRLQQRNISATVDKLMLCLPVLEMYSKLRDQMKTKRHYPALKTLEHLEHTYLPQVSHYRFCKVMVDNIPKLREEIKDVSMSDLKDFLESIRKHSDKIGETAMKQAQQQRNLDNIVLQQPRIGSKRKSKKDAYIIFDTEIESTSPKSEQDSGILDVEDEEDDEEVPGAQDLVDFSPVYRCLHIYSVLGARETFENYYRKQRRKQARLVLQPPSNMHETLDGYRKYFNQIVGFFVVEDHILHTTQGLVNRAYIDELWEMALSKTIAALRTHSSYCSDPNLVLDLKNLIVLFADTLQVYGFPVNQLFDMLLEIRDQYSETLLKKWAGIFRNILDSDNYSPIPVTSEEMYKKVVGQFPFQDIELEKQPFPKKFPFSEFVPKVYNQIKEFIYACLKFSEDLHLSSTEVDDMIRKSTNLLLTRTLSNSLQNVIKRKNIGLTELVQIIINTTHLEKSCKYLEEFITNITNVLPETVHTTKLYGTTTFKDARHAAEEEIYTNLNQKIDQFLQLADYDWMTGDLGNKASDYLVDLIAFLRSTFAVFTHLPGKVAQTACMSACKHLATSLMQLLLEAEVRQLTLGALQQFNLDVRECEQFARSGPVPGFQEDTLQLAFIDLRQLLDLFIQWDWSTYLADYGQPNCKYLRVNPVTALTLLEKMKDTSRKNNMFAQFRKNERDKQKLIDTVAKQLRGLISSHHS

SEQ ID NO: 27029 - protein, 44 aa, Artificial Sequence
  Synthetic polypeptide
RKRGLFMMVKNMDVSWRSLKLVSVITTEKLRKCATFITRALWTL

SEQ ID NO: 27030 - protein, 9 aa, Artificial Sequence
  Synthetic polypeptide
MDKENEVCL

SEQ ID NO: 27031 - protein, 715 aa, Artificial Sequence
  Synthetic polypeptide
YSHYGKQYGGFSKIELSCDPAVSLQCIYWKEKKPVYQRDNCTSMLFCRAKNIAKLQNQPKCISMDEWIKKTRSVYDGEEHGRFMEKLETRIRNHDREIEKMCNFHYQGFVDSITELLKVRGEAQKLKNQVTDTNRKLQHEGKELVIAMEELKQCRLQQRNISATVDKLMLCLPVLEMYSKLRDQMKTKRHYPALKTLEHLEHTYLPQVSHYRFCKVMVDNIPKLREEIKDVSMSDLKDFLESIRKHSDKIGETAMKQAQQQRNLDNIVLQQPRIGSKRKSKKDAYIIFDTEIESTSPKSEQDSGILDVEDEEDDEEVPGAQDLVDFSPVYRCLHIYSVLGARETFENYYRKQRRKQARLVLQPPSNMHETLDGYRKYFNQIVGFFVVEDHILHTTQGLVNRAYIDELWEMALSKTIAALRTHSSYCSDPNLVLDLKNLIVLFADTLQVYGFPVNQLFDMLLEIRDQYSETLLKKWAGIFRNILDSDNYSPIPVTSEEMYKKVVGQFPFQDIELEKQPFPKKFPFSEFVPKVYNQIKEFIYACLKFSEDLHLSSTEVDDMIRKSTNLLLTRTLSNSLQNVIKRKNIGLTELVQIIINTTHLEKSCKYLEEFITNITNVLPETVHTTKLYGTTTFKDARHAAEEEIYTNLNQKIDQFLQLADYDWMTGDLGNKASDYLVDLIAFLRSTFAVFTHLPVSGSCLLCPLYIKRFPYNLVW

SEQ ID NO: 27032 - protein, 3 aa, Artificial Sequence
  Synthetic polypeptide
MLN

SEQ ID NO: 27033 - protein, 54 aa, Artificial Sequence
  Synthetic polypeptide
NVISMRHVHPFVHCPAQHLAQFLPHNRCSIETSQLEPEIAQATSSRTVVYNKGL

SEQ ID NO: 27034 - protein, 15 aa, Artificial Sequence
  Synthetic polypeptide
HSSCHTIDAQLKHPN

SEQ ID NO: 27035 - protein, 35 aa, Artificial Sequence
  Synthetic polypeptide
NVISMRHVHPFVHCPAQHLAQFLPHNRCSIETSQL

SEQ ID NO: 27036 - protein, 47 aa, Artificial Sequence
  Synthetic polypeptide
MLRRLSCRHAPGCSSLCKASCAWQPSAWPCRWPSASSRKCQRLKHPN

SEQ ID NO: 27037 - protein, 69 aa, Artificial Sequence
  Synthetic polypeptide
NVISMRHVHPFVHCPAQHLAQFLPHNRCSDGSPAGTPPAAPPCAKPRVPGSLRPGPAAGHQPLPANVRD

SEQ ID NO: 27038 - protein, 74 aa, Artificial Sequence
  Synthetic polypeptide
HSSCHTIDAQTALLQARPRLLLPVQSLVCLAAFGLALPLAISLFPQMSEIETSQLEPEIAQATSSRTVVYNKGL

SEQ ID NO: 27039 - protein, 55 aa, Artificial Sequence
  Synthetic polypeptide
HSSCHTIDAQTALLQARPRLLLPVQSLVCLAAFGLALPLAISLFPQMSEIETSQL

SEQ ID NO: 27040 - protein, 60 aa, Artificial Sequence
  Synthetic polypeptide
DQEFKTSLANMGKGLFATQLIRKGETIFVERPLVAAQFLWNALYRYREWCLAHSSCSVGL

SEQ ID NO: 27041 - protein, 31 aa, Artificial Sequence
  Synthetic polypeptide
SLEIRSSRPVWPTWERGCLPHSSSGRGRPSS

SEQ ID NO: 27042 - protein, 66 aa, Artificial Sequence
  Synthetic polypeptide
FQRFRRPRWADHLRSGVQDQSGQHGKGAVCHTAHPEGGDHLRRTAPGGCTVSLECTLSLPRMVPGT

SEQ ID NO: 27043 - protein, 397 aa, Artificial Sequence
  Synthetic polypeptide
DQEFKTSLANMGKGLFATQLIRKGETIFVERPLVAAQFLWNALYRYRACDHCLRALEKAEENAQRLTGKPGQVLPHPELCTVRKDLHQNCPHCQVMYCSAECRLAATEQYHQVLCPGPSQDDPLHPLNKLQEAWRSIHYPPETASIMLMARMVATVKQAKDKDRWIRLFSQFCNKTANEEEEIVHKLLGDKFKGQLELLRRLFTEALYEEAVSQWFTPDGFRSLFALVGTNGQGIGTSSLSQWVHACDTLELKPQDREQLDAFIDQLYKDIEAATGEFLNCEGSGLFVLQSCCNHSCVPNAETSFPENNFLLHVTALEDIKPGEEICISYLDCCQRERSRHSRHKILRENYLFVCSCPKCLAEADEPNVTSEEEEEEEEEEEGEPEDAELGDEMTDV

SEQ ID NO: 27044 - protein, 62 aa, Artificial Sequence
  Synthetic polypeptide
FQRFRRPRWADHLRSGVQDQSGQHGKGAVCHTAHPEGGDHLRRTAPGGCTVSLECTLSLPSL

SEQ ID NO: 27045 - protein, 49 aa, Artificial Sequence
  Synthetic polypeptide
DQEFKTSLANMGKGLFATQLIRKGETIFVERPLVAAQFLWNALYRYRGH

SEQ ID NO: 27046 - protein, 63 aa, Artificial Sequence
  Synthetic polypeptide
FQRFRRPRWADHLRSGVQDQSGQHGKGAVCHTAHPEGGDHLRRTAPGGCTVSLECTLSLPRAL

SEQ ID NO: 27047 - protein, 144 aa, Artificial Sequence
  Synthetic polypeptide
DQEFKTSLANMGKGLFATQLIRKGETIFVERPLVAAQFLWNALYRYRACDHCLRALEKAEENAQRLTGKPGQVLPHPELCTVRKDLHQNCPHCQVMYCSAECRLAATEQYHQVLCPGPSQDDPLHPLNKLQEAWRSIHYPPETA

SEQ ID NO: 27048 - protein, 7 aa, Artificial Sequence
  Synthetic polypeptide
MPRILSW

SEQ ID NO: 27049 - protein, 28 aa, Artificial Sequence
  Synthetic polypeptide
GLWSYTECLGFSAGSWCCIQEDFLLRWV

SEQ ID NO: 27050 - protein, 359 aa, Artificial Sequence
  Synthetic polypeptide
IGRLFIEKLPKHRDYKSAVIPEKKDTVKKLKEIAFPKAEELKAELLKRYTKEYTEYNEEKKKEAEELARNMAIQQELEKEKQRVAQQKQQQLEQEQFHAFEEMIRNQELEKERLKIVQEFGKVDPGLGGPLVPDLEKPSLDVFPTLTVSSIQPSDCHTTVRPAKPPVVDRSLKPGALSNSESIPTIDGLRHVVVPGRLCPQFLQLASANTARGVETCGILCGKLMRNEFTITHVLIPKQSAGSDYCNTENEEELFLIQDQQGLITLGWIHTHPTQTAFLSSVDLHTHCSYQMMLPESVAIVCSPKFQETGFFKLTDHGLEEISSCRQKGFHPHSKDPPLFCSCSHVTVVDRAVTITDLR

SEQ ID NO: 27051 - protein, 25 aa, Artificial Sequence
  Synthetic polypeptide
AGSLLRNYQNIEITNLLSFLKRKTQ

SEQ ID NO: 27052 - protein, 17 aa, Artificial Sequence
  Synthetic polypeptide
AAGMDSGHLGLNRQALY

SEQ ID NO: 27053 - protein, 72 aa, Artificial Sequence
  Synthetic polypeptide
IGRLFIEKLPKHRDYKSAVIPEKKDTVKKLKEIAFPKAEELKAELLKRYTKEYTEYNEEKKKEAEELARNMA

SEQ ID NO: 27054 - protein, 253 aa, Artificial Sequence
  Synthetic polypeptide
IGRLFIEKLPKHRDYKSAVIPEKKDTVKKLKEIAFPKAEELKAELLKRYTKEYTEYNEEKKKEAEELARNMAIQQELEKEKQRVAQQKQQQLEQEQFHAFEEMIRNQELEKERLKIVQEFGKVDPGLGGPLVPDLEKPSLDVFPTLTVSSIQPSDCHTTVRPAKPPVVDRSLKPGALSNSESIPTIDGLRHVVVPGRLCPQFLQLASANTARGVETCGILCGKLMRNEFTITHVLIPKQSAGSDYCNTENEEE

SEQ ID NO: 27055 - protein, 98 aa, Artificial Sequence
  Synthetic polypeptide
IGRLFIEKLPKHRDYKSAVIPEKKDTVKKLKEIAFPKAEELKAELLKRYTKEYTEYNEEKKKEAEELARNMAIQQELEKEKQRVAQQKQQQLEQEQFH

SEQ ID NO: 27056 - protein, 144 aa, Artificial Sequence
  Synthetic polypeptide
IGRLFIEKLPKHRDYKSAVIPEKKDTVKKLKEIAFPKAEELKAELLKRYTKEYTEYNEEKKKEAEELARNMAIQQELEKEKQRVAQQKQQQLEQEQFHAFEEMIRNQELEKERLKIVQEFGKFPQSMDCAMWWCLGGCAHSFSS

SEQ ID NO: 27057 - protein, 106 aa, Artificial Sequence
  Synthetic polypeptide
GRAWWLMPVILEFWEVELPLHHRMFATQTEGELRVTQILKEKFPRATAIKVTDISGGCGAMYEIKIESEEFKEKRTVQQHQMVNQALKEEIKEMHGLRIFTSVPKR

SEQ ID NO: 27058 - protein, 23 aa, Artificial Sequence
  Synthetic polypeptide
NFGRLSFHFTIGCLPLRLRGSSE

SEQ ID NO: 27059 - protein, 100 aa, Artificial Sequence
  Synthetic polypeptide
GRAWWLMPVILEFWEVELPLHHRMFATQTEGELRVTQILKEKFPRATAIKVTDISGTKRRNQRDAWIADIYLCPQTLTTPWLHRCCCLRPWMNFTDIILP

SEQ ID NO: 27060 - protein, 36 aa, Artificial Sequence
  Synthetic polypeptide
CKLFNLFVPQFPHLQNRNKSRTNVKIKYACKMLRTK

SEQ ID NO: 27061 - protein, 327 aa, Artificial Sequence
  Synthetic polypeptide
RLNMHVKCSERNEAVVISGRKLAQQIKQEVRQEVEEWVASGNKRPHLSVILVGENPASHSYVLNKTRAAAVVGINSETIMKPASISEEELLNLINKLNNDDNVDGLLVQLPLPEHIDERRICNAVSPDKDVDGFHVINVGRMCLDQYSMLPATPWGVWEIIKRTGIPTLGKNVVVAGRSKNVGMPIAMLLHTDGAHERPGGDATVTISHRYTPKEQLKKHTILADIVISAAGIPNLITADMIKEGAAVIDVGINRVHDPVTAKPKLVGDVDFEGVRQKAGYITPVPGGVGPMTVAMLMKNTIIAAKKVLRLEEREVLKSKELGVATN

SEQ ID NO: 27062 - protein, 27 aa, Artificial Sequence
  Synthetic polypeptide
NAQNEMKLLSFLEGNWPSRSSRKCGRR

SEQ ID NO: 27063 - protein, 199 aa, Artificial Sequence
  Synthetic polypeptide
RLNMHVKCSERNEAVVISGRKLAQQIKQEVRQEVEEWVASGNKRPHLSVILVGENPASHSYVLNKTRAAAVVGDATVTISHRYTPKEQLKKHTILADIVISAAGIPNLITADMIKEGAAVIDVGINRVHDPVTAKPKLVGDVDFEGVRQKAGYITPVPGGVGPMTVAMLMKNTIIAAKKVLRLEEREVLKSKELGVATN

SEQ ID NO: 27064 - protein, 244 aa, Artificial Sequence
  Synthetic polypeptide
RLNMHVKCSERNEAVVISGRKLAQQIKQEVRQEVEEWVASGNKRPHLSVILVGENPASHSYVLNKTRAAAVVEHIDERRICNAVSPDKDVDGFHVINVGRMCLDQYSMLPATPWGVWEIIKRTGIPTLGKNVVVAGRSKNVGMPIAMLLHTDGAHERPGGDATVTISHRYTPKEQLKKHTILADIVISAAGVRQKAGYITPVPGGVGPMTVAMLMKNTIIAAKKVLRLEEREVLKSKELGVATN

SEQ ID NO: 27065 - protein, 58 aa, Artificial Sequence
  Synthetic polypeptide
LELVVLVTTSWLTPHSPWQQCKMDSAHMTSPLPVMRRTLPGCPFMVACVAVWQLSLSA

SEQ ID NO: 27066 - protein, 85 aa, Artificial Sequence
  Synthetic polypeptide
IWVQIQTPPLSTYKLWASFLTSLSLKLPHLVEECHQPHRAVIGIQWDKTYKAYVLTLSWSSWSSLPPLGSHHTHPGSSARWIPHT

SEQ ID NO: 27067 - protein, 317 aa, Artificial Sequence
  Synthetic polypeptide
HLAGARGPRYHLLAHTTLTLAAVQDGFRTHDLTLASHEENPAWLPLYGSVCCRLAAQPLCMTQPTASGTLRVQQAGEMQNWAQVHGVLKGTNLFCYRQPEDADTGEEPLLTIAVNKETRVRAGELDQALGRPFTLSISNQYGDDEVTHTLQTESREALQSWMEALWQLFFDMSQWKQCCDEIMKIETPAPRKPPQALAKQGSLYHEMAIEPLDDIAAVTDILTQREGARLETPPPWLAMFTDQPALPNPCSPASVAPAPDWTHPLPWGRPRTFSLDAVPPDHSPRARSVAPLPPQRSPRTRGLCSKGQPRTWLQSPV

SEQ ID NO: 27068 - protein, 96 aa, Artificial Sequence
  Synthetic polypeptide
GQAWCLTPAIPALWEAKAGGSPEVGSLRPAWPTWCNPVSTKNTKISWVWWLTPVIPATPEARQKNCLNLGGGVCSEPRSCHFTPAWATETRSCRGS

SEQ ID NO: 27069 - protein, 31 aa, Artificial Sequence
  Synthetic polypeptide
TWEAEFAVSRDHATSLQPGQQRHGVAEEARP

SEQ ID NO: 27070 - protein, 539 aa, Artificial Sequence
  Synthetic polypeptide
AEIMPLHSSLGNRDTELQRKLDHEIRMREGACKLLAACSQREQALEATKSLLVCNSRILSYMGELQRRKEAQVLGKTSRRPSDSGPPAERSPCRGRVCISDLRIPLMWKDTEYFKNKGDLHRWAVFLLLQLGEHIQDTEMILVDRTLTDISFQSNVLFAEAGPDFELRLELYGACVEEEGALTGGPKRLATKLSSSLGRSSGRRVRASLDSAGGSGSSPILLPTPVVGGPRYHLLAHTTLTLAAVQDGFRTHDLTLASHEENPAWLPLYGSVCCRLAAQPLCMTQPTASGTLRVQQAGEMQNWAQVHGVLKGTNLFCYRQPEDADTGEEPLLTIAVNKETRVRAGELDQALGRPFTLSISNQYGDDEVTHTLQTESREALQSWMEALWQLFFDMSQWKQCCDEIMKIETPAPRKPPQALAKQGSLYHEMAIEPLDDIAAVTDILTQREGARLETPPPWLAMFTDQPALPNPCSPASVAPAPDWTHPLPWGRPRTFSLDAVPPDHSPRARSVAPLPPQRSPRTRGLCSKGQPRTWLQSPV

SEQ ID NO: 27071 - protein, 13 aa, Artificial Sequence
  Synthetic polypeptide
SSTLGDRGRRIMR

SEQ ID NO: 27072 - protein, 695 aa, Artificial Sequence
  Synthetic polypeptide
PRIGFMVLSKLLSFSKPQFLYIKQCSGSSVLRMITYVHTMAEHLAHSRIWLDNLSCSGTEQSVTECASRGWGNSDCTHDEDAGVICKDQRLPGFSDSNVIEVEHHLQVEEVRIRPAVGWGRRPLPVTEGLVEVRLPDGWSQVCDKGWSAHNSHVVCGMLGFPSEKRVNAAFYRLLAQRQQHSFGLHGVACVGTEAHLSLCSLEFYRANDTARCPGGGPAVVSCVPGPVYAASSGQKKQQQSKPQGEARVRLKGGAHPGEGRVEVLKASTWGTVCDRKWDLHAASVVCRELGFGSAREALSGARMGQGMGAIHLSEVRCSGQELSLWKCPHKNITAEDCSHSQDAGVRCNLPYTGAETRIRLSGGRSQHEGRVEVQIGGPGPLRWGLICGDDWGTLEAMVACRQLGLGYANHGLQETWYWDSGNITEVVMSGVRCTGTELSLDQCAHHGTHITCKRTGTRFTAGVICSETASDLLLHSALVQETAYIEDRPLHMLYCAAEENCLASSARSANWPYGHRRLLRFSSQIHNLGRADFRPKAGRHSWVWHECHGHYHSMDIFTHYDILTPNGTKVAEGHKASFCLEDTECQEDVSKRYECANFGEQGITVGCWDLYRHDIDCQWIDITDVKPGNYILQVVINPNFEVAESDFTNNAMKCNCKYDGHRIWVHNCHIGDAFSEEANRRFERYPGQTSNQII

SEQ ID NO: 27073 - protein, 20 aa, Artificial Sequence
  Synthetic polypeptide
SHMCTPWQSTWHTAASGWTT

SEQ ID NO: 27074 - protein, 48 aa, Artificial Sequence
  Synthetic polypeptide
TPVSLYKTVFWQLCSKNDHICAHHGRAPGTQPHLAGQLELQWDRAECD

SEQ ID NO: 27075 - protein, 413 aa, Artificial Sequence
  Synthetic polypeptide
PRIGFMVLSKLLSFSKPQFLYIKQCSGSSVLRMITYVHTMAEHLAHSRIWLDNLSCSGTEQSVTECASRGWGNSDCTHDEDAGVICKDQRLPGFSDSNVIEVEHHLQVEEVRIRPAVGWGRRPLPVTEGLVEVRLPDGWSQVCDKGWSAHNSHVVCGMLGFPSEKRVNAAFYRLLAQRQQHSFGLHGVACVGTEAHLSLCSLEFYRANDTARCPGGGPAVVSCVPGPVYAASSGQKKQQQSKPQGEARVRLKGGAHPGEGRVEVLKASTWGTVCDRKWDLHAASVVCRELGFGSAREALSGARMGQDVSKRYECANFGEQGITVGCWDLYRHDIDCQWIDITDVKPGNYILQVVINPNFEVAESDFTNNAMKCNCKYDGHRIWVHNCHIGDAFSEEANRRFERYPGQTSNQII

SEQ ID NO: 27076 - protein, 550 aa, Artificial Sequence
  Synthetic polypeptide
PRIGFMVLSKLLSFSKPQFLYIKQCSGSSVLRMITYVHTMAEHLAHSRIWLDNLSCSGTEQSVTECASRGWGNSDCTHDEDAGVICKDQRLPGFSDSNVIEARVRLKGGAHPGEGRVEVLKASTWGTVCDRKWDLHAASVVCRELGFGSAREALSGARMGQGMGAIHLSEVRCSGQELSLWKCPHKNITAEDCSHSQDAGVRCNLPYTGAETRIRLSGGRSQHEGRVEVQIGGPGPLRWGLICGDDWGTLEAMVACRQLGLGYANHGLQETWYWDSGNITEVVMSGVRCTGTELSLDQCAHHGTHITCKRTGTRFTAGVICSETASDLLLHSALVQETAYIEDRPLHMLYCAAEENCLASSARSANWPYGHRRLLRFSSQIHNLGRADFRPKAGRHSWVWHECHGHYHSMDIFTHYDILTPNGTKVAEGHKASFCLEDTECQEDVSKRYECANFGEQGITVGCWDLYRHDIDCQWIDITDVKPGNYILQVVINPNFEVAESDFTNNAMKCNCKYDGHRIWVHNCHIGDAFSEEANRRFERYPGQTSNQII

SEQ ID NO: 27077 - protein, 639 aa, Artificial Sequence
  Synthetic polypeptide
PRIGFMVLSKLLSFSKPQFLYIKQCSGSSVLRMITYVHTMAEHLAHSRIWLDNLSCSGTEQSVTECASRGWGNSDCTHDEDAGVICKDQRLPGFSDSNVIEVEHHLQVEEVRIRPAVGWGRRPLPVTEGLVEVRLPDGWSQVCDKGWSAHNSHVVCGMLGFPSEKRVNAAFYRLLAQRQQHSFGLHGVACVGTEAHLSLCSLEFYRANDTARCPGGGPAVVSCVPGPVYAASSGQKKQQQSKPQGEARVRLKGGAHPGEGRVEVLKASTWGTVCDRKWDLHAASVVCRELGFGSAREALSGARMGQGMGAIHLSEVRCSGQELSLWKCPHKNITAEDCSHSQDAGVRCNLPYTGAETRETWYWDSGNITEVVMSGVRCTGTELSLDQCAHHGTHITCKRTGTRFTAGVICSETASDLLLHSALVQETAYIEDRPLHMLYCAAEENCLASSARSANWPYGHRRLLRFSSQIHNLGRADFRPKAGRHSWVWHECHGHYHSMDIFTHYDILTPNGTKVAEGHKASFCLEDTECQEDVSKRYECANFGEQGITVGCWDLYRHDIDCQWIDITDVKPGNYILQVVINPNFEVAESDFTNNAMKCNCKYDGHRIWVHNCHIGDAFSEEANRRFERYPGQTSNQII

SEQ ID NO: 27078 - protein, 528 aa, Artificial Sequence
  Synthetic polypeptide
PRIGFMVLSKLLSFSKPQFLYIKQCSGSSVLRMITYVHTMAEHLAHSRIWLDNLSCSGTEQSVTECASRGWGNSDCTHDEDAGVICKDQRLPGFSDSNVIEARVRLKGGAHPGEGRVEVLKASTWGTVCDRKWDLHAASVVCRELGFGSAREALSGARMGQGMGAIHLSEVRCSGQELSLWKCPHKNITAEDCSHSQDAGVRCNLPYTGAETRIRLSGGRSQHEGRVEVQIGGPGPLRWGLICGDDWGTLEAMVACRQLGLGYANHGLQETWYWDSGNITEVVMSGVRCTGTELSLDQCAHHGTHITCKRTGTRFTAGVICSETASDLLLHSALVQETAYIEDRPLHMLYCAAEENCLASSARSANWPYGHRRLLRFSSQIHNLGRADFRPKAGRHSWVWHECHGHYHSMDIFTHYDILTPNGTKVAEGHKASFCLEDTECQEDVSKRYECANFGEQGITVGCWDLYRHDIDCQWIDITDVKPGNYILQVVINPNFEVAESDFTNNAMKCNCKYDGHRIWVHNCHIGI

SEQ ID NO: 27079 - protein, 245 aa, Artificial Sequence
  Synthetic polypeptide
PRIGFMVLSKLLSFSKPQFLYIKQCSGSSVLRMITYVHTMAEHLAHSRIWLDNLSCSGTEQSVTECASRGWGNSDCTHDEDAGVICKDQRLPGFSDSNVIEVEHHLQVEEVRIRPAVGWGRRPLPVTEGLVEVRLPDGWSQVCDKGWSAHNSHVVCGMLGFPSEKRVNAAFYRLLAQRQQHSFGLHGVACVGTEAHLSLCSLEFYRANDTARCPGGGPAVVSCVPGPVYAASSGQKKQQQSKPQG

SEQ ID NO: 27080 - protein, 239 aa, Artificial Sequence
  Synthetic polypeptide
ISKKRKFVADGIFKAELNEFLTRELAEDGYSGVEVRVTPTRTEIIILATRTQNVLGEKGRRIRELTAVVQKRFGFPEGSVELYAEKVATRGLCAIAQAESLRYKLLGGLAVRRACYGVLRFIMESGAKGCEVVVSGKLRGQRAKSMKFVDGLMIHSGDPVNYYVDTAVRHVLLRQGVLGIKVKIMLPWDPTGKIGPKKPLPDHVSIVEPKDEILPTTPISEQKGGKPEPPAMPQPVPTA

SEQ ID NO: 27081 - protein, 44 aa, Artificial Sequence
  Synthetic polypeptide
EGEERDKEIESLLKEIIAENFPNWGKCKYPRRGNLSLMASSKLN

SEQ ID NO: 27082 - protein, 19 aa, Artificial Sequence
  Synthetic polypeptide
QKTFQIGANVNIQEEEICR

SEQ ID NO: 27083 - protein, 87 aa, Artificial Sequence
  Synthetic polypeptide
ISKKRKFVADGIFKAELNEFLTRELAEDGYSGVEVRVTPTRTEIIILATRTQNVLGEKGRRIRELTAVVQKRFGFPEGSVEHCGTQR

SEQ ID NO: 27084 - protein, 113 aa, Artificial Sequence
  Synthetic polypeptide
ISKKRKFVADGIFKAELNEFLTRELAEDGYSGVEVRVTPTRTEIIILATRTQNVLGEKGRRIRELTAVVQKRFGFPEGSVELYAEKVATRGLCAIAQAESLRYKLLGGLAVRR

SEQ ID NO: 27085 - protein, 40 aa, Artificial Sequence
  Synthetic polypeptide
ISKKRKFVADGIFKAELNEFLTRELAEDGYSGVENTECSW

SEQ ID NO: 27086 - protein, 255 aa, Artificial Sequence
  Synthetic polypeptide
ISKKRKFVADGIFKAELNEFLTRELAEDGYSGVEVRVTPTRTEIIILATRTQNVLGEKGRRIRELTAVVQKRFGFPEGSVELKIMVMVTGYPLLPLKLYAEKVATRGLCAIAQAESLRYKLLGGLAVRRACYGVLRFIMESGAKGCEVVVSGKLRGQRAKSMKFVDGLMIHSGDPVNYYVDTAVRHVLLRQGVLGIKVKIMLPWDPTGKIGPKKPLPDHVSIVEPKDEILPTTPISEQKGGKPEPPAMPQPVPTA

SEQ ID NO: 27087 - protein, 111 aa, Artificial Sequence
  Synthetic polypeptide
ISKKRKFVADGIFKAELNEFLTRELAEDGYSGVEVRVTPTRTEIIILATRTQNVLGEKGRRIRELTAVVQKRFGFPEGSVEGLLWCAAVHHGEWGQRLRGCGVWETPRTEG

SEQ ID NO: 27088 - protein, 154 aa, Artificial Sequence
  Synthetic polypeptide
ISKKRKFVADGIFKAELNEFLTRELAEDGYSGVEVRVTPTRTEIIILATRTQNVLGEKGRRIRELTAVVQKRFGFPEGSVELYAEKVATRGVLGIKVKIMLPWDPTGKIGPKKPLPDHVSIVEPKDEILPTTPISEQKGGKPEPPAMPQPVPTA

SEQ ID NO: 27089 - protein, 227 aa, Artificial Sequence
  Synthetic polypeptide
ISKKRKFVADGIFKAELNEFLTRELAEDGYSGVEVRVTPTRTEIIILATRTQNVLGEKGRRIRELTAVVQKRFGFPEGSLCAIAQAESLRYKLLGGLAVRRACYGVLRFIMESGAKGCEVVVSGKLRGQRAKSMKFVDGLMIHSGDPVNYYVDTAVRHVLLRQGVLGIKVKIMLPWDPTGKIGPKKPLPDHVSIVEPKDEILPTTPISEQKGGKPEPPAMPQPVPTA

SEQ ID NO: 27090 - protein, 124 aa, Artificial Sequence
  Synthetic polypeptide
ISKKRKFVADGIFKAELNEFLTRELAEDGYSGVEVRVTPTRTEIIILATRTQNVLGEKGRRIRELTAVVQKRSVCHCPGRVSALQTPRRACCAEGLLWCAAVHHGEWGQRLRGCGVWETPRTEG

SEQ ID NO: 27091 - protein, 134 aa, Artificial Sequence
  Synthetic polypeptide
ISKKRKFVADGIFKAELNEFLTRELAEDGYSGVEVRVTPTRTEIIILATRTQNVLGEKGRRIRELTAVVQKRFGFPEGSVELYAEKVATRGLCAIAQAESLRYKLLGGLAVRRVGPKAARLWCLGNSEDRGLNP

SEQ ID NO: 27092 - protein, 176 aa, Artificial Sequence
  Synthetic polypeptide
ISKKRKFVADGIFKAELNEFLTRELAEDGYSGVEVRVTPTRTEIIILATRACYGVLRFIMESGAKGCEVVVSGKLRGQRAKSMKFVDGLMIHSGDPVNYYVDTAVRHVLLRQGVLGIKVKIMLPWDPTGKIGPKKPLPDHVSIVEPKDEILPTTPISEQKGGKPEPPAMPQPVPTA

SEQ ID NO: 27093 - protein, 38 aa, Artificial Sequence
  Synthetic polypeptide
ISKKRKFVADGIFKAELNEFLTRELAEDGYSGVERRPC

SEQ ID NO: 27094 - protein, 37 aa, Artificial Sequence
  Synthetic polypeptide
ARERVLTRNRICQCLDLGLPSYQNYATPHEALAILQL

SEQ ID NO: 27095 - protein, 103 aa, Artificial Sequence
  Synthetic polypeptide
GTATHEPGRESSPETESVSVWILDFPATRTMPHHMKPLPYYSYDQPVIGYCQAHQPLHVTKGYETVSPEQDESPGLELGRDHSFIATIARSAAPAIYLERIAN

SEQ ID NO: 27096 - protein, 46 aa, Artificial Sequence
  Synthetic polypeptide
AQGSPFSPSATEGQPPMSQGESPHQKQNLSVSGSWTSQLPELCHTT

SEQ ID NO: 27097 - protein, 67 aa, Artificial Sequence
  Synthetic polypeptide
GLPSHVELKPFRPHLNQPASMQLPLKSSRYSSRKMKVLIYKLLNFRNLILTFLVNNWKNITNSTRTQ

SEQ ID NO: 27098 - protein, 1958 aa, Artificial Sequence
  Synthetic polypeptide
SLACCHLRRSFAPPLPSAMIVRPPQPCGTETIQAAFESARIYAATFEKFQIFFKENESLDLQALKLQEPDINFFSEQLEKYHKQHKDAVALRPTRNVGLLLIDTRLLREKLIPSPLRCLEVLNFMLPRQSKKKVDAIIFEAQDAEYKLEFVPTTTTEYVHSLLFLDEIQERIESLEDEGNIVTQMYKLMEQYQVPTPPEDFAVFATMKPSIVAVRNAIDKSVGDRESSIKQFCVHLGSDLEELNNEVNEVKLQAQDPQILDISADQDKIRLILNNLQSVLADLQKRAFQYKSYQKNFKVEVSKFEALEEVSAELKLKQLLWDSFSEWDKLQQEWLKSKFDCLDPEVLNGQVSKYAKFVTQLEKGLPPNSVVPQLKYKVEKMKEKLPVIIDLRNPTLKARHWAAIEQTVDATLVDAEIPLTLERLSQLHVFDFGQEIQDISGQASGEAALEAILKKVEDSWKTTEFVILPHRDSKDVFILGGTDDIQVLLDDSTINVATLASSRYLGPLKTRVDEWQKQLALFNQTLEEWLTCQRNWLYLESIFNAPDIQRQLPAEAKMFLQVDKSWKEIMRKVNRLPNALRAATQPGLLETFQNNNALLDQIQKCLEAYLESKRVIFPRFYFLSNDELLEILAQTRNPQAVQPHLRKCFDSISKLEFALMPPAEGKIPGIDGEPEKVYTNDILAMLSPEGERVSLGKGLKARGNVEEWLGKVEEAMFTSLRRLCKAAIADYQGKLRTDWVVAGHPSQVILTVSQIMWCRDLTECLETEHSNHIQALKNFEKVNFERLNALAAIVQGSLPKLHRNILTALITIDVHARDIVTELVQSKVETVESFDWQRQLRYYWDIDLDNCVARMALSQYTYGYEYLGACPRLVITPLTDRCYLCLMGALQLDLGGAPAGPAGTGKTETTKDLAKALAIQCVVFNCSDGLDYKMMGRFFSGLAQSGAWCCFDEFNRIDIEVLSVIAQQLITIRNAKAAKLSRFMFEGREIKLVMTCAAFITMNPGYAGRTELPDNLKALFRPFAMMVPNYALIAEVILYSEGFESSKILARKMTQMYKLCSEQLSQQDHYDFGMRAVKSVLVMAGSLKRENPDLNEDVVLIRALQDSNLPKFLTDDALLFSGIISDLFPGVQIPEHDYGILQSTIVDVMNRQNLQPEMCMVRKVIQFYETMLVRHGVMLVGPTGGGKTTVYRILAETLGNLQKLGIENSFYQAVKTYVLNPKSITMGELYGEVNNLTLEWKDGLMALSVRAAVNDTSEDHKWIISDGPVDALWIENMNTVLDDNKMLCLANSERIKLTPQIHMLFEVQDLRVASPATVSRCGMVFVDPEELKWMPYVKTWMKGISKKLTEETQEYILNLFQRYVDEGLHFINKKCSQAIPQVDISKVTTLCCLLESLILGKDGVNLAMEQTKLNTILCQTFVFCYLWSLGGNLTENYYDSFDTFIRTQFDDNPDARLPNSGDLWSIHMDFDTKRLDPWERIIPTFKYNRDVPFFEMLVPTTDTVRYGYLMEKLLAVKHSVLFTGITGVGKSVIAKGLLNKIQESAGYVPVYLNFSAQTSSARTQEIIESKLERKRKNILGAPGNKRIVIFVDDLNMPRLDRYGSQPPIELLRQYQDFGGFYDRNKLFWKEIQDVTIISACAPPGGGRNPVTPRFIRHFSMLCLPMPSEHSLKQIFQAILNGFLSDFPPAVKQTASSIVEASVEIYNKMSVDLLPTPAKSHYVFNLRDLSKCVQDKHFGIAIDLEYFLNKPIIFGDFIKFGADKADRIYDDMPDIEKTANVLQDYLDDYNLTNPKEVKLVFFQDAIEHVSRIARMIRQERGNALLVGVGGTGKQSLTRLAAHICGYKCLQIELSRGYNYDSFHEDLRKLYKMAGVEDKNMVFLFTDTQIVVEEFLEDINNILNSGEVPNLFEKDELEQVLAATRPRAKEVGISEGNRDEVGCARVVMWLYHKNVSSPFI

SEQ ID NO: 27099 - protein, 3586 aa, Artificial Sequence
  Synthetic polypeptide
SLACCHLRRSFAPPLPSAMIVRPPQPCGTETIQAAFESARIYAATFEKFQIFFKENESLDLQALKLQEPDINFFSEQLEKYHKQHKDAVALRPTRNVGLLLIDTRLLREKLIPSPLRCLEVLNFMLPRQSKKKVDAIIFEAQDAEYKLEFVPTTTTEYVHSLLFLDEIQERIESLEDEGNIVTQMYKLMEQYQVPTPPEDFAVFATMKPSIVAVRNAIDKSVGDRESSIKQFCVHLGSDLEELNNEVNEVKLQAQDPQILDISADQDKIRLILNNLQSVLADLQKRAFQYKSYQKNFKVEVSKFEALEEVSAELKLKQLLWDSFSEWDKLQQEWLKSKFDCLDPEVLNGQVSKYAKFVTQLEKGLPPNSVVPQLKYKVEKMKEKLPVIIDLRNPTLKARHWAAIEQTVDATLVDAEIPLTLERLSQLHVFDFGQEIQDISGQASGEAALEAILKKVEDSWKTTEFVILPHRDSKDVFILGGTDDIQVLLDDSTINVATLASSRYLGPLKTRVDEWQKQLALFNQTLEEWLTCQRNWLYLESIFNAPDIQRQLPAEAKMFLQVDKSWKEIMRKVNRLPNALRAATQPGLLETFQNNNALLDQIQKCLEAYLESKRVIFPRFYFLSNDELLEILAQTRNPQAVQPHLRKCFDSISKLEFALMPPAEGKIPGIDGEPEKVYTNDILAMLSPEGERVSLGKGLKARGNVEEWLGKVEEAMFTSLRRLCKAAIADYQGKLRTDWVVAGHPSQVILTVSQIMWCRDLTECLETEHSNHIQALKNFEKVNFERLNALAAIVQGSLPKLHRNILTALITIDVHARDIVTELVQSKVETVESFDWQRQLRYYWDIDLDNCVARMALSQYTYGYEYLGACPRLVITPLTDRCYLCLMGALQLDLGGAPAGPAGTGKTETTKDLAKALAIQCVVFNCSDGLDYKMMGRFFSGLAQSGAWCCFDEFNRIDIEVLSVIAQQLITIRNAKAAKLSRFMFEGREIKLVMTCAAFITMNPGYAGRTELPDNLKALFRPFAMMVPNYALIAEVILYSEGFESSKILARKMTQMYKLCSEQLSQQDHYDFGMRAVKSVLVMAGSLKRENPDLNEDVVLIRALQDSNLPKFLTDDALLFSGIISDLFPGVQIPEHDYGILQSTIVDVMNRQNLQPEMCMVRKVIQFYETMLVRHGVMLVGPTGGGKTTVYRILAETLGNLQKLGIENSFYQAVKTYVLNPKSITMGELYGEVNNLTLEWKDGLMALSVRAAVNDTSEDHKWIISDGPVDALWIENMNTVLDDNKMLCLANSERIKLTPQIHMLFEVQDLRVASPATVSRCGMVFVDPEELKWMPYVKTWMKGISKKLTEETQEYILNLFQRYVDEGLHFINKKCSQAIPQVDISKVTTLCCLLESLILGKDGVNLAMEQTKLNTILCQTFVFCYLWSLGGNLTENYYDSFDTFIRTQFDDNPDARLPNSGDLWSIHMDFDTKRLDPWERIIPTFKYNRDVPFFEMLVPTTDTVRYGYLMEKLLAVKHSVLFTGITGVGKSVIAKGLLNKIQESAGYVPVYLNFSAQTSSARTQEIIESKLERKRKNILGAPGNKRIVIFVDDLNMPRLDRYGSQPPIELLRQYQDFGGFYDRNKLFWKEIQDVTIISACAPPGGGRNPVTPRFIRHFSMLCLPMPSEHSLKQIFQAILNGFLSDFPPAVKQTASSIVEASVEIYNKMSVDLLPTPAKSHYVFNLRDLSKCVQGILQCDPGTIREEIQIFRLFCHECQRVFHDRLINNEDKHYFHVILTEMANKHFGIAIDLEYFLNKPIIFGDFIKFGADKADRIYDDMPDIEKTANVLQDYLDDYNLTNPKEVKLVFFQDAIEHVSRIARMIRQERGNALLVGVGGTGKQSLTRLAAHICGYKCLQIELSRGYNYDSFHEDLRKLYKMAGVEDKNMVFLFTDTQIVVEEFLEDINNILNSGEVPNLFEKDELEQVLAATRPRAKEVGISEGNRDEVFQYFISKVRQKLHIVLCMSPVGEAFRSRCRMFPSLVNCCTIDWFVQWPREALLSVSKTFFSQVDAGNEELKEKLPLMCVNVHLSVSSMAERYYNELRRRYYTTPTSYLELINLYLSMLSEKRKQIISARDRVKNGLTKLLETNILVDKMKLDLSALEPVLLAKSEDVEALMEKLAVDQESADQVRNTVQEDEATAKVKAEETQAIADDAQRDLDEALPALDAANKALDSLDKADISEIRVFTKPPDLVMTVMEAISILLNAKPDWPSAKQLLGDSNFLKRLLEYDKENIKPQILAKLQKYINNPDFVPEKVEKVSKACKSMCMWVRAMDLYSRVVKVVEPKRQKLRAAQAELDITMATLREKQALLRQVEDQIQALQDEYDKGVNEKESLAKTMALTKARLVRAGKLTAALEDEQVRWEESIQKFEEEISNITGNVFIAAACVAYYGAFTAQYRQSLIECWIQDCQSLEIPIDPSFSLINILGDPYEIRQWNTDGLPRDLISTENGILVTQGRRWPLMIDPQDQANRWIRNKESKSGLKIIKLTDSNFLRILENSIRLGLPVLLEELKETLDPALEPILLKQIFISGGRLLIRLGDSDIDYDKNFRFYMTTKMPNPHYLPEVCIKVTIINFTVTKSGLEDQLLSDVVRLEKPRLEEQRIKLIVRINTDKNQLKTIEEKILRMLFTSEGNILDNEELIDTLQDSKITSGAIKTRLEEAESTEQMINVAREKYRPVATQGSVMYFVIASLSEIDPMYQYSLKYFKQLFNTTIETSVKTENLQQRLDVLLEQTLLTAYVNVSRGLFEQHKLIYSFMLCVEMMRQQGTLSDAEWNFFLRGSAGLEKERPPKPEAPWLPTATWFACCDLEESFPVFHGLTQNILSHPISIRLGSFETYINPQKWEGYSKMKHEDKHMRQEKEAAHQDPWSAGLSSFHKLILIKCCKEEKVVFALTDFVIENLGKQFIETPPVDLPTLYQDMSCNTPLVFILSTGSDPMGAFQRFARESGYSERVQSISLGQGQGPIAEKMVKDAMKSGNWVFLQNCHLAVSWMLAMEELIKTFTDPDSAIKDTFRLFLSSMPSNTFPVTVLQNSVKVTNEPPKGLRANIRRAFTEMTPSFFEENILGKKWRQIIFGICFFHAIIQERKKFGPLGWNICYEFNDSDRECALLNLKLYCKEGKIPWDALIYITGEITYGGRVTDSWDQRCLRTILKRFFSPETLEEDYKYSESGIYFAPMADSLQEFKDYIENLPLIDDPEIFGMHENANLVFQYKETSTLINTILEVQPRSSTGGEGKSNDEIVQELVASVQTRVPEKLEMEGASESLFVKDLQGRLNSLTTVLGQEVDRFNNLLKLIHTSLETLNKAIAGFVVMSEEMEKVYNSFLNNQVPALWSNTAYPSLKPLGSWVKDLILRTSFVDLWLKRGQPKSYWISGFFFPQGFLTGTLQNHARKYNLPIDELSFKYSVIPTYRDQAAVIEAAKTVQFGQELPMDMELPSPEDGVLVHGMFMDASRWDDKEMVIEDALPGQMNPVLPVVHFEPQQNYKPSPTLYHCPLYKTGARAGTLSTTGHSTNFVVTVLLPSKRSKDYWIAKGSALLCQLSE

SEQ ID NO: 27100 - protein, 9 aa, Artificial Sequence
  Synthetic polypeptide
GLPSHVELC

SEQ ID NO: 27101 - protein, 55 aa, Artificial Sequence
  Synthetic polypeptide
RAVPPHMISCLLPLKTQLCSSSAFCHDCEASPAMWNCAKFYASSSKQEKSGCHYL

SEQ ID NO: 27102 - protein, 1867 aa, Artificial Sequence
  Synthetic polypeptide
SLACCHLRRSFAPPLPSAMIVRPPQPCGTVLNFMLPRQSKKKVDAIIFEAQDAEYKLEFVPTTTTEYVHSLLFLDEIQERIESLEDEGNIVTQMYKLMEQYQVPTPPEDFAVFATMKPSIVAVRNAIDKSVGDRESSIKQFCVHLGSDLEELNNEVNEVKLQAQDPQILDISADQDKIRLILNNLQSVLADLQKRAFQYKSYQKNFKVEVSKFEALEEVSAELKLKQLLWDSFSEWDKLQQEWLKSKFDCLDPEVLNGQVSKYAKFVTQLEKGLPPNSVVPQLKYKVEKMKEKLPVIIDLRNPTLKARHWAAIEQTVDATLVDAEIPLTLERLSQLHVFDFGQEIQDISGQASGEAALEAILKKVEDSWKTTEFVILPHRDSKDVFILGGTDDIQVLLDDSTINVATLASSRYLGPLKTRVDEWQKQLALFNQTLEEWLTCQRNWLYLESIFNAPDIQRQLPAEAKMFLQVDKSWKEIMRKVNRLPNALRAATQPGLLETFQNNNALLDQIQKCLEAYLESKRVIFPRFYFLSNDELLEILAQTRNPQAVQPHLRKCFDSISKLEFALMPPAEGKIPGIDGEPEKVYTNDILAMLSPEGERVSLGKGLKARGNVEEWLGKVEEAMFTSLRRLCKAAIADYQGKLRTDWVVAGHPSQVILTVSQIMWCRDLTECLETEHSNHIQALKNFEKVNFERLNALAAIVQGSLPKLHRNILTALITIDVHARDIVTELVQSKVETVESFDWQRQLRYYWDIDLDNCVARMALSQYTYGYEYLGACPRLVITPLTDRCYLCLMGALQLDLGGAPAGPAGTGKTETTKDLAKALAIQCVVFNCSDGLDYKMMGRFFSGLAQSGAWCCFDEFNRIDIEVLSVIAQQLITIRNAKAAKLSRFMFEGREIKLVMTCAAFITMNPGYAGRTELPDNLKALFRPFAMMVPNYALIAEVILYSEGFESSKILARKMTQMYKLCSEQLSQQDHYDFGMRAVKSVLVMAGSLKRENPDLNEDVVLIRALQDSNLPKFLTDDALLFSGIISDLFPGVQIPEHDYGILQSTIVDVMNRQNLQPEMCMVRKVIQFYETMLVRHGVMLVGPTGGGKTTVYRILAETLGNLQKLGIENSFYQAVKTYVLNPKSITMGELYGEVNNLTLEWKDGLMALSVRAAVNDTSEDHKWIISDGPVDALWIENMNTVLDDNKMLCLANSERIKLTPQIHMLFEVQDLRVASPATVSRCGMVFVDPEELKWMPYVKTWMKGISKKLTEETQEYILNLFQRYVDEGLHFINKKCSQAIPQVDISKVTTLCCLLESLILGKDGVNLAMEQTKLNTILCQTFVFCYLWSLGGNLTENYYDSFDTFIRTQFDDNPDARLPNSGDLWSIHMDFDTKRLDPWERIIPTFKYNRDVPFFEMLVPTTDTVRYGYLMEKLLAVKHSVLFTGITGVGKSVIAKGLLNKIQESAGYVPVYLNFSAQTSSARTQEIIESKLERKRKNILGAPGNKRIVIFVDDLNMPRLDRYGSQPPIELLRQYQDFGGFYDRNKLFWKEIQDVTIISACAPPGGGRNPVTPRFIRHFSMLCLPMPSEHSLKQIFQAILNGFLSDFPPAVKQTASSIVEASVEIYNKMSVDLLPTPAKSHYVFNLRDLSKCVQDKHFGIAIDLEYFLNKPIIFGDFIKFGADKADRIYDDMPDIEKTANVLQDYLDDYNLTNPKEVKLVFFQDAIEHVSRIARMIRQERGNALLVGVGGTGKQSLTRLAAHICGYKCLQIELSRGYNYDSFHEDLRKLYKMAGVEDKNMVFLFTDTQIVVEEFLEDINNILNSGEVPNLFEKDELEQVLAATRPRAKEVGISEGNRDEVGCARVVMWLYHKNVSSPFI

SEQ ID NO: 27103 - protein, 3495 aa, Artificial Sequence
  Synthetic polypeptide
SLACCHLRRSFAPPLPSAMIVRPPQPCGTVLNFMLPRQSKKKVDAIIFEAQDAEYKLEFVPTTTTEYVHSLLFLDEIQERIESLEDEGNIVTQMYKLMEQYQVPTPPEDFAVFATMKPSIVAVRNAIDKSVGDRESSIKQFCVHLGSDLEELNNEVNEVKLQAQDPQILDISADQDKIRLILNNLQSVLADLQKRAFQYKSYQKNFKVEVSKFEALEEVSAELKLKQLLWDSFSEWDKLQQEWLKSKFDCLDPEVLNGQVSKYAKFVTQLEKGLPPNSVVPQLKYKVEKMKEKLPVIIDLRNPTLKARHWAAIEQTVDATLVDAEIPLTLERLSQLHVFDFGQEIQDISGQASGEAALEAILKKVEDSWKTTEFVILPHRDSKDVFILGGTDDIQVLLDDSTINVATLASSRYLGPLKTRVDEWQKQLALFNQTLEEWLTCQRNWLYLESIFNAPDIQRQLPAEAKMFLQVDKSWKEIMRKVNRLPNALRAATQPGLLETFQNNNALLDQIQKCLEAYLESKRVIFPRFYFLSNDELLEILAQTRNPQAVQPHLRKCFDSISKLEFALMPPAEGKIPGIDGEPEKVYTNDILAMLSPEGERVSLGKGLKARGNVEEWLGKVEEAMFTSLRRLCKAAIADYQGKLRTDWVVAGHPSQVILTVSQIMWCRDLTECLETEHSNHIQALKNFEKVNFERLNALAAIVQGSLPKLHRNILTALITIDVHARDIVTELVQSKVETVESFDWQRQLRYYWDIDLDNCVARMALSQYTYGYEYLGACPRLVITPLTDRCYLCLMGALQLDLGGAPAGPAGTGKTETTKDLAKALAIQCVVFNCSDGLDYKMMGRFFSGLAQSGAWCCFDEFNRIDIEVLSVIAQQLITIRNAKAAKLSRFMFEGREIKLVMTCAAFITMNPGYAGRTELPDNLKALFRPFAMMVPNYALIAEVILYSEGFESSKILARKMTQMYKLCSEQLSQQDHYDFGMRAVKSVLVMAGSLKRENPDLNEDVVLIRALQDSNLPKFLTDDALLFSGIISDLFPGVQIPEHDYGILQSTIVDVMNRQNLQPEMCMVRKVIQFYETMLVRHGVMLVGPTGGGKTTVYRILAETLGNLQKLGIENSFYQAVKTYVLNPKSITMGELYGEVNNLTLEWKDGLMALSVRAAVNDTSEDHKWIISDGPVDALWIENMNTVLDDNKMLCLANSERIKLTPQIHMLFEVQDLRVASPATVSRCGMVFVDPEELKWMPYVKTWMKGISKKLTEETQEYILNLFQRYVDEGLHFINKKCSQAIPQVDISKVTTLCCLLESLILGKDGVNLAMEQTKLNTILCQTFVFCYLWSLGGNLTENYYDSFDTFIRTQFDDNPDARLPNSGDLWSIHMDFDTKRLDPWERIIPTFKYNRDVPFFEMLVPTTDTVRYGYLMEKLLAVKHSVLFTGITGVGKSVIAKGLLNKIQESAGYVPVYLNFSAQTSSARTQEIIESKLERKRKNILGAPGNKRIVIFVDDLNMPRLDRYGSQPPIELLRQYQDFGGFYDRNKLFWKEIQDVTIISACAPPGGGRNPVTPRFIRHFSMLCLPMPSEHSLKQIFQAILNGFLSDFPPAVKQTASSIVEASVEIYNKMSVDLLPTPAKSHYVFNLRDLSKCVQGILQCDPGTIREEIQIFRLFCHECQRVFHDRLINNEDKHYFHVILTEMANKHFGIAIDLEYFLNKPIIFGDFIKFGADKADRIYDDMPDIEKTANVLQDYLDDYNLTNPKEVKLVFFQDAIEHVSRIARMIRQERGNALLVGVGGTGKQSLTRLAAHICGYKCLQIELSRGYNYDSFHEDLRKLYKMAGVEDKNMVFLFTDTQIVVEEFLEDINNILNSGEVPNLFEKDELEQVLAATRPRAKEVGISEGNRDEVFQYFISKVRQKLHIVLCMSPVGEAFRSRCRMFPSLVNCCTIDWFVQWPREALLSVSKTFFSQVDAGNEELKEKLPLMCVNVHLSVSSMAERYYNELRRRYYTTPTSYLELINLYLSMLSEKRKQIISARDRVKNGLTKLLETNILVDKMKLDLSALEPVLLAKSEDVEALMEKLAVDQESADQVRNTVQEDEATAKVKAEETQAIADDAQRDLDEALPALDAANKALDSLDKADISEIRVFTKPPDLVMTVMEAISILLNAKPDWPSAKQLLGDSNFLKRLLEYDKENIKPQILAKLQKYINNPDFVPEKVEKVSKACKSMCMWVRAMDLYSRVVKVVEPKRQKLRAAQAELDITMATLREKQALLRQVEDQIQALQDEYDKGVNEKESLAKTMALTKARLVRAGKLTAALEDEQVRWEESIQKFEEEISNITGNVFIAAACVAYYGAFTAQYRQSLIECWIQDCQSLEIPIDPSFSLINILGDPYEIRQWNTDGLPRDLISTENGILVTQGRRWPLMIDPQDQANRWIRNKESKSGLKIIKLTDSNFLRILENSIRLGLPVLLEELKETLDPALEPILLKQIFISGGRLLIRLGDSDIDYDKNFRFYMTTKMPNPHYLPEVCIKVTIINFTVTKSGLEDQLLSDVVRLEKPRLEEQRIKLIVRINTDKNQLKTIEEKILRMLFTSEGNILDNEELIDTLQDSKITSGAIKTRLEEAESTEQMINVAREKYRPVATQGSVMYFVIASLSEIDPMYQYSLKYFKQLFNTTIETSVKTENLQQRLDVLLEQTLLTAYVNVSRGLFEQHKLIYSFMLCVEMMRQQGTLSDAEWNFFLRGSAGLEKERPPKPEAPWLPTATWFACCDLEESFPVFHGLTQNILSHPISIRLGSFETYINPQKWEGYSKMKHEDKHMRQEKEAAHQDPWSAGLSSFHKLILIKCCKEEKVVFALTDFVIENLGKQFIETPPVDLPTLYQDMSCNTPLVFILSTGSDPMGAFQRFARESGYSERVQSISLGQGQGPIAEKMVKDAMKSGNWVFLQNCHLAVSWMLAMEELIKTFTDPDSAIKDTFRLFLSSMPSNTFPVTVLQNSVKVTNEPPKGLRANIRRAFTEMTPSFFEENILGKKWRQIIFGICFFHAIIQERKKFGPLGWNICYEFNDSDRECALLNLKLYCKEGKIPWDALIYITGEITYGGRVTDSWDQRCLRTILKRFFSPETLEEDYKYSESGIYFAPMADSLQEFKDYIENLPLIDDPEIFGMHENANLVFQYKETSTLINTILEVQPRSSTGGEGKSNDEIVQELVASVQTRVPEKLEMEGASESLFVKDLQGRLNSLTTVLGQEVDRFNNLLKLIHTSLETLNKAIAGFVVMSEEMEKVYNSFLNNQVPALWSNTAYPSLKPLGSWVKDLILRTSFVDLWLKRGQPKSYWISGFFFPQGFLTGTLQNHARKYNLPIDELSFKYSVIPTYRDQAAVIEAAKTVQFGQELPMDMELPSPEDGVLVHGMFMDASRWDDKEMVIEDALPGQMNPVLPVVHFEPQQNYKPSPTLYHCPLYKTGARAGTLSTTGHSTNFVVTVLLPSKRSKDYWIAKGSALLCQLSE

SEQ ID NO: 27104 - protein, 17 aa, Artificial Sequence
  Synthetic polypeptide
GLPSHVELLKALKMRGI

SEQ ID NO: 27105 - protein, 37 aa, Artificial Sequence
  Synthetic polypeptide
RAVPPHMISCLLPLKTQLCSSSAFCHDCEASPAMWNY

SEQ ID NO: 27106 - protein, 1816 aa, Artificial Sequence
  Synthetic polypeptide
SLACCHLRRSFAPPLPSAMIVRPPQPCGTIESLEDEGNIVTQMYKLMEQYQVPTPPEDFAVFATMKPSIVAVRNAIDKSVGDRESSIKQFCVHLGSDLEELNNEVNEVKLQAQDPQILDISADQDKIRLILNNLQSVLADLQKRAFQYKSYQKNFKVEVSKFEALEEVSAELKLKQLLWDSFSEWDKLQQEWLKSKFDCLDPEVLNGQVSKYAKFVTQLEKGLPPNSVVPQLKYKVEKMKEKLPVIIDLRNPTLKARHWAAIEQTVDATLVDAEIPLTLERLSQLHVFDFGQEIQDISGQASGEAALEAILKKVEDSWKTTEFVILPHRDSKDVFILGGTDDIQVLLDDSTINVATLASSRYLGPLKTRVDEWQKQLALFNQTLEEWLTCQRNWLYLESIFNAPDIQRQLPAEAKMFLQVDKSWKEIMRKVNRLPNALRAATQPGLLETFQNNNALLDQIQKCLEAYLESKRVIFPRFYFLSNDELLEILAQTRNPQAVQPHLRKCFDSISKLEFALMPPAEGKIPGIDGEPEKVYTNDILAMLSPEGERVSLGKGLKARGNVEEWLGKVEEAMFTSLRRLCKAAIADYQGKLRTDWVVAGHPSQVILTVSQIMWCRDLTECLETEHSNHIQALKNFEKVNFERLNALAAIVQGSLPKLHRNILTALITIDVHARDIVTELVQSKVETVESFDWQRQLRYYWDIDLDNCVARMALSQYTYGYEYLGACPRLVITPLTDRCYLCLMGALQLDLGGAPAGPAGTGKTETTKDLAKALAIQCVVFNCSDGLDYKMMGRFFSGLAQSGAWCCFDEFNRIDIEVLSVIAQQLITIRNAKAAKLSRFMFEGREIKLVMTCAAFITMNPGYAGRTELPDNLKALFRPFAMMVPNYALIAEVILYSEGFESSKILARKMTQMYKLCSEQLSQQDHYDFGMRAVKSVLVMAGSLKRENPDLNEDVVLIRALQDSNLPKFLTDDALLFSGIISDLFPGVQIPEHDYGILQSTIVDVMNRQNLQPEMCMVRKVIQFYETMLVRHGVMLVGPTGGGKTTVYRILAETLGNLQKLGIENSFYQAVKTYVLNPKSITMGELYGEVNNLTLEWKDGLMALSVRAAVNDTSEDHKWIISDGPVDALWIENMNTVLDDNKMLCLANSERIKLTPQIHMLFEVQDLRVASPATVSRCGMVFVDPEELKWMPYVKTWMKGISKKLTEETQEYILNLFQRYVDEGLHFINKKCSQAIPQVDISKVTTLCCLLESLILGKDGVNLAMEQTKLNTILCQTFVFCYLWSLGGNLTENYYDSFDTFIRTQFDDNPDARLPNSGDLWSIHMDFDTKRLDPWERIIPTFKYNRDVPFFEMLVPTTDTVRYGYLMEKLLAVKHSVLFTGITGVGKSVIAKGLLNKIQESAGYVPVYLNFSAQTSSARTQEIIESKLERKRKNILGAPGNKRIVIFVDDLNMPRLDRYGSQPPIELLRQYQDFGGFYDRNKLFWKEIQDVTIISACAPPGGGRNPVTPRFIRHFSMLCLPMPSEHSLKQIFQAILNGFLSDFPPAVKQTASSIVEASVEIYNKMSVDLLPTPAKSHYVFNLRDLSKCVQDKHFGIAIDLEYFLNKPIIFGDFIKFGADKADRIYDDMPDIEKTANVLQDYLDDYNLTNPKEVKLVFFQDAIEHVSRIARMIRQERGNALLVGVGGTGKQSLTRLAAHICGYKCLQIELSRGYNYDSFHEDLRKLYKMAGVEDKNMVFLFTDTQIVVEEFLEDINNILNSGEVPNLFEKDELEQVLAATRPRAKEVGISEGNRDEVGCARVVMWLYHKNVSSPFI

SEQ ID NO: 27107 - protein, 3444 aa, Artificial Sequence
  Synthetic polypeptide
SLACCHLRRSFAPPLPSAMIVRPPQPCGTIESLEDEGNIVTQMYKLMEQYQVPTPPEDFAVFATMKPSIVAVRNAIDKSVGDRESSIKQFCVHLGSDLEELNNEVNEVKLQAQDPQILDISADQDKIRLILNNLQSVLADLQKRAFQYKSYQKNFKVEVSKFEALEEVSAELKLKQLLWDSFSEWDKLQQEWLKSKFDCLDPEVLNGQVSKYAKFVTQLEKGLPPNSVVPQLKYKVEKMKEKLPVIIDLRNPTLKARHWAAIEQTVDATLVDAEIPLTLERLSQLHVFDFGQEIQDISGQASGEAALEAILKKVEDSWKTTEFVILPHRDSKDVFILGGTDDIQVLLDDSTINVATLASSRYLGPLKTRVDEWQKQLALFNQTLEEWLTCQRNWLYLESIFNAPDIQRQLPAEAKMFLQVDKSWKEIMRKVNRLPNALRAATQPGLLETFQNNNALLDQIQKCLEAYLESKRVIFPRFYFLSNDELLEILAQTRNPQAVQPHLRKCFDSISKLEFALMPPAEGKIPGIDGEPEKVYTNDILAMLSPEGERVSLGKGLKARGNVEEWLGKVEEAMFTSLRRLCKAAIADYQGKLRTDWVVAGHPSQVILTVSQIMWCRDLTECLETEHSNHIQALKNFEKVNFERLNALAAIVQGSLPKLHRNILTALITIDVHARDIVTELVQSKVETVESFDWQRQLRYYWDIDLDNCVARMALSQYTYGYEYLGACPRLVITPLTDRCYLCLMGALQLDLGGAPAGPAGTGKTETTKDLAKALAIQCVVFNCSDGLDYKMMGRFFSGLAQSGAWCCFDEFNRIDIEVLSVIAQQLITIRNAKAAKLSRFMFEGREIKLVMTCAAFITMNPGYAGRTELPDNLKALFRPFAMMVPNYALIAEVILYSEGFESSKILARKMTQMYKLCSEQLSQQDHYDFGMRAVKSVLVMAGSLKRENPDLNEDVVLIRALQDSNLPKFLTDDALLFSGIISDLFPGVQIPEHDYGILQSTIVDVMNRQNLQPEMCMVRKVIQFYETMLVRHGVMLVGPTGGGKTTVYRILAETLGNLQKLGIENSFYQAVKTYVLNPKSITMGELYGEVNNLTLEWKDGLMALSVRAAVNDTSEDHKWIISDGPVDALWIENMNTVLDDNKMLCLANSERIKLTPQIHMLFEVQDLRVASPATVSRCGMVFVDPEELKWMPYVKTWMKGISKKLTEETQEYILNLFQRYVDEGLHFINKKCSQAIPQVDISKVTTLCCLLESLILGKDGVNLAMEQTKLNTILCQTFVFCYLWSLGGNLTENYYDSFDTFIRTQFDDNPDARLPNSGDLWSIHMDFDTKRLDPWERIIPTFKYNRDVPFFEMLVPTTDTVRYGYLMEKLLAVKHSVLFTGITGVGKSVIAKGLLNKIQESAGYVPVYLNFSAQTSSARTQEIIESKLERKRKNILGAPGNKRIVIFVDDLNMPRLDRYGSQPPIELLRQYQDFGGFYDRNKLFWKEIQDVTIISACAPPGGGRNPVTPRFIRHFSMLCLPMPSEHSLKQIFQAILNGFLSDFPPAVKQTASSIVEASVEIYNKMSVDLLPTPAKSHYVFNLRDLSKCVQGILQCDPGTIREEIQIFRLFCHECQRVFHDRLINNEDKHYFHVILTEMANKHFGIAIDLEYFLNKPIIFGDFIKFGADKADRIYDDMPDIEKTANVLQDYLDDYNLTNPKEVKLVFFQDAIEHVSRIARMIRQERGNALLVGVGGTGKQSLTRLAAHICGYKCLQIELSRGYNYDSFHEDLRKLYKMAGVEDKNMVFLFTDTQIVVEEFLEDINNILNSGEVPNLFEKDELEQVLAATRPRAKEVGISEGNRDEVFQYFISKVRQKLHIVLCMSPVGEAFRSRCRMFPSLVNCCTIDWFVQWPREALLSVSKTFFSQVDAGNEELKEKLPLMCVNVHLSVSSMAERYYNELRRRYYTTPTSYLELINLYLSMLSEKRKQIISARDRVKNGLTKLLETNILVDKMKLDLSALEPVLLAKSEDVEALMEKLAVDQESADQVRNTVQEDEATAKVKAEETQAIADDAQRDLDEALPALDAANKALDSLDKADISEIRVFTKPPDLVMTVMEAISILLNAKPDWPSAKQLLGDSNFLKRLLEYDKENIKPQILAKLQKYINNPDFVPEKVEKVSKACKSMCMWVRAMDLYSRVVKVVEPKRQKLRAAQAELDITMATLREKQALLRQVEDQIQALQDEYDKGVNEKESLAKTMALTKARLVRAGKLTAALEDEQVRWEESIQKFEEEISNITGNVFIAAACVAYYGAFTAQYRQSLIECWIQDCQSLEIPIDPSFSLINILGDPYEIRQWNTDGLPRDLISTENGILVTQGRRWPLMIDPQDQANRWIRNKESKSGLKIIKLTDSNFLRILENSIRLGLPVLLEELKETLDPALEPILLKQIFISGGRLLIRLGDSDIDYDKNFRFYMTTKMPNPHYLPEVCIKVTIINFTVTKSGLEDQLLSDVVRLEKPRLEEQRIKLIVRINTDKNQLKTIEEKILRMLFTSEGNILDNEELIDTLQDSKITSGAIKTRLEEAESTEQMINVAREKYRPVATQGSVMYFVIASLSEIDPMYQYSLKYFKQLFNTTIETSVKTENLQQRLDVLLEQTLLTAYVNVSRGLFEQHKLIYSFMLCVEMMRQQGTLSDAEWNFFLRGSAGLEKERPPKPEAPWLPTATWFACCDLEESFPVFHGLTQNILSHPISIRLGSFETYINPQKWEGYSKMKHEDKHMRQEKEAAHQDPWSAGLSSFHKLILIKCCKEEKVVFALTDFVIENLGKQFIETPPVDLPTLYQDMSCNTPLVFILSTGSDPMGAFQRFARESGYSERVQSISLGQGQGPIAEKMVKDAMKSGNWVFLQNCHLAVSWMLAMEELIKTFTDPDSAIKDTFRLFLSSMPSNTFPVTVLQNSVKVTNEPPKGLRANIRRAFTEMTPSFFEENILGKKWRQIIFGICFFHAIIQERKKFGPLGWNICYEFNDSDRECALLNLKLYCKEGKIPWDALIYITGEITYGGRVTDSWDQRCLRTILKRFFSPETLEEDYKYSESGIYFAPMADSLQEFKDYIENLPLIDDPEIFGMHENANLVFQYKETSTLINTILEVQPRSSTGGEGKSNDEIVQELVASVQTRVPEKLEMEGASESLFVKDLQGRLNSLTTVLGQEVDRFNNLLKLIHTSLETLNKAIAGFVVMSEEMEKVYNSFLNNQVPALWSNTAYPSLKPLGSWVKDLILRTSFVDLWLKRGQPKSYWISGFFFPQGFLTGTLQNHARKYNLPIDELSFKYSVIPTYRDQAAVIEAAKTVQFGQELPMDMELPSPEDGVLVHGMFMDASRWDDKEMVIEDALPGQMNPVLPVVHFEPQQNYKPSPTLYHCPLYKTGARAGTLSTTGHSTNFVVTVLLPSKRSKDYWIAKGSALLCQLSE

SEQ ID NO: 27108 - protein, 215 aa, Artificial Sequence
  Synthetic polypeptide
GAFPPFAQHFSFLLPCDEGHVCFLFCHGCKFPEASSALQNRHFMGNNTVLDVLRREGYEVEHAPAGRPIHKGKSKKTSTRPTLSTIFAPKVPTLEVPAPEAVSSGHSTLPPLVSRPGSADTPSEAEQRFRKKRRRSQRRPRLRQFSDLWVRLEESDIVPQLQVPVLDRHISTELRLPRRGHSHHSQMVASSACLSLWTPVFWVLVLAFQTETPLL

SEQ ID NO: 27109 - protein, 62 aa, Artificial Sequence
  Synthetic polypeptide
FHKGLFPLLLSTSPSCCHVTKDMFASSSAMVVSFLRPPQPFKTVISWATTQCWMFCGVKAMR

SEQ ID NO: 27110 - protein, 22 aa, Artificial Sequence
  Synthetic polypeptide
GLLSPSKPSFHGQQHSAGCFAA

SEQ ID NO: 27111 - protein, 73 aa, Artificial Sequence
  Synthetic polypeptide
GAFPPFAQHFSFLLPCDEGHVCFLFCHGCKFPEASSALQNRHLCFEPDPPAAGKPASRQSSDPLHDGGSHQTL

SEQ ID NO: 27112 - protein, 325 aa, Artificial Sequence
  Synthetic polypeptide
FHKGLFPLLLSTSPSCCHVTKDMFASSSAMVVSFLRPPQPFKTVIFALNQTLLQQESLRAGSLQIPYTTEDLIKHYNCGDLSSVILSHDSSQVPNFINATLPPQERITAQEIDSYLRRELIYKRNERIGKRVKALLEEFPDKGFFFAFGAGHFMGNNTVLDVLRREGYEVEHAPAGRPIHKGKSKKTSTRPTLSTIFAPKVPTLEVPAPEAVSSGHSTLPPLVSRPGSADTPSEAEQRFRKKRRRSQRRPRLRQFSDLWVRLEESDIVPQLQVPVLDRHISTELRLPRRGHSHHSQMVASSACLSLWTPVFWVLVLAFQTETPLL

SEQ ID NO: 27113 - protein, 12 aa, Artificial Sequence
  Synthetic polypeptide
GLLSPSKPSSLL

SEQ ID NO: 27114 - protein, 153 aa, Artificial Sequence
  Synthetic polypeptide
FHKGLFPLLLSTSPSCCHVTKDMFASSSAMVVSFLRPPQPFKTVIFALNQTLLQQESLRAGSLQIPYTTEDLIKHYNCGDLSSVILSHDSSQVPNFINATLPPQERITAQEIDSYLRRELIYKRNERIGKRVKALLEEFPDKGFFFAFGAASQ

SEQ ID NO: 27115 - protein, 408 aa, Artificial Sequence
  Synthetic polypeptide
GRAWWLTPVVIPALWEAQAGRSPGVRDQPGQRGVSCDACLKGNFRGRRYKCLICYDYDLCASCYESGATTTRHTTDHPMQCILTRVDFDLYYGGEAFSVEQPQSFTCPYCGKMGYTETSLQEHVTSEHAETSTEVICPICAALPGGDPNHVTDDFAAHLTLEHRAPRDLDESSGVRHVRRMFHPGRGLGGPRARRSNMHFTSSSTGGLSSSQSSYSPSNREAMDPIAELLSQLSGVRRSAGGQLNSSGPSASQLQQLQMQLQLERQHAQAARQQLETARNATRRTNTSSVTTTITQSTATTNIANTESSQQTLQNSQFLLTRLNDPKMSETERQSMESERADRSLFVQELLLSTLVREESSSSDEDDRGEMADFGAMGCVDIMPLDVALENLNLKESNKGNEPPPPPL

SEQ ID NO: 27116 - protein, 29 aa, Artificial Sequence
  Synthetic polypeptide
FQHFGRPRRADHPEFETSLANVVSAVMHV

SEQ ID NO: 27117 - protein, 35 aa, Artificial Sequence
  Synthetic polypeptide
PSVVAHACCNSSTLGGPGGQITRSSRPAWPTWCQL

SEQ ID NO: 27118 - protein, 38 aa, Artificial Sequence
  Synthetic polypeptide
SQLLGRLRQENCLNPGGGGCSEPRSHHCTPAPATECQL

SEQ ID NO: 27119 - protein, 397 aa, Artificial Sequence
  Synthetic polypeptide
TQEAEVAVSQDLTIALQPRRQSVSCDACLKGNFRGRRYKCLICYDYDLCASCYESGATTTRHTTDHPMQCILTRVDFDLYYGGEAFSVEQPQSFTCPYCGKMGYTETSLQEHVTSEHAETSTEVICPICAALPGGDPNHVTDDFAAHLTLEHRAPRDLDESSGVRHVRRMFHPGRGLGGPRARRSNMHFTSSSTGGLSSSQSSYSPSNREAMDPIAELLSQLSGVRRSAGGQLNSSGPSASQLQQLQMQLQLERQHAQAARQQLETARNATRRTNTSSVTTTITQSTATTNIANTESSQQTLQNSQFLLTRLNDPKMSETERQSMESERADRSLFVQELLLSTLVREESSSSDEDDRGEMADFGAMGCVDIMPLDVALENLNLKESNKGNEPPPPPL

SEQ ID NO: 27120 - protein, 20 aa, Artificial Sequence
  Synthetic polypeptide
AKISPLHSSPGDRVSAVMHV

SEQ ID NO: 27121 - protein, 436 aa, Artificial Sequence
  Synthetic polypeptide
GRAQWFTPVIPAPWEAEAGGSPESNKVPVVQHPHHMHPLTPLITYSNDHFSPGSPPTHLSPEIDPKTGIPRPPHPSELSPYYPLSPGAVGQIPHPLGWLVPQQGQPMYSLPPGGFRHPYPALAMNASMSSLVSSRFSPHMVAPAHPGLPTSGIPHPAIVSPIVKQEPAPPSLSPAVSVKSPVTVKKEEEKKPHVKKPLNAFMLYMKEMRAKVVAECTLKESAAINQILGRKWHNLSREEQAKYYELARKERQLHSQLYPTWSARDNYGKKKKRKREKQLSQTQSQQQVQEAEGALASKSKKPCVQYLPPEKPCDSPASSHGSMLDSPATPSAALASPAAPAATHSEQAQPLSLTTKPETRAQLALHSAAFLSAKAAASSSGQMGSQPPLLSRPLPLGSMPTALLASPPSFPATLHAHQALPVLQAQPLSLVTKSAH

SEQ ID NO: 27122 - protein, 29 aa, Artificial Sequence
  Synthetic polypeptide
SQHLGRPRRVDHLSLIKFLSFSTRITCIR

SEQ ID NO: 27123 - protein, 26 aa, Artificial Sequence
  Synthetic polypeptide
GRAQWFTPVIPAPWEAEAGGSPESNK

SEQ ID NO: 27124 - protein, 17 aa, Artificial Sequence
  Synthetic polypeptide
SQHLGRPRRVDHLSLIK

SEQ ID NO: 27125 - protein, 10 aa, Artificial Sequence
  Synthetic polypeptide
DQPGQHGGSQ

SEQ ID NO: 27126 - protein, 110 aa, Artificial Sequence
  Synthetic polypeptide
AQEFETSLGNMEEASEGGGNDRVRNLQSEVEGVKNIMTQNVERILARGENLEHLRNKTEDLEATSEHFKTTSQKVARKFWWKNVKMIVLICVIVFIIILFIVLFATGAFS

SEQ ID NO: 27127 - protein, 49 aa, Artificial Sequence
  Synthetic polypeptide
LGLWEVEVGGSPEPRSLRPAWATWRKPVKVEEMIVCGTCKVRWRELRIL

SEQ ID NO: 27128 - protein, 109 aa, Artificial Sequence
  Synthetic polypeptide
AQEFETSLGNMEEASEGGGNDRVRNLQSEVEGVKNIMTQNVERILARGENLEHLRNKTEDLEATPGAEASCFREEVTPKLSKVWSLKFCVQRGGWLWLSESCVNSWLLV

SEQ ID NO: 27129 - protein, 16 aa, Artificial Sequence
  Synthetic polypeptide
ISTRPSRFLGRYICQV

SEQ ID NO: 27130 - protein, 52 aa, Artificial Sequence
  Synthetic polypeptide
EGTFVKSEHFKTTSQKVARKFWWKNVKMIVLICVIVFIIILFIVLFATGAFS

SEQ ID NO: 27131 - protein, 43 aa, Artificial Sequence
  Synthetic polypeptide
PPRILRILNFNPAFQIFRKVHLSSLSTSRRHRRRWLENSGGRT

SEQ ID NO: 27132 - protein, 7 aa, Artificial Sequence
  Synthetic polypeptide
EGTFVKS

SEQ ID NO: 27133 - protein, 25 aa, Artificial Sequence
  Synthetic polypeptide
PPRILRILNFNPAFQIFRKVHLSSL

SEQ ID NO: 27134 - protein, 17 aa, Artificial Sequence
  Synthetic polypeptide
SVKENTSAAYDAACTAS

SEQ ID NO: 27135 - protein, 17 aa, Artificial Sequence
  Synthetic polypeptide
VLKKTPVQLMMQLVQRV

SEQ ID NO: 27136 - protein, 6 aa, Artificial Sequence
  Synthetic polypeptide
CSLYSE

SEQ ID NO: 27137 - protein, 70 aa, Artificial Sequence
  Synthetic polypeptide
TWEAEVAVSQGPATAFQPGIPQLCLMCFKMILTLCQHHLWNLVHFYWQRNPGRMWPSLLLIHTPNIFRRT

SEQ ID NO: 27138 - protein, 21 aa, Artificial Sequence
  Synthetic polypeptide
AKVLPLHSSLGYHSCALCVSR

SEQ ID NO: 27139 - protein, 641 aa, Artificial Sequence
  Synthetic polypeptide
SYLFRRLRQENLLNLGGRSCSEPRSCHCIPAWDTTAVPYVFQDDPYLMPASSLESRSFLLAKKSGENVAKFIINSYPKYFQKDIAEPHIPCLMPEYFEPQIKDISEAALKERIELRKVKASVDMFDQLLQAGTTVSLETTNSLLDLLCYYGDQEPSTDYHFQQTGQSEALEEENDETSRRKAGHQFGVTWRAKNNAERIFSLMPEKNEHSYCTMIRGMVKHRAYEQALNLYTELLNNRLHADVYTFNALIEATVCAINEKFEEKWSKILELLRHMVAQKVKPNLQTFNTILKCLRRFHVFARSPALQVLREMKAIGIEPSLATYHHIIRLFDQPGDPLKRSSFIIYDIMNELMGKRFSPKDPDDDKFFQSAMSICSSLRDLELAYQVHGLLKTGDNWKFIGPDQHRNFYYSKFFDLICLMEQIDVTLKWYEDLIPSAYFPHSQTMIHLLQALDVANRLEVIPKIWKDSKEYGHTFRSDLREEILMLMARDKHPPELQVAFADCAADIKSAYESQPIRQTAQDWPATSLNCIAILFLRAGRTQEAWKMLGLFRKHNKIPRSELLNELMDSAKVSNSPSQAIEVVELASAFSLPICEGLTQRVMSDFAINQEQKEALSNLTALTSDSDTDSSSDSDSDTSEGK

SEQ ID NO: 27140 - protein, 129 aa, Artificial Sequence
  Synthetic polypeptide
SYLFRRLRQENLLNLGGRSCSEPRSCHCIPAWDTTAVPYVFQDDPYLMPASSLESRSFLLAKKSGENVAKFIINSYPKYFQKDIAEPHIPEPLCLLKQQIVSWIYCVTMVTRSPQLITIFNKLDSQKHW

SEQ ID NO: 27141 - protein, 160 aa, Artificial Sequence
  Synthetic polypeptide
SYLFRRLRQENLLNLGGRSCSEPRSCHCIPAWDTTAVPYVFQDDPYLMPASSLESRSFLLAKKSGENVAKFIINSYPKYFQKDIAEPHIPEPLCLLKQQIVSWIYCVTMVTRSPQLITIFNKLDSQKHWKRKMMRHLGGKLVISLELHGEQKTTLRESFL

SEQ ID NO: 27142 - protein, 48 aa, Artificial Sequence
  Synthetic polypeptide
LLRRLRSKQLSLRLRLYLSIMSWWSKLGMTLNESWTVLLQKSFLGGKE

SEQ ID NO: 27143 - protein, 453 aa, Artificial Sequence
  Synthetic polypeptide
AQEFETSLGNMVKLCFYKKYKNKWMWWCAPVVLATQETEVQAAQSEAKVVSQYHELVVQARDDFKRELDSITPEVLPGWKGMSVSDLADKLSTDDLNSLIAHAHRRIDQLNRELAEQKATEKQHITLALEKQKLEEKRAFDSAVAKALEHHRSEIQAEQDRKIEEVRDAMENEMRTQLRRQAAAHTDHLRDVLRVQEQELKSEFEQNLSEKLSEQELQFRRLSQEQVDNFTLDINTAYARLRGIEQAVQSHAVAEEEARKAHQLWLSVEALKYSMKTSSAETPTIPLGSAVEAIKANCSDNEFTQALTAAIPPESLTRGVYSEETLRARFYAVQKLARRVAMIDETRNSLYQYFLSYLQSLLLFPPQQLKPPPELCPEDINTFKLLSYASYCIEHGDLELAAKFVNQLKGESRRVAQDWLKEARMTLETKQIVEILTAYASAVGIGTTQVQPE

SEQ ID NO: 27144 - protein, 45 aa, Artificial Sequence
  Synthetic polypeptide
DNARKAFWAVPDTWNPTAPEYFGIFNLPQLCQECLSYFCIVHWTF

SEQ ID NO: 27145 - protein, 177 aa, Artificial Sequence
  Synthetic polypeptide
PPTWGLNEIMHVKRFGQCLTHGILRPLNILASSTYRNCVKNASLISALSTGRFSHIQTPVVSSTPRLTTSERNLTCGHTSVILNRMAPVLPSVLKLPVRSLTYFSARKGKRKTVKAVIDRFLRLHCGLWVRRKAGYKKKLWKKTPARKKRLREFVFCNKTQSKLLDKMTTSFWKRRN

SEQ ID NO: 27146 - protein, 7 aa, Artificial Sequence
  Synthetic polypeptide
HMESYGP

SEQ ID NO: 27147 - protein, 102 aa, Artificial Sequence
  Synthetic polypeptide
PPTWGLNEIMHVKRFGQCLTHGILRPLNILASSTYRNCVKNASLISALSTGRFSHIQTPVVSSTPRLTTSERNLTCGHTSVILNRLAIRKNYGKRHLQGRSD

SEQ ID NO: 27148 - protein, 195 aa, Artificial Sequence
  Synthetic polypeptide
PPTWGLNEIMHVKRFGQCLTHGILRPLNILASSTYRNCVKNASLISALSTGRFSHIQTPVVSSTPRLTTSERNLTCGHTSVILNRMAPVLPSVLKLPVRSLTYFSARKGKRKTVKAVIDRFLRLHCGLWVRRKAGYKKKLWKKTPARKKRLREFVFCNKTQSKLLDKMTTSFWKRRNWYVDDPYQKYHDRTNLKV

SEQ ID NO: 27149 - protein, 184 aa, Artificial Sequence
  Synthetic polypeptide
PPTWGLNEIMHVKRFGQCLTHGILRPLNILASSTYRNCVKNASLISALSTGRFSHIQTPVVSSTPRLTTSERNLTCGHTSVILNRMAPVLPSVLKLPVRSLTYFSARKGKRKTVKAVIDRFLRLHCGLWVRRKAGYKKKLWKKTPARKKRLREFVFCNKTQSKLLDKMTTSFWKRRNWHSPICR

SEQ ID NO: 27150 - protein, 833 aa, Artificial Sequence
  Synthetic polypeptide
LLEKLRQGGCLTPGVGGCAPSRKSVLTDPAKLKKLQQSGEAFVQDDSCVNIVAQLPKCRECRLDSLRKDKEQQKDSPVFCRFFHFRRLQFNKHGVLRVEGFLTPNKYDNEAIGLWLPLTKNVVGIDLDTAKYILANIGDHFCQMVISEKEAMSTIEPHRQVAWKRAVKGVREMCDVCDTTIFNLHWVCPRCGFGVCVDCYRMKRKNCQQGAAYKTFSWLKCVKSQIHEPENLMPTQIIPGKALYDVGDIVHSVRAKWGIKANCPCSNRQFKLFSKPASKEDLKQTSLAGEKPTLGAVLQQNPSVLEPAAVGGEAASKPAGSMKPACPASTSPLNWLADLTSGNVNKENKEKQPTMPILKNEIKCLPPLPPLSKSSTVLHTFNSTILTPVSNNNSGFLRNLLNSSTGKTENGLKNTPKILDDIFASLVQNKTTSDLSKRPQGLTIKPSILGFDTPHYWLCDNRLLCLQDPNNKSNWNVFRECWKQGQPVMVSGVHHKLNSELWKPESFRKEFGEQEVDLVNCRTNEIITGATVGDFWDGFEDVPNRLKNEKEPMVLKLKDWPPGEDFRDMMPSRFDDLMANIPLPEYTRRDGKLNLASRLPNYFVRPDLGPKMYNAYGLITPEDRKYGTTNLHLDVSDAANVMVYVGIPKGQCEQEEEVLKTIQDGDSDELTIKRFIEGKEKPGALWHIYAAKDTEKIREFLKKVSEEQGQENPADHDPIHDQSWYLDRSLRKRLHQEYGVQGWAIVQFLGDVVFIPAGAPHQVHNLYSCIKVAEDFVSPEHVKHCFWLTQEFRYLSQTHTNHEDKLQVKNVIYHAVKDAVAMLKASESSFGKP

SEQ ID NO: 27151 - protein, 14 aa, Artificial Sequence
  Synthetic polypeptide
PQELEAAPHPGSRF

SEQ ID NO: 27152 - protein, 43 aa, Artificial Sequence
  Synthetic polypeptide
KSARHGGAHLLFLATGEAEAGGLLDPRSWRLRPIQEVGFDRPS

SEQ ID NO: 27153 - protein, 223 aa, Artificial Sequence
  Synthetic polypeptide
LLEKLRQGGCLTPGVGGCAPSRKSVLTDPAKLKKLQQSGEAFVQDDSCVNIVAQLPKCRECRLDSLRKDKEQQKDSPVFCRFFHFRRLQFNKHGVLRVEGFLTPNKYDNEAIGLWLPLTKNVVGIDLDTAKYILANIGDHFCQMVISEKEAMSTIEPHRQVAWKRAVKGVREMCDVCDTTIFNLHWVCPRCGFGVCVDCYRMKRKNCQQGENRFDSPPAPLHS

SEQ ID NO: 27154 - protein, 188 aa, Artificial Sequence
  Synthetic polypeptide
IYIQREEEKVKRSVKDAAKKGQKDVCIVLAKEMIRSRKAVSKLYASKAHMNSVLMGMKNQLAVLRVAGSLQKSTEVMKAMQSLVKIPEIQATMRELSKEMMKAGIIEEMLEDTFESMDDQEEMEEEAEMEIDRILFEITAGALGKAPSKVTDALPEPEPPGAMAASEDEEEEEEALEAMQSRLATLRS

SEQ ID NO: 27155 - protein, 31 aa, Artificial Sequence
  Synthetic polypeptide
RKIIPDRNLDLYEGIKHAGNGKYISKEKKKK

SEQ ID NO: 27156 - protein, 120 aa, Artificial Sequence
  Synthetic polypeptide
SMLEMVNIYPKRRRKSETICERCCQEGPEGCLHSSGQGDDQVKEGCEQAVCIQSTHELSAHGDEEPARGLASGWFPAEEHRSDEGHAKSCEDSRDSGHHEGVVQRNDEGWDHRGDVRGHF

SEQ ID NO: 27157 - protein, 148 aa, Artificial Sequence
  Synthetic polypeptide
IYIQREEEKVKRSVKDAAKKGQKDVCIVLAKEMIRSRKAMQSLVKIPEIQATMRELSKEMMKAGIIEEMLEDTFESMDDQEEMEEEAEMEIDRILFEITAGALGKAPSKVTDALPEPEPPGAMAASEDEEEEEEALEAMQSRLATLRS

SEQ ID NO: 27158 - protein, 80 aa, Artificial Sequence
  Synthetic polypeptide
SMLEMVNIYPKRRRKSETICERCCQEGPEGCLHSSGQGDDQVKEGHAKSCEDSRDSGHHEGVVQRNDEGWDHRGDVRGHF

SEQ ID NO: 27159 - protein, 80 aa, Artificial Sequence
  Synthetic polypeptide
IYIQREEEKVKRSVKDAAKKGQKDVCIVLAKEMIRSRKAVSKLYASKAHMNSVLMGMKNQLAVLRVAGSLQKSTEVMKAM

SEQ ID NO: 27160 - protein, 86 aa, Artificial Sequence
  Synthetic polypeptide
SMLEMVNIYPKRRRKSETICERCCQEGPEGCLHSSGQGDDQVKEGCEQAVCIQSTHELSAHGDEEPARGLASGWFPAEEHRSDEGH

SEQ ID NO: 27161 - protein, 46 aa, Artificial Sequence
  Synthetic polypeptide
HLLPHSLLLLPCKMPISLPSPMIGSFLRPPQKQKLLCFPYSLQNCQ

SEQ ID NO: 27162 - protein, 224 aa, Artificial Sequence
  Synthetic polypeptide
GLPKSRSCCASRTVCRTVNEWSLKIRKEMRVVDRQIRDIQREEEKVKRSVKDAAKKGQKDVCIVLAKEMIRSRKAVSKLYASKAHMNSVLMGMKNQLAVLRVAGSLQKSTEVMKAMQSLVKIPEIQATMRELSKEMMKAGIIEEMLEDTFESMDDQEEMEEEAEMEIDRILFEITAGALGKAPSKVTDALPEPEPPGAMAASEDEEEEEEALEAMQSRLATLRS

SEQ ID NO: 27163 - protein, 37 aa, Artificial Sequence
  Synthetic polypeptide
DAYFFAFPHDWKLPEASPKAEAAVLPVQSAELSMSGH

SEQ ID NO: 27164 - protein, 184 aa, Artificial Sequence
  Synthetic polypeptide
GLPKSRSCCASRTVCRTVNEWSLKIRKEMRVVDRQIRDIQREEEKVKRSVKDAAKKGQKDVCIVLAKEMIRSRKAMQSLVKIPEIQATMRELSKEMMKAGIIEEMLEDTFESMDDQEEMEEEAEMEIDRILFEITAGALGKAPSKVTDALPEPEPPGAMAASEDEEEEEEALEAMQSRLATLRS

SEQ ID NO: 27165 - protein, 116 aa, Artificial Sequence
  Synthetic polypeptide
GLPKSRSCCASRTVCRTVNEWSLKIRKEMRVVDRQIRDIQREEEKVKRSVKDAAKKGQKDVCIVLAKEMIRSRKAVSKLYASKAHMNSVLMGMKNQLAVLRVAGSLQKSTEVMKAM

SEQ ID NO: 27166 - protein, 38 aa, Artificial Sequence
  Synthetic polypeptide
VQEFKTSLGNMVNPHLYKNLARPVVKSGDKPSLSARYV

SEQ ID NO: 27167 - protein, 18 aa, Artificial Sequence
  Synthetic polypeptide
PGLWSNRETSPAFRRDTS

SEQ ID NO: 27168 - protein, 53 aa, Artificial Sequence
  Synthetic polypeptide
SQHFGGQGGWMDSLSPGVQDQPGQHGEPPSLQKFSQACGQIGRQAQPFGEIRL

SEQ ID NO: 27169 - protein, 49 aa, Artificial Sequence
  Synthetic polypeptide
VQEFKTSLGNMVNPHLYKNLAREPKTCLQMSPACGQIGRQAQPFGEIRL

SEQ ID NO: 27170 - protein, 28 aa, Artificial Sequence
  Synthetic polypeptide
PGNRRRVCKCPRPVVKSGDKPSLSARYV

SEQ ID NO: 27171 - protein, 63 aa, Artificial Sequence
  Synthetic polypeptide
SQHFGGQGGWMDSLSPGVQDQPGQHGEPPSLQKFSQGTEDVFANVPGLWSNRETSPAFRRDTS

SEQ ID NO: 27172 - protein, 9 aa, Artificial Sequence
  Synthetic polypeptide
GLPSHVELS

SEQ ID NO: 27173 - protein, 1772 aa, Artificial Sequence
  Synthetic polypeptide
RFYKGPFLCTYSLACCLLRLAFAPLFPSTVILRPPQPCGTKLRGFYFAKLYYEAKEYDLAKKYVCTYLSVQERDPRAHRFLGLLYELEENTEKAVECYRRSLELNPPQKDLVLKIAELLCKNDVTDGRAKYWVERAAKLFPGSPAIYKLKEHLLDCEGEDGWNKLFDWIQSELYVRPDDVHMNIRLVELYRSNKRLKDAVARCHEAERNIALRSSLEWNSCVVQTLKEYLESLQCLESDKSDWRATNTDLLLAYANLMLLTLSTRDVQESRELLESFDSALQSAKSSLGGNDELSATFLEMKGHFYMHAGSLLLKMGQHGNNVQWQALSELAALCYVIAFQVPRPKIKLIKGEAGQNLLEMMACDRLSQSGHMLLNLSRGKQDFLKEVVETFANKSGQSVLYNALFSSQSSKDTSFLGSDDIGNIDVQEPELEDLARYDVGAIQAHNGSLQHLTWLGLQWNSLPALPGIRKWLKQLFHHLPQETSRLETNAPESICILDLEVFLLGVVYTSHLQLKEKCNSHHSSYQPLCLPLPVCKRLCTERQKSWWDAVCTLIHRKAVPGNSAELRLVVQHEINTLRAQEKHGLQPALLVHWAKCLQKMGRGLNSSYDQQEYIGRSVHYWKKVLPLLKIIKKNSIPEPIDPLFKHFHSVDIQASEIVEYEEDAHITFAILDAVHGNIEDAVTAFESIKSVVSYWNLALIFHRKAEDIENDAVFPEEQEECKNYLRKTRDYLIKIIDDSDSNLSVVKKLPVPLESVKEMLKSVMQELEDYSEGGPLYKNGSLRNADSEIKHSTPSPTKYSLSPSKSYKYSPKTPPRWAEDQNSLRKMICQEVKAITKLNSSKSASRHRWPTENYGPDSVPDGYQGSQTFHGAPLTVATTGPSVYYSQSPAYNSQYLLRPAANVTPTKGSSNTEFKSTKEGFSIAVSADGFKFGISEPGNQEKKSEKPLENDTGFQAQDISGQKNGRGVIFGQTSSTFTFADVAKSTSGEGFQFGKKDPNFKGFSGAGEKLFSSQCGKMANKANTSGDFEKDDDACKTEDSDDIHFEPVVQMPEKVELVTGEEGEKVLYSQGVKLFRFDAEISQWKERGLGNLKILKNEVNGKPRMLMRRDQVLKVCANHWITTTMNLKPLSGSDRAWMWLASDFSDGDAKLERLAAQFKTPELAEEFKQKFEECQRLLLDIPLQTPHKLVDTGRAAKLIQRAEEMKSGLKDFKTFLTNDQTKVTEEENKGSGTGAAGASDTTIKPNPENTGPTLEWDNYDLREDALDDNVSSSSVHDSPLASSPVRKNIFRFDESTTGFNFSFKSALSLSKSPAKLNQSGTSVGTDEESDVTQEEERDGQYFEPVVPLPDLVEVSSGEENEQVVFSHMAELYRYDKDVGQWKERGIGDIKILQNYDNKQVRIVMRRDQVLKLCANHRITPDMSLQNMKGTERVWVWTACDFADGERKVEHLAVRFKLQDVADSFKKIFDEAKTAQEKDSLITPHVSRSSTPRESPCGKIAVAVLEETTRERTDVIQGDDVADAASEVEVSSTSETTTKAVVSPPKFVFGSESVKRIFSSEKSNPFAFGNSSATGSLFGFSFNAPLKSNDSETSSVAQSGSESKVEPKKCELSKNSDIEQSSDSKVKNLSASFPMEESSINYTFKTPEKEPPLWHAEFTKEELVQKLSSTTKSADQLNGLLRETEATSAVLMEQIKLLKSEIRRLERNQEESAANVEHLKNVLLQFIFLKPGSERESLLPVINTMLQLSPEEKGKLAAVAQGLQETSIPKKK

SEQ ID NO: 27174 - protein, 1772 aa, Artificial Sequence
  Synthetic polypeptide
WFYKGQFPCTCSLAFHHVKHAFLPPLPSDMIVRPPQPCESKLRGFYFAKLYYEAKEYDLAKKYVCTYLSVQERDPRAHRFLGLLYELEENTEKAVECYRRSLELNPPQKDLVLKIAELLCKNDVTDGRAKYWVERAAKLFPGSPAIYKLKEHLLDCEGEDGWNKLFDWIQSELYVRPDDVHMNIRLVELYRSNKRLKDAVARCHEAERNIALRSSLEWNSCVVQTLKEYLESLQCLESDKSDWRATNTDLLLAYANLMLLTLSTRDVQESRELLESFDSALQSAKSSLGGNDELSATFLEMKGHFYMHAGSLLLKMGQHGNNVQWQALSELAALCYVIAFQVPRPKIKLIKGEAGQNLLEMMACDRLSQSGHMLLNLSRGKQDFLKEVVETFANKSGQSVLYNALFSSQSSKDTSFLGSDDIGNIDVQEPELEDLARYDVGAIQAHNGSLQHLTWLGLQWNSLPALPGIRKWLKQLFHHLPQETSRLETNAPESICILDLEVFLLGVVYTSHLQLKEKCNSHHSSYQPLCLPLPVCKRLCTERQKSWWDAVCTLIHRKAVPGNSAELRLVVQHEINTLRAQEKHGLQPALLVHWAKCLQKMGRGLNSSYDQQEYIGRSVHYWKKVLPLLKIIKKNSIPEPIDPLFKHFHSVDIQASEIVEYEEDAHITFAILDAVHGNIEDAVTAFESIKSVVSYWNLALIFHRKAEDIENDAVFPEEQEECKNYLRKTRDYLIKIIDDSDSNLSVVKKLPVPLESVKEMLKSVMQELEDYSEGGPLYKNGSLRNADSEIKHSTPSPTKYSLSPSKSYKYSPKTPPRWAEDQNSLRKMICQEVKAITKLNSSKSASRHRWPTENYGPDSVPDGYQGSQTFHGAPLTVATTGPSVYYSQSPAYNSQYLLRPAANVTPTKGSSNTEFKSTKEGFSIAVSADGFKFGISEPGNQEKKSEKPLENDTGFQAQDISGQKNGRGVIFGQTSSTFTFADVAKSTSGEGFQFGKKDPNFKGFSGAGEKLFSSQCGKMANKANTSGDFEKDDDACKTEDSDDIHFEPVVQMPEKVELVTGEEGEKVLYSQGVKLFRFDAEISQWKERGLGNLKILKNEVNGKPRMLMRRDQVLKVCANHWITTTMNLKPLSGSDRAWMWLASDFSDGDAKLERLAAQFKTPELAEEFKQKFEECQRLLLDIPLQTPHKLVDTGRAAKLIQRAEEMKSGLKDFKTFLTNDQTKVTEEENKGSGTGAAGASDTTIKPNPENTGPTLEWDNYDLREDALDDNVSSSSVHDSPLASSPVRKNIFRFDESTTGFNFSFKSALSLSKSPAKLNQSGTSVGTDEESDVTQEEERDGQYFEPVVPLPDLVEVSSGEENEQVVFSHMAELYRYDKDVGQWKERGIGDIKILQNYDNKQVRIVMRRDQVLKLCANHRITPDMSLQNMKGTERVWVWTACDFADGERKVEHLAVRFKLQDVADSFKKIFDEAKTAQEKDSLITPHVSRSSTPRESPCGKIAVAVLEETTRERTDVIQGDDVADAASEVEVSSTSETTTKAVVSPPKFVFGSESVKRIFSSEKSNPFAFGNSSATGSLFGFSFNAPLKSNDSETSSVAQSGSESKVEPKKCELSKNSDIEQSSDSKVKNLSASFPMEESSINYTFKTPEKEPPLWHAEFTKEELVQKLSSTTKSADQLNGLLRETEATSAVLMEQIKLLKSEIRRLERNQEESAANVEHLKNVLLQFIFLKPGSERESLLPVINTMLQLSPEEKGKLAAVAQGLQETSIPKKK

SEQ ID NO: 27175 - protein, 9 aa, Artificial Sequence
  Synthetic polypeptide
GLPSHVNLS

SEQ ID NO: 27176 - protein, 27 aa, Artificial Sequence
  Synthetic polypeptide
PTEFRQSSMLNSGTKSFTGPSLTPTPS

SEQ ID NO: 27177 - protein, 50 aa, Artificial Sequence
  Synthetic polypeptide
KGRGRDKGVSPRAFRGSMPLLIHRCWSSSLRNSGKARCSTPGQRVLQAHP

SEQ ID NO: 27178 - protein, 151 aa, Artificial Sequence
  Synthetic polypeptide
YIDVGLLAYGIQAKLDAQLRDKEFYRPIPNPNPKLTDGYPAFKRPHMTAKDLGLPGFFPSQEHEATREDERKFTSTCHFTYPASHDLHLAQGDPNQVLQSADFPCLVDPKHQPAAEMAKGYLLLPGCPCLHCHIVKVPILNRWGPLMPFYQ

SEQ ID NO: 27179 - protein, 123 aa, Artificial Sequence
  Synthetic polypeptide
QNTVSASQTSPCHRLKWLFHPTKDTTGEIVLTQSPGTLSLSPGERATLSCRASQSVSSSYLAWYQQKPGQAPRLLIYGASSRATGIPDRFSGSGSGTDFTLTISRLEPEDFAVYYCQQYGSSP

SEQ ID NO: 27180 - protein, 15 aa, Artificial Sequence
  Synthetic polypeptide
SGCFILLRIPPEKLC

SEQ ID NO: 27181 - protein, 7 aa, Artificial Sequence
  Synthetic polypeptide
KDPVGML

SEQ ID NO: 27182 - protein, 75 aa, Artificial Sequence
  Synthetic polypeptide
NKKRARPNQHVYFRLYEVSYRESQSIWTDVRMPVSLIGMGKQLFPERIQWGCCDDSVSTLPARHPWTAGLHLLQV

SEQ ID NO: 27183 - protein, 114 aa, Artificial Sequence
  Synthetic polypeptide
LGWGNSCFLKGSSGDVVMTQSPLSLPVTLGQPASISCRSSQSLVYSDGNTYLNWFQQRPGQSPRRLIYKVSNRDSGVPDRFSGSGSGTDFTLKISRVEAEDVGVYYCMQGTHWP

SEQ ID NO: 27184 - protein, 232 aa, Artificial Sequence
  Synthetic polypeptide
DQPEQHADAINNAAGFGFRGYDENGAARWDLISNLRIQQIEMSTSFKMFLDNWNIQTALWLKRVCYERTSFSPTIQTFILSAIWHGVYPGYYLTFLTGVLMTLAARAMRNNFRHYFIEPSQLKLFYDVITWIVTQVAISYTVVPFVLLSIKPSLTFYSSWYYCLHILGILVLLLLPVKKTQRRKNTHENIQLSQSKKFDEGENSLGQNSFSTTNNVCNQNQEIASRHSSLKQ

SEQ ID NO: 27185 - protein, 35 aa, Artificial Sequence
  Synthetic polypeptide
SQKFETSLSNMLMPLIMLQALVSEGMTKMEQLAGT

SEQ ID NO: 27186 - protein, 3 aa, Artificial Sequence
  Synthetic polypeptide
ATC

SEQ ID NO: 27187 - protein, 65 aa, Artificial Sequence
  Synthetic polypeptide
DQPEQHADAINNAAGFGFRGYDENGAARWDLISNLRIQQIEMSTSFKMFLDNWNIQTALWLKRIF

SEQ ID NO: 27188 - protein, 57 aa, Artificial Sequence
  Synthetic polypeptide
KDKRNVACPYNGIPFGSLQRNKLLIYAATWRNLKSTLLLCVCSGIPHSVPSYSSLYL

SEQ ID NO: 27189 - protein, 432 aa, Artificial Sequence
  Synthetic polypeptide
YMLQHGGTSRARYCFVFALGYLTVCQVTRVYIFDYGQYSADFSGPMMIITQKITSLACEIHDGMFRKDEELTSSQRDLAVRRMPSLLEYLSYNCNFMGILAGPLCSYKDYITFIEGRSYHITQSGENGKEETQYERTEPSPNTAVVQKLLVCGLSLLFHLTICTTLPVEYNIDEHFQATASWPTKIIYLYISLLAARPKYYFAWTLADAINNAAGFGFRGYDENGAARWDLISNLRIQQIEMSTSFKMFLDNWNIQTALWLKRVCYERTSFSPTIQTFILSAIWHGVYPGYYLTFLTGVLMTLAARAMRNNFRHYFIEPSQLKLFYDVITWIVTQVAISYTVVPFVLLSIKPSLTFYSSWYYCLHILGILVLLLLPVKKTQRRKNTHENIQLSQSKKFDEGENSLGQNSFSTTNNVCNQNQEIASRHSSLKQ

SEQ ID NO: 27190 - protein, 67 aa, Artificial Sequence
  Synthetic polypeptide
TKCGMSIQWNTIRQFTKEQTADICCNMEEPQEHVTALCLLWDTSQCAKLLESISLTMDNILLIFQAQ

SEQ ID NO: 27191 - protein, 33 aa, Artificial Sequence
  Synthetic polypeptide
YMLQHGGTSRARYCFVFALGYLTVCQVTRVYIF

SEQ ID NO: 27192 - protein, 55 aa, Artificial Sequence
  Synthetic polypeptide
TKCGMSIQWNTIRQFTKEQTADICCNMEEPQEHVTALCLLWDTSQCAKLLESISL

SEQ ID NO: 27193 - protein, 111 aa, Artificial Sequence
  Synthetic polypeptide
YMLQHGGTSRARYCFVFALGYLTVCQVTRVYIFDYGQYSADFSGPMMIITQKITSLACEIHDGMFRKDEELTSSQRDLAVRRMPSLLEYLSYNCNFMGILAGPLCSYKDYI

SEQ ID NO: 27194 - protein, 497 aa, Artificial Sequence
  Synthetic polypeptide
GQVNFVVCQLFALLAAIWFRTYLHSSKTSSFIRHVVATLLGLYLALFCFGWYALHFLVQSGISYCIMIIIGVENMHNYCFVFALGYLTVCQVTRVYIFDYGQYSADFSGPMMIITQKITSLACEIHDGMFRKDEELTSSQRDLAVRRMPSLLEYLSYNCNFMGILAGPLCSYKDYITFIEGRSYHITQSGENGKEETQYERTEPSPNTAVVQKLLVCGLSLLFHLTICTTLPVEYNIDEHFQATASWPTKIIYLYISLLAARPKYYFAWTLADAINNAAGFGFRGYDENGAARWDLISNLRIQQIEMSTSFKMFLDNWNIQTALWLKRVCYERTSFSPTIQTFILSAIWHGVYPGYYLTFLTGVLMTLAARAMRNNFRHYFIEPSQLKLFYDVITWIVTQVAISYTVVPFVLLSIKPSLTFYSSWYYCLHILGILVLLLLPVKKTQRRKNTHENIQLSQSKKFDEGENSLGQNSFSTTNNVCNQNQEIASRHSSLKQ

SEQ ID NO: 27195 - protein, 5 aa, Artificial Sequence
  Synthetic polypeptide
ARSTL

SEQ ID NO: 27196 - protein, 27 aa, Artificial Sequence
  Synthetic polypeptide
PGQLCSVPTLCLASSHLVSNLSTFKQN

SEQ ID NO: 27197 - protein, 546 aa, Artificial Sequence
  Synthetic polypeptide
NPISTNNTKISWAWWRVPIVPAAWEPELAKNIGNAGFNEIMECCLPAEDSVKPNPGSDMNARKDYITAKYIERRYARKKHADNAAKLHSLCEAVKTRDIFGLLQAYADGVDLTEKIPLANGHEPDETALHLAVRSVDRTSLHIVDFLVQNSGNLDKQTGKGSTALHYCCLTDNAECLKLLLRGKASIEIANESGETPLDIAKRLKHEHCEELLTQALSGRFNSHVHVEYEWRLLHEDLDESDDDMDEKLQPSPNRREDRPISFYQLGSNQLQSNAVSLARDAANLAKEKQRAFMPSILQNETYGALLSGSPPPAQPAAPSTTSAPPLPPRNVGKVQTASSANTLWKTNSVSVDGGSRQRSSSDPPAVHPPLPPLRVTSTNPLTPTPPPPVAKTPSVMEALSQPSKPAPPGISQIRPPPLPPQPPSRLPQKKPAPGADKSTPLTNKGQPRGPVDLSATEALGPLSNAMVLQPPAPMPRKSQATKLKPKRVKALYNCVADNPDELTFSEGDVIIVDGEEDQEWWIGHIDGDPGRKGAFPVSFVHFIAD

SEQ ID NO: 27198 - protein, 39 aa, Artificial Sequence
  Synthetic polypeptide
SPLLGNLSSPRILGMQALMRSWNVAYQLRTQSNPTQAAT

SEQ ID NO: 27199 - protein, 501 aa, Artificial Sequence
  Synthetic polypeptide
NPISTNNTKISWAWWRVPIVPAAWEPELAKNIGNAGFNEIMECCLPAEDSVKPNPGSDMNARKDYITAKYIERRYARKKHADNAAKLHSLCEAVKTRDIFGLLQAYADGVDLTEKIPLANGHEPDETALHLAVRSVDRTSLHIVDFLVQNSGNLDKQTGKGSTALHYCCLTDNAECLKLLLRGKASIEIANESGETPLDIAKRLKHEHCEELLTQALSGRFNSHVHVEYEWRLLHEDLDESDDDMDEKLQPSPNRREDRPISFYQLGSNQLQSNAVSLARDAANLAKEKQRAFMPSILQNETYGALLSGSPPPAQPAAPSTTSAPPLPPRNVGKDPLTPTPPPPVAKTPSVMEALSQPSKPAPPGISQIRPPPLPPQPPSRLPQKKPAPGADKSTPLTNKGQPRGPVDLSATEALGPLSNAMVLQPPAPMPRKSQATKLKPKRVKALYNCVADNPDELTFSEGDVIIVDGEEDQEWWIGHIDGDPGRKGAFPVSFVHFIAD

SEQ ID NO: 27200 - protein, 45 aa, Artificial Sequence
  Synthetic polypeptide
GRARGLTPVIPALWEAEAGGSRAQSQPAGRPAHQLLPAGLQPASV

SEQ ID NO: 27201 - protein, 309 aa, Artificial Sequence
  Synthetic polypeptide
SQHFGRLRRADHEPSPNRREDRPISFYQLGSNQLQSNAVSLARDAANLAKEKQRAFMPSILQNETYGALLSGSPPPAQPAAPSTTSAPPLPPRNVGKVQTASSANTLWKTNSVSVDGGSRQRSSSDPPAVHPPLPPLRVTSTNPLTPTPPPPVAKTPSVMEALSQPSKPAPPGISQIRPPPLPPQPPSRLPQKKPAPGADKSTPLTNKGQPRGPVDLSATEALGPLSNAMVLQPPAPMPRKSQATKLKPKRVKALYNCVADNPDELTFSEGDVIIVDGEEDQEWWIGHIDGDPGRKGAFPVSFVHFIAD

SEQ ID NO: 27202 - protein, 62 aa, Artificial Sequence
  Synthetic polypeptide
GGRITSPVPTGGKTGPSASTSWAPTSFSLTLYLWPEMLQTLPRRSRGLSCPASCRMRLTEPS

SEQ ID NO: 27203 - protein, 264 aa, Artificial Sequence
  Synthetic polypeptide
SQHFGRLRRADHEPSPNRREDRPISFYQLGSNQLQSNAVSLARDAANLAKEKQRAFMPSILQNETYGALLSGSPPPAQPAAPSTTSAPPLPPRNVGKDPLTPTPPPPVAKTPSVMEALSQPSKPAPPGISQIRPPPLPPQPPSRLPQKKPAPGADKSTPLTNKGQPRGPVDLSATEALGPLSNAMVLQPPAPMPRKSQATKLKPKRVKALYNCVADNPDELTFSEGDVIIVDGEEDQEWWIGHIDGDPGRKGAFPVSFVHFIAD

SEQ ID NO: 27204 - protein, 4 aa, Artificial Sequence
  Synthetic polypeptide
LWSW

SEQ ID NO: 27205 - protein, 26 aa, Artificial Sequence
  Synthetic polypeptide
WGRRRRIWGGLQNLLCDCGVGKGPTE

SEQ ID NO: 27206 - protein, 771 aa, Artificial Sequence
  Synthetic polypeptide
GVEGGGSGEGSRTCCVTVELVKALLNELASVKVNEVVRYEAGYVVCAVIAGLYLLLVPTAGLCFCCCRCHRRCGGRVKTEHKALACERAALMVFLLLTTLLLLIGVVCAFVTNQRTHEQMGPSIEAMPETLLSLWGLVSDVPQELQAVAQQFSLPQEQVSEELDGVGVSIGSAIHTQLRSSVYPLLAAVGSLGQVLQVSVHHLQTLNATVVELQAGQQDLEPAIREHRDRLLELLQEARCQGDCAGALSWARTLELGADFSQVPSVDHVLHQLKGVPEANFSSMVQEENSTFNALPALAAMQTSSVVQELKKAVAQQPEGVRTLAEGFPGLEAASRWAQALQEVEESSRPYLQEVQRYETYRWIVGCVLCSVVLFVVLCNLLGLNLGIWGLSARDDPSHPEAKGEAGARFLMAGVGLSFLFAAPLILLVFATFLVGGNVQTLVCQSWENGELFEFADTPGNLPPSMNLSQLLGLRKNISIHQAYQQCKEGAALWTVLQLNDSYDLEEHLDINQYTNKLRQELQSLKVDTQSLDLLSSAARRDLEALQSSGLQRIHYPDFLVQIQRPVVKTSMEQLAQELQGLAQAQDNSVLGQRLQEEAQGLRNLHQEKVVPQQSLVAKLNLSVRALESSAPNLQLETSDVLANVTYLKGELPAWAARILRNVSECFLAREMGYFSQYVAWVREEVTQRIATCQPLSGALDNSRVILCDMMADPWNAFWFCLAWCTFFLIPSIIFAVKTSKYFRPIRKRLSSTSSEETQLFHIPRVTSLKL

SEQ ID NO: 27207 - protein, 722 aa, Artificial Sequence
  Synthetic polypeptide
GVEGGGSGEGSRTCCVTVELVKALLNELASVKVNEVVRYEAGYVVCAVIAGLYLLLVPTAGLCFCCCRCHRRCGGRVKTEHKALACERAALMVFLLLTTLLLLIGVVCAFVTNQRTHEQMGPSIEAMPETLLSLWGLVSDVPQELQAVAQQFSLPQEQVSEELDGVGVSIGSAIHTQLRSSVYPLLAAVGSLGQVLQVSVHHLQTLNATVVELQAGQQDLEPAIREHRDRLLELLQEARCQGDCAGALSWARTLELGADFSQVPSVDHVLHQLKGVPEANFSSMVQEENSTFNALPALAAMQTSSVVQELKKAVAQQPEGVRTLAEGFPGLEAASRWAQALQEVEESSRPYLQEVQRYETYRWIVGCVLCSVVLFVVLCNLLGLNLGIWGLSARDDPSHPEAKGEAGARFLMAGVGLSFLFAAPLILLVFATFLVGGNVQTLVCQSWENGELFEFADTPGNLPPSMNLSQLLGLRKNISIHQAYQQCKEGAALWTVLQLNDSYDLEEHLDINQIQRPVVKTSMEQLAQELQGLAQAQDNSVLGQRLQEEAQGLRNLHQEKVVPQQSLVAKLNLSVRALESSAPNLQLETSDVLANVTYLKGELPAWAARILRNVSECFLAREMGYFSQYVAWVREEVTQRIATCQPLSGALDNSRVILCDMMADPWNAFWFCLAWCTFFLIPSIIFAVKTSKYFRPIRKRLSSTSSEETQLFHIPRVTSLKL

SEQ ID NO: 27208 - protein, 106 aa, Artificial Sequence
  Synthetic polypeptide
GVEGGGSGEGSRTCCVTVELVKALLNELASVKVNEAEARAGQWGSGHPSCPAACPGGAVRGGLRGMRCDRGPLPAAGAHCRALLLLLPLPPALRGTSEDRAQGAGL

SEQ ID NO: 27209 - protein, 39 aa, Artificial Sequence
  Synthetic polypeptide
GPARWLTPVIPALWEVEVGRSQGQEFETILANVIILTWP

SEQ ID NO: 27210 - protein, 215 aa, Artificial Sequence
  Synthetic polypeptide
PGTVAHACNPSTLGGRGGQITRSGVRDHPGQRDYTDLAMSTVKQTQAIPYTGPFNLLCYQLQKLTGDVEELEIQEKPALKVFKNITVIQEPGMVVLEWLANPSNDMYADTVTTVILEVQSNPKIRKGAVQKVSKKLEMHVYSKRLEIMLQDIFGEDCVSVKDDSILSVTVDGKTANLNLETRTVECEEGSEDDESLREMVELAAQRLYEALTPVH

SEQ ID NO: 27211 - protein, 122 aa, Artificial Sequence
  Synthetic polypeptide
GLGTVAHAYHSSTWKAKVGGSLEPSSFTPAWSTQGDLVSQKKRKKISQVIAVSARLQEMLKMTLFAWILASVRMGNASLSARGNSSWSPVHVMKLTTPARCAAGTFLAAVCPMSMLNKRTYF

SEQ ID NO: 27212 - protein, 48 aa, Artificial Sequence
  Synthetic polypeptide
AWAQWLMPIIPALGRPRWEDPLSPAVLHQHGQHREISSLKKKERKLAR

SEQ ID NO: 27213 - protein, 276 aa, Artificial Sequence
  Synthetic polypeptide
PGNSSECPPPGNAEDDTVCLDLGKCKDGKCIPFCEREQQLESCACNETDNSCKVCCRDLSGRCVPYVDAEQKNLFLRKGKPCTVGFCDMNGKCEKRVQDVIERFWDFIDQLSINTFGKFLADNIVGSVLVFSLIFWIPFSILVHCVDKKLDKQYESLSLFHPSNVEMLSSMDSASVRIIKPFPAPQTPGRLQPAPVIPSAPAAPKLDHQRMDTIQEDPSTDSHMDEDGFEKDPFPNSSTAAKSFEDLTDHPVTRSEKAASFKLQRQNRVDSKETEC

SEQ ID NO: 27214 - protein, 21 aa, Artificial Sequence
  Synthetic polypeptide
GMVAHTCNPSTLRGRDVFKLQ

SEQ ID NO: 27215 - protein, 379 aa, Artificial Sequence
  Synthetic polypeptide
EAEMFSNCSKQSIYKTIESKAQECFQERSNKVCGNSRVDEGEECDPGIMYLNNDTCCNSDCTLKEGVQCSDRNSPCCKNCQFETAQKKCQEAINATCKGVSYCTGNSSECPPPGNAEDDTVCLDLGKCKDGKCIPFCEREQQLESCACNETDNSCKVCCRDLSGRCVPYVDAEQKNLFLRKGKPCTVGFCDMNGKCEKRVQDVIERFWDFIDQLSINTFGKFLADNIVGSVLVFSLIFWIPFSILVHCVDKKLDKQYESLSLFHPSNVEMLSSMDSASVRIIKPFPAPQTPGRLQPAPVIPSAPAAPKLDHQRMDTIQEDPSTDSHMDEDGFEKDPFPNSSTAAKSFEDLTDHPVTRSEKAASFKLQRQNRVDSKETEC

SEQ ID NO: 27216 - protein, 55 aa, Artificial Sequence
  Synthetic polypeptide
SQHFERPRCFQTAVNNQSIRPLKVRPRSVFKNAAIKFVGTRGWMKEKSVILASCI

SEQ ID NO: 27217 - protein, 43 aa, Artificial Sequence
  Synthetic polypeptide
SQLLGRLRQENGVNLGGGACSEPRSRHCTPAWATEQDSISKEA

SEQ ID NO: 27218 - protein, 819 aa, Artificial Sequence
  Synthetic polypeptide
TWEVELAVSRDRATALQPGRQSKTPSQKKLDSLLSDYDILSLSNIQQHSVRKRDLQTSTHVETLLTFSALKRHFKLYLTSSTERFSQNFKVVVVDGKNESEYTVKWQDFFTGHVVGEPDSRVLAHIRDDDVIIRINTDGAEYNIEPLWRFVNDTKDKRMLVYKSEDIKNVSRLQSPKVCGYLKVDNEELLPKGLVDREPPEELVHRVKRRADPDPMKNTCKLLVVADHRFYRYMGRGEESTTTNYLIELIDRVDDIYRNTSWDNAGFKGYGIQIEQIRILKSPQEVKPGEKHYNMAKSYPNEEKDAWDVKMLLEQFSFDIAEEASKVCLAHLFTYQDFDMGTLGLAYVGSPRANSHGGVCPKAYYSPVGKKNIYLNSGLTSTKNYGKTILTKEADLVTTHELGHNFGAEHDPDGLAECAPNEDQGGKYVMYPIAVSGDHENNKMFSNCSKQSIYKTIESKAQECFQERSNKVCGNSRVDEGEECDPGIMYLNNDTCCNSDCTLKEGVQCSDRNSPCCKNCQFETAQKKCQEAINATCKGVSYCTGNSSECPPPGNAEDDTVCLDLGKCKDGKCIPFCEREQQLESCACNETDNSCKVCCRDLSGRCVPYVDAEQKNLFLRKGKPCTVGFCDMNGKCEKRVQDVIERFWDFIDQLSINTFGKFLADNIVGSVLVFSLIFWIPFSILVHCVDKKLDKQYESLSLFHPSNVEMLSSMDSASVRIIKPFPAPQTPGRLQPAPVIPSAPAAPKLDHQRMDTIQEDPSTDSHMDEDGFEKDPFPNSSTAAKSFEDLTDHPVTRSEKAASFKLQRQNRVDSKETEC

SEQ ID NO: 27219 - protein, 41 aa, Artificial Sequence
  Synthetic polypeptide
AEIAPLHSSLGDRARLHLKRSLILCSQTTIFSLYLISSSIR

SEQ ID NO: 27220 - protein, 280 aa, Artificial Sequence
  Synthetic polypeptide
TWEVELAVSRDRATALQPGRQSKTPSQKKLDSLLSDYDILSLSNIQQHSVRKRDLQTSTHVETLLTFSALKRHFKLYLTSSTERFSQNFKVVVVDGKNESEYTVKWQDFFTGHVVGEPDSRVLAHIRDDDVIIRINTDGAEYNIEPLWRFVNDTKDKRMLVYKSEDIKNVSRLQSPKVCGYLKVDNEELLPKGLVDREPPEELVHRVKRRADPDPMKNTCKLLVVADHRFYRYMGRGEESTTTNYLIELIDRVDDIYRNTSWDNAGFKGYGIQIEQLLFE

SEQ ID NO: 27221 - protein, 23 aa, Artificial Sequence
  Synthetic polypeptide
ERSLILCSQTTIFSLYLISSSIR

SEQ ID NO: 27222 - protein, 8 aa, Artificial Sequence
  Synthetic polypeptide
NFCCRREA

SEQ ID NO: 27223 - protein, 798 aa, Artificial Sequence
  Synthetic polypeptide
RISAVGEKLDSLLSDYDILSLSNIQQHSVRKRDLQTSTHVETLLTFSALKRHFKLYLTSSTERFSQNFKVVVVDGKNESEYTVKWQDFFTGHVVGEPDSRVLAHIRDDDVIIRINTDGAEYNIEPLWRFVNDTKDKRMLVYKSEDIKNVSRLQSPKVCGYLKVDNEELLPKGLVDREPPEELVHRVKRRADPDPMKNTCKLLVVADHRFYRYMGRGEESTTTNYLIELIDRVDDIYRNTSWDNAGFKGYGIQIEQIRILKSPQEVKPGEKHYNMAKSYPNEEKDAWDVKMLLEQFSFDIAEEASKVCLAHLFTYQDFDMGTLGLAYVGSPRANSHGGVCPKAYYSPVGKKNIYLNSGLTSTKNYGKTILTKEADLVTTHELGHNFGAEHDPDGLAECAPNEDQGGKYVMYPIAVSGDHENNKMFSNCSKQSIYKTIESKAQECFQERSNKVCGNSRVDEGEECDPGIMYLNNDTCCNSDCTLKEGVQCSDRNSPCCKNCQFETAQKKCQEAINATCKGVSYCTGNSSECPPPGNAEDDTVCLDLGKCKDGKCIPFCEREQQLESCACNETDNSCKVCCRDLSGRCVPYVDAEQKNLFLRKGKPCTVGFCDMNGKCEKRVQDVIERFWDFIDQLSINTFGKFLADNIVGSVLVFSLIFWIPFSILVHCVDKKLDKQYESLSLFHPSNVEMLSSMDSASVRIIKPFPAPQTPGRLQPAPVIPSAPAAPKLDHQRMDTIQEDPSTDSHMDEDGFEKDPFPNSSTAAKSFEDLTDHPVTRSEKAASFKLQRQNRVDSKETEC

SEQ ID NO: 27224 - protein, 259 aa, Artificial Sequence
  Synthetic polypeptide
RISAVGEKLDSLLSDYDILSLSNIQQHSVRKRDLQTSTHVETLLTFSALKRHFKLYLTSSTERFSQNFKVVVVDGKNESEYTVKWQDFFTGHVVGEPDSRVLAHIRDDDVIIRINTDGAEYNIEPLWRFVNDTKDKRMLVYKSEDIKNVSRLQSPKVCGYLKVDNEELLPKGLVDREPPEELVHRVKRRADPDPMKNTCKLLVVADHRFYRYMGRGEESTTTNYLIELIDRVDDIYRNTSWDNAGFKGYGIQIEQLLFE

SEQ ID NO: 27225 - protein, 11 aa, Artificial Sequence
  Synthetic polypeptide
LSYLRWPRAIG

SEQ ID NO: 27226 - protein, 222 aa, Artificial Sequence
  Synthetic polypeptide
FFSNEIFLIKLLKMAQGHRVETEHYEEIEDYDYNNPNDTSNFCPGLQAADSDDEDLDDLFVGPVGNSDLSPYPCHPPKTAQQNGDTPEAQGLDITTYGESNLVAEPQKVNKIEIHYAKTAKKMDMKKLKQSMWSLLTALSGKEADAEANHREAGKEAALAEVADEKMLSGLTKDLQRSLPPVMAQNLSIPLAFACLLHLANEKNLKLEGTEDLSDVLVRQGD

SEQ ID NO: 27227 - protein, 99 aa, Artificial Sequence
  Synthetic polypeptide
FFSNEIFLIKLLKMAQGHRVETEHYEEIEDYDYNNPNDTSNFCPGLQAADSDDEDLDDLFVGPVGNSDLSPYPCHPPKTAQQNGDTPEAQGLDITTYGE

SEQ ID NO: 27228 - protein, 191 aa, Artificial Sequence
  Synthetic polypeptide
FFSNEIFLIKLLKMAQGHRVETEHYEEIEDYDYNNPNDTSNFCPGLQTAQQNGDTPEAQGLDITTYGESNLVAEPQKVNKIEIHYAKTAKKMDMKKLKQSMWSLLTALSGKEADAEANHREAGKEAALAEVADEKMLSGLTKDLQRSLPPVMAQNLSIPLAFACLLHLANEKNLKLEGTEDLSDVLVRQGD

SEQ ID NO: 27229 - protein, 14 aa, Artificial Sequence
  Synthetic polypeptide
GLSEGSPTWPSCRR

SEQ ID NO: 27230 - protein, 16 aa, Artificial Sequence
  Synthetic polypeptide
VREVPPGHRAEGEQRG

SEQ ID NO: 27231 - protein, 166 aa, Artificial Sequence
  Synthetic polypeptide
PGPMAHACNPSTLGGQGIWSAALNGDLGRVKHLIQKAEDPSQPDSAGYTALHYASRNGHYAVCQFLLESGAKCDAQTHGGATALHRASYCGHTEIARLLLSHGSNPRVVDDDGMTSLHKAAERGHGDICSLLLQHSPALKAIRDRKARLACDLLPCNSDLRDLLSS

SEQ ID NO: 27232 - protein, 22 aa, Artificial Sequence
  Synthetic polypeptide
PARWLTPVIPALWEAKESGRQP

SEQ ID NO: 27233 - protein, 62 aa, Artificial Sequence
  Synthetic polypeptide
SQHFGRPRNLVGSPEWRPGPSEAFNPEGRGPKSARLGRLHCAALCQPQWALRCVPVPAGKRS

SEQ ID NO: 27234 - protein, 42 aa, Artificial Sequence
  Synthetic polypeptide
RQRKLNTAVLAQPAPGPHEAIISQAIPGLCALATLPGATAKG

SEQ ID NO: 27235 - protein, 131 aa, Artificial Sequence
  Synthetic polypeptide
TQLSSLSRLLGLMRPSSLRQYLDSVPLPPCQEQQPKASAELDHKACYLCHSLLMLAGVVVSCQDITPDQWGELQLLCMQLDRHISTQIRESPQAMHRTMLKDLATQTYIRWQELLTHCQPQAQYFSPWKDI

SEQ ID NO: 27236 - protein, 31 aa, Artificial Sequence
  Synthetic polypeptide
ISLQTDQLLEDILETEKTEHSCPRSAGSWAS

SEQ ID NO: 27237 - protein, 34 aa, Artificial Sequence
  Synthetic polypeptide
EWKQPEALSRSRCWYHTSCTACRTMSQHSFSQRA

SEQ ID NO: 27238 - protein, 15 aa, Artificial Sequence
  Synthetic polypeptide
VNIRSVREHNRSTAF

SEQ ID NO: 27239 - protein, 1842 aa, Artificial Sequence
  Synthetic polypeptide
GPQQKQMLVPHFLYSLQNHESTFVQSESIIEVLRFDDGGLLQTETTLGLSSYQQKSISLYRGNCRPIRFEPPMLDFHEQPVGMPKMEKVYLHNPSSEETITLVSISATTSHFHASFFQNRKILPGGNTSFDVVFLARVVGNVENTLFINTSNHGVFTYQVFGVGVPNPYRLRPFLGARVPVNSSFSPIINIHNPHSEPLQVVEMYSSGGDLHLELPTGQQGGTRKLWEIPPYETKGVMRASFSSREADNHTAFIRIKTNASDSTEFIILPVEVEVTTAPGIYSSTEMLDFGTLRTQDLPKVLNLHLLNSGTKDVPITSVRPTPQNDAITVHFKPITLKASESKYTKVASISFDASKAKKPSQFSGKITVKAKEKSYSKLEIPYQAEVLDGYLGFDHAATLFHIRDSPADPVERPIYLTNTFSFAILIHDVLLPEEAKTMFKVHNFSKPVLILPNESGYIFTLLFMPSTSSMHIDNNILLITNASKFHLPVRVYTGFLDYFVLPPKIEERFIDFGVLSATEASNILFAIINSNPIELAIKSWHIIGDGLSIELVAVERGNRTTIISSLPEFEKSSLSDQSSVTLASGYFAVFRVKLTAKKLEGIHDGAIQITTDYEILTIPVKAVIAVGSLTCFPKHVVLPPSFPGKIVHQSLNIMNSFSQKVKIQQIRSLSEDVRFYYKRLRGNKEDLEPGKKSKIANIYFDPGLQCGDHCYVGLPFLSKSEPKVQPGVAMQEDMWDADWDLHQSLFKGWTGIKENSGHRLSAIFEVNTDLQKNIISKITAELSWPSILSSPRHLKFPLTNTNCSSEEEITLENPADVPVYVQFIPLALYSNPSVFVDKLVSRFNLSKVAKIDLRTLEFQVFRNSAHPLQSSTGFMEGLSRHLILNLILKPGEKKSVKVKFTPVHNRTVSSLIIVRNNLTVMDAVMVQGQGTTENLRVAGKLPGPGSSLRFKITEALLKDCTDSLKLREPNFTLKRTFKVENTGQLQIHIETIEISGYSCEGYGFKVVNCQEFTLSANASRDIIILFTPDFTASRVIRELKFITTSGSEFVFILNASLPYHMLATCAEALPRPNWELALYIIISGIMSALFLLVIGTAYLEAQGIWEPFRRRLSFEASNPPFDVGRPFDLRRIVGISSEGNLNTLSCDPGHSRGFCGAGGSSSRPSAGSHKQCGPSVHPHSSHSNRNSADVENVRAKNSSSTSSRTSAQAASSQSANKTSPLVLDSNTVTQGHTAGRKSKGAKQSQHGSQHHAHSPLEQHPQPPLPPPVPQPQEPQPERLSPAPLAHPSHPERASSARHSSEDSDITSLIEAMDKDFDHHDSPALEVFTEQPPSPLPKSKGKGKPLQRKVKPPKKQEEKEKKGKGKPQEDELKDSLADDDSSSTTTETSNPDTEPLLKEDTEKQKGKQAMPEKHESEMSQVKQKSKKLLNIKKEIPTDVKPSSLELPYTPPLESKQRRNLPSKIPLPTAMTSGSKSRNAQKTKGTSKLVDNRPPALAKFLPNSQELGNTSSSEGEKDSPPPEWDSVPVHKPGSSTDSLYKLSLQTLNADIFLKQRQTSPTPASPSPPAAPCPFVARGSYSSIVNSSSSSDPKIKQPNGSKHKLTKAASLPGKNGNPTFAAVTAGYDKSPGGNGFAKVSSNKTGFSSSLGISHAPVDSDGSDSSGLWSPVSNPSSPDFTPLNSFSAFGNSFNLTGEVFSKLGLSRSCNQASQRSWNEFNSGPSYLWESPATDPSPSWPASSGSPTHTATSVLGNTSGLWSTTPFSSSIWSSNLSSALPFTTPANTLASIGLMGTENSPAPHAPSTSSPADDLGQTYNPWRIWSPTIGRRSSDPWSNSHFPHEN

SEQ ID NO: 27240 - protein, 330 aa, Artificial Sequence
  Synthetic polypeptide
GPQQKQMLVPHFLYSLQNHESTFVQSESIIEVLRFDDGGLLQTETTLGLSSYQQKSISLYRGNCRPIRFEPPMLDFHEQPVGMPKMEKVYLHNPSSEETITLVSISATTSHFHASFFQNRKILPGGNTSFDVVFLARVVGNVENTLFINTSNHGVFTYQVFGVGVPNPYRLRPFLGARVPVNSSFSPIINIHNPHSEPLQVVEMYSSGGDLHLELPTGQQGGTRKLWEIPPYETKGVMRASFSSREADNHTAFIRIKTNASDSTEFIILPVEVEVTTAPGIYSSTEMLDFGTLRTQDLPKVLNLHLLNSGTKDVPITHRRQKSHLSFLGK

SEQ ID NO: 27241 - protein, 57 aa, Artificial Sequence
  Synthetic polypeptide
MELTIPGVGHSSGSLNEGKSPRQCLKEGYCNSLKYAFFECKRSVLDNRARFRGRKGY

SEQ ID NO: 27242 - protein, 37 aa, Artificial Sequence
  Synthetic polypeptide
GVNHPGRRSQLGLTERRKITSAVFEGRILQLFEVRIF

SEQ ID NO: 27243 - protein, 56 aa, Artificial Sequence
  Synthetic polypeptide
MELTIPGVGHSSGSLNEGKSPRQCLKEGYCNSLKYAFFECKRSVMESRSVARAGVQ

SEQ ID NO: 27244 - protein, 48 aa, Artificial Sequence
  Synthetic polypeptide
MELTIPGVGKSPRQCLKEGYCNSLKYAFFECKRSVLDNRARFRGRKGY

SEQ ID NO: 27245 - protein, 28 aa, Artificial Sequence
  Synthetic polypeptide
GVNHPGRRKITSAVFEGRILQLFEVRIF

SEQ ID NO: 27246 - protein, 47 aa, Artificial Sequence
  Synthetic polypeptide
MELTIPGVGKSPRQCLKEGYCNSLKYAFFECKRSVMESRSVARAGVQ

SEQ ID NO: 27247 - protein, 38 aa, Artificial Sequence
  Synthetic polypeptide
EVAVSRDSTTALQPGQQRPSRVEMWPSSEMLSHNWKLI

SEQ ID NO: 27248 - protein, 17 aa, Artificial Sequence
  Synthetic polypeptide
AETVPLHSSLGNRGHPE

SEQ ID NO: 27249 - protein, 109 aa, Artificial Sequence
  Synthetic polypeptide
GCSEPRQYHCTPAWATEAIQSRDVAQFRNVVTQLEADLDITKRQLGTERFERERAVQELRRQNYSSNAYHMSSTMKPNTKCHSPERAHHRSPDRGLDRSLEENLCYRDF

SEQ ID NO: 27250 - protein, 101 aa, Artificial Sequence
  Synthetic polypeptide
GCSEPRQYHCTPAWATEAIQSRDVAQFRNVVTQLEADLDITKRQLGTERFERERAVQELRRQNYSSNAYHMSSTMKPNTKCHSPERAHHRSPDRGLDRSLE

SEQ ID NO: 27251 - protein, 25 aa, Artificial Sequence
  Synthetic polypeptide
SQHFRRPRREDHEVRRSRPSWLTRL

SEQ ID NO: 27252 - protein, 60 aa, Artificial Sequence
  Synthetic polypeptide
HASKESNHYTYGWDFALSSSMAPRQTTDCDKRCGVSYLYRLDSSQIHQIKNSRKSVSGLT

SEQ ID NO: 27253 - protein, 202 aa, Artificial Sequence
  Synthetic polypeptide
RAWWLTPVISALSEAEAGGSRGQEIETILANTPLKRAITTLMAGILRLVVQWPPGRLQTVTKGVESLICTDWIRHKFTRSRIPEKVFQASPEDHEKYGGDPQNPHKLHIVTRIKSTRRRPYWEKDIIKMLGLEKAHTPQVHKNIPSVNAKLKVVKHLIRIKPLKLPQGLPAEENMSNTCLKSTGELVVQWHLKPVEQKAHES

SEQ ID NO: 27254 - protein, 49 aa, Artificial Sequence
  Synthetic polypeptide
HFGRPRRADHKVRSSRPAWPTWCFRPHLKIMKNTVGIHRTLINCILLPE

SEQ ID NO: 27255 - protein, 38 aa, Artificial Sequence
  Synthetic polypeptide
PGVVVHTCNPSTLGGQGGRITRSGVRDQPGQHGVSGLT

SEQ ID NO: 27256 - protein, 149 aa, Artificial Sequence
  Synthetic polypeptide
QAWWFTPVILALWEAKAGGSQGQEFETSLANMVFQASPEDHEKYGGDPQNPHKLHIVTRIKSTRRRPYWEKDIIKMLGLEKAHTPQVHKNIPSVNAKLKVVKHLIRIKPLKLPQGLPAEENMSNTCLKSTGELVVQWHLKPVEQKAHES

SEQ ID NO: 27257 - protein, 119 aa, Artificial Sequence
  Synthetic polypeptide
QAWWFTPVILALWEAKAGGSQGQEFETSLANMVFQASPEDHEKYGGDPQNPHKLHIVTRIKSTRRRPYWEKDIIKMLGLEKAHTPQVHKNIPSVNAKLKVVKHLIRFVVSSQLFLKCIA

SEQ ID NO: 27258 - protein, 89 aa, Artificial Sequence
  Synthetic polypeptide
QAWWFTPVILALWEAKAGGSQGQEFETSLANMVFQASPEDHEKYGGDPQNPHKLHIVTRIKSTRRRPYWEKDIIKMLGLEKVCNYFNHL

SEQ ID NO: 27259 - protein, 180 aa, Artificial Sequence
  Synthetic polypeptide
DRAWWFTSVIPTLWESKEWLSKGHGEYREIPSERDFFQEVKESENVVCHFYRDSTFRCKILDRHLAILSKKHLETKFLKLNVEKAPFLCERLHIKVIPTLALLKDGKTQDYVVGFTDLGNTDDFTTETLEWRLGSSDILNYSGNLMEPPFQNQKKFGTNFTKLEKKTIRGKKYDSDSDDD

SEQ ID NO: 27260 - protein, 51 aa, Artificial Sequence
  Synthetic polypeptide
SQHFGSPRNGFLKDMGNTEKSLVKETFFKKSRRVKMWFAISTETPHSGVKY

SEQ ID NO: 27261 - protein, 20 aa, Artificial Sequence
  Synthetic polypeptide
PGMVVHICNPNTLGVQGMAF

SEQ ID NO: 27262 - protein, 142 aa, Artificial Sequence
  Synthetic polypeptide
DRAWWFTSVIPTLWESKEWLSKGHGEYREIPSERDFFQEVKESENVVCHFYRDSTFRCKILDRHLAILSKKHLETKFLKLNVEKAPFLCERLHIKVIPTLALLKDGKTQDYVVGFTDLGNTDDFTTETLEWRLGSSDILNYR

SEQ ID NO: 27263 - protein, 76 aa, Artificial Sequence
  Synthetic polypeptide
DRAWWFTSVIPTLWESKEWLSKGHGEYREIPSERDFFQEVKESENVVCHFYRDSTFSVAYLGVRSFSSVMLFSFSS

SEQ ID NO: 27264 - protein, 51 aa, Artificial Sequence
  Synthetic polypeptide
SQHFGSPRNGFLKDMGNTEKSLVKETFFKKSRRVKMWFAISTETPHSALHI

SEQ ID NO: 27265 - protein, 89 aa, Artificial Sequence
  Synthetic polypeptide
DRAWWFTSVIPTLWESKEWLSKGHGEYREIPSERDFFQEVKESENVVCHFYRDSTFRCKILDRHLAILSKKHLETKFLKLNVEKAPFLC

SEQ ID NO: 27266 - protein, 287 aa, Artificial Sequence
  Synthetic polypeptide
VIPLSVYLLVSHLAALWVRSTVVVSPRLCSDRIGVTLMEPLTKMTGTQPIGSLGSICPNSYGSVKDVCTAKFGSKHFFHLIPNEATICSLLLCNRNDTAWDELKLTCQTALHVLQLTLKEPWALLGGGCTETHLAAYIRHKTHNDPESILKDDECTQTELQLIAEAFCSALESVVGSLEHDGGEILTDMKYGHLWSVQADSPCVANWPDLLSQCGCGLYNSQEELNWSFLRSTRRPFVPQSCLPHEAVGSASNLTLDCLTAKLSGLQVAVETANLILDLSYVIEDKN

SEQ ID NO: 27267 - protein, 21 aa, Artificial Sequence
  Synthetic polypeptide
QHSGLDQLWWYLRAYVQTELE

SEQ ID NO: 27268 - protein, 23 aa, Artificial Sequence
  Synthetic polypeptide
INCGGISALMFRQNWSDSDGTPD

SEQ ID NO: 27269 - protein, 198 aa, Artificial Sequence
  Synthetic polypeptide
LCEENDSGTLDTVGAVVVDHEGNVAAAVSSGGLALKHPGRVGQAALYGCGCWAENTGAHNPYSTAVSTSGCGEHLVRTILARECSHALQAEDAHQALLETMQNKFISSPFLASEDGVLGGVIVLRSCRCSAEPDSSQNKQTLLVEFLWSHTTESMCVGYMSAQDGKAKTHISRLPPGAVAGQSVAIEGGVCRLESPVN

SEQ ID NO: 27270 - protein, 20 aa, Artificial Sequence
  Synthetic polypeptide
AFSPEINDYVRKMTQALWTR

SEQ ID NO: 27271 - protein, 106 aa, Artificial Sequence
  Synthetic polypeptide
LCEENDSGTLDTVGAVVVDHEGNVAAAVSSGGLALKHPGRVGQAALYGCGCWAENTGAHNPYSTAVSTSGCGEHLVRTILARECSHALQAEDAHQALLETMQNKFI

SEQ ID NO: 27272 - protein, 12 aa, Artificial Sequence
  Synthetic polypeptide
HNDERDRASELL

SEQ ID NO: 27273 - protein, 321 aa, Artificial Sequence
  Synthetic polypeptide
DFLESWGAFRVDTMMKGIALASFYEDGGDEDIVTISQATPSSVSRGTAPSDNRVTSFRDLIHDQDEDEEEEEGQRFYAGGSERSGQQIVGPPRKKSPNELVDDLFKGAKEHGAVAVERVTKSPGETSKPRVHVVLKLWKSGFSLDNGELRSYQDPSNAQFLESIRRGEVPAELRRLAHGGQVNLDMEDHRDEDFVKPKGAFKAFTGEGQKLGSTAPQVLSTSSPAQQAENEAKASSSILIDESEPTTNIQIRLADGGRLVQKFNHSHRISDIRLFIVDARPAMAATSFILMTTFPNKELADESQTLKEANLLNAVIVQRLT

SEQ ID NO: 27274 - protein, 4 aa, Artificial Sequence
  Synthetic polypeptide
KGSR

SEQ ID NO: 27275 - protein, 354 aa, Artificial Sequence
  Synthetic polypeptide
DFLESWGAFRVDTMMKGIALASFYEDGGDEDIVTISQATPSSVSRGTAPSDNRVTSFRDLIHDQDEDEEEEEGQRSRFYAGGSERSGQQIVGPPRKKSPNELVDDLFKGAKEHGAVAVERVTKSPGETSKPRPFAGGGYRLGAAPEEESAYVAGEKRQHSSQDVHVVLKLWKSGFSLDNGELRSYQDPSNAQFLESIRRGEVPAELRRLAHGGQVNLDMEDHRDEDFVKPKGAFKAFTGEGQKLGSTAPQVLSTSSPAQQAENEAKASSSILIDESEPTTNIQIRLADGGRLVQKFNHSHRISDIRLFIVDARPAMAATSFILMTTFPNKELADESQTLKEANLLNAVIVQRLT

SEQ ID NO: 27276 - protein, 352 aa, Artificial Sequence
  Synthetic polypeptide
DFLESWGAFRVDTMMKGIALASFYEDGGDEDIVTISQATPSSVSRGTAPSDNRVTSFRDLIHDQDEDEEEEEGQRFYAGGSERSGQQIVGPPRKKSPNELVDDLFKGAKEHGAVAVERVTKSPGETSKPRPFAGGGYRLGAAPEEESAYVAGEKRQHSSQDVHVVLKLWKSGFSLDNGELRSYQDPSNAQFLESIRRGEVPAELRRLAHGGQVNLDMEDHRDEDFVKPKGAFKAFTGEGQKLGSTAPQVLSTSSPAQQAENEAKASSSILIDESEPTTNIQIRLADGGRLVQKFNHSHRISDIRLFIVDARPAMAATSFILMTTFPNKELADESQTLKEANLLNAVIVQRLT

SEQ ID NO: 27277 - protein, 354 aa, Artificial Sequence
  Synthetic polypeptide
DFLESWGAFRVDTMMKGIALASFYEDGGDEDIVTISQATPSSVSRGTAPSDNRVTSFRDLIHDQDEDEEEEEGQRDRFYAGGSERSGQQIVGPPRKKSPNELVDDLFKGAKEHGAVAVERVTKSPGETSKPRPFAGGGYRLGAAPEEESAYVAGEKRQHSSQDVHVVLKLWKSGFSLDNGELRSYQDPSNAQFLESIRRGEVPAELRRLAHGGQVNLDMEDHRDEDFVKPKGAFKAFTGEGQKLGSTAPQVLSTSSPAQQAENEAKASSSILIDESEPTTNIQIRLADGGRLVQKFNHSHRISDIRLFIVDARPAMAATSFILMTTFPNKELADESQTLKEANLLNAVIVQRLT

SEQ ID NO: 27278 - protein, 256 aa, Artificial Sequence
  Synthetic polypeptide
DFLESWGAFRVDTMMKGIALASFYEDGGDEDIVTISQATPSSVSRGTAPSDNRVTSFRDLIHDQDEDEEEEEGQRFYAGGSERSGQQIVGPPRKKSPNELVDDLFKGAKEHGAVAVERVTKSPGETSKPRPFAGGGYRLGAAPEEESAYVAGEKRQHSSQDVHVVLKLWKSGFSLDNGELRSYQDPSNAQFLESIRRGEVPAELRRLAHGGQVNLDMEDHRDEDFVKPKGAFKAFTGEGQKLGRLSCFPPFKPLFS

SEQ ID NO: 27279 - protein, 53 aa, Artificial Sequence
  Synthetic polypeptide
DFLESWGAFRVDTMMKGIALASFYEDGGDEDIVTISQATPSSVSRGTAPREKR

SEQ ID NO: 27280 - protein, 87 aa, Artificial Sequence
  Synthetic polypeptide
DFLESWGAFRVDTMMKGIALASFYEDGGDEDIVTISQATPSSVSRGTAPSDNRVTSFRDLIHDQDEDEEEEEGQRGHSVCHMNGKVR

SEQ ID NO: 27281 - protein, 328 aa, Artificial Sequence
  Synthetic polypeptide
RDEAHSLGNLAVQVQIPVLLLISWIALASFYEDGGDEDIVTISQATPSSVSRGTAPSDNRVTSFRDLIHDQDEDEEEEEGQRFYAGGSERSGQQIVGPPRKKSPNELVDDLFKGAKEHGAVAVERVTKSPGETSKPRVHVVLKLWKSGFSLDNGELRSYQDPSNAQFLESIRRGEVPAELRRLAHGGQVNLDMEDHRDEDFVKPKGAFKAFTGEGQKLGSTAPQVLSTSSPAQQAENEAKASSSILIDESEPTTNIQIRLADGGRLVQKFNHSHRISDIRLFIVDARPAMAATSFILMTTFPNKELADESQTLKEANLLNAVIVQRLT

SEQ ID NO: 27282 - protein, 26 aa, Artificial Sequence
  Synthetic polypeptide
EMKHTVSEIWLCRFKFQFSYLSLGSR

SEQ ID NO: 27283 - protein, 28 aa, Artificial Sequence
  Synthetic polypeptide
STQSRKSGCAGSNSSSPTYLLDRASELL

SEQ ID NO: 27284 - protein, 361 aa, Artificial Sequence
  Synthetic polypeptide
RDEAHSLGNLAVQVQIPVLLLISWIALASFYEDGGDEDIVTISQATPSSVSRGTAPSDNRVTSFRDLIHDQDEDEEEEEGQRSRFYAGGSERSGQQIVGPPRKKSPNELVDDLFKGAKEHGAVAVERVTKSPGETSKPRPFAGGGYRLGAAPEEESAYVAGEKRQHSSQDVHVVLKLWKSGFSLDNGELRSYQDPSNAQFLESIRRGEVPAELRRLAHGGQVNLDMEDHRDEDFVKPKGAFKAFTGEGQKLGSTAPQVLSTSSPAQQAENEAKASSSILIDESEPTTNIQIRLADGGRLVQKFNHSHRISDIRLFIVDARPAMAATSFILMTTFPNKELADESQTLKEANLLNAVIVQRLT

SEQ ID NO: 27285 - protein, 359 aa, Artificial Sequence
  Synthetic polypeptide
RDEAHSLGNLAVQVQIPVLLLISWIALASFYEDGGDEDIVTISQATPSSVSRGTAPSDNRVTSFRDLIHDQDEDEEEEEGQRFYAGGSERSGQQIVGPPRKKSPNELVDDLFKGAKEHGAVAVERVTKSPGETSKPRPFAGGGYRLGAAPEEESAYVAGEKRQHSSQDVHVVLKLWKSGFSLDNGELRSYQDPSNAQFLESIRRGEVPAELRRLAHGGQVNLDMEDHRDEDFVKPKGAFKAFTGEGQKLGSTAPQVLSTSSPAQQAENEAKASSSILIDESEPTTNIQIRLADGGRLVQKFNHSHRISDIRLFIVDARPAMAATSFILMTTFPNKELADESQTLKEANLLNAVIVQRLT

SEQ ID NO: 27286 - protein, 361 aa, Artificial Sequence
  Synthetic polypeptide
RDEAHSLGNLAVQVQIPVLLLISWIALASFYEDGGDEDIVTISQATPSSVSRGTAPSDNRVTSFRDLIHDQDEDEEEEEGQRDRFYAGGSERSGQQIVGPPRKKSPNELVDDLFKGAKEHGAVAVERVTKSPGETSKPRPFAGGGYRLGAAPEEESAYVAGEKRQHSSQDVHVVLKLWKSGFSLDNGELRSYQDPSNAQFLESIRRGEVPAELRRLAHGGQVNLDMEDHRDEDFVKPKGAFKAFTGEGQKLGSTAPQVLSTSSPAQQAENEAKASSSILIDESEPTTNIQIRLADGGRLVQKFNHSHRISDIRLFIVDARPAMAATSFILMTTFPNKELADESQTLKEANLLNAVIVQRLT

SEQ ID NO: 27287 - protein, 263 aa, Artificial Sequence
  Synthetic polypeptide
RDEAHSLGNLAVQVQIPVLLLISWIALASFYEDGGDEDIVTISQATPSSVSRGTAPSDNRVTSFRDLIHDQDEDEEEEEGQRFYAGGSERSGQQIVGPPRKKSPNELVDDLFKGAKEHGAVAVERVTKSPGETSKPRPFAGGGYRLGAAPEEESAYVAGEKRQHSSQDVHVVLKLWKSGFSLDNGELRSYQDPSNAQFLESIRRGEVPAELRRLAHGGQVNLDMEDHRDEDFVKPKGAFKAFTGEGQKLGRLSCFPPFKPLFS

SEQ ID NO: 27288 - protein, 60 aa, Artificial Sequence
  Synthetic polypeptide
RDEAHSLGNLAVQVQIPVLLLISWIALASFYEDGGDEDIVTISQATPSSVSRGTAPREKR

SEQ ID NO: 27289 - protein, 94 aa, Artificial Sequence
  Synthetic polypeptide
RDEAHSLGNLAVQVQIPVLLLISWIALASFYEDGGDEDIVTISQATPSSVSRGTAPSDNRVTSFRDLIHDQDEDEEEEEGQRGHSVCHMNGKVR

SEQ ID NO: 27290 - protein, 21 aa, Artificial Sequence
  Synthetic polypeptide
RISDIMHAGPSTRCLWAEQQE

SEQ ID NO: 27291 - protein, 271 aa, Artificial Sequence
  Synthetic polypeptide
VTSCTQGPAHDASGQSSRNDWQVLQPEGPMLVAEGETLLLRCMVVGSCTDGMIKWVKVSTQDQQEIYNFKRGSFPGVMPMIQRTSEPLNCDYSIYIHNVTREHTGTYHCVRFDGLSEHSEMKSDEGTSVLVKGAGDPEPDLWIIQPQELVLGTTGDTVFLNCTVLGDGPPGPIRWFQGAGLSREAIYNFGGISHPKETAVQASNNDFSILLQNVSSEDAGTYYCVKFQRKPNRQYLSGQGTSLKVKAKSTSSKEAEFTSEPATEMSPTGLQ

SEQ ID NO: 27292 - protein, 38 aa, Artificial Sequence
  Synthetic polypeptide
HHARRAQHTMPLGRAAGMTGRCYSPRAPCWWQKVRHFY

SEQ ID NO: 27293 - protein, 324 aa, Artificial Sequence
  Synthetic polypeptide
VTSCTQGPAHDASGQSSRNDWQVLQPEGPMLVAEGETLLLRCMVVGSCTDGMIKWVKVSTQDQQEIYNFKRGSFPGVMPMIQRTSEPLNCDYSIYIHNVTREHTGTYHCVRFDGLSEHSEMKSDEGTSVLVKGAGDPEPDLWIIQPQELVLGTTGDTVFLNCTVLGDGPPGPIRWFQGAGLSREAIYNFGGISHPKETAVQASNNDFSILLQNVSSEDAGTYYCVKFQRKPNRQYLSGQGTSLKVKAKSTSSKEAEFTSEPATEMSPTGLLVVFAPVVLGLKAITLAALLLALATSRRSPGQEDVKTTGPAGAMNTLAWSKGQE

SEQ ID NO: 27294 - protein, 226 aa, Artificial Sequence
  Synthetic polypeptide
VTSCTQGPAHDASGQSSRNDWQVLQPEGPMLVAEGAGDPEPDLWIIQPQELVLGTTGDTVFLNCTVLGDGPPGPIRWFQGAGLSREAIYNFGGISHPKETAVQASNNDFSILLQNVSSEDAGTYYCVKFQRKPNRQYLSGQGTSLKVKAKSTSSKEAEFTSEPATEMSPTGLLVVFAPVVLGLKAITLAALLLALATSRRSPGQEDVKTTGPAGAMNTLAWSKGQE

SEQ ID NO: 27295 - protein, 60 aa, Artificial Sequence
  Synthetic polypeptide
HHARRAQHTMPLGRAAGMTGRCYSPRAPCWWQKELGTLNQTCGSSSPRNWCWGPLETLSF

SEQ ID NO: 27296 - protein, 68 aa, Artificial Sequence
  Synthetic polypeptide
VTSCTQGPAHDASGQSSRNDWQVLQPEGPMLVAEGETLLLRCMVVGSCTDGMIKWVKGAHWNLPLCEV

SEQ ID NO: 27297 - protein, 154 aa, Artificial Sequence
  Synthetic polypeptide
ALSLPATIHVRCHLLLLAFCHDCEASPAIWNYFAKDENITKGGEVTDHSVRDQDHPDGQENDSTKNEIKIETESQSSYMETEELSSNQEDAVIVEQPEVIPLTEDQEEKEGEKAPGEDTPRMPGKSEGSSDLENTPGPDAGAQDEAKEQRNGTK

SEQ ID NO: 27298 - protein, 34 aa, Artificial Sequence
  Synthetic polypeptide
DVTCSSLPSAMIVRLPQPYGTILQRMKILQKAVK

SEQ ID NO: 27299 - protein, 12 aa, Artificial Sequence
  Synthetic polypeptide
GFPSHMELFCKG

SEQ ID NO: 27300 - protein, 177 aa, Artificial Sequence
  Synthetic polypeptide
ALSLPATIHVRCHLLLLAFCHDCEASPAIWNYFAKDENITKGGEVTDHSVRDQDHPDGQENDSTKNEIKIETESQSSYMETEELSSNQEDAVIVEQPEVIPLTEDQEEKEGEKAPGEDTPRMPGKSEGSSDLENTPGPDVEMNSQVDKVNDPTESQQEDQLIAGAQDEAKEQRNGTK

SEQ ID NO: 27301 - protein, 59 aa, Artificial Sequence
  Synthetic polypeptide
PTWKLMKPCCITYAFSWKPNFCKMISVRQRTGTRRIFWKFRPISASCSRSSTPLLQHPL

SEQ ID NO: 27302 - protein, 26 aa, Artificial Sequence
  Synthetic polypeptide
SQHFGRPRWVDHLRSGVQDQPDQHGS

SEQ ID NO: 27303 - protein, 530 aa, Artificial Sequence
  Synthetic polypeptide
GQEFKTSLTNMEADEALLHNLRLQLEAQFLQDDISAAKDRHKKNLLEVQTYISILQQIIHTTPPASIVTSGMREEKLLTEREVAALRSQLEEGREVLSHLQAQRVELQAQTTTLEQAIKSAHECYDDEIQLYNEQIETLRKEIEETERVLEKSSYDCRQLAVAQQTLKNELDRYHRIIEIEGNRLTSAFIETPIPLFTQSHGVSLSTGSGGKDLTRALQDITAAKPRQKALPKNVPRRKEIITKDKTNGALEDAPLKGLEDTKLVQVVLKEESESKFESESKEVSPLTQEGAPEDVPDGGQISKGFGKLYRKVKEKVRSPKEPETPTELYTKERHVLVTGDANYVDPRFYVSSITAKGGVAVSVAEDSVLYDGQVEPSPESPKPPLENGQVGLQEKEDGQPIDQQPIDKEIEPDGAELEGPEEKREGEERDEESRRPCAMVTPGAEEPSIPEPPKPAADQDGAEVLGTRSRSLPEKGPPKALAYKTVEVVESIEKISTESIQTYEETAVIVETMIGKTKSDKKKSGEKSS

SEQ ID NO: 27304 - protein, 6 aa, Artificial Sequence
  Synthetic polypeptide
EKMHKT

SEQ ID NO: 27305 - protein, 38 aa, Artificial Sequence
  Synthetic polypeptide
RKCIKHECQANGPEDLNRACIAEKLGGSLIVAFEGCPV

SEQ ID NO: 27306 - protein, 3 aa, Artificial Sequence
  Synthetic polypeptide
ENA

SEQ ID NO: 27307 - protein, 30 aa, Artificial Sequence
  Synthetic polypeptide
IRGFVTELSETLRGKFGKKKTFVFWENRLF

SEQ ID NO: 27308 - protein, 16 aa, Artificial Sequence
  Synthetic polypeptide
SSREAEAGESLESEAS

SEQ ID NO: 27309 - protein, 76 aa, Artificial Sequence
  Synthetic polypeptide
KDYMGPGAVAHACNPLGRLRQENRLNPRLRDGVIRDIERQIRKKENIRLLGEQIILTEQLEAEREKMLLAKGSQKS

SEQ ID NO: 27310 - protein, 28 aa, Artificial Sequence
  Synthetic polypeptide
LKASSSQGEGSMEGTHGIQGCGCGFHPG

SEQ ID NO: 27311 - protein, 668 aa, Artificial Sequence
  Synthetic polypeptide
RPPVPRGKEAWRAHMAFRDVAVDFTQDEWRLLSPAQRTLYREVMLENYSNLVSLGISFSKPELITQLEQGKETWREEKKCSPATCPADPEPELYLDPFCPPGFSSQKFPMQHVLCNHPPWIFTCLCAEGNIQPGDPGPGDQEKQQQASEGRPWSDQAEGPEGEGAMPLFGRTKKRTLGAFSRPPQRQPVSSRNGLRGVELEASPAQSGNPEETDKLLKRIEVLGFGTVNCGECGLSFSKMTNLLSHQRIHSGEKPYVCGVCEKGFSLKKSLARHQKAHSGEKPIVCRECGRGFNRKSTLIIHERTHSGEKPYMCSECGRGFSQKSNLIIHQRTHSGEKPYVCRECGKGFSQKSAVVRHQRTHLEEKTIVCSDCGLGFSDRSNLISHQRTHSGEKPYACKECGRCFRQRTTLVNHQRTHSKEKPYVCGVCGHSFSQNSTLISHRRTHTGEKPYVCGVCGRGFSLKSHLNRHQNIHSGEKPIVCKDCGRGFSQQSNLIRHQRTHSGEKPMVCGECGRGFSQKSNLVAHQRTHSGERPYVCRECGRGFSHQAGLIRHKRKHSREKPYMCRQCGLGFGNKSALITHKRAHSEEKPCVCRECGQGFLQKSHLTLHQMTHTGEKPYVCKTCGRGFSLKSHLSRHRKTTSVHHRLPVQPDPEPCAGQPSDSLYSL

SEQ ID NO: 27312 - protein, 62 aa, Artificial Sequence
  Synthetic polypeptide
KILESVSPPRQRLYWQDLSGVPILELWSLVEGLQFPGGRKHGGHTWHSGMWLWISPRMSGGC

SEQ ID NO: 27313 - protein, 68 aa, Artificial Sequence
  Synthetic polypeptide
GHNVALLWRMQQRGTILEAERPGPPQTPNLQGPLFWTSSFQNGTGEDSWITSLLTSGVMLRTTLNSGP

SEQ ID NO: 27314 - protein, 77 aa, Artificial Sequence
  Synthetic polypeptide
VKAPFCPLALPPCEDTTLPSFGGCSNEAPFWKQRDQALPRHLTCRDLYFGLLASRMVLEKTAGSHLCSPQVLCSEQP

SEQ ID NO: 27315 - protein, 278 aa, Artificial Sequence
  Synthetic polypeptide
LPEWYWRRQLDHISAHLRCYAQNNPEFRALIAEPRMGKLISATVHEDGCEVSIRLNYSQVSNKNLYLNKAVNFSDHLLSSAAEGDGGLCGSRSSWVSDYSQSTSDTIEKIKRIKNFKTKTFQEKKEQLIPENRLLLKEVGPTGEGRVSVIEQLLDEGADPNCCDEDNRPVITVAVMNKHHEAIPVLVQRGADIDQQWGPLRNTALHEATLLGLAGRESTATLLGCNASIQKKNAGGQTAYDLALNTGDDLVTSLFAAKFGQGLEDQLAQTRSLSLDDC

SEQ ID NO: 27316 - protein, 254 aa, Artificial Sequence
  Synthetic polypeptide
LPEWYWRRQLDHISAHLRCYAQNNPEFRALIAEPRMGKLISATVHEDGCEVSIRLNYSQVSNKVRKLRLREVKQPASSKGTKLAGRPLIKNFKTKTFQEKKEQLIPENRLLLKEVGPTGEGRVSVIEQLLDEGADPNCCDEDNRPVITVAVMNKHHEAIPVLVQRGADIDQQWGPLRNTALHEATLLGLAGRESTATLLGCNASIQKKNAGGQTAYDLALNTGDDLVTSLFAAKFGQGLEDQLAQTRSLSLDDC

SEQ ID NO: 27317 - protein, 100 aa, Artificial Sequence
  Synthetic polypeptide
LPEWYWRRQLDHISAHLRCYAQNNPEFRALIAEPRMGKLISATVHEDGCEVSIRLNYSQVSNKVRKLRLREVKQPASSKGTKLVSGRPRIHTWQPETFPS

SEQ ID NO: 27318 - protein, 79 aa, Artificial Sequence
  Synthetic polypeptide
VPALFTSLISTTLLQKLGFRRSRLFLVSGHIMLFRATGLMLFPCLEGSSYSLQMTNALGLNSAIVSRKSLNPPRVSWIS

SEQ ID NO: 27319 - protein, 17 aa, Artificial Sequence
  Synthetic polypeptide
TPPGSVGSLKEQYGPFI

SEQ ID NO: 27320 - protein, 274 aa, Artificial Sequence
  Synthetic polypeptide
RIRTQLCHCLQEVTEPPQGQLDLLRSNTGLLYRIKDSQNAGKMKGSDNQEKLVYQIIEDAGNKGIWSRDIRYKSNLPLTEINKILKNLESKKLIKAVKSVAASKKKVYMLYNLQPDRSVTGGAWYSDQDFESEFVEVLNQQCFKFLQSKAETARESKQNPMIQRNSSFASSHEVWKYICELGISKVELSMEDIETILNTLIYDGKVEMTIIAAKEGTVGSVDGHMKLYRAVNPIIPPTGLVRAPCGLCPVFDDCHEGGEISPSNCIYMTEWLEF

SEQ ID NO: 27321 - protein, 7 aa, Artificial Sequence
  Synthetic polypeptide
GRRRSGG

SEQ ID NO: 27322 - protein, 485 aa, Artificial Sequence
  Synthetic polypeptide
GGAGVAGEEELQVIQPDKSVLVAAGETATLRCTATSLIPVGPIQWFRGAGPGRELIYNQKEGHFPRVTTVSDLTKRNNMDFSIRIGNITPADAGTYYCVKFRKGSPDDVEFKSGAGTELSVRAKPSAPVVSGPAARATPQHTVSFTCESHGFSPRDITLKWFKNGNELSDFQTNVDPVGESVSYSIHSTAKVVLTREDVHSQVICEVAHVTLQGDPLRGTANLSETIRVPPTLEVTQQPVRAENQVNVTCQVRKFYPQRLQLTWLENGNVSRTETASTVTENKDGTYNWMSWLLVNVSAHRDDVKLTCQVEHDGQPAVSKSHDLKVSAHPKEQGSNTAAENTGSNERNIYIVVGVVCTLLVALLMAALYLVRIRQKKAQGSTSSTRLHEPEKNAREITQVQSLDTNDITYADLNLPKGKKPAPQAAEPNNHTEYASIQTSPQPASEDTLTYADLDMVHLNRTPKQPAPKPEPSFSEYASVQVPRK

SEQ ID NO: 27323 - protein, 12 aa, Artificial Sequence
  Synthetic polypeptide
AAQEWRVRRSCR

SEQ ID NO: 27324 - protein, 481 aa, Artificial Sequence
  Synthetic polypeptide
GGAGVAGEEELQVIQPDKSVLVAAGETATLRCTATSLIPVGPIQWFRGAGPGRELIYNQKEGHFPRVTTVSDLTKRNNMDFSIRIGNITPADAGTYYCVKFRKGSPDDVEFKSGAGTELSVRAKPSAPVVSGPAARATPQHTVSFTCESHGFSPRDITLKWFKNGNELSDFQTNVDPVGESVSYSIHSTAKVVLTREDVHSQVICEVAHVTLQGDPLRGTANLSETIRVPPTLEVTQQPVRAENQVNVTCQVRKFYPQRLQLTWLENGNVSRTETASTVTENKDGTYNWMSWLLVNVSAHRDDVKLTCQVEHDGQPAVSKSHDLKVSAHPKEQGSNTAAENTGSNERNIYIVVGVVCTLLVALLMAALYLVRIRQKKAQGSTSSTRLHEPEKNAREITQDTNDITYADLNLPKGKKPAPQAAEPNNHTEYASIQTSPQPASEDTLTYADLDMVHLNRTPKQPAPKPEPSFSEYASVQVPRK

SEQ ID NO: 27325 - protein, 66 aa, Artificial Sequence
  Synthetic polypeptide
GRRSWRDSHSALHCDLSDPCGAHPVVQRSWTRPGINLQSKRRPLPPGNNCFRPHKEKQHGLFHPHR

SEQ ID NO: 27326 - protein, 465 aa, Artificial Sequence
  Synthetic polypeptide
GGAAGETATLRCTATSLIPVGPIQWFRGAGPGRELIYNQKEGHFPRVTTVSDLTKRNNMDFSIRIGNITPADAGTYYCVKFRKGSPDDVEFKSGAGTELSVRAKPSAPVVSGPAARATPQHTVSFTCESHGFSPRDITLKWFKNGNELSDFQTNVDPVGESVSYSIHSTAKVVLTREDVHSQVICEVAHVTLQGDPLRGTANLSETIRVPPTLEVTQQPVRAENQVNVTCQVRKFYPQRLQLTWLENGNVSRTETASTVTENKDGTYNWMSWLLVNVSAHRDDVKLTCQVEHDGQPAVSKSHDLKVSAHPKEQGSNTAAENTGSNERNIYIVVGVVCTLLVALLMAALYLVRIRQKKAQGSTSSTRLHEPEKNAREITQVQSLDTNDITYADLNLPKGKKPAPQAAEPNNHTEYASIQTSPQPASEDTLTYADLDMVHLNRTPKQPAPKPEPSFSEYASVQVPRK

SEQ ID NO: 27327 - protein, 16 aa, Artificial Sequence
  Synthetic polypeptide
AAQLERQPLCAALRPL

SEQ ID NO: 27328 - protein, 461 aa, Artificial Sequence
  Synthetic polypeptide
GGAAGETATLRCTATSLIPVGPIQWFRGAGPGRELIYNQKEGHFPRVTTVSDLTKRNNMDFSIRIGNITPADAGTYYCVKFRKGSPDDVEFKSGAGTELSVRAKPSAPVVSGPAARATPQHTVSFTCESHGFSPRDITLKWFKNGNELSDFQTNVDPVGESVSYSIHSTAKVVLTREDVHSQVICEVAHVTLQGDPLRGTANLSETIRVPPTLEVTQQPVRAENQVNVTCQVRKFYPQRLQLTWLENGNVSRTETASTVTENKDGTYNWMSWLLVNVSAHRDDVKLTCQVEHDGQPAVSKSHDLKVSAHPKEQGSNTAAENTGSNERNIYIVVGVVCTLLVALLMAALYLVRIRQKKAQGSTSSTRLHEPEKNAREITQDTNDITYADLNLPKGKKPAPQAAEPNNHTEYASIQTSPQPASEDTLTYADLDMVHLNRTPKQPAPKPEPSFSEYASVQVPRK

SEQ ID NO: 27329 - protein, 18 aa, Artificial Sequence
  Synthetic polypeptide
ARAGQLERQPLCAALRPL

SEQ ID NO: 27330 - protein, 67 aa, Artificial Sequence
  Synthetic polypeptide
PGRGSWRDSHSALHCDLSDPCGAHPVVQRSWTRPGINLQSKRRPLPPGNNCFRPHKEKQHGLFHPHR

SEQ ID NO: 27331 - protein, 466 aa, Artificial Sequence
  Synthetic polypeptide
PGGAAGETATLRCTATSLIPVGPIQWFRGAGPGRELIYNQKEGHFPRVTTVSDLTKRNNMDFSIRIGNITPADAGTYYCVKFRKGSPDDVEFKSGAGTELSVRAKPSAPVVSGPAARATPQHTVSFTCESHGFSPRDITLKWFKNGNELSDFQTNVDPVGESVSYSIHSTAKVVLTREDVHSQVICEVAHVTLQGDPLRGTANLSETIRVPPTLEVTQQPVRAENQVNVTCQVRKFYPQRLQLTWLENGNVSRTETASTVTENKDGTYNWMSWLLVNVSAHRDDVKLTCQVEHDGQPAVSKSHDLKVSAHPKEQGSNTAAENTGSNERNIYIVVGVVCTLLVALLMAALYLVRIRQKKAQGSTSSTRLHEPEKNAREITQVQSLDTNDITYADLNLPKGKKPAPQAAEPNNHTEYASIQTSPQPASEDTLTYADLDMVHLNRTPKQPAPKPEPSFSEYASVQVPRK

SEQ ID NO: 27332 - protein, 462 aa, Artificial Sequence
  Synthetic polypeptide
PGGAAGETATLRCTATSLIPVGPIQWFRGAGPGRELIYNQKEGHFPRVTTVSDLTKRNNMDFSIRIGNITPADAGTYYCVKFRKGSPDDVEFKSGAGTELSVRAKPSAPVVSGPAARATPQHTVSFTCESHGFSPRDITLKWFKNGNELSDFQTNVDPVGESVSYSIHSTAKVVLTREDVHSQVICEVAHVTLQGDPLRGTANLSETIRVPPTLEVTQQPVRAENQVNVTCQVRKFYPQRLQLTWLENGNVSRTETASTVTENKDGTYNWMSWLLVNVSAHRDDVKLTCQVEHDGQPAVSKSHDLKVSAHPKEQGSNTAAENTGSNERNIYIVVGVVCTLLVALLMAALYLVRIRQKKAQGSTSSTRLHEPEKNAREITQDTNDITYADLNLPKGKKPAPQAAEPNNHTEYASIQTSPQPASEDTLTYADLDMVHLNRTPKQPAPKPEPSFSEYASVQVPRK

SEQ ID NO: 27333 - protein, 40 aa, Artificial Sequence
  Synthetic polypeptide
CETCPPPSTFCLLFSNFCLPPSMIVRPPQPCGTSLTSWTS

SEQ ID NO: 27334 - protein, 9 aa, Artificial Sequence
  Synthetic polypeptide
GLPSHVELA

SEQ ID NO: 27335 - protein, 604 aa, Artificial Sequence
  Synthetic polypeptide
ISLMRSDGFIRGFCFCVFLIFSLPAAIHVRRDLLLLAFHQDCEASPAMWNSLHEFPNDIFTNEDRRQGAVVLHVLCAIYMFYALAIVCDDFFVPSLEKICERLHLSEDVAGATFMAAGSSAPELFTSVIGVFITKGDVGVGTIVGSAVFNILCIIGVCGLFAGQVVALSSWCLLRDSIYYTLSVIALIVFIYDEKVSWWESLVLVLMYLIYIVIMKYNACIHQCFERRTKGAGNMVNGLANNAEIDDSSNCDATVVLLKKANFHRKASVIMVDELLSAYPHQLSFSEAGLRIMITSHFPPKTRLSMASRMLINERQRLINSRAYTNGESEVAIKIPIKHTVENGTGPSSAPDRGVNGTRRDDVVAEAGNETENENEDNENDEEEEEDEDDDEGPYTPFDTPSGKLETVKWAFTWPLSFVLYFTVPNCNKPRWEKWFMVTFASSTLWIAAFSYMMVWMVTIIGYTLGIPDVIMGITFLAAGTSVPDCMASLIVARQGMGDMAVSNSIGSNVFDILIGLGLPWALQTLAVDYGSYIRLNSRGLIYSVGLLLASVFVTVFGVHLNKWQLDKKLGCGCLLLYGVFLCFSIMTEFNVFTFVNLPMCGDH

SEQ ID NO: 27336 - protein, 99 aa, Artificial Sequence
  Synthetic polypeptide
DGTCSSLPSTRIVKLPQPCGTPCMNSPMTSSQTRIEDKVRWSSMCSVPYTCSMRWPLCVMTSSSLPWKRSVSACTSVKMWLGPHSWQREVRPQSCSHRS

SEQ ID NO: 27337 - protein, 10 aa, Artificial Sequence
  Synthetic polypeptide
SFPSHVELPA

SEQ ID NO: 27338 - protein, 22 aa, Artificial Sequence
  Synthetic polypeptide
QRGKPSSWDLSPRRAVEPRWGK

SEQ ID NO: 27339 - protein, 941 aa, Artificial Sequence
  Synthetic polypeptide
KLPPTVFPSPSASNRPWCFPVWPLTTWQALLLGSESPACSGASLGEMTAWTMGARGLDKRGSFFKLIDTIASEIGELKQEMVRTDVNLENGLEPAETHSMVRHKDGGYSEEEDVKTCARDSGYDSLSNRLSILDRLLHTHPIWLQLSLSEEEAAEVLQAQPPGIFLVHKSTKMQKKVLSLRLPCEFGAPLKEFAIKESTYTFSLEGSGISFADLFRLIAFYCISRDVLPFTLKLPYAISTAKSEAQLEELAQMGLNFWSSPADSKPPNLPPPHRPLSSDGVCPASLRQLCLINGVHSIKTRTPSELECSQTNGALCFINPLFLKVHSQDLSGGLKRPSTRTPNANGTERTRSPPPRPPPPAINSLHTSPRLARTETQTSMPETVNHNKHGNVALPGTKPTPIPPPRLKKQASFLEAEGGAKTLSGGRPGAGPELELGTAGSPGGAPPEAAPGDCTRAPPPSSESRPPCHGGRQRLSDMSISTSSSDSLEFDRSMPLFGYEADTNSSLEDYEGESDQETMAPPIKSKKKRSSSFVLPKLVKSQLQKVSGVFSSFMTPEKRMVRRIAELSRDKCTYFGCLVQDYVSFLQENKECHVSSTDMLQTIRQFMTQVKNYLSQSSELDPPIESLIPEDQIDVVLEKAMHKCILKPLKGHVEAMLKDFHMADGSWKQLKENLQLVRQRNPQELGVFAPTPDFVDVEKIKVKFMTMQKMYSPEKKVMLLLRVCKLIYTVMENNSGRMYGADDFLPVLTYVIAQCDMLELDTEIEYMMELLDPSLLHGEGGYYLTSAYGALSLIKNFQEEQAARLLSSETRDTLRQWHKRRTTNRTIPSVDDFQNYLRVAFQEVNSGCTGKTLLVRPYITTEDVCQICAEKFKVGDPEEYSLFLFVDETWQQLAEDTYPQKIKAELHSRPQPHIFHFVYKRIKNDPYGIIFQNGEEDLTTS

SEQ ID NO: 27340 - protein, 208 aa, Artificial Sequence
  Synthetic polypeptide
DLPQPRGTMSYALNHTNRKLTLEPKITVNAKIIVVGASSVGISFLETLVFCSHMKFNNLTLISTHGLPGKKLLDTEQRKFLASDHCFNDKDYALMSLCSWVNVVVGRMTGIDRAAKHVVLSTDEIVPYDHLILCTGQQYQVPCPTEADISQHLTNREVPNSSQRRYTGKVPCNHFTLNEEEDCFKALIWIRNNSITTEDGGRASVLFC

SEQ ID NO: 27341 - protein, 19 aa, Artificial Sequence
  Synthetic polypeptide
EVPFTLHHDCETFPSHVEL

SEQ ID NO: 27342 - protein, 54 aa, Artificial Sequence
  Synthetic polypeptide
AYQGFLLLLLPHFVLPPPCKKCLSPSTMIVRPSPATWNYELCFKPYKQKTNIGT

SEQ ID NO: 27343 - protein, 328 aa, Artificial Sequence
  Synthetic polypeptide
DLPQPRGTMSYALNHTNRKLTLEPKITVNAKIIVVGASSVGISFLETLVFCSHMKFNNLTLISTHGLPGKKLLDTEQRKFLASDHCFNDKDYALMSLCSWVNVVVGRMTGIDRAAKHVVLSTDEIVPYDHLILCTGQQYQVPCPTEADISQHLTNREVPNSSQRRYTGKVPCNHFTLNEEEDCFKALIWIRNNSITTEGNIIVYGNTIDTYTTVETLLNLGVSGSRIHLVQPPPASTITCINNYSVESAVADALGAAGVTMYRDAILAQWNDGLHPDPIYSASFTTPTKPFRLQCSGAFFLGLTIICILPSLPFQLPWRYKWHSLIMV

SEQ ID NO: 27344 - protein, 601 aa, Artificial Sequence
  Synthetic polypeptide
DLPQPRGTMSYALNHTNRKLTLEPKITVNAKIIVVGASSVGISFLETLVFCSHMKFNNLTLISTHGLPGKKLLDTEQRKFLASDHCFNDKDYALMSLCSWVNVVVGRMTGIDRAAKHVVLSTDEIVPYDHLILCTGQQYQVPCPTEADISQHLTNREVPNSSQRRYTGKVPCNHFTLNEEEDCFKALIWIRNNSITTEGNIIVYGNTIDTYTTVETLLNLGVSGSRIHLVQPPPASTITCINNYSVESAVADALGAAGVTMYRDAILAQWNDGLHPDPIYSASFTTPTKPFRLQCSMFFSFCEKNVDYETFKALNDACLVYDSRLVIDTNFHTNDIAIRAAGSLTKFSNRYYSNEWTHSNFSSKEIGFQLAAAMLHLFDPTLEPVTEPPANLDRLIPMYKGAKIQGGILPGSYHYLHIAKPAIPTPLEVQMAQPNYGLELVTGSAKNGTYFRIHINKYKMVETITCLSREPFPASNYIRLFGQHEQLLNNLCARYDENLITDLYSYFTEPWCLALFHDRFIDLRKELRQILASKEEEDLPSIEQLAHQIEDEEINPTEKPRQYLKRVFEESIYKTLVERSTLDYLHYNRYHLPMYAWPGIV

SEQ ID NO: 27345 - protein, 51 aa, Artificial Sequence
  Synthetic polypeptide
DLPQPRGTMSYALNHTNRKLTLEPKITVNAKIIVVGASSVGISFLETLVFW

SEQ ID NO: 27346 - protein, 55 aa, Artificial Sequence
  Synthetic polypeptide
EQAAHTRVDRKWVRLTLGEGWLFVQTSAPGGSRSLDFAGDTQAPQTPWWCLMTFS

SEQ ID NO: 27347 - protein, 35 aa, Artificial Sequence
  Synthetic polypeptide
HWGRAGFLCKLLLLEAPVHWTLQETHRLPRPRGGA

SEQ ID NO: 27348 - protein, 78 aa, Artificial Sequence
  Synthetic polypeptide
DCDHHSRTVSAWGDKWTHAAGIGAGSTHTCGQKVGAADTGGGLAFCANFCSWRLPFTGLCRRHTGSPDPVVVPDDLQL

SEQ ID NO: 27349 - protein, 51 aa, Artificial Sequence
  Synthetic polypeptide
EQAAHTRVDRKWVRLTLGEGWLFVQTSAPGGSRSLDFAGDTQAPQTPWWCL

SEQ ID NO: 27350 - protein, 73 aa, Artificial Sequence
  Synthetic polypeptide
DCDHHSRTVSAWGDKWTHAAGIGAGSTHTCGQKVGAADTGGGLAFCANFCSWRLPFTGLCRRHTGSPDPVVVP

SEQ ID NO: 27351 - protein, 18 aa, Artificial Sequence
  Synthetic polypeptide
VPRWLNRNSSSLQLSAWG

SEQ ID NO: 27352 - protein, 40 aa, Artificial Sequence
  Synthetic polypeptide
IGTAPVYSSQLGVRLGGTRGDRRRCWPWEWRPGEAGSVFP

SEQ ID NO: 27353 - protein, 737 aa, Artificial Sequence
  Synthetic polypeptide
EQLQSTALSLGLDLEELEEIEEDAGLGNGGLGRLAACFLDSMATLGLAAYGYGIRYEFGIFNQKIVNGWQVEEADDWLRYGNPWEKARPEYMLPVHFYGRVEHTPDGVKWLDTQVVLAMPYDTPVPGYKNNTVNTMRLWSAKAPNDFKLQDFNVGDYIEAVLDRNLAENISRVLYPNDNFFEGKELRLKQEYFVVAATLQDIIRRFKSSKFGCRDPVRTCFETFPDKVAIQLNDTHPALSIPELMRILVDVEKVDWDKAWEITKKTCAYTNHTVLPEALERWPVSMFEKLLPRHLEIIYAINQRHLDHVAALFPGDVDRLRRMSVIEEGDCKRINMAHLCVIGSHAVNGVARIHSEIVKQSVFKDFYELEPEKFQNKTNGITPRRWLLLCNPGLADTIVEKIGEEFLTDLSQLKKLLPLVSDEVFIRDVAKVKQENKLKFSAFLEKEYKVKINPSSMFDVHVKRIHEYKRQLLNCLHVVTLYNRIKRDPAKAFVPRTVMIGGKAAPGYHMAKLIIKLVTSIGDVVNHDPVVGDRLKVIFLENYRVSLAEKVIPAADLSQQISTAGTEASGTGNMKFMLNGALTIGTMDGANVEMAEEAGAENLFIFGLRVEDVEALDRKGYNAREYYDHLPELKQAVDQISSGFFSPKEPDCFKDIVNMLMHHDRFKVFADYEAYMQCQAQVDQLYRNPKEWTKKVIRNIACSGKFSSDRTITEYAREIWGVEPSDLQIPPPNIPRD

SEQ ID NO: 27354 - protein, 168 aa, Artificial Sequence
  Synthetic polypeptide
ATSAKSQDTKSMCKNHKHSYTPINRQTEGQIMSELPFTIASKRIKYLGIQLTRDVKDLFKENYKPLFREIKDDTNKWKNIPCSWIGRINILKMVLLPKVIYRFNAIPIKLPMTFFTELEKTTLKFIWNQKRARIAKTILSQKKKAGGIMLPDFKLYYKATVTKTACWG

SEQ ID NO: 27355 - protein, 34 aa, Artificial Sequence
  Synthetic polypeptide
PKQHVGVRLGGTRGDRRRCWPWEWRPGEAGSVFP

SEQ ID NO: 27356 - protein, 742 aa, Artificial Sequence
  Synthetic polypeptide
LQTILQGYSNQNSMLGLDLEELEEIEEDAGLGNGGLGRLAACFLDSMATLGLAAYGYGIRYEFGIFNQKIVNGWQVEEADDWLRYGNPWEKARPEYMLPVHFYGRVEHTPDGVKWLDTQVVLAMPYDTPVPGYKNNTVNTMRLWSAKAPNDFKLQDFNVGDYIEAVLDRNLAENISRVLYPNDNFFEGKELRLKQEYFVVAATLQDIIRRFKSSKFGCRDPVRTCFETFPDKVAIQLNDTHPALSIPELMRILVDVEKVDWDKAWEITKKTCAYTNHTVLPEALERWPVSMFEKLLPRHLEIIYAINQRHLDHVAALFPGDVDRLRRMSVIEEGDCKRINMAHLCVIGSHAVNGVARIHSEIVKQSVFKDFYELEPEKFQNKTNGITPRRWLLLCNPGLADTIVEKIGEEFLTDLSQLKKLLPLVSDEVFIRDVAKVKQENKLKFSAFLEKEYKVKINPSSMFDVHVKRIHEYKRQLLNCLHVVTLYNRIKRDPAKAFVPRTVMIGGKAAPGYHMAKLIIKLVTSIGDVVNHDPVVGDRLKVIFLENYRVSLAEKVIPAADLSQQISTAGTEASGTGNMKFMLNGALTIGTMDGANVEMAEEAGAENLFIFGLRVEDVEALDRKGYNAREYYDHLPELKQAVDQISSGFFSPKEPDCFKDIVNMLMHHDRFKVFADYEAYMQCQAQVDQLYRNPKEWTKKVIRNIACSGKFSSDRTITEYAREIWGVEPSDLQIPPPNIPRD

SEQ ID NO: 27357 - protein, 150 aa, Artificial Sequence
  Synthetic polypeptide
GQAQWLMPIIPAILEAKAGGSSGIRSSRPAWPTWYDRLLRIRALRWEYGSVLPNALRFHMAAEEMEWFNNYKRSLATYMRSLGGDEGLDITQDMKPPKSLYIEVRCLKDYGEFEVDDGTSVLLKKNSQHFLPRWKCEQLIRQGVLEHILS

SEQ ID NO: 27358 - protein, 69 aa, Artificial Sequence
  Synthetic polypeptide
SQQFWRPRRVDHLGSGVRDQPGQHGMTACFGSEHSDGNMVASCQMHYDFTWLLKKWSGLIIIKDLLLLI

SEQ ID NO: 27359 - protein, 34 aa, Artificial Sequence
  Synthetic polypeptide
PGTVAHAYNPSNFGGQGGWIIWDQEFETSLANMV

SEQ ID NO: 27360 - protein, 119 aa, Artificial Sequence
  Synthetic polypeptide
GQAQWLMPIIPAILEAKAGGSSGIRSSRPAWPTWYDRLLRIRALRWEYGSVLPNALRFHMAAEEMESRSVAQAGVQWCILCSLQLPPPGFKQFSCLSLPSSCDYRWSGLIIIKDLLLLI

SEQ ID NO: 27361 - protein, 99 aa, Artificial Sequence
  Synthetic polypeptide
SQQFWRPRRVDHLGSGVRDQPGQHGMTACFGSEHSDGNMVASCQMHYDFTWLLKKWNLALLPRLEYSGAFSAHCNFRLLASSNSPASACQVAVITDGVV

SEQ ID NO: 27362 - protein, 666 aa, Artificial Sequence
  Synthetic polypeptide
GRMRWLTPVISTLGGQGGREAEAELSGELSGLGALPARRDLTLELEEPPQGPLPRGSQRSEQLELERALKLQPCASEKRAQMCVSLALEEEELELARGKRVDGPSLEAEMQALPKDGLVAGSGQEGTRGLLPLRPGCGERPLAWLAPGDGRESEEAAGAGPRRRQAQDTEATQSPAPAPAPASHGPSERWSRMQPCGVDGDIVPKEPEPFGASAAGLEQPGARELPLLGTERDASQTQPRMWEPPLRPAASCRGQAERLQAIQEERARSWSRGTQEQASEQQARAEGALEPGCHKHSVEVARRGSLPSHLQLADPQGSWQEQLAAPEEGETKIALEREKDDMETKLLHLEDVVRALEKHVDLRENDRLEFHRLSEENTLLKNDLGRVRQELEAAESTHDAQRKEIEVLKKDKEKACSEMEVLNRQNQNYKDQLSQLNVRVLQLGQEASTHQAQNEEHRVTIQMLTQSLEEVVRSGQQQSDQIQKLRVELECLNQEHQSLQLPWSELTQTLEESQDQVQGAHLRLRQAQAQHLQEVRLVPQDRVAELHRLLSLQGEQARRRLDAQREEHEKQLKATEERVEEAEMILKNMEMLLQEKVDKLKEQFEKNTKSDLLLKELYVENAHLVRALQATEEKQRGAEKQSRLLEEKVRALNKLVSRIAPAALSV

SEQ ID NO: 27363 - protein, 15 aa, Artificial Sequence
  Synthetic polypeptide
SALWEAKAGERLRRS

SEQ ID NO: 27364 - protein, 20 aa, Artificial Sequence
  Synthetic polypeptide
PDAVAHTCNQHFGRPRRERG

SEQ ID NO: 27365 - protein, 129 aa, Artificial Sequence
  Synthetic polypeptide
PPGRNLRRNGARTLDVERGGGGTRSGDLHLGWSALRMPSKVTAWSTSRRGLCASVGIAADGETFGVAEECPQTSEGIRYILHSRVSLPRAIFWGSGKSCSRARAGWLEPLVRRSPGGGSGGPGVASGCE

SEQ ID NO: 27366 - protein, 185 aa, Artificial Sequence
  Synthetic polypeptide
CVRVGPESSPGQGFNRMVSGAWDSRRADHQEETSEEMVRELWMWNVEEEEHEVGICTWGGQHCGCPAKSLPGPHPGGVSAPQSASQLMVKLLVWQKSVHKLRKVSATSSIAVYPCPGQSSGGAESPAPGPGLAGWSHLCGAALAEVQAAPVSQAAVSDASLGPEWSQEGCRPGLTSGQHGGRDGR

SEQ ID NO: 27367 - protein, 114 aa, Artificial Sequence
  Synthetic polypeptide
ASALVVVIATVAVDGSLRLCEVGALCDSASESGLRAVLARALTGWSPEPGILGGLTTRKKPQKKWCENFGCGTWRRRNTKWGSALGVVSTADAQQSHCLVHIPEGSLRLSRHRS

SEQ ID NO: 27368 - protein, 104 aa, Artificial Sequence
  Synthetic polypeptide
PPGRNLRRNGARTLDVERGGGGTRSGDLHLGWSALRMPSKVTAWSTSRRGLCASVGIAADGETFGVAEECPQTSEGIRYILHSRVSLPRAIFWGSGKSCSRARA

SEQ ID NO: 27369 - protein, 132 aa, Artificial Sequence
  Synthetic polypeptide
CVRVGPESSPGQGFNRMVSGAWDSRRADHQEETSEEMVRELWMWNVEEEEHEVGICTWGGQHCGCPAKSLPGPHPGGVSAPQSASQLMVKLLVWQKSVHKLRKVSATSSIAVYPCPGQSSGGAESPAPGPGL

SEQ ID NO: 27370 - protein, 8 aa, Artificial Sequence
  Synthetic polypeptide
SQHFGRPR

SEQ ID NO: 27371 - protein, 821 aa, Artificial Sequence
  Synthetic polypeptide
GQARWLTPVIPALWKAKISMDSWFILVLLGSGLICVSANNATTVAPSVGITRLINSSTAEPVKEEAKTSNPTSSLTSLSVAPTFSPNITLGPTYLTTVNSSDSDNGTTRTASTNSIGITISPNGTWLPDNQFTDARTEPWEGNSSTAATTPETFPPSGNSDSKDRRDETPIIAVMVALSSLLVIVFIIIVLYMLRFKKYKQAGSHSNSFRLSNGRTEDVEPQSVPLLARSPSTNRKYPPLPVDKLEEEINRRMADDNKLFREEFNALPACPIQATCEAASKEENKEKNRYVNILPYDHSRVHLTPVEGVPDSDYINASFINGYQEKNKFIAAQGPKEETVNDFWRMIWEQNTATIVMVTNLKERKECKCAQYWPDQGCWTYGNIRVSVEDVTVLVDYTVRKFCIQQVGDMTNRKPQRLITQFHFTSWPDFGVPFTPIGMLKFLKKVKACNPQYAGAIVVHCSAGVGRTGTFVVIDAMLDMMHTERKVDVYGFVSRIRAQRCQMVQTDMQYVFIYQALLEHYLYGDTELEVTSLETHLQKIYNKIPGTSNNGLEEEFKKLTSIKIQNDKMRTGNLPANMKKNRVLQIIPYEFNRVIIPVKRGEENTDYVNASFIDGYRQKDSYIASQGPLLHTIEDFWRMIWEWKSCSIVMLTELEERGQEKCAQYWPSDGLVSYGDITVELKKEEECESYTVRDLLVTNTRENKSRQIRQFHFHGWPEVGIPSDGKGMISIIAAVQKQQQQSGNHPITVHCSAGAGRTGTFCALSTVLERVKAEGILDVFQTVKSLRLQRPHMVQTLEQYEFCYKVVQEYIDAFSDYANFK

SEQ ID NO: 27372 - protein, 53 aa, Artificial Sequence
  Synthetic polypeptide
PGAVAHTCNPSTLEGQDKHGFLVHSCSARQWSDMCQCQQCYHSCTFCRNYKIN

SEQ ID NO: 27373 - protein, 38 aa, Artificial Sequence
  Synthetic polypeptide
KEGNSNTCYNMDEPGRHHGLPRKEQIHCCTRTKRRNGE

SEQ ID NO: 27374 - protein, 532 aa, Artificial Sequence
  Synthetic polypeptide
MWYMHTVECYSAFKRKEILIHATTWMNLEDIMGYQEKNKFIAAQGPKEETVNDFWRMIWEQNTATIVMVTNLKERKECKCAQYWPDQGCWTYGNIRVSVEDVTVLVDYTVRKFCIQQVGDMTNRKPQRLITQFHFTSWPDFGVPFTPIGMLKFLKKVKACNPQYAGAIVVHCSAGVGRTGTFVVIDAMLDMMHTERKVDVYGFVSRIRAQRCQMVQTDMQYVFIYQALLEHYLYGDTELEVTSLETHLQKIYNKIPGTSNNGLEEEFKKLTSIKIQNDKMRTGNLPANMKKNRVLQIIPYEFNRVIIPVKRGEENTDYVNASFIDGYRQKDSYIASQGPLLHTIEDFWRMIWEWKSCSIVMLTELEERGQEKCAQYWPSDGLVSYGDITVELKKEEECESYTVRDLLVTNTRENKSRQIRQFHFHGWPEVGIPSDGKGMISIIAAVQKQQQQSGNHPITVHCSAGAGRTGTFCALSTVLERVKAEGILDVFQTVKSLRLQRPHMVQTLEQYEFCYKVVQEYIDAFSDYANFK

SEQ ID NO: 27375 - protein, 24 aa, Artificial Sequence
  Synthetic polypeptide
TWKTSWATKKRTNSLLHKDQKKKR

SEQ ID NO: 27376 - protein, 67 aa, Artificial Sequence
  Synthetic polypeptide
EHDFWHHSEPGIWHQCDGDSGQVLRGTNKIGVSPGSAGERPRSKQLCHAGTWRCRHSRDLHCLAAAL

SEQ ID NO: 27377 - protein, 190 aa, Artificial Sequence
  Synthetic polypeptide
NQYRVLDENMTFGIIQSQVFGTNVMVTVAKSFEAPIKLVFPQDLLEKGLEANNFAMLGLGDVVIPGIFIALLLRFDISLKKNTHTYFYTSFAAYIFGLGLTIFIMHIFKHAQPALLYLVPACIGFPVLVALAKGEVTEMFSYESSAEILPHTPRLTHFPTVSGSPASLADSMQQKLAGPRRRRPQNPSAM

SEQ ID NO: 27378 - protein, 13 aa, Artificial Sequence
  Synthetic polypeptide
LLASFRARYLAPM

SEQ ID NO: 27379 - protein, 173 aa, Artificial Sequence
  Synthetic polypeptide
NQYRVLDENMTFGIIQSQVFGTNVMVTVAKSFEAPIKLVFPQDLLEKGLEANNFAMLGLGDVVIPGIFIALLLRFDISLKKNTHTYFYTSFAAYIFGLGLTIFIMHIFKHAQPALLYLVPACIGFPVLVALAKGEVTEMFSYEESNPKDPAAVTESKEGTEASASKGLEKKEK

SEQ ID NO: 27380 - protein, 222 aa, Artificial Sequence
  Synthetic polypeptide
NQYRVLDENMTFGIIQSQVFGTNVMVTVAKSFEAPIKLVFPQDLLEKGLEANNFAMLGLGDVVIPGIFIALLLRFDISLKKNTHTYFYTSFAAYIFGLGLTIFIMHIFKHAQPALLYLVPACIGFPVLVALAKGEVTEMFSYESSAEILPHTPRLTHFPTVSGSPASLADSMQQKLAGPRRRRPQNPSAIYEESNPKDPAAVTESKEGTEASASKGLEKKEK

SEQ ID NO: 27381 - protein, 110 aa, Artificial Sequence
  Synthetic polypeptide
NQYRVLDENMTFGIIQSQVFGTNVMVTVAKSFEAPIKLVFPQDLLEKGLEANNFAMLGLGDVVIPGIFIALLLRFDISLKKNTHTYFYTSFAAYIFGLGLTIFIMHIFKH

SEQ ID NO: 27382 - protein, 90 aa, Artificial Sequence
  Synthetic polypeptide
IIASPGAFAKMQPALLYLVPACIGFPVLVALAKGEVTEMFSYESSAEILPHTPRLTHFPTVSGSPASLADSMQQKLAGPRRRRPQNPSAM

SEQ ID NO: 27383 - protein, 33 aa, Artificial Sequence
  Synthetic polypeptide
HLLEHLLKCSLPSYTWSPPASVFLSWWRWPREK

SEQ ID NO: 27384 - protein, 81 aa, Artificial Sequence
  Synthetic polypeptide
NAACPPIPGPRLHRFSCPGGAGQGRSDRDVQLRVLGGNPASYPEAHPLPHSLGLPSQPGRLHAAEASWPSPPAPAESQRHV

SEQ ID NO: 27385 - protein, 73 aa, Artificial Sequence
  Synthetic polypeptide
IIASPGAFAKMQPALLYLVPACIGFPVLVALAKGEVTEMFSYEESNPKDPAAVTESKEGTEASASKGLEKKEK

SEQ ID NO: 27386 - protein, 32 aa, Artificial Sequence
  Synthetic polypeptide
NAACPPIPGPRLHRFSCPGGAGQGRSDRDVQL

SEQ ID NO: 27387 - protein, 122 aa, Artificial Sequence
  Synthetic polypeptide
IIASPGAFAKMQPALLYLVPACIGFPVLVALAKGEVTEMFSYESSAEILPHTPRLTHFPTVSGSPASLADSMQQKLAGPRRRRPQNPSAIYEESNPKDPAAVTESKEGTEASASKGLEKKEK

SEQ ID NO: 27388 - protein, 81 aa, Artificial Sequence
  Synthetic polypeptide
NAACPPIPGPRLHRFSCPGGAGQGRSDRDVQLRVLGGNPASYPEAHPLPHSLGLPSQPGRLHAAEASWPSPPAPAESQRHL

SEQ ID NO: 27389 - protein, 111 aa, Artificial Sequence
  Synthetic polypeptide
LVAPHSTLPSDSTLGSLRLPGHVWSGSCSPLHHHLPHALLSCTLLQPPGFHQFPDPAHLVPTLDSGDTFVELYGNNAAAESRKGQERFNRWFLTGMTVAGVVLLGSLFSRK

SEQ ID NO: 27390 - protein, 78 aa, Artificial Sequence
  Synthetic polypeptide
APCGFQATYGLALAHPCTIISPMPSSPALCSSHLASISSLTLPISFPPWILEILLWNSMGTMQQPRAERARNASTAGS

SEQ ID NO: 27391 - protein, 57 aa, Artificial Sequence
  Synthetic polypeptide
PCPSRSHLGFWRYFCGTLWEQCSSREPKGPGTLQPLVPDGHDCGRRGSAGLTLQSEM

SEQ ID NO: 27392 - protein, 83 aa, Artificial Sequence
  Synthetic polypeptide
LVAPHSTLPSDSTLGSLRLPGHVWSGSCSPLHHHLPHALLSCTLLQPPGFHQFPDPAHLVPTLDSGDTFVELYGNNAAAESRK

SEQ ID NO: 27393 - protein, 69 aa, Artificial Sequence
  Synthetic polypeptide
APCGFQATYGLALAHPCTIISPMPSSPALCSSHLASISSLTLPISFPPWILEILLWNSMGTMQQPRAER

SEQ ID NO: 27394 - protein, 28 aa, Artificial Sequence
  Synthetic polypeptide
PCPSRSHLGFWRYFCGTLWEQCSSREPK

SEQ ID NO: 27395 - protein, 58 aa, Artificial Sequence
  Synthetic polypeptide
SSPWTLRGTASWPDTFVELYGNNAAAESRKGQERFNRWFLTGMTVAGVVLLGSLFSRK

SEQ ID NO: 27396 - protein, 52 aa, Artificial Sequence
  Synthetic polypeptide
ILAPPLTQLGDLDPVPGPSEAQLLGLILLWNSMGTMQQPRAERARNASTAGS

SEQ ID NO: 27397 - protein, 30 aa, Artificial Sequence
  Synthetic polypeptide
SSPWTLRGTASWPDTFVELYGNNAAAESRK

SEQ ID NO: 27398 - protein, 43 aa, Artificial Sequence
  Synthetic polypeptide
ILAPPLTQLGDLDPVPGPSEAQLLGLILLWNSMGTMQQPRAER

SEQ ID NO: 27399 - protein, 12 aa, Artificial Sequence
  Synthetic polypeptide
YLMITLKIKKIS

SEQ ID NO: 27400 - protein, 634 aa, Artificial Sequence
  Synthetic polypeptide
SLLKSRRSLRLSAQKDLEQKEKHHVKMKAKRCATPVIIDEILPSKKMKVSNNKKKPEEEGSAHQDTAEKNASSPEKAKGRHTVPCMPPAKQKFLKSTEEQELEKSMKMQQEVVEMRKKNEEFKKLALAGIGQPVKKSVSQVTKSVDFHFRTDERIKQHPKNQEEYKEVNFTSELRKHPSSPARVTKGCTIVKPFNLSQGKKRTFDETVSTYVPLAQQVEDFHKRTPNRYHLRSKKDDINLLPSKSSVTKICRDPQTPVLQTKHRARAVTCKSTAELEAEELEKLQQYKFKARELDPRILEGGPILPKKPPVKPPTEPIGFDLEIEKRIQERESKKKTEDEHFEFHSRPCPTKILEDVVGVPEKKVLPITVPKSPAFALKNRIRMPTKEDEEEDEPVVIKAQPVPHYGVPFKPQIPEARTVEICPFSFDSRDKERQLQKEKKIKELQKGEVPKFKALPLPHFDTINLPEKKVKNVTQIEPFCLETDRRGALKAQTWKHQLEEELRQQKEAACFKARPNTVISQEPFVPKKEKKSVAEGLSGSLVQEPFQLATEKRAKERQELEKRMAEVEAQKAQQLEEARLQEEEQKKEELARLRRELVHKANPIRKYQGLEIKSSDQPLTVPVSPKFSTRFHC

SEQ ID NO: 27401 - protein, 21 aa, Artificial Sequence
  Synthetic polypeptide
NQEDLLGFLLRRIWNRKKSIM

SEQ ID NO: 27402 - protein, 670 aa, Artificial Sequence
  Synthetic polypeptide
SLLKSRRSLRLSAQKDLEQKEKHHVKMKAKRCATPVIIDEILPSKKMKVSNNKKKPEEEGSAHQDTAEKNASSPEKAKGRHTVPCMPPAKQKFLKSTEEQELEKSMKMQQEVVEMRKKNEEFKKLALAGIGQPVKKSVSQVTKSVDFHFRTDERIKQHPKNQEEYKEVNFTSELRKHPSSPARVTKGCTIVKPFNLSQGKKRTFDETVSTYVPLAQQVEDFHKRTPNRYHLRSKKDDIKTGSCSVTQAGVQWRDHGSLQCPTPGLKQSSCLSLPNLLPSKSSVTKICRDPQTPVLQTKHRARAVTCKSTAELEAEELEKLQQYKFKARELDPRILEGGPILPKKPPVKPPTEPIGFDLEIEKRIQERESKKKTEDEHFEFHSRPCPTKILEDVVGVPEKKVLPITVPKSPAFALKNRIRMPTKEDEEEDEPVVIKAQPVPHYGVPFKPQIPEARTVEICPFSFDSRDKERQLQKEKKIKELQKGEVPKFKALPLPHFDTINLPEKKVKNVTQIEPFCLETDRRGALKAQTWKHQLEEELRQQKEAACFKARPNTVISQEPFVPKKEKKSVAEGLSGSLVQEPFQLATEKRAKERQELEKRMAEVEAQKAQQLEEARLQEEEQKKEELARLRRELVHKANPIRKYQGLEIKSSDQPLTVPVSPKFSTRFHC

SEQ ID NO: 27403 - protein, 34 aa, Artificial Sequence
  Synthetic polypeptide
NGAMKSFLQGCRKLEYARGGATAVMSYSPSRMCL

SEQ ID NO: 27404 - protein, 20 aa, Artificial Sequence
  Synthetic polypeptide
SLSCKDAGNWSMREVGQPLS

SEQ ID NO: 27405 - protein, 54 aa, Artificial Sequence
  Synthetic polypeptide
MDEFSASEFVSSSVKRGYEVFLARMQEIGVCERWGNRCHELQSFQDVPLKMDCI

SEQ ID NO: 27406 - protein, 57 aa, Artificial Sequence
  Synthetic polypeptide
LKKERWSRSQQPGLGPSAATDALCGLGQITLASLVCFPHMSCVKLRIGCRGLYCFSP

SEQ ID NO: 27407 - protein, 662 aa, Artificial Sequence
  Synthetic polypeptide
CIVWPGANYFGFISLFSTYVMCEIKDWLPWSLLLFSLMCETSAFYVPGVAPINFHQNDPVEIKAVKLTSSRTQLPYEYYSLPFCQPSKITYKAENLGEVLRGDRIVNTPFQVLMNSEKKCEVLCSQSNKPVTLTVEQSRLVAERITEDYYVHLIADNLPVATRLELYSNRDSDDKKKEKDVQFEHGYRLGFTDVNKIYLHNHLSFILYYHREDMEEDQEHTYRVVRFEVIPQSIRLEDLKADEKSSCTLPEGTNSSPQEIDPTKENQLYFTYSVHWEESDIKWASRWDTYLTMSDVQIHWFSIINSVVVVFFLSGILSMIIIRTLRKDIANYNKEDDIEDTMEESGWKLVHGDVFRPPQYPMILSSLLGSGIQLFCMILIVIFVAMLGMLSPSSRGALMTTACFLFMFMGVFGGFSAGRLYRTLKGHRWKKGAFCTATLYPGVVFGICFVLNCFIWGKHSSGAVPFPTMVALLCMWFGISLPLVYLGYYFGFRKQPYDNPVRTNQIPRQIPEQRWYMNRFVGILMAGILPFGAMFIELFFIFSAIWENQFYYLFGFLFLVFIILVVSCSQISIVMVYFQLCAEDYRWWWRNFLVSGGSAFYVLVYAIFYFVNKLDIVEFIPSLLYFGYTALMVLSFWLLTGTIGFYAAYMFVRKIYAAVKID

SEQ ID NO: 27408 - protein, 105 aa, Artificial Sequence
  Synthetic polypeptide
CIVWPGANYFGFISLFSTYVMCEIKDWLPWSLLLFSLMCETSAFYVPGVAPINFHQNDPVEIKAVKLTSSRTQLPYEYYSLPFCQPSKITYKAENLGRRKERTGS

SEQ ID NO: 27409 - protein, 40 aa, Artificial Sequence
  Synthetic polypeptide
RFVETLHKASLLAPFFQQHMLSSCLCASYYRKLYPSGRKK

SEQ ID NO: 27410 - protein, 213 aa, Artificial Sequence
  Synthetic polypeptide
KHTLFYCTLLCYNSQILHFLQIEGLWKPCIKQVCWHHFFNSICSLHVSVHLIIENFIPLEEKSKIMNRAFFDEEEDHWKLHPITRLENQQMMKRPVSAVGYKRPLSQHARMSMMIRPEARYRAENIVLLELDMPSRTTRDYEGPAIAPKVQAALDAALQDEDEIQVDASSFESTANKKSKARPKSGRKSGSSSSSSGTPASQLYPQSRGLVPK

SEQ ID NO: 27411 - protein, 22 aa, Artificial Sequence
  Synthetic polypeptide
SKSVGTIFSTAYALFMSLCILL

SEQ ID NO: 27412 - protein, 207 aa, Artificial Sequence
  Synthetic polypeptide
VLTRSDGFISSFPLCSVSLSLLPPCEELPSTMIVSFLRPPQPRRTGADGLSEPEGISLKRVAVVEDFFDIIYSMHVESSAEPGKAPKHAGQKKTYRAIAETYAFLPREAVTRFLMSCTECQKRMHFNSNGLEPKENEPPSPLVSGIIDYNMPLTSTYLKQMKLRVMNSQEQCLPSGAEDIMSGGPTLEAAEFDDLIGKCLPDRPIAE

SEQ ID NO: 27413 - protein, 20 aa, Artificial Sequence
  Synthetic polypeptide
GLPSHAELGQMACRSQRASL

SEQ ID NO: 27414 - protein, 42 aa, Artificial Sequence
  Synthetic polypeptide
RAAFHHDCKFPEASPATQNWGRWPVGARGHLSEAGRCGGRFL

SEQ ID NO: 27415 - protein, 195 aa, Artificial Sequence
  Synthetic polypeptide
VLTRSDGFISSFPLCSVSLSLLPPCEELPSTMIGADGLSEPEGISLKRVAVVEDFFDIIYSMHVESSAEPGKAPKHAGQKKTYRAIAETYAFLPREAVTRFLMSCTECQKRMHFNSNGLEPKENEPPSPLVSGIIDYNMPLTSTYLKQMKLRVMNSQEQCLPSGAEDIMSGGPTLEAAEFDDLIGKCLPDRPIAE

SEQ ID NO: 27416 - protein, 30 aa, Artificial Sequence
  Synthetic polypeptide
RAAFHHDWGRWPVGARGHLSEAGRCGGRFL

SEQ ID NO: 27417 - protein, 402 aa, Artificial Sequence
  Synthetic polypeptide
STSNVCQELRMGKWGLKVKDVQLPVITLNFVPGVGIFQCVSTGMTVTGKSFMGGNMEIIVALNITATNRLLRDEETGLPVFKSEGCEVILVNVKTNLPSNMLPKMVNKFLDSTLHKVLPGLMCPAIDAVLVYVNRKWTNLSDPMPVGQMGTVKYVLMSAPATTASYIQLDFSPVVQQQKGKTIKLADAGEALTFPEGYAKGSSQLLLPATFLSAELALLQKSFHVNIQDTMIGELPPQTTKTLARFIPEVAVAYPKSKPLTTQIKIKKPPKVTMKTGKSLLHLHSTLEMFAARWRSKAPMSLFLLEVHFNLKVQYSVHENQLQMATSLDRLLSLSRKSSSIGNFNERELTGFITSYLEEAYIPVVNDVLQVGLPLPDFLAMNYNLAELDIVENALMLDLKLG

SEQ ID NO: 27418 - protein, 18 aa, Artificial Sequence
  Synthetic polypeptide
DCDQLAMSAKSSGWASGV

SEQ ID NO: 27419 - protein, 70 aa, Artificial Sequence
  Synthetic polypeptide
QCLPRAQDGQVGFEGEGCPAARHHTELCTWSGHLPMCVHRHDRHWQELHGREHGDHRGPEHHSHQPASAG

SEQ ID NO: 27420 - protein, 51 aa, Artificial Sequence
  Synthetic polypeptide
GQARWLMPVIPALLKVKICPLIRIFIHSLDVNVIQQVVDNPQHKTQLQTLI

SEQ ID NO: 27421 - protein, 6 aa, Artificial Sequence
  Synthetic polypeptide
RSRYVH

SEQ ID NO: 27422 - protein, 38 aa, Artificial Sequence
  Synthetic polypeptide
PGAVAYACNPSSFEGQDMSTDPHLHPLPGCECHSAGRR

SEQ ID NO: 27423 - protein, 22 aa, Artificial Sequence
  Synthetic polypeptide
AQEVEAAVSRDRTTALHPGFCS

SEQ ID NO: 27424 - protein, 16 aa, Artificial Sequence
  Synthetic polypeptide
AEIAPLHSILGSAADS

SEQ ID NO: 27425 - protein, 250 aa, Artificial Sequence
  Synthetic polypeptide
FQLLGRLRWENHMSPGSRGCSEPRSHHCTPSWVLQLIHERDNICKQIHLPAQSGSSRVLEAMRRGYSREAYVELVHHIRESIPGVSLSSDFIAGFCGETEEDHVQTVSLLREVQYNMGFLFAYSMRQKTRAYHRLKDDVPEEVKLRRLEELITIFREEATKANQTSVGCTQLVLVEGLSKRSATDLCGRNDGNLKVIFPDAEMEDVNNPGLRVRAQPGDYVLVKITSASSQTLRGHVLCRTTLRDSSAYC

SEQ ID NO: 27426 - protein, 89 aa, Artificial Sequence
  Synthetic polypeptide
FQLLGRLRWENHMSPGSRGCSEPRSHHCTPSWVLQLIHERDNICKQIHLPAQSGSSRVLEAMRRGYSREAYVELVHHIRESIPEDTGIS

SEQ ID NO: 27427 - protein, 872 aa, Artificial Sequence
  Synthetic polypeptide
GSAVAVLNFLPENSPTMSQNGYFEDSSYYKCDTDDTFEAREEILGDEAFDTANSSIVSGESIRFFVNVNLEMQATNTENEATSGGCVLLHTSRKYLKLKNFKEEIRAHRDLDGFLAQASIVLNETATSLDNVLRTMLRRFARDPDNNEPNCNLDLLMAMLFTDAGAPMRGKVHLLSDTIQGVTATVTGVRYQQSWLCIICTMKALQKRHVCISRLVRPQNWGENSCEVRFVILVLAPPKMKSTKTAMEVARTFATMFSDIAFRQKLLETRTEEEFKEALVHQRQLLTMVSHGPVAPRTKERSTVSLPAHRHPEPPKCKDFVPFGKGIREDIARRFPLYPLDFTDGIIGKNKAVGKYITTTLFLYFACLLPTIAFGSLNDENTDGAIDVQKTIAGQSIGGLLYALFSGQPLVILLTTAPLALYIQVIRVICDDYDLDFNSFYAWTGLWNSFFLALYAFFNLSLVMSLFKRSTEEIIALFISITFVLDAVKGTVKIFWKYYYGHYLDDYHTKRTSSLVSLSGLGASLNASLHTALNASFLASPTELPSATHSGQATAVLSLLIMLGTLWLGYTLYQFKKSPYLHPCVREILSDCALPIAVLAFSLISSHGFREIEMSKFRYNPSESPFAMAQIQSLSLRAVSGAMGLGFLLSMLFFIEQNLVAALVNAPENRLVKGTAYHWDLLLLAIINTGLSLFGLPWIHAAYPHSPLHVRALALVEERVENGHIYDTIVNVKETRLTSLGASVLVGLSLLLLPVPLQWIPKPVLYGLFLYIALTSLDGNQLVQRVALLLKEQTAYPPTHYIRRVPQRKIHYFTGLQVLQLLLLCAFGMSSLPYMKMIFPLIMIAMIPIRYILLPRIIEAKYLDVMDAEHRP

SEQ ID NO: 27428 - protein, 88 aa, Artificial Sequence
  Synthetic polypeptide
ISYQKTLPPCRRMDTSRIQATTSVTQMTPSKPERRSWGMRPSTLPTPPSCLARVSVFLSMSTLRCRPPTLRMKRLPVAVCSCTPPEST

SEQ ID NO: 27429 - protein, 37 aa, Artificial Sequence
  Synthetic polypeptide
ARLVSLGLCCRRLEFLTRKLSHHVAEWILRGFKLLQV

SEQ ID NO: 27430 - protein, 62 aa, Artificial Sequence
  Synthetic polypeptide
SHTPLHSSLAHPHGPEAGPGGRGRPAGLPPSPALLCGLHRGPEPLSACVRPEDAGRCLLHPV

SEQ ID NO: 27431 - protein, 123 aa, Artificial Sequence
  Synthetic polypeptide
AWEIEAAVSRDPTHHCTPAWHILMAQRQVQVAEEGLQDFHRALRCYVDFTGAQSHCLHVSAQKMLDGASFTLYEFWQDEASWRRHQQSPGSKAFQRILIDHLRAPDTLTTVFFPASWWIMNNN

SEQ ID NO: 27432 - protein, 110 aa, Artificial Sequence
  Synthetic polypeptide
AVIPHTTALQPGTSSWPRGRSRWQRKACRTSTEPCAAMWTSQGPRAIVCMCPPRRCWTVPPSPCMSSGRMRPPGEGTSSRLAARPSSASSSTTCGPRTPSPLCSSQPPGG

SEQ ID NO: 27433 - protein, 107 aa, Artificial Sequence
  Synthetic polypeptide
AWEIEAAVSRDPTHHCTPAWHILMAQRQVQVAEEGLQDFHRALRCYVDFTGAQSHCLHVSAQKMLDGASFTLYEFWQDEASWRRHQQSPGSKAFQRILIDHLRAPDT

SEQ ID NO: 27434 - protein, 99 aa, Artificial Sequence
  Synthetic polypeptide
AVIPHTTALQPGTSSWPRGRSRWQRKACRTSTEPCAAMWTSQGPRAIVCMCPPRRCWTVPPSPCMSSGRMRPPGEGTSSRLAARPSSASSSTTCGPRTP

SEQ ID NO: 27435 - protein, 57 aa, Artificial Sequence
  Synthetic polypeptide
SHTPLHSSLAHPHGPEAGPGGRGRPAGLPPSPALLCGLHRGPEPLSACVRPEDAGRC

SEQ ID NO: 27436 - protein, 68 aa, Artificial Sequence
  Synthetic polypeptide
AWEIEAAVSRDPTHHCTPAWHILMAQRQVQVAEEGLQDFHRALRCYVDFTGAQSHCLHVSAQKMLDGA

SEQ ID NO: 27437 - protein, 60 aa, Artificial Sequence
  Synthetic polypeptide
AVIPHTTALQPGTSSWPRGRSRWQRKACRTSTEPCAAMWTSQGPRAIVCMCPPRRCWTVP

SEQ ID NO: 27438 - protein, 281 aa, Artificial Sequence
  Synthetic polypeptide
ILALLLTCYVTLAQEYERASKVDQFVTRFLLRETVSQLQALQSSLEGASDTLEAQAHGWRSDAESVEAQSRLCGSRRAGRRALRSVSRSSTWSPGSSDTGRSSEAEMQWRLQVNRLQELIDQLECKVRAVGPGPHKGGPSWYPPEPGPCWRPGPHSVPSQAPRLEPLREEDLAKGPDLHILMAQRQVQVAEEGLQDFHRALRCYVDFTGAQSHCLHVSAQKMLDGASFTLYEFWQDEASWRRHQQSPGSKAFQRILIDHLRAPDTLTTVFFPASWWIMNNN

SEQ ID NO: 27439 - protein, 13 aa, Artificial Sequence
  Synthetic polypeptide
PRSTRGPPKWTSL

SEQ ID NO: 27440 - protein, 104 aa, Artificial Sequence
  Synthetic polypeptide
DFCGLGMNFGPATNLLCDLSPGVREGLQSGPVCDALPAAGDGEPAASPSELAGGGVRYPGGPGPWLAVRCRERGGAEQALRQPAGRTPSPEECQPVIHLVPRLF

SEQ ID NO: 27441 - protein, 247 aa, Artificial Sequence
  Synthetic polypeptide
ILALLLTCYVTLAQEYERASKVDQFVTRFLLRETVSQLQALQSSLEGASDTLEAQAHGWRSDAESVEAQSRLCGSRRAGRRALRSVSRSSTWSPGSSDTGRSSEAEMQWRLQVNRLQELIDQLECKAPRLEPLREEDLAKGPDLHILMAQRQVQVAEEGLQDFHRALRCYVDFTGAQSHCLHVSAQKMLDGASFTLYEFWQDEASWRRHQQSPGSKAFQRILIDHLRAPDTLTTVFFPASWWIMNNN

SEQ ID NO: 27442 - protein, 77 aa, Artificial Sequence
  Synthetic polypeptide
ILALLLTCYVTLAQEYERASKVDQFVTRFLLRETVSQLQALQSSLEGASDTLEAQAHGWRLIPSWGPSPRPCEPHFL

SEQ ID NO: 27443 - protein, 79 aa, Artificial Sequence
  Synthetic polypeptide
DFCGLGMNFGPATNLLCDLSPGVREGLQSGPVCDALPAAGDGEPAASPSELAGGGVRYPGGPGPWLAAYPVLGPQSSAL

SEQ ID NO: 27444 - protein, 182 aa, Artificial Sequence
  Synthetic polypeptide
ILALLLTCYVTLAQEYERASKVDQFVTRFLLRETVSQLQALQSSLEGASDTLEAQAHGWRSDAESVEAQSRLCGSRRAGRRALRSVSRSSTWSPGSSDTGRSSEAEMQWRLQVNRLQELIDQLECKRQVQVAEEGLQDFHRALRCYVDFTGAQSHCLHVSAQKMLDGASFTLYEFWQDEASW

SEQ ID NO: 27445 - protein, 174 aa, Artificial Sequence
  Synthetic polypeptide
ILALLLTCYVTLAQEYERASKVDQFVTRFLLRETVSQLQALQSSLEGASDTLEAQAHGWRSDAESVEAQSRLCGSRRAGRRALRSVSRSSTWSPGSSDTGRSSEAEMQWRLQVNRLQELIDQLECKHILMAQRQVQVAEEGLQDFHRALRCYVDFTGAQSHCLHVSAQKMLDGA

SEQ ID NO: 27446 - protein, 95 aa, Artificial Sequence
  Synthetic polypeptide
ILALLLTCYVTLAQEYERASKVDQFVTRFLLRETVSQLQALQSSLEGASDTLEAQAHGWRCRERGGAEQALRQPAGRTPSPEECQPVIHLVPRLF

SEQ ID NO: 27447 - protein, 88 aa, Artificial Sequence
  Synthetic polypeptide
DFCGLGMNFGPATNLLCDLSPGVREGLQSGPVCDALPAAGDGEPAASPSELAGGGVRYPGGPGPWLAMQRAWRRRAGSAAAGGQDAEP

SEQ ID NO: 27448 - protein, 8 aa, Artificial Sequence
  Synthetic polypeptide
SQHFGRLR

SEQ ID NO: 27449 - protein, 36 aa, Artificial Sequence
  Synthetic polypeptide
VQWLTPVIPALWEAEMTRMYFSAGSVRSNSTRCQRL

SEQ ID NO: 27450 - protein, 7 aa, Artificial Sequence
  Synthetic polypeptide
ISQPQAW

SEQ ID NO: 27451 - protein, 17 aa, Artificial Sequence
  Synthetic polypeptide
PIKLKVLYKLVSLRPGE

SEQ ID NO: 27452 - protein, 297 aa, Artificial Sequence
  Synthetic polypeptide
SASGLVSNVVFTSHTTEQRHPLLVQLQSLIRAANPAAAFILAENGIVTRNEDIELILSENSFSSPEMLRSRYLMYPGWYEGKLNAGSVYPLMVQICVWFGRPLEKTRFVAKCKAIQSSIKPSPFSGNIYHILGKVKFSDSERTMEVCYNTLANSLSIMPVLEGPTPPPDSKSVSQDSSGQQECYLVFIGCSLKEDSIKDWLRQSAKQKPQRKALKTRGMLTQQEIRSIHVKRHLEPLPAGYFYNGTQFVNFFGDKTDFHPLMDQFMNDYVEEANREIEKYNQELEQQEYHDLFELKP

SEQ ID NO: 27453 - protein, 19 aa, Artificial Sequence
  Synthetic polypeptide
QSGRTRCWMRQWLKPTWAS

SEQ ID NO: 27454 - protein, 8 aa, Artificial Sequence
  Synthetic polypeptide
RAAGPGAG

SEQ ID NO: 27455 - protein, 49 aa, Artificial Sequence
  Synthetic polypeptide
ERQDQVLDEAVAEAHLGKLNVKLTKLTEKQAQYLGMSCDGPFKPDHYRY

SEQ ID NO: 27456 - protein, 131 aa, Artificial Sequence
  Synthetic polypeptide
GQARWHTPVIPALWEAEAGGSLEVDRYRLKNGRRIILLAEGRLVNLGCAMGHPSFVMSNSFTNQVMAQIELWTHPDKYPVGVHFLPKKLDEAVAEAHLGKLNVKLTKLTEKQAQYLGMSCDGPFKPDHYRY

SEQ ID NO: 27457 - protein, 19 aa, Artificial Sequence
  Synthetic polypeptide
FQHFGRPRQADHLRWTGIG

SEQ ID NO: 27458 - protein, 429 aa, Artificial Sequence
  Synthetic polypeptide
MLAPENSDIGLAAWGRKALDIAENEMPGLMRMRERYSASKPLKGARIAGCLHMTVETAVLIETLVTLGAEVQWSSCNIFSTQDHAAAAIAKAGIPVYAWKGETDEEYLWCIEQTLYFKDGPLNMILDDGGDLTNLIHTKYPQLLPGIRGISEETTTGVHNLYKMMANGILKVPAINVNDSVTKSKFDNLYGCRESLIDGIKRATDVMIAGKVAVVAGYGDVGKGCAQALRGFGARVIITEIDPINALQAAMEGYEVTTMDEACQEGNIFVTTTGCIDIILGRHFEQMKDDAIVCNIGHFDVEIDVKWLNENAVEKVNIKPQVDRYRLKNGRRIILLAEGRLVNLGCAMGHPSFVMSNSFTNQVMAQIELWTHPDKYPVGVHFLPKKLDEAVAEAHLGKLNVKLTKLTEKQAQYLGMSCDGPFKPDHYRY

SEQ ID NO: 27459 - protein, 81 aa, Artificial Sequence
  Synthetic polypeptide
IVSILCEQICHLSVSTVTTPVWSLSLQVSLDLLLRRSTQQPMGSFQKTNLVSECWPLKTPTSAWLPGDARPWTLLRTRCRA

SEQ ID NO: 27460 - protein, 17 aa, Artificial Sequence
  Synthetic polypeptide
KLRHRPGCLGTQGPGHC

SEQ ID NO: 27461 - protein, 25 aa, Artificial Sequence
  Synthetic polypeptide
EAEPTSAWLPGDARPWTLLRTRCRA

SEQ ID NO: 27462 - protein, 23 aa, Artificial Sequence
  Synthetic polypeptide
SQHFERPSRHRPGCLGTQGPGHC

SEQ ID NO: 27463 - protein, 439 aa, Artificial Sequence
  Synthetic polypeptide
PGVVAHPCSPSTLRGRADIGLAAWGRKALDIAENEMPGLMRMRERYSASKPLKGARIAGCLHMTVETAVLIETLVTLGAEVQWSSCNIFSTQDHAAAAIAKAGIPVYAWKGETDEEYLWCIEQTLYFKDGPLNMILDDGGDLTNLIHTKYPQLLPGIRGISEETTTGVHNLYKMMANGILKVPAINVNDSVTKSKFDNLYGCRESLIDGIKRATDVMIAGKVAVVAGYGDVGKGCAQALRGFGARVIITEIDPINALQAAMEGYEVTTMDEACQEGNIFVTTTGCIDIILGRHFEQMKDDAIVCNIGHFDVEIDVKWLNENAVEKVNIKPQVDRYRLKNGRRIILLAEGRLVNLGCAMGHPSFVMSNSFTNQVMAQIELWTHPDKYPVGVHFLPKKLDEAVAEAHLGKLNVKLTKLTEKQAQYLGMSCDGPFKPDHYRY

SEQ ID NO: 27464 - protein, 24 aa, Artificial Sequence
  Synthetic polypeptide
TLPTSAWLPGDARPWTLLRTRCRA

SEQ ID NO: 27465 - protein, 40 aa, Artificial Sequence
  Synthetic polypeptide
VTLSLHLGLSALTCPGIHDLCREHCRHRPGCLGTQGPGHC

SEQ ID NO: 27466 - protein, 435 aa, Artificial Sequence
  Synthetic polypeptide
PALASMICVVNIADIGLAAWGRKALDIAENEMPGLMRMRERYSASKPLKGARIAGCLHMTVETAVLIETLVTLGAEVQWSSCNIFSTQDHAAAAIAKAGIPVYAWKGETDEEYLWCIEQTLYFKDGPLNMILDDGGDLTNLIHTKYPQLLPGIRGISEETTTGVHNLYKMMANGILKVPAINVNDSVTKSKFDNLYGCRESLIDGIKRATDVMIAGKVAVVAGYGDVGKGCAQALRGFGARVIITEIDPINALQAAMEGYEVTTMDEACQEGNIFVTTTGCIDIILGRHFEQMKDDAIVCNIGHFDVEIDVKWLNENAVEKVNIKPQVDRYRLKNGRRIILLAEGRLVNLGCAMGHPSFVMSNSFTNQVMAQIELWTHPDKYPVGVHFLPKKLDEAVAEAHLGKLNVKLTKLTEKQAQYLGMSCDGPFKPDHYRY

SEQ ID NO: 27467 - protein, 27 aa, Artificial Sequence
  Synthetic polypeptide
VREFETSMDNMVLLRMMMAPDPRMKQE

SEQ ID NO: 27468 - protein, 37 aa, Artificial Sequence
  Synthetic polypeptide
QAWWLTPVIPALWEAKAGGSLESGSLRPAWTTWCFSE

SEQ ID NO: 27469 - protein, 710 aa, Artificial Sequence
  Synthetic polypeptide
DQHGQHGASQNDDGSRSKDETRVSTNGSDDPEDAGAGENRRVSGNNSPSLSNGGFKPSRPPRPSRPPPPTPRRPASVNGSPSATSESDGSSTGSLPPTNTNTNTSEGATSGLIIPLTISGGSGPRPLNPVTQAPLPPGWEQRVDQHGRVYYVDHVEKRTTWDRPEPLPPGWERRVDNMGRIYYVDHFTRTTTWQRPTLESVRNYEQWQLQRSQLQGAMQQFNQRFIYGNQDLFATSQSKEFDPLGPLPPGWEKRTDSNGRVYFVNHNTRITQWEDPRSQGQLNEKPLPEGWEMRFTVDGIPYFVDHNRRTTTYIDPRTGKSALDNGPQIAYVRDFKAKVQYFRFWCQQLAMPQHIKITVTRKTLFEDSFQQIMSFSPQDLRRRLWVIFPGEEGLDYGGVAREWFFLLSHEVLNPMYCLFEYAGKDNYCLQINPASYINPDHLKYFRFIGRFIAMALFHGKFIDTGFSLPFYKRILNKPVGLKDLESIDPEFYNSLIWVKENNIEECDLEMYFSVDKEILGEIKSHDLKPNGGNILVTEENKEEYIRMVAEWRLSRGVEEQTQAFFEGFNEILPQQYLQYFDAKELEVLLCGMQEIDLNDWQRHAIYRHYARTSKQIMWFWQFVKEIDNEKRMRLLQFVTGTCRLPVGGFADLMGSNGPQKFCIEKVGKENWLPRSHTCFNRLDLPPYKSYEQLKEKLLFAIEETEGFGQE

SEQ ID NO: 27470 - protein, 51 aa, Artificial Sequence
  Synthetic polypeptide
HSQNDKTRDGEHISTCQETGEENRQQWQSIFRQPQHTNYTMGRPQKSRSIK

SEQ ID NO: 27471 - protein, 483 aa, Artificial Sequence
  Synthetic polypeptide
FNSYNILKMTKLEMENILVLVRKQEKRTDSNGRVYFVNHNTRITQWEDPRSQGQLNEKPLPEGWEMRFTVDGIPYFVDHNRRTTTYIDPRTGKSALDNGPQIAYVRDFKAKVQYFRFWCQQLAMPQHIKITVTRKTLFEDSFQQIMSFSPQDLRRRLWVIFPGEEGLDYGGVAREWFFLLSHEVLNPMYCLFEYAGKDNYCLQINPASYINPDHLKYFRFIGRFIAMALFHGKFIDTGFSLPFYKRILNKPVGLKDLESIDPEFYNSLIWVKENNIEECDLEMYFSVDKEILGEIKSHDLKPNGGNILVTEENKEEYIRMVAEWRLSRGVEEQTQAFFEGFNEILPQQYLQYFDAKELEVLLCGMQEIDLNDWQRHAIYRHYARTSKQIMWFWQFVKEIDNEKRMRLLQFVTGTCRLPVGGFADLMGSNGPQKFCIEKVGKENWLPRSHTCFNRLDLPPYKSYEQLKEKLLFAIEETEGFGQE

SEQ ID NO: 27472 - protein, 36 aa, Artificial Sequence
  Synthetic polypeptide
YLSGNRRREQTAMAEYISSTTTHELHNGKTPEVKVN

SEQ ID NO: 27473 - protein, 36 aa, Artificial Sequence
  Synthetic polypeptide
PLKSFLVTKCLPAFLRPSTPLENKDYFLIVIQNPTE

SEQ ID NO: 27474 - protein, 12 aa, Artificial Sequence
  Synthetic polypeptide
GHLLHLRIKTIS

SEQ ID NO: 27475 - protein, 22 aa, Artificial Sequence
  Synthetic polypeptide
AALSLKHLPIYSINNIPLSFPN

SEQ ID NO: 27476 - protein, 375 aa, Artificial Sequence
  Synthetic polypeptide
SIYQFTPLIIYLFHFLIDYAELVFMITDALTAIALYFAIQDFNKVVFKKQKLLLELDQYAPDVAELIRTPMEMRYIPLKVALFYLLNPYTILSCVAKSTCAINNTLIAFFILTTIKGSAFLSAIFLALATYQSLYPLTLFVPGLLYLLQRQYIPVKMKSKAFWIFSWEYAMMYVGSLVVIICLSFFLLSSWDFIPAVYGFILSVPDLTPNIGLFWYFFAEMFEHFSLFFVCVFQINVFFYTIPLAIKLKEHPIFFMFIQIAVIAIFKSYPTVGDVALYMAFFPVWNHLYRFLRNIFVLTCIIIVCSLLFPVLWHLWIYAGSANSNFFYAITLTFNVGQILLISDYFYAFLRREYYLTHGLYLTAKDGTEAMLVLK

SEQ ID NO: 27477 - protein, 27 aa, Artificial Sequence
  Synthetic polypeptide
DPRGESTKSNTNSLSCFVLEAFTNLLH

SEQ ID NO: 27478 - protein, 363 aa, Artificial Sequence
  Synthetic polypeptide
SIYQFTPLIIYLFHFLIDYAELVFMITDALTAIALYFAIQDFNKVVFKKQKLLLELDQYAPDVAELIRTPMEMRYIPLKVALFYLLNPYTILSCVAKSTCAINNTLIAFFILTTIKGSAFLSAIFLALATYQSLYPLTLFVPGLLYLLQRQYIPVKMKSKAFWIFSWEYAMMYVGSLVVIICLSFFLLSSWDFIPAVYGFILSVPDLTPNIGLFWYFFAEMFEHFSLFFVCVFQINVFFYTIPLAIKLKEHPIFFMFIQIAVIAIFKSYPTVGDVALYMAFFPVWNHLYRFLRNIFVLTCIIIVCSLLFPVLWHLWIYAGSANSNFFYAITLTFNVGQMGFCGDRMAGTCPEAIRAAGDRTPS

SEQ ID NO: 27479 - protein, 112 aa, Artificial Sequence
  Synthetic polypeptide
FGLSGYLAQCLAPTPSQNLVSKETSTTALQASVARPELEVNAAIVSGQSSEPKEIVEKSKIPGRRNSRTEEPTVASESVENGHRKRSSRPASASSSTKDITSAVQSKRRKSK

SEQ ID NO: 27480 - protein, 24 aa, Artificial Sequence
  Synthetic polypeptide
CARGYSLVSQGTWHSALPLPRRRI

SEQ ID NO: 27481 - protein, 58 aa, Artificial Sequence
  Synthetic polypeptide
VPDVQEDIVWSLRVPGTVPCPYPVAEFSLKGNFNHSTAGLCCQTRAGGKCCHSLWTKQ

SEQ ID NO: 27482 - protein, 5 aa, Artificial Sequence
  Synthetic polypeptide
GRWFC

SEQ ID NO: 27483 - protein, 15 aa, Artificial Sequence
  Synthetic polypeptide
AGGSAECPDLEPEPE

SEQ ID NO: 27484 - protein, 89 aa, Artificial Sequence
  Synthetic polypeptide
QVVLLNVLTLNRNLSDSLARGRLHPDLQSNLLQVDSEFTEEEIEFLEARGHHVEKVDVLSWVHGSRRTNNFIIAVKDPRSPDAAGATIL

SEQ ID NO: 27485 - protein, 14 aa, Artificial Sequence
  Synthetic polypeptide
GRARWLMPETRTPS

SEQ ID NO: 27486 - protein, 110 aa, Artificial Sequence
  Synthetic polypeptide
AGRGGSCLRPGLLPEVCTAAAAAIVVVGDGQPRRVAATRDAQRPVLRRSGRVLLPPGWAHGHRHGLSHLRYRCHRGAGHADLLRGPPDLPAGCRGDRCCPLHFTGHRGAQ

SEQ ID NO: 27487 - protein, 83 aa, Artificial Sequence
  Synthetic polypeptide
DLESPCLGSNPSSASSVTSDKCSSSPGQGSCAQSMGTTNALRQPTLRSFLDTMLQEMAASGTRMAITGSLAGLMTCSMYLDTC

SEQ ID NO: 27488 - protein, 23 aa, Artificial Sequence
  Synthetic polypeptide
PQISVQAALARDHAHSLWEPRTL

SEQ ID NO: 27489 - protein, 17 aa, Artificial Sequence
  Synthetic polypeptide
SQHFGRLRRADHLRTSP

SEQ ID NO: 27490 - protein, 369 aa, Artificial Sequence
  Synthetic polypeptide
WAPWLTPVIPALWEAEAGRSLEDITLKIQFLRLLQSFSDHHENKYLLLNNQELNELSAISLKANIPEVEAVLNTDRSLVCDGKRGLLTRLLQVMKKEPAESSFRFWQARAVESFLRGTTSYADQMFLLKRGLLEHILYCIVDSECKSRDVLQSYFDLLGELMKFNVDAFKRFNKYINTDAKFQVFLKQINSSLVDSNMLVRCVTLSLDRFENQVDMKVAEVLSECRLLAYISQVPTQMSFLFRLINIIHVQTLTQENVSCLNTSLVILMLARRKERLPLYLRLLQRMEHSKKYPGFLLNNFHNLLRFWQQHYLHKDKDSTCLENSSCISFSYWKETVSILLNPDRQSPSALVSYIEEPYMDIDRDFTEE

SEQ ID NO: 27491 - protein, 53 aa, Artificial Sequence
  Synthetic polypeptide
NFLFFRKHNEESEKRTHRMEERFLWPPLCSLLQGLLRRMACLTRQPEPSCPSQ

SEQ ID NO: 27492 - protein, 51 aa, Artificial Sequence
  Synthetic polypeptide
STSNQINNKLDFIKIKTFCSSENTMRKVKREPTEWKNVFCGLHCVPSSRGF

SEQ ID NO: 27493 - protein, 459 aa, Artificial Sequence
  Synthetic polypeptide
KENPQNGRTFFVASIVFPPPGASEENGLPHTSARTQLPQSMKIMHEIMYKLEVLYVLCVLLMGRQRNQVHRMIAEFKLIPGLNNLFDKLIWRKHSASALVLHGHNQNCDCSPDITLKIQFLRLLQSFSDHHENKYLLLNNQELNELSAISLKANIPEVEAVLNTDRSLVCDGKRGLLTRLLQVMKKEPAESSFRFWQARAVESFLRGTTSYADQMFLLKRGLLEHILYCIVDSECKSRDVLQSYFDLLGELMKFNVDAFKRFNKYINTDAKFQVFLKQINSSLVDSNMLVRCVTLSLDRFENQVDMKVAEVLSECRLLAYISQVPTQMSFLFRLINIIHVQTLTQENVSCLNTSLVILMLARRKERLPLYLRLLQRMEHSKKYPGFLLNNFHNLLRFWQQHYLHKDKDSTCLENSSCISFSYWKETVSILLNPDRQSPSALVSYIEEPYMDIDRDFTEE

SEQ ID NO: 27494 - protein, 35 aa, Artificial Sequence
  Synthetic polypeptide
NRVIYRPASSPENQGRRQLRRTLPSLHCVPSSRGF

SEQ ID NO: 27495 - protein, 452 aa, Artificial Sequence
  Synthetic polypeptide
EELSQASIVFPPPGASEENGLPHTSARTQLPQSMKIMHEIMYKLEVLYVLCVLLMGRQRNQVHRMIAEFKLIPGLNNLFDKLIWRKHSASALVLHGHNQNCDCSPDITLKIQFLRLLQSFSDHHENKYLLLNNQELNELSAISLKANIPEVEAVLNTDRSLVCDGKRGLLTRLLQVMKKEPAESSFRFWQARAVESFLRGTTSYADQMFLLKRGLLEHILYCIVDSECKSRDVLQSYFDLLGELMKFNVDAFKRFNKYINTDAKFQVFLKQINSSLVDSNMLVRCVTLSLDRFENQVDMKVAEVLSECRLLAYISQVPTQMSFLFRLINIIHVQTLTQENVSCLNTSLVILMLARRKERLPLYLRLLQRMEHSKKYPGFLLNNFHNLLRFWQQHYLHKDKDSTCLENSSCISFSYWKETVSILLNPDRQSPSALVSYIEEPYMDIDRDFTEE

SEQ ID NO: 27496 - protein, 44 aa, Artificial Sequence
  Synthetic polypeptide
FTREPGKETAEKNSPKPPLCSLLQGLLRRMACLTRQPEPSCPSQ

SEQ ID NO: 27497 - protein, 633 aa, Artificial Sequence
  Synthetic polypeptide
FVSDEMSKDCLSILYNTCVCTEGVTKRLAEKNDFVIFLFTLMTSKKTFLQTATLIEDILGVKKEMIRLDEVPNLSSLVSNFDQQQLANFCRILAVTISEMDTGNDDKHTLLAKNAQQKKSLSLGPSAAEINQAALLSIPGFVERLCKLATRKVSESTGTASFLQELEEWYTWLDNALVLDALMRVANEESEHNQGASEENGLPHTSARTQLPQSMKIMHEIMYKLEVLYVLCVLLMGRQRNQVHRMIAEFKLIPGLNNLFDKLIWRKHSASALVLHGHNQNCDCSPDITLKIQFLRLLQSFSDHHENKYLLLNNQELNELSAISLKANIPEVEAVLNTDRSLVCDGKRGLLTRLLQVMKKEPAESSFRFWQARAVESFLRGTTSYADQMFLLKRGLLEHILYCIVDSECKSRDVLQSYFDLLGELMKFNVDAFKRFNKYINTDAKFQVFLKQINSSLVDSNMLVRCVTLSLDRFENQVDMKVAEVLSECRLLAYISQVPTQMSFLFRLINIIHVQTLTQENVSCLNTSLVILMLARRKERLPLYLRLLQRMEHSKKYPGFLLNNFHNLLRFWQQHYLHKDKDSTCLENSSCISFSYWKETVSILLNPDRQSPSALVSYIEEPYMDIDRDFTEE

SEQ ID NO: 27498 - protein, 641 aa, Artificial Sequence
  Synthetic polypeptide
FVSDEMSKDCLSILYNTCVCTEGVTKRLAEKNDFVIFLFTLMTSKKTFLQTATLIEDILGVKKEMIRLDEVPNLSSLVSNFDQQQLANFCRILAVTISEMDTGNDDKHTLLAKNAQQKKSLSLGPSAAEINQAALLSIPGFVERLCKLATRKVSESTGTASFLQELEEWYTWLDNALVLDALMRVANEESEHNQASIVFPPPGASEENGLPHTSARTQLPQSMKIMHEIMYKLEVLYVLCVLLMGRQRNQVHRMIAEFKLIPGLNNLFDKLIWRKHSASALVLHGHNQNCDCSPDITLKIQFLRLLQSFSDHHENKYLLLNNQELNELSAISLKANIPEVEAVLNTDRSLVCDGKRGLLTRLLQVMKKEPAESSFRFWQARAVESFLRGTTSYADQMFLLKRGLLEHILYCIVDSECKSRDVLQSYFDLLGELMKFNVDAFKRFNKYINTDAKFQVFLKQINSSLVDSNMLVRCVTLSLDRFENQVDMKVAEVLSECRLLAYISQVPTQMSFLFRLINIIHVQTLTQENVSCLNTSLVILMLARRKERLPLYLRLLQRMEHSKKYPGFLLNNFHNLLRFWQQHYLHKDKDSTCLENSSCISFSYWKETVSILLNPDRQSPSALVSYIEEPYMDIDRDFTEE

SEQ ID NO: 27499 - protein, 125 aa, Artificial Sequence
  Synthetic polypeptide
RHMHVYIYCSTIHNSKRLGTNPNVHLMVGWIKKMWHIYTMEYYAAIKNDEFMSFVGTWMNLETIILSKLSLRTENQTPCVLTHRKFLLFSPWRLWHLLLKRGNLPKKPLIQILTFLTCLEVLIFL

SEQ ID NO: 27500 - protein, 27 aa, Artificial Sequence
  Synthetic polypeptide
GQKTKHRVFSLIGNFSSSLHGGYGICY

SEQ ID NO: 27501 - protein, 15 aa, Artificial Sequence
  Synthetic polypeptide
DSAKKVLGQCSLRLF

SEQ ID NO: 27502 - protein, 12 aa, Artificial Sequence
  Synthetic polypeptide
KIVQRKCLANVH

SEQ ID NO: 27503 - protein, 741 aa, Artificial Sequence
  Synthetic polypeptide
CKESAWPMFTETFLTERDKQSKWSGIPQLLLKLHTTSHLHSDFVECQNILKEISPLLSMEAMAFVTEERKLTQETTYPNTYIFDLFGGVDLLVEILMRPTISIRGQKLKISDEMSKDCLSILYNTCVCTEGVTKRLAEKNDFVIFLFTLMTSKKTFLQTATLIEDILGVKKEMIRLDEVPNLSSLVSNFDQQQLANFCRILAVTISEMDTGNDDKHTLLAKNAQQKKSLSLGPSAAEINQAALLSIPGFVERLCKLATRKVSESTGTASFLQELEEWYTWLDNALVLDALMRVANEESEHNQGASEENGLPHTSARTQLPQSMKIMHEIMYKLEVLYVLCVLLMGRQRNQVHRMIAEFKLIPGLNNLFDKLIWRKHSASALVLHGHNQNCDCSPDITLKIQFLRLLQSFSDHHENKYLLLNNQELNELSAISLKANIPEVEAVLNTDRSLVCDGKRGLLTRLLQVMKKEPAESSFRFWQARAVESFLRGTTSYADQMFLLKRGLLEHILYCIVDSECKSRDVLQSYFDLLGELMKFNVDAFKRFNKYINTDAKFQVFLKQINSSLVDSNMLVRCVTLSLDRFENQVDMKVAEVLSECRLLAYISQVPTQMSFLFRLINIIHVQTLTQENVSCLNTSLVILMLARRKERLPLYLRLLQRMEHSKKYPGFLLNNFHNLLRFWQQHYLHKDKDSTCLENSSCISFSYWKETVSILLNPDRQSPSALVSYIEEPYMDIDRDFTEE

SEQ ID NO: 27504 - protein, 749 aa, Artificial Sequence
  Synthetic polypeptide
CKESAWPMFTETFLTERDKQSKWSGIPQLLLKLHTTSHLHSDFVECQNILKEISPLLSMEAMAFVTEERKLTQETTYPNTYIFDLFGGVDLLVEILMRPTISIRGQKLKISDEMSKDCLSILYNTCVCTEGVTKRLAEKNDFVIFLFTLMTSKKTFLQTATLIEDILGVKKEMIRLDEVPNLSSLVSNFDQQQLANFCRILAVTISEMDTGNDDKHTLLAKNAQQKKSLSLGPSAAEINQAALLSIPGFVERLCKLATRKVSESTGTASFLQELEEWYTWLDNALVLDALMRVANEESEHNQASIVFPPPGASEENGLPHTSARTQLPQSMKIMHEIMYKLEVLYVLCVLLMGRQRNQVHRMIAEFKLIPGLNNLFDKLIWRKHSASALVLHGHNQNCDCSPDITLKIQFLRLLQSFSDHHENKYLLLNNQELNELSAISLKANIPEVEAVLNTDRSLVCDGKRGLLTRLLQVMKKEPAESSFRFWQARAVESFLRGTTSYADQMFLLKRGLLEHILYCIVDSECKSRDVLQSYFDLLGELMKFNVDAFKRFNKYINTDAKFQVFLKQINSSLVDSNMLVRCVTLSLDRFENQVDMKVAEVLSECRLLAYISQVPTQMSFLFRLINIIHVQTLTQENVSCLNTSLVILMLARRKERLPLYLRLLQRMEHSKKYPGFLLNNFHNLLRFWQQHYLHKDKDSTCLENSSCISFSYWKETVSILLNPDRQSPSALVSYIEEPYMDIDRDFTEE

SEQ ID NO: 27505 - protein, 710 aa, Artificial Sequence
  Synthetic polypeptide
CKESAWPMFTETFLTERDKQSKWSGIPQLLLKLHTTSHLHSDFVECQNILKLLVEILMRPTISIRGQKLKISDEMSKDCLSILYNTCVCTEGVTKRLAEKNDFVIFLFTLMTSKKTFLQTATLIEDILGVKKEMIRLDEVPNLSSLVSNFDQQQLANFCRILAVTISEMDTGNDDKHTLLAKNAQQKKSLSLGPSAAEINQAALLSIPGFVERLCKLATRKVSESTGTASFLQELEEWYTWLDNALVLDALMRVANEESEHNQASIVFPPPGASEENGLPHTSARTQLPQSMKIMHEIMYKLEVLYVLCVLLMGRQRNQVHRMIAEFKLIPGLNNLFDKLIWRKHSASALVLHGHNQNCDCSPDITLKIQFLRLLQSFSDHHENKYLLLNNQELNELSAISLKANIPEVEAVLNTDRSLVCDGKRGLLTRLLQVMKKEPAESSFRFWQARAVESFLRGTTSYADQMFLLKRGLLEHILYCIVDSECKSRDVLQSYFDLLGELMKFNVDAFKRFNKYINTDAKFQVFLKQINSSLVDSNMLVRCVTLSLDRFENQVDMKVAEVLSECRLLAYISQVPTQMSFLFRLINIIHVQTLTQENVSCLNTSLVILMLARRKERLPLYLRLLQRMEHSKKYPGFLLNNFHNLLRFWQQHYLHKDKDSTCLENSSCISFSYWKETVSILLNPDRQSPSALVSYIEEPYMDIDRDFTEE

SEQ ID NO: 27506 - protein, 321 aa, Artificial Sequence
  Synthetic polypeptide
SQCFGKLRRENCLTPEVQDQPGQHEYNKAIRNYTRFDDWYLWVQMYKGTVSMPVFQSLEAYWPGLQSLIGDIDNAMRTFLNYYTVWKQFGGLPEFYNIPQGYTVEKREGYPLRPELIESAMYLYRATGDPTLLELGRDAVESIEKISKVECGFATIKDLRDHKLDNRMESFFLAETVKYLYLLFDPTNFIHNNGSTFDAVITPYGECILGAGGYIFNTEAHPIDPAALHCCQRLKEEQWEVEDLMREFYSLKRSRSKFQKNTVSSGPWEPPARPGTLFSPENHDQARERKPAKQKVPLLSCPSQPFTSKLALLGQVFLDSS

SEQ ID NO: 27507 - protein, 62 aa, Artificial Sequence
  Synthetic polypeptide
PQKFKISLGNMSITKPSGTTPASMTGTCGFRCTRGLCPCQSSSPWRPTGLVFRASLETLTMP

SEQ ID NO: 27508 - protein, 188 aa, Artificial Sequence
  Synthetic polypeptide
SQCFGKLRRENCLTPEVQDQPGQHEYNKAIRNYTRFDDWYLWVQMYKGTVSMPVFQSLEAYWPGLQSLIGDIDNAMRTFLNYYTVWKQFGGLPEFYNIPQGYTVEKREGYPLRPELIESAMYLYRATGDPTLLELGRDAVESIEKISKVECGFATVSVCMAPRTGKSLPLLLKSLFKGRALGVLTYQH

SEQ ID NO: 27509 - protein, 70 aa, Artificial Sequence
  Synthetic polypeptide
MNAESMPYSSYVPHSALHVSITKPSGTTPASMTGTCGFRCTRGLCPCQSSSPWRPTGLVFRASLETLTMP

SEQ ID NO: 27510 - protein, 315 aa, Artificial Sequence
  Synthetic polypeptide
ECRIHALLILCSPQCFTCEYNKAIRNYTRFDDWYLWVQMYKGTVSMPVFQSLEAYWPGLQSLIGDIDNAMRTFLNYYTVWKQFGGLPEFYNIPQGYTVEKREGYPLRPELIESAMYLYRATGDPTLLELGRDAVESIEKISKVECGFATIKDLRDHKLDNRMESFFLAETVKYLYLLFDPTNFIHNNGSTFDAVITPYGECILGAGGYIFNTEAHPIDPAALHCCQRLKEEQWEVEDLMREFYSLKRSRSKFQKNTVSSGPWEPPARPGTLFSPENHDQARERKPAKQKVPLLSCPSQPFTSKLALLGQVFLDSS

SEQ ID NO: 27511 - protein, 182 aa, Artificial Sequence
  Synthetic polypeptide
ECRIHALLILCSPQCFTCEYNKAIRNYTRFDDWYLWVQMYKGTVSMPVFQSLEAYWPGLQSLIGDIDNAMRTFLNYYTVWKQFGGLPEFYNIPQGYTVEKREGYPLRPELIESAMYLYRATGDPTLLELGRDAVESIEKISKVECGFATVSVCMAPRTGKSLPLLLKSLFKGRALGVLTYQH

SEQ ID NO: 27512 - protein, 37 aa, Artificial Sequence
  Synthetic polypeptide
CDSHQSYQLQSTSAGSEHPDPEQQVSAGWDPLHPRNR

SEQ ID NO: 27513 - protein, 1157 aa, Artificial Sequence
  Synthetic polypeptide
VIVISLTSCSRLRQVQSILTQSSKSRPDGILCILGIDSRYNEGCRELANYLLFGLYNQNTSDFEKTGFSEEVLDDVIILIKSDSVHLYCNPVNFRYLLPYVAHWRNLHFHCMTENEYEDEEAAEEFKITSFVDMVRDCSRIGIPYSSQGHLQIFDMFVVEKWPIVQAFALEGIGGDGFFTMKYELQDVSLNLWNVYSKMDPMSLESLLSDDLVAFEHQWTSFFANFDTEIPFLLELSESQAGEPFRSYFSHGMISSHITENSPNRQPFVLFGNHSTRENLNAGNFNFPSEGHLVRSTGPGGSFAKHMVAQCVSPKGPLACSRTYFFGATHVPYLGGDSKLPKKTEQIRLLSQIYAAVIEAVLAGIACYAKTSSLTKAKEVAEQTLGSGLDSFELIPFKAALRSKMTFHIHAVNNQGRIVPLDSEDSLSFVKTACMAVYDIPDLLGGNGCLGSVVFSESFLTSQILVKEKDGTVTTETSSVVLTAAVPRFCSWLVEDNEVKLSEKTQQAVRGDESFLGTYLTGGEGAYLYSSNLQSWPEEGNVHFFSSGLLFSHCRHRSIIISKDHMNSISFYDGDSTSTVAALLIDFKSSLLPHLPVHFHGSSNFLMIALFPKSKIYQAFYSEVFSLWKQQDNSGISLKVIQEDGLSVEQKRLHSSAQKLFSALSQPAGEKRSSLKLLSAKLPELDWFLQHFAISSISQEPVMRTHLPVLLQQAEINTTHRIESDKVIISIVTGLPGCHASELCAFLVTLHKECGRWMVYRQIMDSSECFHAAHFQRYLSSALEAQQNRSARQSAYIRKKTRLLVVLQGYTDVIDVVQALQTHPDSNVKASFTIGAITACVEPMSCYMEHRFLFPKCLDQCSQGLVSNVVFTSHTTEQRHPLLVQLQSLIRAANPAAAFILAENGIVTRNEDIELILSENSFSSPEMLRSRYLMYPGWYEGKLNAGSVYPLMVQICVWFGRPLEKTRFVAKCKAIQSSIKPSPFSGNIYHILGKVKFSDSERTMEVCYNTLANSLSIMPVLEGPTPPPDSKSVSQDSSGQQECYLVFIGCSLKEDSIKDWLRQSAKQKPQRKALKTRGMLTQQEIRSIHVKRHLEPLPAGYFYNGTQFVNFFGDKTDFHPLMDQFMNDYVEEANREIEKYNQELEQQEYHDLFELKP

SEQ ID NO: 27514 - protein, 16 aa, Artificial Sequence
  Synthetic polypeptide
SSVLPAAVDFGRFRAS

SEQ ID NO: 27515 - protein, 19 aa, Artificial Sequence
  Synthetic polypeptide
NEPVTKGQNRGGCGDGHIH

SEQ ID NO: 27516 - protein, 623 aa, Artificial Sequence
  Synthetic polypeptide
MCYTHATYMQWDVIQPKVEGDSDIRYNVKELEDMKLREMSQSQKDKTVVAVVMDIFTDMELLCDLMEASSRRGVPVYLLLAQEHLRHFLEMCYKMDLNGEHLPNMRVRSTCGDTYCSKAGRRFTGQALEKFVLIDCEQVVAGSYSFTWLCSQAHTSMVLQLRGRIVEDFDREFRCLYAESQPVEGFCGGEDPLSPRALRPPPVALAFRPDVPSPTSSLPSSTSLSSIKQSPLMGRSSYLALPGGGDCSDTGVVSSSLGPARREASGQPSLHRQLSDPNHGSPPGLYRANLGKLGAYPWSQSSPALNHNSTSPLTLAVGSPLLPRSRPLLQFHRGAPALSRFPENGLPGSQEPSPLRGRWVPGTTLETVEEKEKKASPSQSRGQLDLLVPFPRAREVGDPDSGVTPNSGPLRPGEQAPEDRRLSPSQADSQLDLLSRALGTGGAPELGSLRPGDRALEDRRLSLNQSRGQSDLLMQYPKAQGSRVPLETNSSARPARRAPDERRQTLGHSQLDLITKFGPFRGEGPGPNGLPISSPARTAGAGSGDEKRLTLGHSKLDLITKYHQLHGARQGTEPGGPKGGHLNGGNSDLVRDEKRLTLGHSKLDLITKYNKSKFKQLRSRFES

SEQ ID NO: 27517 - protein, 12 aa, Artificial Sequence
  Synthetic polypeptide
ASHKRTKPWWLW

SEQ ID NO: 27518 - protein, 52 aa, Artificial Sequence
  Synthetic polypeptide
SPSSASPNWWLGPSGPPVLPLGSFQMIMGWPLPSGEPSSTGNVKTLDILNCW

SEQ ID NO: 27519 - protein, 25 aa, Artificial Sequence
  Synthetic polypeptide
VPALHHLTGGLAPLDPLFSLWDPFR

SEQ ID NO: 27520 - protein, 95 aa, Artificial Sequence
  Synthetic polypeptide
LVAWPLWTPCSPSGILSDDHGLAAALWRTFFNRKCEDPRHLELLVEYVRKQIQYLDSMNGEDLLLTGEVSWRPLVEKNPQSILKPHSPTYNDEGL

SEQ ID NO: 27521 - protein, 45 aa, Artificial Sequence
  Synthetic polypeptide
LVAWPLWTPCSPSGILSDDHGLAAALWRTFFNRKCEDPRHLELLV

SEQ ID NO: 27522 - protein, 77 aa, Artificial Sequence
  Synthetic polypeptide
LVAWPLWTPCSPSGILSDDHGLAAALWRTFFNRKCEDPRHLELLVEYVRKQIQYLDSMNGEDLLLTGEVSWRPLVEK

SEQ ID NO: 27523 - protein, 33 aa, Artificial Sequence
  Synthetic polypeptide
SPSSASPNWWLGPSGPPVLPLGSFQMIMGWPLP

SEQ ID NO: 27524 - protein, 25 aa, Artificial Sequence
  Synthetic polypeptide
LVAWPLWTPCSPSGILSDDHGLAAA

SEQ ID NO: 27525 - protein, 114 aa, Artificial Sequence
  Synthetic polypeptide
CPFYLTVNPYILKKNMILMTNHFYAAILGYDEGILSDDHGLAAALWRTFFNRKCEDPRHLELLVEYVRKQIQYLDSMNGEDLLLTGEVSWRPLVEKNPQSILKPHSPTYNDEGL

SEQ ID NO: 27526 - protein, 6 aa, Artificial Sequence
  Synthetic polypeptide
SLLLNC

SEQ ID NO: 27527 - protein, 96 aa, Artificial Sequence
  Synthetic polypeptide
CPFYLTVNPYILKKNMILMTNHFYAAILGYDEGILSDDHGLAAALWRTFFNRKCEDPRHLELLVEYVRKQIQYLDSMNGEDLLLTGEVSWRPLVEK

SEQ ID NO: 27528 - protein, 7 aa, Artificial Sequence
  Synthetic polypeptide
CPFYLTV

SEQ ID NO: 27529 - protein, 44 aa, Artificial Sequence
  Synthetic polypeptide
CPFYLTVNPYILKKNMILMTNHFYAAILGYDEGILSDDHGLAAA

SEQ ID NO: 27530 - protein, 37 aa, Artificial Sequence
  Synthetic polypeptide
QIIESEEAAVGTPNVWTSWTKVGTRLAFLSGFQYAAD

SEQ ID NO: 27531 - protein, 64 aa, Artificial Sequence
  Synthetic polypeptide
GGSCGNPQCMDKLDKSRNQTSISQWVPVCSRLIPVSPTQGQGDRALSRTSQGVRCLIHSIHGFL

SEQ ID NO: 27532 - protein, 280 aa, Artificial Sequence
  Synthetic polypeptide
GGSCGNPQCMDKLDKSRNQTSISQWVPVCSRLIPVSPTQGQGDRALSRTSQWPQMSQSRACGGSEQIPGIDIQLNRKYHTTRKLSTTKDSPQPVEEKVGAFTKIIEAMGFTGPLKYRCQMPDTFNSWFLITLLHVWMCLVRMKQEGRSGKYMCRIIVHFMWEDVQQRGRVMGVNPYILKKNMILMTNHFYAAILGYDEGILSDDHGLAAALWRTFFNRKCEDPRHLELLVEYVRKQIQYLDSMNGEDLLLTGEVSWRPLVEKNPQSILKPHSPTYNDEGL

SEQ ID NO: 27533 - protein, 227 aa, Artificial Sequence
  Synthetic polypeptide
GGSCGNPQCMDKLDKSRNQTSISQWVPVCSRLIPVSPTQGQGDRALSRTSQWPQMSQSRACGGSEQIPGIDIQLNRKYHTTRKLSTTKDSPQPVEEKVGAFTKIIEAMGFTGPLKYSKWVNPYILKKNMILMTNHFYAAILGYDEGILSDDHGLAAALWRTFFNRKCEDPRHLELLVEYVRKQIQYLDSMNGEDLLLTGEVSWRPLVEKNPQSILKPHSPTYNDEGL

SEQ ID NO: 27534 - protein, 281 aa, Artificial Sequence
  Synthetic polypeptide
GGSCGNPQCMDKLDKSRNQTSISQWVPVCSRLIPVSPTQGQGDRALSRTSQWPQMSQSRACGGSEQIPGIDIQLNRKYHTTRKLSTTKDSPQPVEEKVGAFTKIIEAMGFTGPLKYSKWKIKIAALRMYTSCVEKTDFEEFFLRCQMPDTFNSWFLITLLHVWMCLVRMKQEGRSGKYMCRIIVHFMWEDVQQRGRVMGGILSDDHGLAAALWRTFFNRKCEDPRHLELLVEYVRKQIQYLDSMNGEDLLLTGEVSWRPLVEKNPQSILKPHSPTYNDEGL

SEQ ID NO: 27535 - protein, 239 aa, Artificial Sequence
  Synthetic polypeptide
GGSCGNPQCMDKLDKSRNQTSISQWVPVCSRLIPVSPTQGQGDRALSRTSQKIKIAALRMYTSCVEKTDFEEFFLRCQMPDTFNSWFLITLLHVWMCLVRMKQEGRSGKYMCRIIVHFMWEDVQQRGRVMGVNPYILKKNMILMTNHFYAAILGYDEGILSDDHGLAAALWRTFFNRKCEDPRHLELLVEYVRKQIQYLDSMNGEDLLLTGEVSWRPLVEKNPQSILKPHSPTYNDEGL

SEQ ID NO: 27536 - protein, 307 aa, Artificial Sequence
  Synthetic polypeptide
GGSCGNPQCMDKLDKSRNQTSISQWVPVCSRLIPVSPTQGQGDRALSRTSQWPQMSQSRACGGSEQIPGIDIQLNRKYHTTRKLSTTKDSPQPVEEKVGAFTKIIEAMGFTGPLKYSKWKIKIAALRMYTSCVEKTDFEEFFLRCQMPDTFNSWFLITLLHVWMCLVRMKQEGRSGKYMCRIIVHFMWEDVQQRGRVMGVNPYILKKNMILMTNHFYAAILGYDEGILSDDHGLAAALWRTFFNRKCEDPRHLELLVEYVRKQIQYLDSMNGEDLLLTGEVSWRPLVEKNPQSILKPHSPTYNDEGL

SEQ ID NO: 27537 - protein, 170 aa, Artificial Sequence
  Synthetic polypeptide
GGSCGNPQCMDKLDKSRNQTSISQWVPVCSRLIPVSPTQGQGDRALSRTSQWPQMSQSRACGGSEQIPGIDIQLNRKYHTTPILGYDEGILSDDHGLAAALWRTFFNRKCEDPRHLELLVEYVRKQIQYLDSMNGEDLLLTGEVSWRPLVEKNPQSILKPHSPTYNDEGL

SEQ ID NO: 27538 - protein, 135 aa, Artificial Sequence
  Synthetic polypeptide
GGSCGNPQCMDKLDKSRNQTSISQWVPVCSRLIPVSPTQGQGDRALSRTSQWPQMSQSRACGGSEQIPGIDIQLNRKYHTTRKLSTTKDSPQPVEEKRSWDMMRGSFQMIMGWPLPSGEPSSTGNVKTLDILNCW

SEQ ID NO: 27539 - protein, 257 aa, Artificial Sequence
  Synthetic polypeptide
GGSCGNPQCMDKLDKSRNQTSISQWVPVCSRLIPVSPTQGQGDRALSRTSQLSTTKDSPQPVEEKVGAFTKIIEAMGFTGPLKYSKWKIKIAALRMYTSCVEKTDFEEFFLRCQMPDTFNSWFLITLLHVWMCLVRMKQEGRSGKYMCRIIVHFMWEDVQQRGRVMGVNPYILKKNMILMTNHFYAAILGYDEGILSDDHGLAAALWRTFFNRKCEDPRHLELLVEYVRKQIQYLDSMNGEDLLLTGEVSWRPLVEK

SEQ ID NO: 27540 - protein, 156 aa, Artificial Sequence
  Synthetic polypeptide
GGSCGNPQCMDKLDKSRNQTSISQWVPVCSRLIPVSPTQGQGDRALSRTSQWPQMSQSRACGGSEQIPGIDIQLNRKYHTTRKLSTTKDSPQPVEEKVGAFTKIIEAMGFTGPLKYSKWDVSSPNEAGRPEWEVHVSYHSSFYVGGCSAARQSHGG

SEQ ID NO: 27541 - protein, 132 aa, Artificial Sequence
  Synthetic polypeptide
GGSCGNPQCMDKLDKSRNQTSISQWVPVCSRLIPVSPTQGQGDRALSRTSQWPQMSQSRACGGSEQIPGIDIQLNRKYHTTRKLSTTKDSPQPVEEKVGAFTKIIEAMGFTGPLKYSKWGVRCLIHSIHGFL

SEQ ID NO: 27542 - protein, 251 aa, Artificial Sequence
  Synthetic polypeptide
GGSCGNPQCMDKLDKSRNQTSISQWVPVCSRLIPVSPTQGQGDRALSRTSQVPWLETSASEWHPQWPQMSQSRACGGSEQIPGIDIQLNRKYHTTRKLSTTKDSPQPVEEKVGAFTKIIEAMGFTGPLKYSKWKIKIAALRMYTSCVEKTDFEEFFLRCQMPDTFNSWFLITLLHVWMCLVRMKQEGRSGKYMCRIIVHFMWEDVQQRGRVMGVNPYILKKNMILMTNHFYAAILGYDEGILSDDHGLAAA

SEQ ID NO: 27543 - protein, 229 aa, Artificial Sequence
  Synthetic polypeptide
GGSCGNPQCMDKLDKSRNQTSISQWVPVCSRLIPVSPTQGQGDRALSRTSQWPQMSQSRACGGSEQIPGIDIQLNRKYHTTRKLSTTKDSPQPVEEKVGAFTKIIEAMGFTGPLKYSKWKIKIAALRMYTSCVEKTDFEEFFLRCQMPDTFNSWFLITLLHVWMCLVRMKQEGRSGKYMCRIIVHFMWEDVQQRGRVMGVSECCQMLVLDNSREGFEFGVLSVVKWPCF

SEQ ID NO: 27544 - protein, 52 aa, Artificial Sequence
  Synthetic polypeptide
GGSCGNPQCMDKLDKSRNQTSISQWVPVCSRLIPVSPTQGQGDRALSRTSQG

SEQ ID NO: 27545 - protein, 57 aa, Artificial Sequence
  Synthetic polypeptide
GGSCGNPQCMDKLDKSRNQTSISQWVPVCSRLIPVSPTQGQGDRALSRTSQTGSCSC

SEQ ID NO: 27546 - protein, 76 aa, Artificial Sequence
  Synthetic polypeptide
NFYPSFLLLLGMMMISALLTIKGFYEDQRNQTSISQWVPVCSRLIPVSPTQGQGDRALSRTSQGVRCLIHSIHGFL

SEQ ID NO: 27547 - protein, 22 aa, Artificial Sequence
  Synthetic polypeptide
RDSMKIRGTRLAFLSGFQYAAD

SEQ ID NO: 27548 - protein, 6 aa, Artificial Sequence
  Synthetic polypeptide
RSEEPD

SEQ ID NO: 27549 - protein, 292 aa, Artificial Sequence
  Synthetic polypeptide
NFYPSFLLLLGMMMISALLTIKGFYEDQRNQTSISQWVPVCSRLIPVSPTQGQGDRALSRTSQWPQMSQSRACGGSEQIPGIDIQLNRKYHTTRKLSTTKDSPQPVEEKVGAFTKIIEAMGFTGPLKYRCQMPDTFNSWFLITLLHVWMCLVRMKQEGRSGKYMCRIIVHFMWEDVQQRGRVMGVNPYILKKNMILMTNHFYAAILGYDEGILSDDHGLAAALWRTFFNRKCEDPRHLELLVEYVRKQIQYLDSMNGEDLLLTGEVSWRPLVEKNPQSILKPHSPTYNDEGL

SEQ ID NO: 27550 - protein, 239 aa, Artificial Sequence
  Synthetic polypeptide
NFYPSFLLLLGMMMISALLTIKGFYEDQRNQTSISQWVPVCSRLIPVSPTQGQGDRALSRTSQWPQMSQSRACGGSEQIPGIDIQLNRKYHTTRKLSTTKDSPQPVEEKVGAFTKIIEAMGFTGPLKYSKWVNPYILKKNMILMTNHFYAAILGYDEGILSDDHGLAAALWRTFFNRKCEDPRHLELLVEYVRKQIQYLDSMNGEDLLLTGEVSWRPLVEKNPQSILKPHSPTYNDEGL

SEQ ID NO: 27551 - protein, 293 aa, Artificial Sequence
  Synthetic polypeptide
NFYPSFLLLLGMMMISALLTIKGFYEDQRNQTSISQWVPVCSRLIPVSPTQGQGDRALSRTSQWPQMSQSRACGGSEQIPGIDIQLNRKYHTTRKLSTTKDSPQPVEEKVGAFTKIIEAMGFTGPLKYSKWKIKIAALRMYTSCVEKTDFEEFFLRCQMPDTFNSWFLITLLHVWMCLVRMKQEGRSGKYMCRIIVHFMWEDVQQRGRVMGGILSDDHGLAAALWRTFFNRKCEDPRHLELLVEYVRKQIQYLDSMNGEDLLLTGEVSWRPLVEKNPQSILKPHSPTYNDEGL

SEQ ID NO: 27552 - protein, 251 aa, Artificial Sequence
  Synthetic polypeptide
NFYPSFLLLLGMMMISALLTIKGFYEDQRNQTSISQWVPVCSRLIPVSPTQGQGDRALSRTSQKIKIAALRMYTSCVEKTDFEEFFLRCQMPDTFNSWFLITLLHVWMCLVRMKQEGRSGKYMCRIIVHFMWEDVQQRGRVMGVNPYILKKNMILMTNHFYAAILGYDEGILSDDHGLAAALWRTFFNRKCEDPRHLELLVEYVRKQIQYLDSMNGEDLLLTGEVSWRPLVEKNPQSILKPHSPTYNDEGL

SEQ ID NO: 27553 - protein, 319 aa, Artificial Sequence
  Synthetic polypeptide
NFYPSFLLLLGMMMISALLTIKGFYEDQRNQTSISQWVPVCSRLIPVSPTQGQGDRALSRTSQWPQMSQSRACGGSEQIPGIDIQLNRKYHTTRKLSTTKDSPQPVEEKVGAFTKIIEAMGFTGPLKYSKWKIKIAALRMYTSCVEKTDFEEFFLRCQMPDTFNSWFLITLLHVWMCLVRMKQEGRSGKYMCRIIVHFMWEDVQQRGRVMGVNPYILKKNMILMTNHFYAAILGYDEGILSDDHGLAAALWRTFFNRKCEDPRHLELLVEYVRKQIQYLDSMNGEDLLLTGEVSWRPLVEKNPQSILKPHSPTYNDEGL

SEQ ID NO: 27554 - protein, 182 aa, Artificial Sequence
  Synthetic polypeptide
NFYPSFLLLLGMMMISALLTIKGFYEDQRNQTSISQWVPVCSRLIPVSPTQGQGDRALSRTSQWPQMSQSRACGGSEQIPGIDIQLNRKYHTTPILGYDEGILSDDHGLAAALWRTFFNRKCEDPRHLELLVEYVRKQIQYLDSMNGEDLLLTGEVSWRPLVEKNPQSILKPHSPTYNDEGL

SEQ ID NO: 27555 - protein, 147 aa, Artificial Sequence
  Synthetic polypeptide
NFYPSFLLLLGMMMISALLTIKGFYEDQRNQTSISQWVPVCSRLIPVSPTQGQGDRALSRTSQWPQMSQSRACGGSEQIPGIDIQLNRKYHTTRKLSTTKDSPQPVEEKRSWDMMRGSFQMIMGWPLPSGEPSSTGNVKTLDILNCW

SEQ ID NO: 27556 - protein, 269 aa, Artificial Sequence
  Synthetic polypeptide
NFYPSFLLLLGMMMISALLTIKGFYEDQRNQTSISQWVPVCSRLIPVSPTQGQGDRALSRTSQLSTTKDSPQPVEEKVGAFTKIIEAMGFTGPLKYSKWKIKIAALRMYTSCVEKTDFEEFFLRCQMPDTFNSWFLITLLHVWMCLVRMKQEGRSGKYMCRIIVHFMWEDVQQRGRVMGVNPYILKKNMILMTNHFYAAILGYDEGILSDDHGLAAALWRTFFNRKCEDPRHLELLVEYVRKQIQYLDSMNGEDLLLTGEVSWRPLVEK

SEQ ID NO: 27557 - protein, 168 aa, Artificial Sequence
  Synthetic polypeptide
NFYPSFLLLLGMMMISALLTIKGFYEDQRNQTSISQWVPVCSRLIPVSPTQGQGDRALSRTSQWPQMSQSRACGGSEQIPGIDIQLNRKYHTTRKLSTTKDSPQPVEEKVGAFTKIIEAMGFTGPLKYSKWDVSSPNEAGRPEWEVHVSYHSSFYVGGCSAARQSHGG

SEQ ID NO: 27558 - protein, 144 aa, Artificial Sequence
  Synthetic polypeptide
NFYPSFLLLLGMMMISALLTIKGFYEDQRNQTSISQWVPVCSRLIPVSPTQGQGDRALSRTSQWPQMSQSRACGGSEQIPGIDIQLNRKYHTTRKLSTTKDSPQPVEEKVGAFTKIIEAMGFTGPLKYSKWGVRCLIHSIHGFL

SEQ ID NO: 27559 - protein, 263 aa, Artificial Sequence
  Synthetic polypeptide
NFYPSFLLLLGMMMISALLTIKGFYEDQRNQTSISQWVPVCSRLIPVSPTQGQGDRALSRTSQVPWLETSASEWHPQWPQMSQSRACGGSEQIPGIDIQLNRKYHTTRKLSTTKDSPQPVEEKVGAFTKIIEAMGFTGPLKYSKWKIKIAALRMYTSCVEKTDFEEFFLRCQMPDTFNSWFLITLLHVWMCLVRMKQEGRSGKYMCRIIVHFMWEDVQQRGRVMGVNPYILKKNMILMTNHFYAAILGYDEGILSDDHGLAAA

SEQ ID NO: 27560 - protein, 241 aa, Artificial Sequence
  Synthetic polypeptide
NFYPSFLLLLGMMMISALLTIKGFYEDQRNQTSISQWVPVCSRLIPVSPTQGQGDRALSRTSQWPQMSQSRACGGSEQIPGIDIQLNRKYHTTRKLSTTKDSPQPVEEKVGAFTKIIEAMGFTGPLKYSKWKIKIAALRMYTSCVEKTDFEEFFLRCQMPDTFNSWFLITLLHVWMCLVRMKQEGRSGKYMCRIIVHFMWEDVQQRGRVMGVSECCQMLVLDNSREGFEFGVLSVVKWPCF

SEQ ID NO: 27561 - protein, 64 aa, Artificial Sequence
  Synthetic polypeptide
NFYPSFLLLLGMMMISALLTIKGFYEDQRNQTSISQWVPVCSRLIPVSPTQGQGDRALSRTSQG

SEQ ID NO: 27562 - protein, 69 aa, Artificial Sequence
  Synthetic polypeptide
NFYPSFLLLLGMMMISALLTIKGFYEDQRNQTSISQWVPVCSRLIPVSPTQGQGDRALSRTSQTGSCSC

SEQ ID NO: 27563 - protein, 65 aa, Artificial Sequence
  Synthetic polypeptide
GQVPWLTPVIPAHWEAERNQTSISQWVPVCSRLIPVSPTQGQGDRALSRTSQGVRCLIHSIHGFL

SEQ ID NO: 27564 - protein, 23 aa, Artificial Sequence
  Synthetic polypeptide
SQHIGRLRGTRLAFLSGFQYAAD

SEQ ID NO: 27565 - protein, 281 aa, Artificial Sequence
  Synthetic polypeptide
GQVPWLTPVIPAHWEAERNQTSISQWVPVCSRLIPVSPTQGQGDRALSRTSQWPQMSQSRACGGSEQIPGIDIQLNRKYHTTRKLSTTKDSPQPVEEKVGAFTKIIEAMGFTGPLKYRCQMPDTFNSWFLITLLHVWMCLVRMKQEGRSGKYMCRIIVHFMWEDVQQRGRVMGVNPYILKKNMILMTNHFYAAILGYDEGILSDDHGLAAALWRTFFNRKCEDPRHLELLVEYVRKQIQYLDSMNGEDLLLTGEVSWRPLVEKNPQSILKPHSPTYNDEGL

SEQ ID NO: 27566 - protein, 228 aa, Artificial Sequence
  Synthetic polypeptide
GQVPWLTPVIPAHWEAERNQTSISQWVPVCSRLIPVSPTQGQGDRALSRTSQWPQMSQSRACGGSEQIPGIDIQLNRKYHTTRKLSTTKDSPQPVEEKVGAFTKIIEAMGFTGPLKYSKWVNPYILKKNMILMTNHFYAAILGYDEGILSDDHGLAAALWRTFFNRKCEDPRHLELLVEYVRKQIQYLDSMNGEDLLLTGEVSWRPLVEKNPQSILKPHSPTYNDEGL

SEQ ID NO: 27567 - protein, 282 aa, Artificial Sequence
  Synthetic polypeptide
GQVPWLTPVIPAHWEAERNQTSISQWVPVCSRLIPVSPTQGQGDRALSRTSQWPQMSQSRACGGSEQIPGIDIQLNRKYHTTRKLSTTKDSPQPVEEKVGAFTKIIEAMGFTGPLKYSKWKIKIAALRMYTSCVEKTDFEEFFLRCQMPDTFNSWFLITLLHVWMCLVRMKQEGRSGKYMCRIIVHFMWEDVQQRGRVMGGILSDDHGLAAALWRTFFNRKCEDPRHLELLVEYVRKQIQYLDSMNGEDLLLTGEVSWRPLVEKNPQSILKPHSPTYNDEGL

SEQ ID NO: 27568 - protein, 240 aa, Artificial Sequence
  Synthetic polypeptide
GQVPWLTPVIPAHWEAERNQTSISQWVPVCSRLIPVSPTQGQGDRALSRTSQKIKIAALRMYTSCVEKTDFEEFFLRCQMPDTFNSWFLITLLHVWMCLVRMKQEGRSGKYMCRIIVHFMWEDVQQRGRVMGVNPYILKKNMILMTNHFYAAILGYDEGILSDDHGLAAALWRTFFNRKCEDPRHLELLVEYVRKQIQYLDSMNGEDLLLTGEVSWRPLVEKNPQSILKPHSPTYNDEGL

SEQ ID NO: 27569 - protein, 308 aa, Artificial Sequence
  Synthetic polypeptide
GQVPWLTPVIPAHWEAERNQTSISQWVPVCSRLIPVSPTQGQGDRALSRTSQWPQMSQSRACGGSEQIPGIDIQLNRKYHTTRKLSTTKDSPQPVEEKVGAFTKIIEAMGFTGPLKYSKWKIKIAALRMYTSCVEKTDFEEFFLRCQMPDTFNSWFLITLLHVWMCLVRMKQEGRSGKYMCRIIVHFMWEDVQQRGRVMGVNPYILKKNMILMTNHFYAAILGYDEGILSDDHGLAAALWRTFFNRKCEDPRHLELLVEYVRKQIQYLDSMNGEDLLLTGEVSWRPLVEKNPQSILKPHSPTYNDEGL

SEQ ID NO: 27570 - protein, 171 aa, Artificial Sequence
  Synthetic polypeptide
GQVPWLTPVIPAHWEAERNQTSISQWVPVCSRLIPVSPTQGQGDRALSRTSQWPQMSQSRACGGSEQIPGIDIQLNRKYHTTPILGYDEGILSDDHGLAAALWRTFFNRKCEDPRHLELLVEYVRKQIQYLDSMNGEDLLLTGEVSWRPLVEKNPQSILKPHSPTYNDEGL

SEQ ID NO: 27571 - protein, 136 aa, Artificial Sequence
  Synthetic polypeptide
GQVPWLTPVIPAHWEAERNQTSISQWVPVCSRLIPVSPTQGQGDRALSRTSQWPQMSQSRACGGSEQIPGIDIQLNRKYHTTRKLSTTKDSPQPVEEKRSWDMMRGSFQMIMGWPLPSGEPSSTGNVKTLDILNCW

SEQ ID NO: 27572 - protein, 258 aa, Artificial Sequence
  Synthetic polypeptide
GQVPWLTPVIPAHWEAERNQTSISQWVPVCSRLIPVSPTQGQGDRALSRTSQLSTTKDSPQPVEEKVGAFTKIIEAMGFTGPLKYSKWKIKIAALRMYTSCVEKTDFEEFFLRCQMPDTFNSWFLITLLHVWMCLVRMKQEGRSGKYMCRIIVHFMWEDVQQRGRVMGVNPYILKKNMILMTNHFYAAILGYDEGILSDDHGLAAALWRTFFNRKCEDPRHLELLVEYVRKQIQYLDSMNGEDLLLTGEVSWRPLVEK

SEQ ID NO: 27573 - protein, 157 aa, Artificial Sequence
  Synthetic polypeptide
GQVPWLTPVIPAHWEAERNQTSISQWVPVCSRLIPVSPTQGQGDRALSRTSQWPQMSQSRACGGSEQIPGIDIQLNRKYHTTRKLSTTKDSPQPVEEKVGAFTKIIEAMGFTGPLKYSKWDVSSPNEAGRPEWEVHVSYHSSFYVGGCSAARQSHGG

SEQ ID NO: 27574 - protein, 133 aa, Artificial Sequence
  Synthetic polypeptide
GQVPWLTPVIPAHWEAERNQTSISQWVPVCSRLIPVSPTQGQGDRALSRTSQWPQMSQSRACGGSEQIPGIDIQLNRKYHTTRKLSTTKDSPQPVEEKVGAFTKIIEAMGFTGPLKYSKWGVRCLIHSIHGFL

SEQ ID NO: 27575 - protein, 252 aa, Artificial Sequence
  Synthetic polypeptide
GQVPWLTPVIPAHWEAERNQTSISQWVPVCSRLIPVSPTQGQGDRALSRTSQVPWLETSASEWHPQWPQMSQSRACGGSEQIPGIDIQLNRKYHTTRKLSTTKDSPQPVEEKVGAFTKIIEAMGFTGPLKYSKWKIKIAALRMYTSCVEKTDFEEFFLRCQMPDTFNSWFLITLLHVWMCLVRMKQEGRSGKYMCRIIVHFMWEDVQQRGRVMGVNPYILKKNMILMTNHFYAAILGYDEGILSDDHGLAAA

SEQ ID NO: 27576 - protein, 230 aa, Artificial Sequence
  Synthetic polypeptide
GQVPWLTPVIPAHWEAERNQTSISQWVPVCSRLIPVSPTQGQGDRALSRTSQWPQMSQSRACGGSEQIPGIDIQLNRKYHTTRKLSTTKDSPQPVEEKVGAFTKIIEAMGFTGPLKYSKWKIKIAALRMYTSCVEKTDFEEFFLRCQMPDTFNSWFLITLLHVWMCLVRMKQEGRSGKYMCRIIVHFMWEDVQQRGRVMGVSECCQMLVLDNSREGFEFGVLSVVKWPCF

SEQ ID NO: 27577 - protein, 53 aa, Artificial Sequence
  Synthetic polypeptide
GQVPWLTPVIPAHWEAERNQTSISQWVPVCSRLIPVSPTQGQGDRALSRTSQG

SEQ ID NO: 27578 - protein, 58 aa, Artificial Sequence
  Synthetic polypeptide
GQVPWLTPVIPAHWEAERNQTSISQWVPVCSRLIPVSPTQGQGDRALSRTSQTGSCSC

SEQ ID NO: 27579 - protein, 31 aa, Artificial Sequence
  Synthetic polypeptide
GQVPWLTPVIPAHWEAETEFCSCCASWSAMA

SEQ ID NO: 27580 - protein, 22 aa, Artificial Sequence
  Synthetic polypeptide
SQHIGRLRRSFALVAQAGVQWR

SEQ ID NO: 27581 - protein, 50 aa, Artificial Sequence
  Synthetic polypeptide
SQHFGRLRRVDHLRCVWFQRSMAVVIRLQGLPIVAGTMDIRHFFSGLTIP

SEQ ID NO: 27582 - protein, 57 aa, Artificial Sequence
  Synthetic polypeptide
AQWLTPVIPALWKTEEGGSPEVCVVSAQHGCGHPFARSPNCGGDHGHSPLLLWIDHS

SEQ ID NO: 27583 - protein, 56 aa, Artificial Sequence
  Synthetic polypeptide
SQHFGRLRPADHLRSGVRDQPDQHGGGPILQVTEKALDHHPDRTQMCLGLLPFTGS

SEQ ID NO: 27584 - protein, 332 aa, Artificial Sequence
  Synthetic polypeptide
DQEFETSLTNMGVARFYRSRKKHLITTQTEHKCVLDSCRSLEAEGFQVTYLPVQKSGIIDLKELEAAIQPDTSLVSVMTVNNEIGVKQPIAEIGRICSSRKVYFHTDAAQAVGKIPLDVNDMKIDLMSISGHKIYGPKGVGAIYIRRRPRVRVEALQSGGGQERGMRSGTVPTPLVVGLGAACEVAQQEMEYDHKRISKLSERLIQNIMKSLPDVVMNGDPKHHYPGCINLSFAYVEGESLLMALKDVALSSGSACTSASLEPSYVLRAIGTDEDLAHSSIRFGIGRFTTEEEVDYTVEKCIQHVKRLREMSPLWEMVQDGIDLKSIKWTQH

SEQ ID NO: 27585 - protein, 15 aa, Artificial Sequence
  Synthetic polypeptide
PTWGWPDSTGHGKST

SEQ ID NO: 27586 - protein, 139 aa, Artificial Sequence
  Synthetic polypeptide
DQEFETSLTNMGVARFYRSRKKHLITTQTEHKCVLDSCRSLEAEGFQVTYLPVQKSGIIDLKELEAAIQPDTSLVSVMTVNNEIGVKQPIAEIGRICSSRKVYFHTDAAQAVGKIPLDVNDMKIDLMSISGHKIYGPKV

SEQ ID NO: 27587 - protein, 42 aa, Artificial Sequence
  Synthetic polypeptide
DQEFETSLTNMGVARFYRSRKKHLITTQTEHKCVLDSCRSLE

SEQ ID NO: 27588 - protein, 4 aa, Artificial Sequence
  Synthetic polypeptide
KRTY

SEQ ID NO: 27589 - protein, 26 aa, Artificial Sequence
  Synthetic polypeptide
QAWWLTPVIPALLEVEAGGSPEVLTL

SEQ ID NO: 27590 - protein, 21 aa, Artificial Sequence
  Synthetic polypeptide
SQHFWRSRQVDHLRYLHCEIL

SEQ ID NO: 27591 - protein, 239 aa, Artificial Sequence
  Synthetic polypeptide
QKLSRSISVDLAESKRLGCLLLSSFQFSIQKLEPFLRDTKGFSLESFRAKASSLSEELKHFADGLETDGTLQKCFEDSNGKASDFSLEASVAEMKEYITKFSLERQTWDQLLLHYQQEAKEILSRGSTEAKITEVKVEPMTYLGSSQNEVLNTKPDYQKILQNQSKVFDCMELVMDELQGSVKQLQAFMDESTQCFQKVSVQLGKRSMQQLDPSPARKLLKLQLQNPPAIHGSGSGSCQ

SEQ ID NO: 27592 - protein, 36 aa, Artificial Sequence
  Synthetic polypeptide
GKRITWAQEFKKAVSYDCATQSILGDKSSAGLSVSI

SEQ ID NO: 27593 - protein, 43 aa, Artificial Sequence
  Synthetic polypeptide
AMIAPLNLSWVTKAQPVYQCRFSRKQTAWLSPAFQFPVLYSET

SEQ ID NO: 27594 - protein, 124 aa, Artificial Sequence
  Synthetic polypeptide
QKLSRSISVDLAESKRLGCLLLSSFQFSIQKLEPFLRDTKGFSLESFRAKASSLSEELKHFADGLETDGTLQKCFEDSNGKASDFSLEASVAEMKEYITKFSLERQTWDQLLLHYQQEAKEILS

SEQ ID NO: 27595 - protein, 48 aa, Artificial Sequence
  Synthetic polypeptide
TWEAEFAVSCDRTTALQSGQQTAEGCRPLGPEALGAGEAGQQLEGDTQ

SEQ ID NO: 27596 - protein, 561 aa, Artificial Sequence
  Synthetic polypeptide
AAIVPQHSSLDNRLQKAADPWVLKHSELEKQDNSWKETRSEKIHDKEAVSEVELGGNGLKRTKSVSSMSEFESLLDCSPYLAGGDARGKKLPNNPAFGFVSSEPGDPEKDTKEKPGLSSRDCNHLGALACQDPPGRQMQRSYTAPDKTGIRVYYSPPVARRLGVPVVHDKEGKIIIEPGFLFTTAKPKESAEADGLAESSYGRWLCNFSRQRLDGGSAGSPSAAGPGFPAALHDFEMSGNMSDDMKEITNCVRQAMRSGSLERKVKSTSSQTVGLASVGTQTIRTVSVGLQTDPPRSSLHGKAWSPRSSSLVSVRSKQISSSLDKVHSRIERPCCSPKYGSPKLQRRSVSKLDSSKDRSLWNLHQGKQNGSAWARSTTTRDSPVLRNINDGLSSLFSVVEHSGSTESVWKLGMSETRAKPEPPKYGIVQEFFRNVCGRAPSPTSSAGEEGTKKPEPLSPASYHQPEGVARILNKKAAKLGSSEEVRLTMLPQVGKDGVLRDGDGAVVLPNEDAVCDCSTQSLTSCFARSSRSAIRHSPSKCRLHPSESSWGGEERALPPSE

SEQ ID NO: 27597 - protein, 53 aa, Artificial Sequence
  Synthetic polypeptide
PGEVAHPCKCQPLGRLRQENCLNLGGRVCSELRSYHSTPVWTTDCRRLPTPGS

SEQ ID NO: 27598 - protein, 154 aa, Artificial Sequence
  Synthetic polypeptide
AAIVPQHSSLDNRLQKAADPWVLKHSELEKQDNSWKETRSEKIHDKEAVSEVELGGNGLKRTKSVSSMSEFESLLDCSPYLAGGDARGKKLPNNPAFGFVSSEPGDPEKDTKEKPGLSSRDCNHLGALACQDPPGSQKLPFLLILAPPQPPPIL

SEQ ID NO: 27599 - protein, 65 aa, Artificial Sequence
  Synthetic polypeptide
AVPRLLCGLGSLRTSPCGCIRSSRWWRRNGRGWRRRTKSFVSGSSRLSWLSRCCRRSWSDRESIP

SEQ ID NO: 27600 - protein, 11 aa, Artificial Sequence
  Synthetic polypeptide
MCHVCCVALGL

SEQ ID NO: 27601 - protein, 1366 aa, Artificial Sequence
  Synthetic polypeptide
CATFAVWPWVSKDISMRLHKELEVVEKKRARLEEENEELRQRLIETELAKQVLQTELERPREHSLKKRGTRSLGKADKKTLVQEDSADLKCQLHFAKEESALMCKKLTKLAKENDSMKEELLKYRSLYGDLDSALSAEELADAPHSRETELKVHLKLVEEEANLLSRRIVELEVENRGLRAEMDDMKDHGGGCGGPEARLAFSALGGGECGESLAELRRHLQFVEEEAELLRRSSAELEDQNKLLLNELAKFRSEHELDVALSEDSCSVLSEPSQEELAAAKLQIGELSGKVKKLQYENRVLLSNLQRCDLASCQSTRPMLETDAEAGDSAQCVPAPLGETHESHAVRLCRAREAEVLPGLREQAALVSKAIDVLVADANGFTAGLRLCLDNECADFRLHEAPDNSEGPRDTKLIHAILVRLSVLQQELNAFTRKADAVLGCSVKEQQESFSSLPPLGSQGLSKEILLAKDLGSDFQPPDFRDLPEWEPRIREAFRTGDLDSKPDPSRSFRPYRAEDNDSYASEIKELQLVLAEAHDSLRGLQEQLSQERQLRKEEADNFNQKMVQLKEDQQRALLRREFELQSLSLQRRLEQKFWSQEKNMLVQESQQFKHNFLLLFMKLRWFLKRWRQGKVLPSEGDDFLEVNSMKELYLLMEEEEINAQHSDNKACTGDSWTQNTPNEYIKTLADMKVTLKELCWLLRDERRGLTELQQQFAKAKATWETERAELKGHTSQMELKTGKGAGERAGPDWKAALQREREEQQHLLAESYSAVMELTRQLQISERNWSQEKLQLVERLQGEKQQVEQQVKELQNRLSQLQKAADPWVLKHSELEKQDNSWKETRSEKIHDKEAVSEVELGGNGLKRTKSVSSMSEFESLLDCSPYLAGGDARGKKLPNNPAFGFVSSEPGDPEKDTKEKPGLSSRDCNHLGALACQDPPGRQMQRSYTAPDKTGIRVYYSPPVARRLGVPVVHDKEGKIIIEPGFLFTTAKPKESAEADGLAESSYGRWLCNFSRQRLDGGSAGSPSAAGPGFPAALHDFEMSGNMSDDMKEITNCVRQAMRSGSLERKVKSTSSQTVGLASVGTQTIRTVSVGLQTDPPRSSLHGKAWSPRSSSLVSVRSKQISSSLDKVHSRIERPCCSPKYGSPKLQRRSVSKLDSSKDRSLWNLHQGKQNGSAWARSTTTRDSPVLRNINDGLSSLFSVVEHSGSTESVWKLGMSETRAKPEPPKYGIVQEFFRNVCGRAPSPTSSAGEEGTKKPEPLSPASYHQPEGVARILNKKAAKLGSSEEVRLTMLPQVGKDGVLRDGDGAVVLPNEDAVCDCSTQSLTSCFARSSRSAIRHSPSKCRLHPSESSWGGEERALPPSE

SEQ ID NO: 27602 - protein, 959 aa, Artificial Sequence
  Synthetic polypeptide
CATFAVWPWVSKDISMRLHKELEVVEKKRARLEEENEELRQRLIETELAKQVLQTELERPREHSLKKRGTRSLGKADKKTLVQEDSADLKCQLHFAKEESALMCKKLTKLAKENDSMKEELLKYRSLYGDLDSALSAEELADAPHSRETELKVHLKLVEEEANLLSRRIVELEVENRGLRAEMDDMKDHGGGCGGPEARLAFSALGGGECGESLAELRRHLQFVEEEAELLRRSSAELEDQNKLLLNELAKFRSEHELDVALSEDSCSVLSEPSQEELAAAKLQIGELSGKVKKLQYENRVLLSNLQRCDLASCQSTRPMLETDAEAGDSAQCVPAPLGETHESHAVRLCRAREAEVLPGLREQAALVSKAIDVLVADANGFTAGLRLCLDNECADFRLHEAPDNSEGPRDTKLIHAILVRLSVLQQELNAFTRKADAVLGCSVKEQQESFSSLPPLGSQGLSKEILLAKDLGSDFQPPDFRDLPEWEPRIREAFRTGDLDSKPDPSRSFRPYRAEDNDSYASEIKELQLVLAEAHDSLRGLQEQLSQERQLRKEEADNFNQKMVQLKEDQQRALLRREFELQSLSLQRRLEQKFWSQEKNMLVQESQQFKHNFLLLFMKLRWFLKRWRQGKVLPSEGDDFLEVNSMKELYLLMEEEEINAQHSDNKACTGDSWTQNTPNEYIKTLADMKVTLKELCWLLRDERRGLTELQQQFAKAKATWETERAELKGHTSQMELKTGKGAGERAGPDWKAALQREREEQQHLLAESYSAVMELTRQLQISERNWSQEKLQLVERLQGEKQQVEQQVKELQNRLSQLQKAADPWVLKHSELEKQDNSWKETRSEKIHDKEAVSEVELGGNGLKRTKSVSSMSEFESLLDCSPYLAGGDARGKKLPNNPAFGFVSSEPGDPEKDTKEKPGLSSRDCNHLGALACQDPPGSQKLPFLLILAPPQPPPIL

SEQ ID NO: 27603 - protein, 1474 aa, Artificial Sequence
  Synthetic polypeptide
PRATWLVWNPAPQVPCSSSSAKLLSLVSSSAKQERFQHLPHRDEIEELRAEMLEMRDVYMEEDVYQLQELRQQLDQASKTCRILQYRLRKAERRSLRAAQTGQVDGELIRGLEQDVKVSKDISMRLHKELEVVEKKRARLEEENEELRQRLIETELAKQVLQTELERPREHSLKKRGTRSLGKADKKTLVQEDSADLKCQLHFAKEESALMCKKLTKLAKENDSMKEELLKYRSLYGDLDSALSAEELADAPHSRETELKVHLKLVEEEANLLSRRIVELEVENRGLRAEMDDMKDHGGGCGGPEARLAFSALGGGECGESLAELRRHLQFVEEEAELLRRSSAELEDQNKLLLNELAKFRSEHELDVALSEDSCSVLSEPSQEELAAAKLQIGELSGKVKKLQYENRVLLSNLQRCDLASCQSTRPMLETDAEAGDSAQCVPAPLGETHESHAVRLCRAREAEVLPGLREQAALVSKAIDVLVADANGFTAGLRLCLDNECADFRLHEAPDNSEGPRDTKLIHAILVRLSVLQQELNAFTRKADAVLGCSVKEQQESFSSLPPLGSQGLSKEILLAKDLGSDFQPPDFRDLPEWEPRIREAFRTGDLDSKPDPSRSFRPYRAEDNDSYASEIKELQLVLAEAHDSLRGLQEQLSQERQLRKEEADNFNQKMVQLKEDQQRALLRREFELQSLSLQRRLEQKFWSQEKNMLVQESQQFKHNFLLLFMKLRWFLKRWRQGKVLPSEGDDFLEVNSMKELYLLMEEEEINAQHSDNKACTGDSWTQNTPNEYIKTLADMKVTLKELCWLLRDERRGLTELQQQFAKAKATWETERAELKGHTSQMELKTGKGAGERAGPDWKAALQREREEQQHLLAESYSAVMELTRQLQISERNWSQEKLQLVERLQGEKQQVEQQVKELQNRLSQLQKAADPWVLKHSELEKQDNSWKETRSEKIHDKEAVSEVELGGNGLKRTKSVSSMSEFESLLDCSPYLAGGDARGKKLPNNPAFGFVSSEPGDPEKDTKEKPGLSSRDCNHLGALACQDPPGRQMQRSYTAPDKTGIRVYYSPPVARRLGVPVVHDKEGKIIIEPGFLFTTAKPKESAEADGLAESSYGRWLCNFSRQRLDGGSAGSPSAAGPGFPAALHDFEMSGNMSDDMKEITNCVRQAMRSGSLERKVKSTSSQTVGLASVGTQTIRTVSVGLQTDPPRSSLHGKAWSPRSSSLVSVRSKQISSSLDKVHSRIERPCCSPKYGSPKLQRRSVSKLDSSKDRSLWNLHQGKQNGSAWARSTTTRDSPVLRNINDGLSSLFSVVEHSGSTESVWKLGMSETRAKPEPPKYGIVQEFFRNVCGRAPSPTSSAGEEGTKKPEPLSPASYHQPEGVARILNKKAAKLGSSEEVRLTMLPQVGKDGVLRDGDGAVVLPNEDAVCDCSTQSLTSCFARSSRSAIRHSPSKCRLHPSESSWGGEERALPPSE

SEQ ID NO: 27604 - protein, 148 aa, Artificial Sequence
  Synthetic polypeptide
ASSPHLQNRNVFSTYLTGTRLRSCGPRCWRCGTSIWRRTCISCRSCDSSWTRPARPAASCSTGCAKPSAAVSVPPRPARWTASLSVVWSRMSRSLRTSPCGCIRSSRWWRRNGRGWRRRTKSFVSGSSRLSWLSRCCRRSWSDRESIP

SEQ ID NO: 27605 - protein, 51 aa, Artificial Sequence
  Synthetic polypeptide
HSYDALTQGHVACLESSPAGPLLKQLCEASEPRLLICKTGTFSAPTSQGRD

SEQ ID NO: 27606 - protein, 1441 aa, Artificial Sequence
  Synthetic polypeptide
KIEGASTEKDEIEELRAEMLEMRDVYMEEDVYQLQELRQQLDQASKTCRILQYRLRKAERRSLRAAQTGQVDGELIRGLEQDVKVSKDISMRLHKELEVVEKKRARLEEENEELRQRLIETELAKQVLQTELERPREHSLKKRGTRSLGKADKKTLVQEDSADLKCQLHFAKEESALMCKKLTKLAKENDSMKEELLKYRSLYGDLDSALSAEELADAPHSRETELKVHLKLVEEEANLLSRRIVELEVENRGLRAEMDDMKDHGGGCGGPEARLAFSALGGGECGESLAELRRHLQFVEEEAELLRRSSAELEDQNKLLLNELAKFRSEHELDVALSEDSCSVLSEPSQEELAAAKLQIGELSGKVKKLQYENRVLLSNLQRCDLASCQSTRPMLETDAEAGDSAQCVPAPLGETHESHAVRLCRAREAEVLPGLREQAALVSKAIDVLVADANGFTAGLRLCLDNECADFRLHEAPDNSEGPRDTKLIHAILVRLSVLQQELNAFTRKADAVLGCSVKEQQESFSSLPPLGSQGLSKEILLAKDLGSDFQPPDFRDLPEWEPRIREAFRTGDLDSKPDPSRSFRPYRAEDNDSYASEIKELQLVLAEAHDSLRGLQEQLSQERQLRKEEADNFNQKMVQLKEDQQRALLRREFELQSLSLQRRLEQKFWSQEKNMLVQESQQFKHNFLLLFMKLRWFLKRWRQGKVLPSEGDDFLEVNSMKELYLLMEEEEINAQHSDNKACTGDSWTQNTPNEYIKTLADMKVTLKELCWLLRDERRGLTELQQQFAKAKATWETERAELKGHTSQMELKTGKGAGERAGPDWKAALQREREEQQHLLAESYSAVMELTRQLQISERNWSQEKLQLVERLQGEKQQVEQQVKELQNRLSQLQKAADPWVLKHSELEKQDNSWKETRSEKIHDKEAVSEVELGGNGLKRTKSVSSMSEFESLLDCSPYLAGGDARGKKLPNNPAFGFVSSEPGDPEKDTKEKPGLSSRDCNHLGALACQDPPGRQMQRSYTAPDKTGIRVYYSPPVARRLGVPVVHDKEGKIIIEPGFLFTTAKPKESAEADGLAESSYGRWLCNFSRQRLDGGSAGSPSAAGPGFPAALHDFEMSGNMSDDMKEITNCVRQAMRSGSLERKVKSTSSQTVGLASVGTQTIRTVSVGLQTDPPRSSLHGKAWSPRSSSLVSVRSKQISSSLDKVHSRIERPCCSPKYGSPKLQRRSVSKLDSSKDRSLWNLHQGKQNGSAWARSTTTRDSPVLRNINDGLSSLFSVVEHSGSTESVWKLGMSETRAKPEPPKYGIVQEFFRNVCGRAPSPTSSAGEEGTKKPEPLSPASYHQPEGVARILNKKAAKLGSSEEVRLTMLPQVGKDGVLRDGDGAVVLPNEDAVCDCSTQSLTSCFARSSRSAIRHSPSKCRLHPSESSWGGEERALPPSE

SEQ ID NO: 27607 - protein, 137 aa, Artificial Sequence
  Synthetic polypeptide
KELLQRRTRLRSCGPRCWRCGTSIWRRTCISCRSCDSSWTRPARPAASCSTGCAKPSAAVSVPPRPARWTASLSVVWSRMSRSLRTSPCGCIRSSRWWRRNGRGWRRRTKSFVSGSSRLSWLSRCCRRSWSDRESIP

SEQ ID NO: 27608 - protein, 11 aa, Artificial Sequence
  Synthetic polypeptide
DRRSFYREGRD

SEQ ID NO: 27609 - protein, 38 aa, Artificial Sequence
  Synthetic polypeptide
PGQQTPCMCSVVSIVSSSATSWYSPRNSVMRIGVKPLV

SEQ ID NO: 27610 - protein, 20 aa, Artificial Sequence
  Synthetic polypeptide
AQEFETSLGNRHHVCVRWFQ

SEQ ID NO: 27611 - protein, 838 aa, Artificial Sequence
  Synthetic polypeptide
WMWWCVPVVPATQEAEARGSLEPRSLRLAWATDTMYVFGGFNSLLLSDILVFTSEQCDAHRSEAACLAAGPGIRCVWNTGSSQCISWALATDEQEEKLKSECFSKRTLDHDRCDQHTDCYSCTANTNDCHWCNDHCVPRNHSCSEGQISIFRYENCPKDNPMYYCNKKTSCRSCALDQNCQWEPRNQECIALPENICGIGWHLVGNSCLKITTAKENYDNAKLFCRNHNALLASLTTQKKVEFVLKQLRIMQSSQSMSKLTLTPWVGLRKINVSYWCWEDMSPFTNSLLQWMPSEPSDAGFCGILSEPSTRGLKAATCINPLNGSVCERPANHSAKQCRTPCALRTACGDCTSGSSECMWCSNMKQCVDSNAYVASFPFGQCMEWYTMSTCPPENCSGYCTCSHCLEQPGCGWCTDPSNTGKGKCIEGSYKGPVKMPSQAPTGNFYPQPLLNSSMCLEDSRYNWSFIHCPACQCNGHSKCINQSICEKCENLTTGKHCETCISGFYGDPTNGGKCQPCKCNGHASLCNTNTGKCFCTTKGVKGDECQLCEVENRYQGNPLRGTCYYTLLIDYQFTFSLSQEDDRYYTAINFVATPDEQNRDLDMFINASKNFNLNITWAASFSAGTQAGEEMPVVSKTNIKEYKDSFSNEKFDFRNHPNITFFVYVSNFTWPIKIQIAFSQHSNFMDLVQFFVTFFSCFLSLLLVAAVVWKIKQSCWASRRREQLLREMQQMASRPFASVNVALETDEEPPDLIGGSIKTVPKPIALEPCFGNKAAVLSVFVRLPRGLGGIPPPGQSGLAVASALVDISQQMPIVYKEKSGAVRNRKQQPPAQPGTCI

SEQ ID NO: 27612 - protein, 681 aa, Artificial Sequence
  Synthetic polypeptide
WMWWCVPVVPATQEAEARGSLEPRSLRLAWATDTMYVFGGFNSLLLSDILVFTSEQCDAHRSEAACLAAGPGIRCVWNTGSSQCISWALATDEQEEKLKSECFSKRTLDHDRCDQHTDCYSCTANTNDCHWCNDHCVPRNHSCSEGQISIFRYENCPKDNPMYYCNKKTSCRSCALDQNCQWEPRNQECIALPENICGIGWHLVGNSCLKITTAKENYDNAKLFCRNHNALLASLTTQKKVEFVLKQLRIMQSSQSMSKLTLTPWVGLRKINVSYWCWEDMSPFTNSLLQWMPSEPSDAGFCGILSEPSTRGLKAATCINPLNGSVCERPANHSAKQCRTPCALRTACGDCTSGSSECMWCSNMKQCVDSNAYVASFPFGQCMEWYTMSTCPPENCSGYCTCSHCLEQPGCGWCTDPSNTGKGKCIEGSYKGPVKMPSQAPTGNFYPQPLLNSSMCLEDSRYNWSFIHCPACQCNGHSKCINQSICEKCENLTTGKHCETCISGFYGDPTNGGKCQPCKCNGHASLCNTNTGKCFCTTKGVKGDECQLCEVENRYQGNPLRGTCYYTLLIDYQFTFSLSQEDDRYYTAINFVATPDEQNRDLDMFINASKNFNLNITWAASFSAGTQAGEEMPVVSKTNIKEYKDSFSNEKFDFRNHPNITFFVYVSNFTWPIKIQVQTEQ

SEQ ID NO: 27613 - protein, 1043 aa, Artificial Sequence
  Synthetic polypeptide
PKSNNEGSMRQTQIRDILQITDQLSSKMFVLQRSLRNWFQAERNRKEMTPKCNTCYWIRMFKIAPKEHLDNCLIQFFSKMKKWMDMSNLPQEFRERIERLERNFEVSTVIFKKYEPIFLDIFQNPYEEPPKLPRSRKQRRIPCSVKDLFNFCWTLFVYTKGNFRMIGDDLVNSYHLLLCCLDLIFANAIMCPNRQDLLNPSFKGLPSDFHTADFTASEEPPCIIAVLCELHDGLLVEAKGIKEHYFKPYISKLFDRKILKGECLLDLSSFTDNSKAVNKEYEEYVLTVGDFDERIFLGADAEEEIGTPRKFTRDTPLGKLTAQANVEYNLQQHFEKKRSFAPSTPLTGRRYLREKEAVITPVASATQSVSRLQSIVAGLKNAPSDQLINIFESCVRNPVENIMKILKGIGETFCQHYTQSTDEQPGSHIDFAVNRLKLAEILYYKILETVMVQETRRLHGMDMSVLLEQDIFHRSLMACCLEIVLFAYSSPRTFPWIIEVLNLQPFYFYKVIEVVIRSEEGLSRDMVKHLNSIEEQILESLAWSHDSALWEALQVSANKVPTCEEVIFPNNFETGNGGNVQGHLPLMPMSPLMHPRVKEVRTDSGSLRRDMQPLSPISVHERYSSPTAGSAKRRLFGEDPPKEMLMDKIITEGTKLKIAPSSSITAENVSILPGQTLLTMATAPVTGTTGHKVTIPLHGVANDAGEITLIPLSMNTNQESKVKSPVSLTAHSLIGASPKQTNLTKAQEVHSTGINRPKRTGSLALFYRKVYHLASVRLRDLCLKLDVSNELRRKIWTCFEFTLVHCPDLMKDRHLDQLLLCAFYIMAKVTKEERTFQEIMKSYRNQPQANSHVYRSVLLKSIPREVVAYNKNINDDFEMIDCDLEDATKTPDCSSGPVKEERGDLIKFYNTIYVGRVKSFALKYDLANQDHMMDAPPLSPFPHIKQQPGSPRRISQQHSIYISPHKNGSGLTPRSALLYKFNGSPSKSLKDINNMIRQGEQRTKKRVIAIDSDAESPAKRVCQENDDVLLKRLQDVVSERANH

SEQ ID NO: 27614 - protein, 24 aa, Artificial Sequence
  Synthetic polypeptide
HLNAIHATGLGCLKLLRKNIWTIV

SEQ ID NO: 27615 - protein, 15 aa, Artificial Sequence
  Synthetic polypeptide
NCSERTFGQLFNTIF

SEQ ID NO: 27616 - protein, 989 aa, Artificial Sequence
  Synthetic polypeptide
PKSNNEGSMRQTQIRDILQITDQLSSKMFVLQRSLRNWFQAERNRKEMTPKCNTCYWIRMFKIAPKEHLDNCLIQFFSKMKKWMDMSNLPQEFRERIERLERNFEVSTVIFKKYEPIFLDIFQNPYEEPPKLPRSRKQRRIPCSVKDLFNFCWTLFVYTKGNFRMIGDDLVNSYHLLLCCLDLIFANAIMCPNRQDLLNPSFKGLPSDFHTADFTASEEPPCIIAVLCELHDGLLVEAKGIKEHYFKPYISKLFDRKILKGECLLDLSSFTDNSKAVNKEYEEYVLTVGDFDERIFLGADAEEEIGTPRKFTRDTPLGKLTAQANVEYNLQQHFEKKRSFAPSTPLTGRRYLREKEAVITPVASATQSVSRLQSIVAGLKNAPSDQLINIFESCVRNPVENIMKILKGIGETFCQHYTQSTDEQPGSHIDFAVNRLKLAEILYYKILETVMVQETRRLHGMDMSVLLEQDIFHRSLMACCLEIVLFAYSSPRTFPWIIEVLNLQPFYFYKVIEVVIRSEEGLSRDMVKHLNSIEEQILESLAWSHDSALWEALQVSANKVPTCEEVIFPNNFETGNGGNVQGHLPLMPMSPLMHPRVKEVRTDSGSLRRDMQPLSPISVHERYSSPTAGSAKRRLFGEDPPKEMLMDKIITEGTKLKIAPSSSITAENVSILPGQTLLTMATAPVTGTTGHKVTIPLHGVANDAGEITLIPLSMNTNQESKVKSPVSLTAHSLIGASPKQTNLTKAQEVHSTGINRPKRTGSLALFYRKVYHLASVRLRDLCLKLDVSNELRRKIWTCFEFTLVHCPDLMKDRHLDQLLLCAFYIMAKVTKEERTFQEIMKSYRNQPQANSHVYRSVLLKSIPREVVAYNKNINDDFEMIDCDLEDATKTPDCSSGPVKEERGDLIKFYNTIYVGRVKSFALKYDLANQDHMMDAPPLSPFPHIKQQPGSPRRISQQHSIYISPHKNGSGLTPRSALLYKFNGSPSKVR

SEQ ID NO: 27617 - protein, 44 aa, Artificial Sequence
  Synthetic polypeptide
GRAQWLTPVIPELWEAEAGGLPETWTSLTSLDSIVSPCHIAPDT

SEQ ID NO: 27618 - protein, 18 aa, Artificial Sequence
  Synthetic polypeptide
SQNFGRPRRADYLRLGHP

SEQ ID NO: 27619 - protein, 25 aa, Artificial Sequence
  Synthetic polypeptide
GRAQWLTPVIPELWEAEAGGLPEDL

SEQ ID NO: 27620 - protein, 970 aa, Artificial Sequence
  Synthetic polypeptide
SQNFGRPRRADYLRICSQEEVVIPCAYDSDSESVDLELSNLEIIKKGSSSIELTDLDIPDIPGLHCEPLSHSPRHLTQQDPLSEAIVEKLIQSIQKVFNGELKGELEKLKFLGDLSSLSQALPYDETAKSFIHSHIADIVHTLNVLVQEERPHSLSSSMRQEVFVTIADLSYQDVHLLLGSEDRAELFSLTIKSIITLPSVRTLTQIQEIMPNGTCNTECLYRQTFQAFSEMLQSLVVKDPHLENLDTIIKHLVPWLQSVKDHERERATASMAQVLKCLSKHLNLKLPLRFQRLGHLVALMALLCGDPQEKVAEEAAEGIHSLLHITLRLKYITHDKKDQQNLKRALTKCREFLELHSSAAKCFYNCPFRIAQVFEGFLDSNELCQFIMTTFDTLKTLKHPCIQRSAGELLLTLAKNTESQFEKVPEIMGVICAQLSIISQPRVRQQIINTVSLFISRPKYTDIVLSFLLCHPVPYNRHLAEVWRMLSVELPSTTWILWRLLRKLQKCHNEPAQEKMAYVAVAATDALYEVFLGNRLRAATFRLFPQLLMTLLIQIHHSIGLTMSDVDIPSGLYTEQEVPSEVTPLCFAMQATKTLLLRTCCLQEFNIMEKNKGWALLGGKDGHLQGLFLLANALLERNQLLAQKVMYLLVPLLNRGNDKHKLTSAGFFVELLRSPVAKRLPSIYSVARFKDWLQDGNHLFRILGLRGLYNLVGHQEMREDIKSLLPYIVDSLRETDEKIVLSAIQILLQLVRTMDFTTLAAMMRTLFSLFGDVRSDVHRFSVTLFGAAIKSVKNPDKKSIENQVLDSLVPLLLYSQDENDAVAEESRQVLTICAQFLKWKLPQEVYSKDPWHIKPTEAGTICRFFEKKCKGKINILEQTLMYSKNPKLPIRRSAVLFVGLLSKYMDHNELRRMGTDWIEDDLRDLLCDPEPSLCIIASQTLLLVQMARAEPKPKQRVNWLQKLMGRSSA

SEQ ID NO: 27621 - protein, 874 aa, Artificial Sequence
  Synthetic polypeptide
SQNFGRPRRADYLRICSQEEVVIPCAYDSDSESVDLELSNLEIIKKGSSSIELTDLDIPDIPGLHCEPLSHSPRHLTQQDPLSEAIVEKLIQSIQKVFNGELKGELEKLKFLGDLSSLSQALPYDETAKSFIHSHIADIVHTLNVLVQEERPHSLSSSMRQEVFVTIADLSYQDVHLLLGSEDRAELFSLTIKSIITLPSVRTLTQIQEIMPNGTCNTECLYRQTFQAFSEMLQSLVVKDPHLENLDTIIKHLVPWLQSVKDHERERATASMAQVLKCLSKHLNLKLPLRFQRLGHLVALMALLCGDPQEKVAEEAAEGIHSLLHITLRLKYITHDKKDQQNLKRALTKCREFLELHSSAAKCFYNCPFRIAQVFEGFLDSNELCQFIMTTFDTLKTLKHPCIQRSAGELLLTLAKNTESQFEKVPEIMGVICAQLSIISQPRVRQQIINTVSLFISRPKYTDIVLSFLLCHPVPYNRHLAEVWRMLSVELPSTTWILWRLLRKLQKCHNEPAQEKMAYVAVAATDALYEVFLGNRLRAATFRLFPQLLMTLLIQIHHSIGLTMSDVDIPSGLYTEQEVPSEVTPLCFAMQATKTLLLRTCCLQEFNIMEKNKGWALLGGKDGHLQGLFLLANALLERNQLLAQKVMYLLVPLLNRGNDKHKLTSAGFFVELLRSPVAKRLPSIYSVARFKDWLQDGNHLFRILGLRGLYNLVGHQEMREDIKSLLPYIVDSLRETDEKIVLSAIQILLQLVRTMDFTTLAAMMRTLFSLFGDVRSDVHRFSVTLFGAAIKSVKNPDKKSIENQVLDSLVPLLLYSQDENDAVAEESRQVLTICAQFLKWKLPQEVYSKDPWHIKPTEAGTICRFFGKKVQGEN

SEQ ID NO: 27622 - protein, 884 aa, Artificial Sequence
  Synthetic polypeptide
SQNFGRPRRADYLRICSQEEVVIPCAYDSDSESVDLELSNLEIIKKGSSSIELTDLDIPDIPGLHCEPLSHSPRHLTQQDPLSEAIVEKLIQSIQKVFNGELKGELEKLKFLGDLSSLSQALPYDETAKSFIHSHIADIVHTLNVLVQEERPHSLSSSMRQEVFVTIADLSYQDVHLLLGSEDRAELFSLTIKSIITLPSVRTLTQIQEIMPNGTCNTECLYRQTFQAFSEMLQSLVVKDPHLENLDTIIKLPLRFQRLGHLVALMALLCGDPQEKVAEEAAEGIHSLLHITLRLKYITHDKKDQQNLKRALTKCREFLELHSSAAKCFYNCPFRIAQVPEIMGVICAQLSIISQPRVRQQIINTVSLFISRPKYTDIVLSFLLCHPVPYNRHLAEVWRMLSVELPSTTWILWRLLRKLQKCHNEPAQEKMAYVAVAATDALYEVFLGNRLRAATFRLFPQLLMTLLIQIHHSIGLTMSDVDIPSGLYTEQEVPSEVTPLCFAMQATKTLLLRTCCLQEFNIMEKNKGWALLGGKDGHLQGLFLLANALLERNQLLAQKVMYLLVPLLNRGNDKHKLTSAGFFVELLRSPVAKRLPSIYSVARFKDWLQDGNHLFRILGLRGLYNLVGHQEMREDIKSLLPYIVDSLRETDEKIVLSAIQILLQLVRTMDFTTLAAMMRTLFSLFGDVRSDVHRFSVTLFGAAIKSVKNPDKKSIENQVLDSLVPLLLYSQDENDAVAEESRQVLTICAQFLKWKLPQEVYSKDPWHIKPTEAGTICRFFEKKCKGKINILEQTLMYSKNPKLPIRRSAVLFVGLLSKYMDHNELRRMGTDWIEDDLRDLLCDPEPSLCIIASQTLLLVQMARAEPKPKQRVNWLQKLMGRSSA

SEQ ID NO: 27623 - protein, 526 aa, Artificial Sequence
  Synthetic polypeptide
SQNFGRPRRADYLRICSQEEVVIPCAYDSDSESVDLELSNLEIIKKGSSSIELTDLDIPDIPGLHCEPLSHSPRHLTQQDPLSEAIVEKLIQSIQKVFNGELKGELEKLKFLGDLSSLSQALPYDETAKSFIHSHIADIVHTLNVLVQEERPHSLSSSMRQEVFVTIADLSYQDVHLLLGSEDRAELFSLTIKSIITLPSVRTLTQIQEIMPNGTCNTECLYRQTFQAFSEMLQSLVVKDPHLENLDTIIKHLVPWLQSVKDHERERATASMAQVLKCLSKHLNLKLPLRFQRLGHLVALMALLCGDPQEKVAEEAAEGIHSLLHITLRLKYITHDKKDQQNLKRALTKCREFLELHSSAAKCFYNCPFRIAQVFEGFLDSNELCQFIMTTFDTLKTLKHPCIQRSAGELLLTLAKNTESQFEKVPEIMGVICAQLSIISQPRVRQQIINTVSLFISRPKYTDIVLSFLLCHPVPYNRHLAEVWRMLSVELPSTTWILWRLLRKLQKCHNEPAQEKMAYVAVAVSP

SEQ ID NO: 27624 - protein, 491 aa, Artificial Sequence
  Synthetic polypeptide
SQNFGRPRRADYLRICSQEEVVIPCAYDSDSESVDLELSNLEIIKKGSSSIELTDLDIPDIPGLHCEPLSHSPRHLTQQDPLSEAIVEKLIQSIQKVFNGELKGELEKLKFLGDLSSLSQALPYDETAKSFIHSHIADIVHTLNVLVQEERPHSLSSSMRQEVFVTIADLSYQDVHLLLGSEDRAELFSLTIKSIITLPSVRTLTQIQEIMPNGTCNTECLYRQTFQAFSEMLQSLVVKDPHLENLDTIIKLPLRFQRLGHLVALMALLCGDPQEKVAEEAAEGIHSLLHITLRLKYITHDKKDQQNLKRALTKCREFLELHSSAAKCFYNCPFRIAQVFEGFLDSNELCQFIMTTFDTLKTLKHPCIQRSAGELLLTLAKNTESQFEKVPEIMGVICAQLSIISQPRVRQQIINTVSLFISRPKYTDIVLSFLLCHPVPYNRHLAEVWRMLSVELPSTTWILWRLLRKLQKCHNEPAQEKMAYVAVAVSP

SEQ ID NO: 27625 - protein, 585 aa, Artificial Sequence
  Synthetic polypeptide
MPLGSFVTFIRLLANLEPQFLFQKACTYIRSNLDPSNVDSLFYAAQASQALSGCEISISNETKDLLLAAVSEDSSVTQIYHAVAALSGFGLPLASQEALSALTARLSKEETVLATVQALQTASHLSQQADLRSIVEEIEDLVARLDELGGVYLQFEEGLETTALFVAATYKLMDHVGTEPSIKEDQVIQLMNAIFSKKNFESLSEAFSVASAAAVLSHNRYHVPVVVVPEGSASDTHEQAILRLQVTNVLSQPLTQATVKLEHAKSVASRATVLQKTSFTPVGDVFELNFMNVKFSSGYYDFLVEVEGDNRYIANTVELRVKISTEVGITNVDLSTVDKDQSIAPKTTRVTYPAKAKGTFIADSHQNFALFFQLVDVNTGAELTPHQTFVRLHNQKTGQEVVFVAEPDNKNVYKFELDTSERKIEFDSASGTYTLYLIIGDATLKNPILWNVADVVIKFPEEEAPSTVLSQNLFTPKQEIQHLFREPEKRPPTVVSNTFTALILSPLLLLFALWIRIGANVSNFTFAPSTIIFHLGHAAMLGLMYVYWTQLNMFQTLKYLAILGSVTFLAGNRMLAQQAVKRTAH

SEQ ID NO: 27626 - protein, 85 aa, Artificial Sequence
  Synthetic polypeptide
CHLVALSPSSGYLPIWSPSFFFRKHVPTSDLTLIPAMWIPSSTLPRPARPSQDVRSLFQMRPKICFWQLSVRTHLLPRSTMQLQL

SEQ ID NO: 27627 - protein, 26 aa, Artificial Sequence
  Synthetic polypeptide
LCHLHQVTCQFGAPVSFSESMYLHQI

SEQ ID NO: 27628 - protein, 298 aa, Artificial Sequence
  Synthetic polypeptide
MPLGSFVTFIRLLANLEPQFLFQKACTYIRSNLDPSNVDSLFYAAQASQALSGCEISISNETKDLLLAAVSEDSSVTQIYHAVAALSGFGLPLASQEALSALTARLSKEETVLARVWSTVLESRSLFSKRTVQALQTASHLSQQADLRSIVEEIEDLVARLDELGGVYLQFEEGLETTALFVAATYKLMDHVGTEPSIKEDQVIQLMNAIFSKKNFESLSEAFSVASAAAVLSHNRYHVPVVVVPEGSASDTHEQAILRLQVTNVLSQPLTQATVKLEHAKSVASRATVLQKTSFTPV

SEQ ID NO: 27629 - protein, 70 aa, Artificial Sequence
  Synthetic polypeptide
MPLGSFVTFIRLLANLEPQFLFQKACTYIRSNLDPSNVDSLFYAAQASQALSGCENSPGSADSIPPVPAG

SEQ ID NO: 27630 - protein, 182 aa, Artificial Sequence
  Synthetic polypeptide
CHLVALSPSSGYLPIWSPSFFFRKHVPTSDLTLIPAMWIPSSTLPRPARPSQDVRTVQALQTASHLSQQADLRSIVEEIEDLVARLDELGGVYLQFEEGLETTALFVAATYKLMDHVGTEPSIKEDQVIQLMNAIFSKKNFESLSEAFSVASAAAVLSHNRYHVPVVVVPEGSASDTHEQAI

SEQ ID NO: 27631 - protein, 559 aa, Artificial Sequence
  Synthetic polypeptide
SELRNTPNRGTKRPRDDEEEEQKMRRKQTGTRERGRYREEEMTVVEEADDDKKRLLQIIDRDGEEEEEEEEPLDESSVKKMILTFEKRSYKNQELRIKFPDNPEKFMESELDLNDIIQEMHVVATMPDLYHLLVELNAVQSLLGLLGHDNTDVSIAVVDLLQELTDIDTLHESEEGAEVLIDALVDGQVVALLVQNLERLDESVKEEADGVHNTLAIVENMAEFRPEMCTEGAQQGLLQWLLKRLKAKMPFDANKLYCSEVLAILLQDNDENRELLGELDGIDVLLQQLSVFKRHNPSTAEEQEMMENLFDSLCSCLMLSSNRERFLKGEGLQLMNLMLREKKISRSSALKVLDHAMIGPEGTDNCHKFVDILGLRTIFPLFMKSPRKIKKVGTTEKEHEEHVCSILASLLRNLRGQQRTRLLNKFTENDSEKVDRLMELHFKYLGAMQVADKKIEGEKHDMVRRGEIIDNDTEEEFYLRRLDAGLFVLQHICYIMAEICNANVPQIRQRVHQILNMRGSSIKIVRHIIKEYAENIGDGRSPEFRENEQKRILGLLENF

SEQ ID NO: 27632 - protein, 38 aa, Artificial Sequence
  Synthetic polypeptide
EILPIGAQNVPGMMKRRSRRCVGNKLVLENAAAIGKKK

SEQ ID NO: 27633 - protein, 6 aa, Artificial Sequence
  Synthetic polypeptide
IEKYSQ

SEQ ID NO: 27634 - protein, 23 aa, Artificial Sequence
  Synthetic polypeptide
PSKVNCTSCGRFASGINRYRHPP

SEQ ID NO: 27635 - protein, 407 aa, Artificial Sequence
  Synthetic polypeptide
TVQAVVDLLQELTDIDTLHESEEGAEVLIDALVDGQVVALLVQNLERLDESVKEEADGVHNTLAIVENMAEFRPEMCTEGAQQGLLQWLLKRLKAKMPFDANKLYCSEVLAILLQDNDENRELLGELDGIDVLLQQLSVFKRHNPSTAEEQEMMENLFDSLCSCLMLSSNRERFLKGEGLQLMNLMLREKKISRSSALKVLDHAMIGPEGTDNCHKFVDILGLRTIFPLFMKSPRKIKKVGTTEKEHEEHVCSILASLLRNLRGQQRTRLLNKFTENDSEKVDRLMELHFKYLGAMQVADKKIEGEKHDMVRRGEIIDNDTEEEFYLRRLDAGLFVLQHICYIMAEICNANVPQIRQRVHQILNMRGSSIKIVRHIIKEYAENIGDGRSPEFRENEQKRILGLLENF

SEQ ID NO: 27636 - protein, 15 aa, Artificial Sequence
  Synthetic polypeptide
FKGELYKLWSICFRN

SEQ ID NO: 27637 - protein, 37 aa, Artificial Sequence
  Synthetic polypeptide
TVQAVVDLLQELTDIDTLHESEEGAEVLIDALVDGQV

SEQ ID NO: 27638 - protein, 86 aa, Artificial Sequence
  Synthetic polypeptide
KEHGLGFESQFCHPLALRSLFCLSQLPHLKWGTWSGEERSSTMTPRRSSTSGAWMRGSLFSSTSATSWPRSAMPMSPRFARGFTRS

SEQ ID NO: 27639 - protein, 13 aa, Artificial Sequence
  Synthetic polypeptide
NGGHGPARRDHRQ

SEQ ID NO: 27640 - protein, 123 aa, Artificial Sequence
  Synthetic polypeptide
VPVLPPTSLEELVLPEPASSSKMGDMVRRGEIIDNDTEEEFYLRRLDAGLFVLQHICYIMAEICNANVPQIRQRVHQILNMRGSSIKIVRHIIKEYAENIGDGRSPEFRENEQKRILGLLENF

SEQ ID NO: 27641 - protein, 13 aa, Artificial Sequence
  Synthetic polypeptide
PLPPWIRAGLREV

SEQ ID NO: 27642 - protein, 704 aa, Artificial Sequence
  Synthetic polypeptide
MEPQFPHPHCITINPCLPGSELVLERCDLELETNGRDHHTADLCREKLVVRRGQPFWLTLHFEGRNYEASVDSLTFSVVTGPAPSQEAGTKARFPLRDAVEEGDWTATVVDQQDCTLSLQLTTPANAPIGLYRLSLEASTGYQGSSFVLGHFILLFNAWCPADAVYLDSEEERQEYVLTQQGFIYQGSAKFIKNIPWNFGQFEDGILDICLILLDVNPKFLKNAGRDCSRRSSPVYVGRVVSGMVNCNDDQGVLLGRWDNNYGDGVSPMSWIGSVDILRRWKNHGCQRVKYGQCWVFAAVACTVLRCLGIPTRVVTNYNSAHDQNSNLLIEYFRNEFGEIQGDKSEMIWNFHCWVESWMTRPDLQPGYEGWQALDPTPQEKSEGTYCCGPVPVRAIKEGDLSTKYDAPFVFAEVNADVVDWIQQDDGSVHKSINRSLIVGLKISTKSVGRDEREDITHTYKYPEGSSEEREAFTRANHLNKLAEKEETGMAMRIRVGQSMNMGSDFDVFAHITNNTAEEYVCRLLLCARTVSYNGILGPECGTKYLLNLNLEPFSEKSVPLCILYEKYRDCLTESNLIKVRALLVEPVINSYLLAERDLYLENPEIKIRILGEPKQKRKLVAEVSLQNPLPVALEGCTFTVEGAGLTEEQKTVEIPDPVEAGEEVKVRMDLLPLHMGLHKLVVNFESDKLKAVKGFRNVIIGPA

SEQ ID NO: 27643 - protein, 12 aa, Artificial Sequence
  Synthetic polypeptide
PLTLASLDQSWS

SEQ ID NO: 27644 - protein, 623 aa, Artificial Sequence
  Synthetic polypeptide
MEPQFPHPHCITINPCLPGSELVLERCDLELETNGRDHHTADLCREKLVVRRGQPFWLTLHFEGRNYEASVDSLTFSVVTADAVYLDSEEERQEYVLTQQGFIYQGSAKFIKNIPWNFGQFEDGILDICLILLDVNPKFLKNAGRDCSRRSSPVYVGRVVSGMVNCNDDQGVLLGRWDNNYGDGVSPMSWIGSVDILRRWKNHGCQRVKYGQCWVFAAVACTVLRCLGIPTRVVTNYNSAHDQNSNLLIEYFRNEFGEIQGDKSEMIWNFHCWVESWMTRPDLQPGYEGWQALDPTPQEKSEGTYCCGPVPVRAIKEGDLSTKYDAPFVFAEVNADVVDWIQQDDGSVHKSINRSLIVGLKISTKSVGRDEREDITHTYKYPEGSSEEREAFTRANHLNKLAEKEETGMAMRIRVGQSMNMGSDFDVFAHITNNTAEEYVCRLLLCARTVSYNGILGPECGTKYLLNLNLEPFSEKSVPLCILYEKYRDCLTESNLIKVRALLVEPVINSYLLAERDLYLENPEIKIRILGEPKQKRKLVAEVSLQNPLPVALEGCTFTVEGAGLTEEQKTVEIPDPVEAGEEVKVRMDLLPLHMGLHKLVVNFESDKLKAVKGFRNVIIGPA

SEQ ID NO: 27645 - protein, 297 aa, Artificial Sequence
  Synthetic polypeptide
MEPQFPHPHCITINPCLPGSELVLERCDLELETNGRDHHTADLCREKLVVRRGQPFWLTLHFEGRNYEASVDSLTFSVVTGPAPSQEAGTKARFPLRDAVEEGDWTATVVDQQDCTLSLQLTTPANAPIGLYRLSLEASTGYQGSSFVLGHFILLFNAWCPADAVYLDSEEERQEYVLTQQGFIYQGSAKFIKNIPWNFGQFEDGILDICLILLDVNPKFLKNAGRDCSRRSSPVYVGRVVSGMVNCNDDQGVLLGRWDNNYGDGVSPMSWIGSVDILRRWKNHGCQRVKYGQCWVF

SEQ ID NO: 27646 - protein, 176 aa, Artificial Sequence
  Synthetic polypeptide
MEPQFPHPHCITINPCLPGSELVLERCDLELETNGRDHHTADLCREKLVVRRGQPFWLTLHFEGRNYEASVDSLTFSVVTGPAPSQEAGTKARFPLRDAVEEGDWTATVVDQQDCTLSLQLTTPANAPIGLYRLSLEASTGYQGSSFVLGHFILLFNAWCPADAVYLDSEEERQEY

SEQ ID NO: 27647 - protein, 49 aa, Artificial Sequence
  Synthetic polypeptide
CLVLELTLHPSTQPSSMPWRASILLSRPQHPPSWVRCSVSWTLASRGMG

SEQ ID NO: 27648 - protein, 1217 aa, Artificial Sequence
  Synthetic polypeptide
WCCLRGPLWHCVMPCLGIDPPSLDTAIQHALAGLYPPFEATAPTVLGQVFRLLDSGFQGDGLSFLLDFLIPAKRLCEQVREAACAPYSHCLFLHEGWPLCLRDEVVVHLAPLNPLLLRQGDFYLQVEPQEEQSVCIMIKCLSLDLCTVDKKPVPEPAYPILFTQEWLEAINSDFEGNPLHNCLVASENGIAPVPWTKITSPEFVDDRPQVVNALCQAWGPLPLEALDLSSPQELHQASSPDNQVLPAQSLAKGKGRTYGSKYPGLIKVEQARCGEVAFRMDEVVSQDFEGDYVALLGFSQESRGESPSREAGTSSGCTSGALEEIAGTKETPLFQKILPLSEANEGPSLGNRACTKPESSEERPYNLGFRRKVNLKAPTHNSERPPQGSYMNVLEDALDCASGLRAGVSQEPAASKMQGPLGNPENMVQLRPGPRQASSPRLSPASPAAAASETKIEVKTKERNGRLPKPMPCPSRNTSSPEPPTPGLKFSFLRGQRQPSVTPEKASLQHNGPWKVLCSLYSPKPNRAKSLGKAGTTQTKTSGPATAPSPLTEEKAALPEASAGSPERGPTLEEEPPGPEPRIGALGVKVFRSRIACLPGGRDRAGRPLLLVSTTEGAWEAPWCTVSEVTKLLSYLCTIPRPEDKAKGLAVLIDARRQPPQPGLVSALQATQAQVPASIRAILFLGEKEAALQLQTLPDVQVEVLTSLKALSHHVDPSQLPAVLEGPFPYCHTEWVHFFQKLDPFLADLHQASSLLQASIEEFEKADPPGGMQEATRCLSKSKELMEAVLRDPGLLGLQREGGATLARLQHDASRLDFSPDVRSHLAAATALYSLVDEQLHVLVTASNSLLGKLELRVRLGRLEAAIHQVSDWMEQEGRRCLQSLTPKDGSLETVEKAHAEFENFFLQAAAQYRRGLELSKQAAQLGATARGAGEAERAEFPELAAFASTQRAFQAELTHFYMAAERQRTDLETLLHLHRFCKRMTWFHMDCQDLMAQLRLDKTSRVSPGDQRRLHRYLQRLASEFPAEKLAAVGLQVASLSRAGLGQELWEEARIRHEEIRMLLEKALTHSSCPEAPAAHSARPERRGVAAKGQGVSVEVTSKGRWDQPPLDSLGMDHLPKSYWPPGPPRGEQNRTFQAGSPPQEAGQAAEAEDGKGSHKLPDPAREHLLATTFFRQQPPRQSQVPRLTGGSFSSEGTDSQTSLEDSPQTSPLASL

SEQ ID NO: 27649 - protein, 47 aa, Artificial Sequence
  Synthetic polypeptide
MNLKGMMLSKKKKKFQKNYTNGGVLIIMRIMSTRCSSHFPASSWAAL

SEQ ID NO: 27650 - protein, 16 aa, Artificial Sequence
  Synthetic polypeptide
VKKKKSFKRITQMAVS

SEQ ID NO: 27651 - protein, 356 aa, Artificial Sequence
  Synthetic polypeptide
KKKKVSKELHKWRCPDYYENNVHKMQLPFSSKLLGSTLTSEEKQERRQQQLRRLQELNARRREEKLQLDQERLDRLLYVQELLEDGQMDQFHKALIELNMDSPEELQSYIQKLSIAVEQAKQKILQAEVNLEVDVVDSKPETPDLEQLEPSLEDVESMNDFDPLFSEETPGVEKPVTTVQPVFNLAAYHQLFVGTERIRAPEIIFQPSLIGEEQAGIAETLQYILDRYPKDIQEMLVQNVFLTGGNTMYPGMKARMEKELLEMRPFRSSFQVQLASNPVLDAWYGARDWALNHLDDNEVWITRKEYEEKGGEYLKEHCASNIYVPIRLPKQASRSSDAQASSKGSAAGGGGAGEQA

SEQ ID NO: 27652 - protein, 55 aa, Artificial Sequence
  Synthetic polypeptide
SEVLEAQIGNWCLAEVWWRSSLEGLSPRPVAYDAISSFSMVWTGYRWNSGQAGIF

SEQ ID NO: 27653 - protein, 413 aa, Artificial Sequence
  Synthetic polypeptide
SKPKRGHANSNLKPVDQKFWRPRLATGVWQRCGGGAVLRDLALDLWHMMLSPVFPWFGLDIGGTLVKLVYFEPKDITAEEEEEEVESLKSIRKYLTSNVAYGSTGIRDVHLELKDLTLCGRKGNLHFIRFPTHDMPAFIQMGRDKNFSSLHTVFCATGGGAYKFEQDFLTIGDLQLCKLDELDCLIKGILYIDSVGFNGRSQCYYFENPADSEKCQKLPFDLKNPYPLLLVNIGSGVSILAVYSKDNYKRVTGTSLGGGTFFGLCCLLTGCTTFEEALEMASRGDSTKVDKLVRDIYGGDYERFGLPGWAVASSFGNMMSKEKREAVSKEDLARATLITITNNIGSIARMCALNENINQVVFVGNFLRINTIAMRLLAYALDYWSKGQLKALFSEHEGYFGAVGALLELLKIP

SEQ ID NO: 27654 - protein, 46 aa, Artificial Sequence
  Synthetic polypeptide
CYLQFFHGLDWISVELWSSWYILNPKTSLLKKKRKKWKVLKAFGST

SEQ ID NO: 27655 - protein, 124 aa, Artificial Sequence
  Synthetic polypeptide
SKPKRGHANSNLKPVDQKFWRPRLATGVWQRCGGGAVLRDLALDLWHMMLSPVFPWFGLDIGGTLVKLVYFEPKDITAEEEEEEVESLKSIRKYLTSNVAYGSTGIRDVHLELKDLTLCGRKDR

SEQ ID NO: 27656 - protein, 92 aa, Artificial Sequence
  Synthetic polypeptide
SEVLEAQIGNWCLAEVWWRSSLEGLSPRPVAYDAISRYIVVGIALEGTQLFFHGLDWISVELWSSWYILNPKTSLLKKKRKKWKVLKAFGST

SEQ ID NO: 27657 - protein, 29 aa, Artificial Sequence
  Synthetic polypeptide
SLELHWRAPSCFSMVWTGYRWNSGQAGIF

SEQ ID NO: 27658 - protein, 378 aa, Artificial Sequence
  Synthetic polypeptide
CYLQVHSRWNCIGGHPAVFPWFGLDIGGTLVKLVYFEPKDITAEEEEEEVESLKSIRKYLTSNVAYGSTGIRDVHLELKDLTLCGRKGNLHFIRFPTHDMPAFIQMGRDKNFSSLHTVFCATGGGAYKFEQDFLTIGDLQLCKLDELDCLIKGILYIDSVGFNGRSQCYYFENPADSEKCQKLPFDLKNPYPLLLVNIGSGVSILAVYSKDNYKRVTGTSLGGGTFFGLCCLLTGCTTFEEALEMASRGDSTKVDKLVRDIYGGDYERFGLPGWAVASSFGNMMSKEKREAVSKEDLARATLITITNNIGSIARMCALNENINQVVFVGNFLRINTIAMRLLAYALDYWSKGQLKALFSEHEGYFGAVGALLELLKIP

SEQ ID NO: 27659 - protein, 89 aa, Artificial Sequence
  Synthetic polypeptide
CYLQVHSRWNCIGGHPAVFPWFGLDIGGTLVKLVYFEPKDITAEEEEEEVESLKSIRKYLTSNVAYGSTGIRDVHLELKDLTLCGRKDR

SEQ ID NO: 27660 - protein, 12 aa, Artificial Sequence
  Synthetic polypeptide
ERQRRIWQRKWP

SEQ ID NO: 27661 - protein, 22 aa, Artificial Sequence
  Synthetic polypeptide
RGSVGSGRGNGPEPHPSSGGRG

SEQ ID NO: 27662 - protein, 116 aa, Artificial Sequence
  Synthetic polypeptide
EAASDLAEEMALSLTRAVAGGDEQVAMKCAIWLAEQRVPLSVQLKPEVSPTQDIRLWVSVEDAQMHTVTIWLTVRPDMTVASLKDMVFLDYGFPPVLQQWVIGQRLARDQETLHSH

SEQ ID NO: 27663 - protein, 335 aa, Artificial Sequence
  Synthetic polypeptide
EAASDLAEEMALSLTRAVAGGDEQVAMKCAIWLAEQRVPLSVQLKPEVSPTQDIRLWVSVEDAQMHTVTIWLTVRPDMTVASLKDMVFLDYGFPPVLQQWVIGQRLARDQETLHSHGVRQNGDSAYLYLLSARNTSLNPQELQRERQLRMLEDLGFKDLTLQPRGPLEPGPPKPGVPQEPGRGQPDAVPEPPPVGWQCPGCTFINKPTRPGCEMCCRARPEAYQVPASYQPDEEERARLAGEEEALRQYQQRKQQQQEGNYLQHVQLDQRSLVLNTEPAECPVCYSVLAPGEAVVLRSACRAPSATARRRRSPAPSLTTPTRARASCWRGRSRRS

SEQ ID NO: 27664 - protein, 509 aa, Artificial Sequence
  Synthetic polypeptide
EAASDLAEEMALSLTRAVAGGDEQVAMKCAIWLAEQRVPLSVQLKPEVSPTQDIRLWVSVEDAQMHTVTIWLTVRPDMTVASLKDMVFLDYGFPPVLQQWVIGQRLARDQETLHSHGVRQNGDSAYLYLLSARNTSLNPQELQRERQLRMLEDLGFKDLTLQPRGPLEPGPPKPGVPQEPGRGQPDAVPEPPPVGWQCPGCTFINKPTRPGCEMCCRARPEAYQVPASYQPDEEERARLAGEEEALRQYQQRKQQQQEGNYLQHVQLDQRSLVLNTEPAECPVCYSVLAPGEAVVLRECLHTFCRECLQGTIRNSQEAEVSCPFIDNTYSCSGKLLEREIKALLTPEDYQRFLDLGISIAENRSAFSYHCKTPDCKGWCFFEDDVNEFTCPVCFHVNCLLCKAIHEQMNCKEYQEDLALRAQNDVAARQTTEMLKVMLQQGEAMRCPQCQIVVQKKDGCDWIRCTVCHTEICWVTKGPRWGPGGPGDTSGGCRCRVNGIPCHPSCQNCH

SEQ ID NO: 27665 - protein, 271 aa, Artificial Sequence
  Synthetic polypeptide
EAASDLAEEMALSLTRAVAGGDEQVAMKCAIWLAEQRVPLSVQLKPEVSPTQDIRLWVSVEDAQMHTVTIWLTVRPDMTVASLKDMVFLDYGFPPVLQQWVIGQRLARDQETLHSHGVRQNGDSAYLYLLSARNTSLNPQELQRERQLRMLEDLGFKDLTLQPRGPLEPGPPKPGVPQEPGRGQPDAVPEPPPVGWQCPGCTFINKPTRPGCEMCCRARPEAYQVPASYQPDEEERARLAGEEEALRQYQQGVPAGHHPQQPGGGGLLPLH

SEQ ID NO: 27666 - protein, 104 aa, Artificial Sequence
  Synthetic polypeptide
EAASDLAEEMALSLTRAVAGGDEQVAMKCAIWLAEQRVPLSVQLKPEVSPTQDIRFLMVQNGHSSSIQPSHHRRKGRKTPLHTLLKSIAQKLYTLLPLIPVDQN

SEQ ID NO: 27667 - protein, 13 aa, Artificial Sequence
  Synthetic polypeptide
SQLLGRLSSVQCA

SEQ ID NO: 27668 - protein, 84 aa, Artificial Sequence
  Synthetic polypeptide
WTPVIPATRKAKLCAVCLEDFKPRDELGICPCKHAFHRKCLIKWLEVRKVCPLCNMPVLQLAQLHSKQDRGPPQGPLPGAENIV

SEQ ID NO: 27669 - protein, 5 aa, Artificial Sequence
  Synthetic polypeptide
MLKTD

SEQ ID NO: 27670 - protein, 41 aa, Artificial Sequence
  Synthetic polypeptide
LAVSLPSLHTQYLPCLKSSLRARTLSPGSKPVLDNRCSKQT

SEQ ID NO: 27671 - protein, 21 aa, Artificial Sequence
  Synthetic polypeptide
GQELYPQDLNQCWTIDAQNRL

SEQ ID NO: 27672 - protein, 129 aa, Artificial Sequence
  Synthetic polypeptide
LAVSLPSLHTQYLPCLKSSLRARTLSPGSKPVLDNRCSKQTEFDLINVKDWPVWETACHVEEPNPTLCCHMPFPCPAAGHLGELPESSQTAQSLPLPSACPPPSKQQARWGSHQFFLPQCRTFPLPSNG

SEQ ID NO: 27673 - protein, 24 aa, Artificial Sequence
  Synthetic polypeptide
GQELYPQDLNQCWTIDAQNRLNLI

SEQ ID NO: 27674 - protein, 4 aa, Artificial Sequence
  Synthetic polypeptide
WGSP

SEQ ID NO: 27675 - protein, 403 aa, Artificial Sequence
  Synthetic polypeptide
GEVHEDPGQATLSTTHPEGPGPATSAPEPATAASSQAEKSIPSKSLLDWLRQQADYSLEVPGFGANFSDKPKQRRPRCKEPGKLDVSSLSGEERVPAIPKEPGLRGFLPENKFNHTLAEPILRDTGPRRRGRRPRSELLKAPSIVADSPSGMGPLFMNGLIAGMDLVGLQNMRNMPGIPLTGLVGFPAGFATMPTGEEVKSTLSMLPMMLPGMAAVPQMFGVGGLLSPPMATTCTSTAPASLSSTTKSGTAVTEKTAEDKPSSHDVKTDTLAEDKPGPGPFSDQSEPAITTSSPVAFNPFLIPGVSPGLIYPSMFLSPGMGMALPAMQQARHSEIVGLESQKRKKKKTKGDNPNSHPEPAPSCEREPSGDENCAEPSAPLPAEREHGAQAGEGALKDSNNDTN

SEQ ID NO: 27676 - protein, 35 aa, Artificial Sequence
  Synthetic polypeptide
KKNEDYHYILLYPGLYPGYIVKRGKKIRLRPDVTA

SEQ ID NO: 27677 - protein, 1833 aa, Artificial Sequence
  Synthetic polypeptide
AGKKNKAQARCHRIGQSKAVKVYRLITRNSYEREMFDKASLKLGLDKAVLQDINRKGGTNGVQQLSKMEVEDLLRKGAYGALMDEEDEGSKFCEEDIDQILQRRTHTITIQSEGKGSTFAKASFVASGNRTDISLDDPNFWQKWAKIAELDTEAKNEKESLVIDRPRVRKQTKHYNSFEEDELMEFSELDSDSDERPTRSRRLNDKARRYLRAECFRVEKNLLIFGWGRWKDILTHGRFKWHLNEKDMEMICRALLVYCVKHYKGDEKIKSFIWELITPTKDGQAQTLQNHSGLSAPVPRGRKGKKTKNQLLIPELKDADWLATCNPEVVLHDDGYKKHLKQHCNKVLLRVRMLYYLKAEILGEAAEKAFEGSPARELDVPLPDIDYMEIPVDWWDAEADKSLLIGVFKHGYERYNAMRADPALCFLEKVGMPDEKSLSAEQGVTDGTSDIPERGNTDKEDNAEDKVDGLQKQTESSSDGGDGVFSEKKDDSRAAQDGSDPDKSPWPVSSALTARLRRLVTVYQRCNRKELCRPEILGPGNQGYWVQEEMFRRTSEMDLINKEAQKRWTRREQADFYRTVSSFGVVYDQEKKTFDWTQFRIISRLDKKSDESLEQYFYSFVAMCRNVCRLPTWKDGGPPDTTIYVEPITEERAARTLYRIELLRKVREQVLKCPQLHERLQLCRPSLYLPVWWECGKHDRDLLIGTAKHGLNRTDCYIMNDPQLSFLDAYRNYAQHKRSGTQAPGNLCCLYQTNSKLYESLTYSQMSRTSESLENEPENLVRVESRDDHLSLPDVTCENFISKVQDVISINHDESLLPESLESMMYGKKVLSQEPSSFQESPSTNTESRKDVITISISKDGNCQSGGPEAEIASGPTFMGSLEAGGVAQANIKNGKHLLMSISKEGELCCSEAGQRPENIGQLEAKCLASPSLNPGNESGFVDMCSLSVCDSKRNLSSDQQLIDLLENKSLESKLILSQNHSDEEEEEEENEEENLAMAVGMGERPEVLHLTEPTTNISREKNQGFQDETKKGSLEVANQTPGLQRAFPAPAACQCHCKHMERWMHGLENDEFEIEKPKAYIPDLFKSKTNTIAMEGEPTAIPSQPFKVKHELLKEPWKESAEGQNVFPTYPLEGSELKSEDMDFENKDDYDRDGNCHSQDYPGKYSEEESKSSTSGITGDIGDELQEARAPTIAQLLQEKTLYSFSEWPKDRVIINRLDNICHVVLKGKWPSSQQYEPSGTLPTPVLTSSAGSRTSLSEPEAAEHSFSNGAALAAQIHKESFLAPVFTKDEQKHRRPYEFEVERDAKARGLEQFSATHGHTPIILNGWHGESAMDLSCSSEGSPGATSPFPVSASTPKIGAISSLQGALGMDLSGILQAGLIHPVTGQIVNGSLRRDDAATRRRRGRRKHVEGGMDLIFLKEQTLQAGILEVHEDPGQATLSTTHPEGPGPATSAPEPATAASSQAEKSIPSKSLLDWLRQQADYSLEVPGFGANFSDKPKQRRPRCKEPGKLDVSSLSGEERVPAIPKEPGLRGFLPENKFNHTLAEPILRDTGPRRRGRRPRSELLKAPSIVADSPSGMGPLFMNGLIAGMDLVGLQNMRNMPGIPLTGLVGFPAGFATMPTGEEVKSTLSMLPMMLPGMAAVPQMFGVGGLLSPPMATTCTSTAPASLSSTTKSGTAVTEKTAEDKPSSHDVKTDTLAEDKPGPGPFSDQSEPAITTSSPVAFNPFLIPGVSPGLIYPSMFLSPGMGMALPAMQQARHSEIVGLESQKRKKKKTKGDNPNSHPEPAPSCEREPSGDENCAEPSAPLPAEREHGAQAGEGALKDSNNDTN

SEQ ID NO: 27678 - protein, 75 aa, Artificial Sequence
  Synthetic polypeptide
VWPVFFLSHTCASSPCDIFHHGIKQHEVFISQTPASCSWPCQLPEPTWQAAGPQLHQTAIPSCLVSLLHEPINGP

SEQ ID NO: 27679 - protein, 68 aa, Artificial Sequence
  Synthetic polypeptide
SSMKSSSVRHQRHALGLASFQNRHGRLQDPSCTKLPSPPAWFPFFMNRSMGHSQVGMHVFHRMGTTSS

SEQ ID NO: 27680 - protein, 42 aa, Artificial Sequence
  Synthetic polypeptide
SLHQSDTSVMLLALPASRTDMAGCRTPVAPNCHPLLPGFPSS

SEQ ID NO: 27681 - protein, 79 aa, Artificial Sequence
  Synthetic polypeptide
GRARWLTPVIPARWEAKAGGSRGQEFKTSLAKMVKPSRIWMSCTTRTQIQMCRSRGIASARSNGPMRRTALTSNASTGG

SEQ ID NO: 27682 - protein, 6 aa, Artificial Sequence
  Synthetic polypeptide
NPRGSG

SEQ ID NO: 27683 - protein, 705 aa, Artificial Sequence
  Synthetic polypeptide
PGAVAHACNPSPLGGQGGWITRSGVQDQPGQDGETLEDLDELHYQDTDSDVPEQRDSKCKVKWTHEENRTDQQCQYRWLRVLNPDLVKGPWTKEEDQKVIELVKKYGTKQWTLIAKHLKGRLGKQCRERWHNHLNPEVKKSCWTEEEDRIICEAHKVLGNRWAEIAKMLPGRTDNAVKNHWNSTIKRKVDTGGFLSESKDCKPPVYLLLELEDKDGLQSAQPTEGQGSLLTNWPSVPPTIKEEENSEEELAAATTSKEQEPIGTDLDAVRTPEPLEEFPKREDQEGSPPETSLPYKWVVEAANLLIPAVGSSLSEALDLIESDPDAWCDLSKFDLPEEPSAEDSINNSLVQLQASHQQQVLPPRQPSALVPSVTEYRLDGHTISDLSRSSRGELIPISPSTEVGGSGIGTPPSVLKRQRKRRVALSPVTENSTSLSFLDSCNSLTPKSTPVKTLPFSPSQFLNFWNKQDTLELESPSLTSTPVCSQKVVVTTPLHRDKTPLHQKHAAFVTPDQKYSMDNTPHTPTPFKNALEKYGPLKPLPQTPHLEEDLKEVLRSEAGIELIIEDDIRPEKQKRKPGLRRSPIKKVRKSLALDIVDEDVKLMMSTLPKSLSLPTTAPSNSSSLTLSGIKEDNSLLNQGFLQAKPEKAAVAQKPRSHFTTPAPMSSAWKTVACGGTRDQLFMQEKARQLLGRLKPSHTSRTLILS

SEQ ID NO: 27684 - protein, 71 aa, Artificial Sequence
  Synthetic polypeptide
GRARWLTPVIPARWEAKAGGSRGQEFKTSLAKMVKPSRIWMSCTTRTQIQMCRSRGIASARSNGPMRRTSS

SEQ ID NO: 27685 - protein, 729 aa, Artificial Sequence
  Synthetic polypeptide
PGAVAHACNPSPLGGQGGWITRSGVQDQPGQDGETLEDLDELHYQDTDSDVPEQRDSKCKVKWTHEEDEQLRALVRQFGQQDWKFLASHFPNRTDQQCQYRWLRVLNPDLVKGPWTKEEDQKVIELVKKYGTKQWTLIAKHLKGRLGKQCRERWHNHLNPEVKKSCWTEEEDRIICEAHKVLGNRWAEIAKMLPGRTDNAVKNHWNSTIKRKVDTGGFLSESKDCKPPVYLLLELEDKDGLQSAQPTEGQGSLLTNWPSVPPTIKEEENSEEELAAATTSKEQEPIGTDLDAVRTPEPLEEFPKREDQEGSPPETSLPYKWVVEAANLLIPAVGSSLSEALDLIESDPDAWCDLSKFDLPEEPSAEDSINNSLVQLQASHQQQVLPPRQPSALVPSVTEYRLDGHTISDLSRSSRGELIPISPSTEVGGSGIGTPPSVLKRQRKRRVALSPVTENSTSLSFLDSCNSLTPKSTPVKTLPFSPSQFLNFWNKQDTLELESPSLTSTPVCSQKVVVTTPLHRDKTPLHQKHAAFVTPDQKYSMDNTPHTPTPFKNALEKYGPLKPLPQTPHLEEDLKEVLRSEAGIELIIEDDIRPEKQKRKPGLRRSPIKKVRKSLALDIVDEDVKLMMSTLPKSLSLPTTAPSNSSSLTLSGIKEDNSLLNQGFLQAKPEKAAVAQKPRSHFTTPAPMSSAWKTVACGGTRDQLFMQEKARQLLGRLKPSHTSRTLILS

SEQ ID NO: 27686 - protein, 10 aa, Artificial Sequence
  Synthetic polypeptide
PRPRDGKYKD

SEQ ID NO: 27687 - protein, 20 aa, Artificial Sequence
  Synthetic polypeptide
LCDPGPETESTKTSKIHPCP

SEQ ID NO: 27688 - protein, 52 aa, Artificial Sequence
  Synthetic polypeptide
GLVGITNKLWSQMGWCLNSTSAANYVTQAQRRKVQRLVKYILALKELSTQNL

SEQ ID NO: 27689 - protein, 255 aa, Artificial Sequence
  Synthetic polypeptide
FRPDFQSHMLLTVAIPSSTILEAPPVPFLHAQRYVSGYGLQKGELSTLLYNTHPYRAFPVLLLDTVPWYLRLYVHTLTITSKGKENKPSYIHYQPAQDRLQPHLLEMLIQLPANSVTKVSIQFERALLKWTEYTPDPNHGFYVSPSVLSALVPSMVAAKPVDWEESPLFNSLFPVSDGSNYFVRLYTEPLLVNLPTPDFSMPYNVICLTCTVVAVCYGSFYNLLTRTFHIEEPRTGGLAKRLANLIRRARGVPPL

SEQ ID NO: 27690 - protein, 21 aa, Artificial Sequence
  Synthetic polypeptide
LFQALRFWRPPQCPSCMPSGT

SEQ ID NO: 27691 - protein, 121 aa, Artificial Sequence
  Synthetic polypeptide
TRFPESYAADCSYSKLYDFGGPPSALPACPAVREWLWAAEGGAEHTAVQHPPIPGLPGAAAGHRTLVSAAVCAHPHHHLQGQGEQTKLHPLPACPGPAATPPPGDADSAAGQLSHQGFHPV

SEQ ID NO: 27692 - protein, 241 aa, Artificial Sequence
  Synthetic polypeptide
ALGKSHSGRHFPLHSPTFSWRNVAFLLLLSLALEWTSAMLTKKIKHKPGLCPKERLTCTTELPDSCNTDFDCKEYQKCCFFACQKKCMDPFQEPCMLPVRHGNCNHEAQRWHFDFKNYRCTPFKYRGCEGNANNFLNEDACRTACMLIVKDGQCPLFPFTERKECPPSCHSDIDCPQTDKCCESRCGFVCARAWTVKKGFCPRKPLLCTKIDKPKCLQDEECPLVEKCCSHCGLKCMDPRR

SEQ ID NO: 27693 - protein, 20 aa, Artificial Sequence
  Synthetic polypeptide
VNLTVEGTFLSIAPPSPGGM

SEQ ID NO: 27694 - protein, 10 aa, Artificial Sequence
  Synthetic polypeptide
ISQWKALSSP

SEQ ID NO: 27695 - protein, 16 aa, Artificial Sequence
  Synthetic polypeptide
ALGTFLSIAPPSPGGM

SEQ ID NO: 27696 - protein, 255 aa, Artificial Sequence
  Synthetic polypeptide
RLKTDAARSPRNPHRPSWTLSFRHFPLHSPTFSWRNVAFLLLLSLALEWTSAMLTKKIKHKPGLCPKERLTCTTELPDSCNTDFDCKEYQKCCFFACQKKCMDPFQEPCMLPVRHGNCNHEAQRWHFDFKNYRCTPFKYRGCEGNANNFLNEDACRTACMLIVKDGQCPLFPFTERKECPPSCHSDIDCPQTDKCCESRCGFVCARAWTVKKGFCPRKPLLCTKIDKPKCLQDEECPLVEKCCSHCGLKCMDPRR

SEQ ID NO: 27697 - protein, 103 aa, Artificial Sequence
  Synthetic polypeptide
TLWFRLNICFPSESLESWYVLGRGCLSDQPPVENFHRRGGDCPKVLVGLCIVGCVMDENCQAGEKCCKSGCGRFCVPPVLPPKLTMNPNWTVRSDSELEIPVP

SEQ ID NO: 27698 - protein, 22 aa, Artificial Sequence
  Synthetic polypeptide
RTFTGGAVIVQKFWWACALLAV

SEQ ID NO: 27699 - protein, 12 aa, Artificial Sequence
  Synthetic polypeptide
PAPSRELSQAGR

SEQ ID NO: 27700 - protein, 147 aa, Artificial Sequence
  Synthetic polypeptide
TLWFRLNICFPSESLESWYVLGRGCLSDQPPVENFHKFGGECPADPLPCEELCDGDASCPQGHKCCSTGCGRTCLGDIEGGRGGDCPKVLVGLCIVGCVMDENCQAGEKCCKSGCGRFCVPPVLPPKLTMNPNWTVRSDSELEIPVP

SEQ ID NO: 27701 - protein, 66 aa, Artificial Sequence
  Synthetic polypeptide
RTFTSLVVNVPLTPFRVRSCVMGMHPVPRGINAAAPAVAAPASETLREGGAVIVQKFWWACALLAV

SEQ ID NO: 27702 - protein, 12 aa, Artificial Sequence
  Synthetic polypeptide
PAPSRELSQVWW

SEQ ID NO: 27703 - protein, 91 aa, Artificial Sequence
  Synthetic polypeptide
LEPLEHNDKAPAGAAEGPPLTDDNKFHRSCHLHGSPPSCPAAQHQRGDPDCLQQVHEVLPEGSTERARQCWGGGGRRAADPGSLSELPGAG

SEQ ID NO: 27704 - protein, 19 aa, Artificial Sequence
  Synthetic polypeptide
PDDLDLNSGAALLARTLGT

SEQ ID NO: 27705 - protein, 106 aa, Artificial Sequence
  Synthetic polypeptide
LEPLEHNDKAPAGAAEGPPLTDDNKFHRSCHLHGSPPSCPAAQHQRGDPDCLQQVHEVLPEGSTERARQCWGGGGRRAADPGSLSELPGAGAWWIKLSWPHLVSWG

SEQ ID NO: 27706 - protein, 58 aa, Artificial Sequence
  Synthetic polypeptide
LEPLEHNDKAPAGAAEGPPLTDDNKFHRSCHLHGSPPSCPAAQHQRGDPDCLQQVHEG

SEQ ID NO: 27707 - protein, 7 aa, Artificial Sequence
  Synthetic polypeptide
NALHPRR

SEQ ID NO: 27708 - protein, 18 aa, Artificial Sequence
  Synthetic polypeptide
QCAWHYDVVNEMLYTLAV

SEQ ID NO: 27709 - protein, 25 aa, Artificial Sequence
  Synthetic polypeptide
DNGQKALSSVPGIMTWSMKCSTPSP

SEQ ID NO: 27710 - protein, 27 aa, Artificial Sequence
  Synthetic polypeptide
NALHPRRDRPRTARLPASPDLSPLLGL

SEQ ID NO: 27711 - protein, 236 aa, Artificial Sequence
  Synthetic polypeptide
QCAWHYDVVNEMLYTLAVIGPGPPDCQPAQISRRYSDFERLHRNLQRQFRGPMAAISFPRKRLRRNFTAETIARRSRAFEQFLGHLQAVPELRHAPDLQDFFVLPELRRAQSLTCTGLYREALALWANAWQLQAQLGTPSGPDRPLLTLAGLAVCHQELEDPGEARACCEKALQLLGDKSLHPLLAPFLEAHVRLSWRLGLDKRQSEARLQALQEAGLTPTPPPSLKELLIKEVLD

SEQ ID NO: 27712 - protein, 62 aa, Artificial Sequence
  Synthetic polypeptide
QCAWHYDVVNEMLYTLAVIGPGPPDCQPAQISRRYSDFERLHRNLQRQFRGPMAAISFPQSH

SEQ ID NO: 27713 - protein, 14 aa, Artificial Sequence
  Synthetic polypeptide
TSVALPVSPGLHAS

SEQ ID NO: 27714 - protein, 654 aa, Artificial Sequence
  Synthetic polypeptide
TSLSIRLNFSCLTCKSRAARQLMERTQSSNMETRLDAMKELAKLSADVTFATEFINMDGIIVLTRLVESGTKLLSHYSEMLAFTLTAFLELMDHGIVSWDMVSITFIKQIAGYVSQPMVDVSILQRSLAILESMVLNSQSLYQKIAEEITVGQLISHLQVSNQEIQTYAIALINALFLKAPEDKRQDMANAFAQKHLRSIILNHVIRGNRPIKTEMAHQLYVLQVLTFNLLEERMMTKMDPNDQAQRDIIFELRRIAFDAESDPSNAPGSGTEKRKAMYTKDYKMLGFTNHINPAMDFTQTPPGMLALDNMLYLAKVHQDTYIRIVLENSSREDKHECPFGRSAIELTKMLCEILQVGELPNEGRNDYHPMFFTHDRAFEELFGICIQLLNKTWKEMRATAEDFNKVMQVVREQITRALPSKPNSLDQFKSKLRSLSYSEILRLRQSERMSQDDFQSPPIVELREKIQPEILELIKQQRLNRLCEGSSFRKIGNRRRQERFWYCRLALNHKVLHYGDLDDNPQGEVTFESLQEKIPVADIKAIVTGKDCPHMKEKSALKQNKEVLELAFSILYDPDETLNFIAPNKYEYCIWIDGLSALLGKDMSSELTKSDLDTLLSMEMKLRLLDLENIQIPEAPPPIPKEPSSYDFVYHYG

SEQ ID NO: 27715 - protein, 666 aa, Artificial Sequence
  Synthetic polypeptide
TSLSIRLNFSCLTCKSRAARQLMERTQSSNMETRLDAMKELAKLSADVTFATEFINMDGIIVLTRLVESGTKLLSHYSEMLAFTLTAFLELMDHGIVSWDMVSITFIKQIAGYVSQPMVDVSILQRSLAILESMVLNSQSLYQKIAEEITVGQLISHLQVSNQEIQTYAIALINALFLKAPEDKRQDKHLNPLDLPVTDMANAFAQKHLRSIILNHVIRGNRPIKTEMAHQLYVLQVLTFNLLEERMMTKMDPNDQAQRDIIFELRRIAFDAESDPSNAPGSGTEKRKAMYTKDYKMLGFTNHINPAMDFTQTPPGMLALDNMLYLAKVHQDTYIRIVLENSSREDKHECPFGRSAIELTKMLCEILQVGELPNEGRNDYHPMFFTHDRAFEELFGICIQLLNKTWKEMRATAEDFNKVMQVVREQITRALPSKPNSLDQFKSKLRSLSYSEILRLRQSERMSQDDFQSPPIVELREKIQPEILELIKQQRLNRLCEGSSFRKIGNRRRQERFWYCRLALNHKVLHYGDLDDNPQGEVTFESLQEKIPVADIKAIVTGKDCPHMKEKSALKQNKEVLELAFSILYDPDETLNFIAPNKYEYCIWIDGLSALLGKDMSSELTKSDLDTLLSMEMKLRLLDLENIQIPEAPPPIPKEPSSYDFVYHYG

SEQ ID NO: 27716 - protein, 652 aa, Artificial Sequence
  Synthetic polypeptide
TSLSIRLNFSCLTCKSRAARQLMERTQSSNMETRLDAMKELAKLSADVTFATEFINMDGIIVLTRLVESGTKLLSHEMLAFTLTAFLELMDHGIVSWDMVSITFIKQIAGYVSQPMVDVSILQRSLAILESMVLNSQSLYQKIAEEITVGQLISHLQVSNQEIQTYAIALINALFLKAPEDKRQDMANAFAQKHLRSIILNHVIRGNRPIKTEMAHQLYVLQVLTFNLLEERMMTKMDPNDQAQRDIIFELRRIAFDAESDPSNAPGSGTEKRKAMYTKDYKMLGFTNHINPAMDFTQTPPGMLALDNMLYLAKVHQDTYIRIVLENSSREDKHECPFGRSAIELTKMLCEILQVGELPNEGRNDYHPMFFTHDRAFEELFGICIQLLNKTWKEMRATAEDFNKVMQVVREQITRALPSKPNSLDQFKSKLRSLSYSEILRLRQSERMSQDDFQSPPIVELREKIQPEILELIKQQRLNRLCEGSSFRKIGNRRRQERFWYCRLALNHKVLHYGDLDDNPQGEVTFESLQEKIPVADIKAIVTGKDCPHMKEKSALKQNKEVLELAFSILYDPDETLNFIAPNKYEYCIWIDGLSALLGKDMSSELTKSDLDTLLSMEMKLRLLDLENIQIPEAPPPIPKEPSSYDFVYHYG

SEQ ID NO: 27717 - protein, 272 aa, Artificial Sequence
  Synthetic polypeptide
TSLSIRLNFSCLTCKSRAARQLMERTQSSNMETRLDAMKELAKLSADVTFATEFINMDGIIVLTRLVESGTKLLSHYSEMLAFTLTAFLELMDHGIVSWDMVSITFIKQIAGYVSQPMVDVSILQRSLAILESMVLNSQSLYQKIAEEITVGQLISHLQVSNQEIQTYAIALINALFLKAPEDKRQDMANAFAQKHLRSIILNHVIRGNRPIKTEMAHQLYVLQVLTFNLLEERMMTKMDPNDQAQRDIIFELRRIAFDAESDPSNAPGSGT

SEQ ID NO: 27718 - protein, 27 aa, Artificial Sequence
  Synthetic polypeptide
GEANKVPGMQNLGRHSTLRIAQTLMMP

SEQ ID NO: 27719 - protein, 11 aa, Artificial Sequence
  Synthetic polypeptide
EDTQLSGLHRH

SEQ ID NO: 27720 - protein, 620 aa, Artificial Sequence
  Synthetic polypeptide
GKQGAWHAKFRKTLNSQDCTDIDDALEKNKEIQDKHLTQTVFFSNKTLITERENVFGKTLNLGMNSVPSRKMPYKCNPGGNSLKTNSEVIVAKKSKENRKIPDGYSGFGKHEKSHLGMKKYRYNPMRKASNQNENLILHQNIQILKQPFDYNKCGKTFFKRAILITQKGRQTERKPNECNECRKTFSKRSTLIVHQRIHTGEKPYVCSDCRKTFRVKTSLTRHRRIHTGERPYECSECRKTFIDKSALIVHQKIHGGEKSYECNECGKTFFRKSALAEHFRSHTGEKPYECKECGNAFSKKSYLVVHQRTHRGEKPNECKECGKTFFCQSALTAHQRIHTGEKPYECSECEKTFFCQSALNVHRRSHTGEKPYECSQCGKFLCTKSALIAHQITHRGKKSYECNECGKFFCHKSTLTIHQRTHTGEKHGVFNKCGRISIVKSNCSQCKRMNTKENLYECSEHGHAVSKNSHLIVHQRTIWERPYECNECGRTYCRKSALTHHQRTHTGQRPYECNECGKTFCQKFSFVEHQRTHTGEKPYECNECGKSFCHKSAFRVHRRIHTGEKPYECNQCGKTYRRLWTLTEHQKIHTGEKPYECNKCEKTFRHKSNFLLHQKSHKE

SEQ ID NO: 27721 - protein, 151 aa, Artificial Sequence
  Synthetic polypeptide
GKQGAWHAKFRKTLNSQDCTDIDDALEKNKEIQDKHLTQTVFFSNKTLITERENVFGKTLNLGMNSVPSRKMPYKCNPGGNSLKTNSEVIVAKKSKENRKIPDGYSGFGKHEKSHLGMKKYRYNPMRKASNQNENLILHQNIQILKQPFDY

SEQ ID NO: 27722 - protein, 719 aa, Artificial Sequence
  Synthetic polypeptide
TLNEGKWKMRRRWADEFPILSLFCALFQDTSFIPGPDCELHPRGMAATGPCSEAPVQGCDAGELQQLGLCGVSDVQRSWSKFCNFPLTGYHVSKPDVIFKLEQGEEPWIVEEFSNQNYPDIDDALEKNKEIQDKHLTQTVFFSNKTLITERENVFGKTLNLGMNSVPSRKMPYKCNPGGNSLKTNSEVIVAKKSKENRKIPDGYSGFGKHEKSHLGMKKYRYNPMRKASNQNENLILHQNIQILKQPFDYNKCGKTFFKRAILITQKGRQTERKPNECNECRKTFSKRSTLIVHQRIHTGEKPYVCSDCRKTFRVKTSLTRHRRIHTGERPYECSECRKTFIDKSALIVHQKIHGGEKSYECNECGKTFFRKSALAEHFRSHTGEKPYECKECGNAFSKKSYLVVHQRTHRGEKPNECKECGKTFFCQSALTAHQRIHTGEKPYECSECEKTFFCQSALNVHRRSHTGEKPYECSQCGKFLCTKSALIAHQITHRGKKSYECNECGKFFCHKSTLTIHQRTHTGEKHGVFNKCGRISIVKSNCSQCKRMNTKENLYECSEHGHAVSKNSHLIVHQRTIWERPYECNECGRTYCRKSALTHHQRTHTGQRPYECNECGKTFCQKFSFVEHQRTHTGEKPYECNECGKSFCHKSAFRVHRRIHTGEKPYECNQCGKTYRRLWTLTEHQKIHTGEKPYECNKCEKTFRHKSNFLLHQKSHKE

SEQ ID NO: 27723 - protein, 77 aa, Artificial Sequence
  Synthetic polypeptide
EGGGQMNSPSFLYSVHYFKIPVSFQDLTVNFTQEEWQQLDPAQRLLYRDVMLENYSNLVSVESLMSKDLGPSSVISH

SEQ ID NO: 27724 - protein, 20 aa, Artificial Sequence
  Synthetic polypeptide
IPHPFSILCTISRYQFHSRT

SEQ ID NO: 27725 - protein, 74 aa, Artificial Sequence
  Synthetic polypeptide
TLNEGKWKMRRRWADEFPILSLFCALFQDTSFIPGPDCELHPRGMAATGPCSEAPVQGCDAGELQQLGLCGVSC

SEQ ID NO: 27726 - protein, 692 aa, Artificial Sequence
  Synthetic polypeptide
EGGGQMNSPSFLYSVHYFKIPVSFQDLTVNFTQEEWQQLDPAQRLLYRDVMLENYSNLVSVGYHVSKPDVIFKLEQGEEPWIVEEFSNQNYPDIDDALEKNKEIQDKHLTQTVFFSNKTLITERENVFGKTLNLGMNSVPSRKMPYKCNPGGNSLKTNSEVIVAKKSKENRKIPDGYSGFGKHEKSHLGMKKYRYNPMRKASNQNENLILHQNIQILKQPFDYNKCGKTFFKRAILITQKGRQTERKPNECNECRKTFSKRSTLIVHQRIHTGEKPYVCSDCRKTFRVKTSLTRHRRIHTGERPYECSECRKTFIDKSALIVHQKIHGGEKSYECNECGKTFFRKSALAEHFRSHTGEKPYECKECGNAFSKKSYLVVHQRTHRGEKPNECKECGKTFFCQSALTAHQRIHTGEKPYECSECEKTFFCQSALNVHRRSHTGEKPYECSQCGKFLCTKSALIAHQITHRGKKSYECNECGKFFCHKSTLTIHQRTHTGEKHGVFNKCGRISIVKSNCSQCKRMNTKENLYECSEHGHAVSKNSHLIVHQRTIWERPYECNECGRTYCRKSALTHHQRTHTGQRPYECNECGKTFCQKFSFVEHQRTHTGEKPYECNECGKSFCHKSAFRVHRRIHTGEKPYECNQCGKTYRRLWTLTEHQKIHTGEKPYECNKCEKTFRHKSNFLLHQKSHKE

SEQ ID NO: 27727 - protein, 25 aa, Artificial Sequence
  Synthetic polypeptide
DRKAAACLSSCSWRCTGARRPCRSQ

SEQ ID NO: 27728 - protein, 69 aa, Artificial Sequence
  Synthetic polypeptide
VKTGRPLLVCHPAHGGVLVHGGPAALSDGAAAHRPLPLHGHLALQQGLPPVLPRHQLPLPQWADHGQRH

SEQ ID NO: 27729 - protein, 572 aa, Artificial Sequence
  Synthetic polypeptide
GWNELRQEGRCLFVILLMAVYWCTEALPLSVTALLPIVLFPFMGILPSNKVCPQYFLDTNFLFLSGLIMASAIEEWNLHRRIALKILMLVGVQPARLILGMMVTTSFLSMWLSNTASTAMMLPIANAILKSLFGQKEVRKDPSQESEENTAAVRRNGLHTVPTEMQFLASTEAKDHPGETEVPLDLPADSRKEDEYRRNIWKGFLISIPYSASIGGTATLTGTAPNLILLGQLKSFFPQCDVVNFGSWFIFAFPLMLLFLLAGWLWISFLYGGLSFRGWRKNKSEIRTNAEDRARAVIREEYQNLGPIKFAEQAVFILFCMFAILLFTRDPKFIPGWASLFNPGFLSDAVTGVAIVTILFFFPSQRPSLKWWFDFKAPNTETEPLLTWKKAQETVPWNIILLLGGGFAMAKGCEESGLSVWIGGQLHPLENVPPALAVLLITVVIAFFTEFASNTATIIIFLPVLAELAIRLRVHPLYLMIPGTVGCSFAFMLPVSTPPNSIAFASGHLLVKDMVRTGLLMNLMGVLLLSLAMNTWAQTIFQLGTFPDWADMYSVNVTALPPTLANDTFRTL

SEQ ID NO: 27730 - protein, 522 aa, Artificial Sequence
  Synthetic polypeptide
GWNELRQEGRCLFVILLMAVYWCTEALPLSVTALLPIVLFPFMGILPSNKVCPQYFLDTNFLFLSGLIMASAIEEWNLHRRIALKILMLVGVQPARLILGMMVTTSFLSMWLSNTASTAMMLPIANAILKSLFGQKEVRKDPSQESEENTAKTTLGRQRFHWICRLTPGRRMNIVGTSGRASSSPSPTQPVLGAQPHSRAQPLTSSCLASSRGWLWISFLYGGLSFRGWRKNKSEIRTNAEDRARAVIREEYQNLGPIKFAEQAVFILFCMFAILLFTRDPKFIPGWASLFNPGFLSDAVTGVAIVTILFFFPSQRPSLKWWFDFKAPNTETEPLLTWKKAQETVPWNIILLLGGGFAMAKGCEESGLSVWIGGQLHPLENVPPALAVLLITVVIAFFTEFASNTATIIIFLPVLAELAIRLRVHPLYLMIPGTVGCSFAFMLPVSTPPNSIAFASGHLLVKDMVRTGLLMNLMGVLLLSLAMNTWAQTIFQLGTFPDWADMYSVNVTALPPTLANDTFRTL

SEQ ID NO: 27731 - protein, 308 aa, Artificial Sequence
  Synthetic polypeptide
GWNELRQEGRCLFVILLMAVYWCTEALPLSVTALLPIVLFPFMGILPSNKVCPQYFLDTNFLFLSGLIMASAIEEWNLHRRIALKILMLVGVQPARLILGMMVTTSFLSMWLSNTASTAMMLPIANAILKSLFGQKEVRKDPSQESEENTAKTTLGRQRFHWICRLTPGRRMNIVGTSGRASSSPSPTQPVLGAQPHSRAQPLTSSCLASSRGWLWISFLYGGLSFRGWRKNKSEIRTNAEDRARAVIREEYQNLGPIKFAEQAVFILFCMFAILLFTRDPKFIPGWASLFNPGCKMGIISISTIQKM

SEQ ID NO: 27732 - protein, 202 aa, Artificial Sequence
  Synthetic polypeptide
GWNELRQEGRCLFVILLMAVYWCTEALPLSVTALLPIVLFPFMGILPSNKVCPQYFLDTNFLFLSGLIMASAIEEWNLHRRIALKILMLVGVQPARLILGMMVTTSFLSMWLSNTASTAMMLPIANAILKSLFGQKEVRKDPSQESEENTGIEPNTFLSEERLKLQAPLVIRLGQITESGQWNMSGNDVCNFRVLSFLPGGM

SEQ ID NO: 27733 - protein, 566 aa, Artificial Sequence
  Synthetic polypeptide
TEGRCLFVILLMAVYWCTEALPLSVTALLPIVLFPFMGILPSNKVCPQYFLDTNFLFLSGLIMASAIEEWNLHRRIALKILMLVGVQPARLILGMMVTTSFLSMWLSNTASTAMMLPIANAILKSLFGQKEVRKDPSQESEENTAAVRRNGLHTVPTEMQFLASTEAKDHPGETEVPLDLPADSRKEDEYRRNIWKGFLISIPYSASIGGTATLTGTAPNLILLGQLKSFFPQCDVVNFGSWFIFAFPLMLLFLLAGWLWISFLYGGLSFRGWRKNKSEIRTNAEDRARAVIREEYQNLGPIKFAEQAVFILFCMFAILLFTRDPKFIPGWASLFNPGFLSDAVTGVAIVTILFFFPSQRPSLKWWFDFKAPNTETEPLLTWKKAQETVPWNIILLLGGGFAMAKGCEESGLSVWIGGQLHPLENVPPALAVLLITVVIAFFTEFASNTATIIIFLPVLAELAIRLRVHPLYLMIPGTVGCSFAFMLPVSTPPNSIAFASGHLLVKDMVRTGLLMNLMGVLLLSLAMNTWAQTIFQLGTFPDWADMYSVNVTALPPTLANDTFRTL

SEQ ID NO: 27734 - protein, 31 aa, Artificial Sequence
  Synthetic polypeptide
GIPSHAELKAAACLSSCSWRCTGARRPCRSQ

SEQ ID NO: 27735 - protein, 516 aa, Artificial Sequence
  Synthetic polypeptide
TEGRCLFVILLMAVYWCTEALPLSVTALLPIVLFPFMGILPSNKVCPQYFLDTNFLFLSGLIMASAIEEWNLHRRIALKILMLVGVQPARLILGMMVTTSFLSMWLSNTASTAMMLPIANAILKSLFGQKEVRKDPSQESEENTAKTTLGRQRFHWICRLTPGRRMNIVGTSGRASSSPSPTQPVLGAQPHSRAQPLTSSCLASSRGWLWISFLYGGLSFRGWRKNKSEIRTNAEDRARAVIREEYQNLGPIKFAEQAVFILFCMFAILLFTRDPKFIPGWASLFNPGFLSDAVTGVAIVTILFFFPSQRPSLKWWFDFKAPNTETEPLLTWKKAQETVPWNIILLLGGGFAMAKGCEESGLSVWIGGQLHPLENVPPALAVLLITVVIAFFTEFASNTATIIIFLPVLAELAIRLRVHPLYLMIPGTVGCSFAFMLPVSTPPNSIAFASGHLLVKDMVRTGLLMNLMGVLLLSLAMNTWAQTIFQLGTFPDWADMYSVNVTALPPTLANDTFRTL

SEQ ID NO: 27736 - protein, 302 aa, Artificial Sequence
  Synthetic polypeptide
TEGRCLFVILLMAVYWCTEALPLSVTALLPIVLFPFMGILPSNKVCPQYFLDTNFLFLSGLIMASAIEEWNLHRRIALKILMLVGVQPARLILGMMVTTSFLSMWLSNTASTAMMLPIANAILKSLFGQKEVRKDPSQESEENTAKTTLGRQRFHWICRLTPGRRMNIVGTSGRASSSPSPTQPVLGAQPHSRAQPLTSSCLASSRGWLWISFLYGGLSFRGWRKNKSEIRTNAEDRARAVIREEYQNLGPIKFAEQAVFILFCMFAILLFTRDPKFIPGWASLFNPGCKMGIISISTIQKM

SEQ ID NO: 27737 - protein, 196 aa, Artificial Sequence
  Synthetic polypeptide
TEGRCLFVILLMAVYWCTEALPLSVTALLPIVLFPFMGILPSNKVCPQYFLDTNFLFLSGLIMASAIEEWNLHRRIALKILMLVGVQPARLILGMMVTTSFLSMWLSNTASTAMMLPIANAILKSLFGQKEVRKDPSQESEENTGIEPNTFLSEERLKLQAPLVIRLGQITESGQWNMSGNDVCNFRVLSFLPGGM

SEQ ID NO: 27738 - protein, 20 aa, Artificial Sequence
  Synthetic polypeptide
CLATPHLSCLCVPLCLCWVA

SEQ ID NO: 27739 - protein, 26 aa, Artificial Sequence
  Synthetic polypeptide
RSAWPLPTCPAFVCLCVFAGWPDLWL

SEQ ID NO: 27740 - protein, 561 aa, Artificial Sequence
  Synthetic polypeptide
KVNKRPVLFCSSAHPKPSVVPGHSPPVLPLCASVSLLGGLTFGYELAVISGALLPLQLDFGLSCLEQEFLVGSLLLGALLASLVGGFLIDCYGRKQAILGSNLVLLAGSLTLGLAGSLAWLVLGRAVVGFAISLSSMACCIYVSELVGPRQRGVLVSLYEAGITVGILLSYALNYALAGTPWGWRHMFGWATAPAVLQSLSLLFLPAGTDETATHKDLIPLQGGEAPKLGPGRPRYSFLDLFRARDNMRGRTTVGLGLVLFQQLTGQPNVLCYASTIFSSVGFHGGSSAVLASVGLGAVKVAATLTAMGLVDRAGRRALLLAGCALMALSVSGIGLVSFAVPMDSGPSCLAVPNATGQTGLPGDSGLLQDSSLPPIPRTNEDQREPILSTAKKTKPHPRSGDPSAPPRLALSSALPGPPLPARGHALLRWTALLCLMVFVSAFSFGFGPVTWLVLSEIYPVEIRGRAFAFCNSFNWAANLFISLSFLDLIGTIGLSWTFLLYGLTAVLGLGFIYLFVPETKGQSLAEIDQQFQKRRFTLSFGHRQNSTGIPYSRIEISAAS

SEQ ID NO: 27741 - protein, 31 aa, Artificial Sequence
  Synthetic polypeptide
LIHQKQKWRPLPTCPAFVCLCVFAGWPDLWL

SEQ ID NO: 27742 - protein, 547 aa, Artificial Sequence
  Synthetic polypeptide
SIKSRNGGHSPPVLPLCASVSLLGGLTFGYELAVISGALLPLQLDFGLSCLEQEFLVGSLLLGALLASLVGGFLIDCYGRKQAILGSNLVLLAGSLTLGLAGSLAWLVLGRAVVGFAISLSSMACCIYVSELVGPRQRGVLVSLYEAGITVGILLSYALNYALAGTPWGWRHMFGWATAPAVLQSLSLLFLPAGTDETATHKDLIPLQGGEAPKLGPGRPRYSFLDLFRARDNMRGRTTVGLGLVLFQQLTGQPNVLCYASTIFSSVGFHGGSSAVLASVGLGAVKVAATLTAMGLVDRAGRRALLLAGCALMALSVSGIGLVSFAVPMDSGPSCLAVPNATGQTGLPGDSGLLQDSSLPPIPRTNEDQREPILSTAKKTKPHPRSGDPSAPPRLALSSALPGPPLPARGHALLRWTALLCLMVFVSAFSFGFGPVTWLVLSEIYPVEIRGRAFAFCNSFNWAANLFISLSFLDLIGTIGLSWTFLLYGLTAVLGLGFIYLFVPETKGQSLAEIDQQFQKRRFTLSFGHRQNSTGIPYSRIEISAAS

SEQ ID NO: 27743 - protein, 52 aa, Artificial Sequence
  Synthetic polypeptide
KKKGKHRKCNTQISAGKNGKKTHPIIDPSKAEMEATPHLSCLCVPLCLCWVA

SEQ ID NO: 27744 - protein, 54 aa, Artificial Sequence
  Synthetic polypeptide
FCLTLSVLSTFKILALQREQPRKESSPALHILPMATRRRTHQQAPLKRKRNLAY

SEQ ID NO: 27745 - protein, 37 aa, Artificial Sequence
  Synthetic polypeptide
AHLRSWLCRENSPEKKVPQPSTFFQWPLAAGHINKPH

SEQ ID NO: 27746 - protein, 46 aa, Artificial Sequence
  Synthetic polypeptide
FCLTLSVLSTFKILALQREQPRKESSPALHILPMATRRRTHQQAPL

SEQ ID NO: 27747 - protein, 28 aa, Artificial Sequence
  Synthetic polypeptide
FCLTLSVLSTFKILALQREQPRKESSPA

SEQ ID NO: 27748 - protein, 19 aa, Artificial Sequence
  Synthetic polypeptide
AHLRSWLCRENSPEKKVPQ

SEQ ID NO: 27749 - protein, 1200 aa, Artificial Sequence
  Synthetic polypeptide
GRALWLMPVIPALWEAEAGGSQDPGSAERTAQKRKFPSPPHSSNGHSPQDTSTSPIKKKKKPGLLNSNNKEQSELRHGPFYYMKQPLTTDPVDVVPQDGRNDFYCWVCHREGQVLCCELCPRVYHAKCLRLTSEPEGDWFCPECEKITVAECIETQSKAMTMLTIEQLSYLLKFAIQKMKQPGTDAFQKPVPLEQHPDYAEYIFHPMDLCTLEKNAKKKMYGCTEAFLADAKWILHNCIIYNGGNHKLTQIAKVVIKICEHEMNEIEVCPECYLAACQKRDNWFCEPCSNPHPLVWAKLKGFPFWPAKALRDKDGQVDARFFGQHDRAWVPINNCYLMSKEIPFSVKKTKSIFNSAMQEMEVYVENIRRKFGVFNYSPFRTPYTPNSQYQMLLDPTNPSAGTAKIDKQEKVKLNFDMTASPKILMSKPVLSGGTGRRISLSDMPRSPMSTNSSVHTGSDVEQDAEKKATSSHFSASEESMDFLDKSTASPASTKTGQAGSLSGSPKPFSPQLSAPITTKTDKTSTTGSILNLNLDRSKAEMDLKELSESVQQQSTPVPLISPKRQIRSRFQLNLDKTIESCKAQLGINEISEDVYTAVEHSDSEDSEKSDSSDSEYISDDEQKSKNEPEDTEDKEGCQMDKEPSAVKKKPKPTNPVEIKEELKSTSPASEKADPGAVKDKASPEPEKDFSEKAKPSPHPIKDKLKGKDETDSPTVHLGLDSDSESELVIDLGEDHSGREGRKNKKEPKEPSPKQDVVGKTPPSTTVGSHSPPETPVLTRSSAQTSAAGATATTSTSSTVTVTAPAPAATGSPVKKQRPLLPKETAPAVQRVVWNSSSKFQTSSQKWHMQKMQRQQQQQQQQNQQQQPQSSQGTRYQTRQAVKAVQQKEITQSPSTSTITLVTSTQSSPLVTSSGSMSTLVSSVNADLPIATASADVAADIAKYTSKMMDAIKGTMTEIYNDLSKNTTGSTIAEIRRLRIEIEKLQWLHQQELSEMKHNLELTMAEMRQSLEQERDRLIAEVKKQLELEKQQAVDETKKKQWCANCKKEAIFYCCWNTSYCDYPCQQAHWPEHMKSCTQSATAPQQEADAEVNTETLNKSSQGSSSSTQSAPSETASASKEKETSAEKSKESGSTLDLSGSRETPSSILLGSNQGSDHSRSNKSSWSSSDEKRGSTRSDHNTSTSTKSLLPKESRLDTFWD

SEQ ID NO: 27750 - protein, 55 aa, Artificial Sequence
  Synthetic polypeptide
SQHFGRPRRADHKILALQREQPRKESSPALHILPMATRRRTHQQAPLKRKRNLAY

SEQ ID NO: 27751 - protein, 55 aa, Artificial Sequence
  Synthetic polypeptide
PGTVAHACNPSTLGGRGGRITRSWLCRENSPEKKVPQPSTFFQWPLAAGHINKPH

SEQ ID NO: 27752 - protein, 1129 aa, Artificial Sequence
  Synthetic polypeptide
GRALWLMPVIPALWEAEAGGSQDPGSAERTAQKRKFPSPPHSSNGHSPQDTSTSPIKKKKKPGLLNSNNKEQDGRNDFYCWVCHREGQVLCCELCPRVYHAKCLRLTSEPEGDWFCPECEKITVAECIETQSKAMTMLTIEQLSYLLKFAIQKMKQPGTDAFQKPVPLEQHPDYAEYIFHPMDLCTLEKNAKKKMYGCTEAFLADAKWILHNCIIYNGGNHKLTQIAKVVIKICEHEMNEIEVCPECYLAACQKRDNWFCEPCSNPHPLVWAKLKGFPFWPAKALRDKDGQVDARFFGQHDRAWVPINNCYLMSKEIPFSVKKTKSIFNSAMQEMEVYVENIRRKFGVFNYSPFRTPYTPNSQYQMLLDPTNPSAGTAKIDKQEKVKLNFDMTASPKILMSKPVLSGGTGRRISLSDMPRSPMSTNSSVHTGSDVEQDAEKKATSSHFSASEESMDFLDKSTASPASTKTGQAGSLSGSPKPFSPQLSAPITTKTDKTSTTGSILNLNLDRSKAEMDLKELSESVQQQSTPVPLISPKRQIRSRFQLNLDKTIESCKAQLGINEISEDVYTAVEHSDSEDSEKSDSSDSEYISDDEQKSKNEPEDTEDKEGCQMDKEPSAVKKKPKPTNPVEIKEELKSTSPASEKADPGAVKDKASPEPEKDFSEKAKPSPHPIKDKLKGKDETDSPTVHLGLDSDSESELVIDLGEDHSGREGRKNKKEPKEPSPKQDVVGKTPPSTTVGSHSPPETPVLTRSSAQTSAAGATATTSTSSTVTVTAPAPAATGSPVKKQRPLLPKETAPAVQRVVWNSSTVQQKEITQSPSTSTITLVTSTQSSPLVTSSGSMSTLVSSVNADLPIATASADVAADIAKYTSKMMDAIKGTMTEIYNDLSKNTTGSTIAEIRRLRIEIEKLQWLHQQELSEMKHNLELTMAEMRQSLEQERDRLIAEVKKQLELEKQQAVDETKKKQWCANCKKEAIFYCCWNTSYCDYPCQQAHWPEHMKSCTQSATAPQQEADAEVNTETLNKSSQGSSSSTQSAPSETASASKEKETSAEKSKESGSTLDLSGSRETPSSILLGSNQGSDHSRSNKSSWSSSDEKRGSTRSDHNTSTSTKSLLPKESRLDTFWD

SEQ ID NO: 27753 - protein, 1048 aa, Artificial Sequence
  Synthetic polypeptide
GRALWLMPVIPALWEAEAGGSQDPGSAERTAQKRKFPSPPHSSNGHSPQDTSTSPIKKKKKPGLLNSNNKEQDGRNDFYCWVCHREGQVLCCELCPRVYHAKCLRLTSEPEGDWFCPECEKITVAECIETQSKAMTMLTIEQLSYLLKFAIQKMKQPGTDAFQKPVPLEQHPDYAEYIFHPMDLCTLEKNAKKKMYGCTEAFLADAKWILHNCIIYNGGNHKLTQIAKVVIKICEHEMNEIEVCPECYLAACQKRDNWFCEPCSNPHPLVWAKLKGFPFWPAKALRDKDGQVDARFFGQHDRAWVPINNCYLMSKEIPFSVKKTKSIFNSAMQEMEVYVENIRRKFGVFNYSPFRTPYTPNSQYQMLLDPTNPSAGTAKIDKQEKVKLNFDMTASPKILMSKPVLSGGTGRRISLSDMPRSPMSTNSSVHTGSDVEQDAEKKATSSHFSASEESMDFLDKSTASPASTKTGQAGSLSGSPKPFSPQLSAPITTKTDKTSTTGSILNLNLDRSKAEMDLKELSESVQQQSTPVPLISPKRQIRSRFQLNLDKTIESCKAQLGINEISEDVYTAVEHSDSEDSEKSDSSDSEYISDDEQKSKNEPEDTEDKEGCQMDKEPSAVKKKPKPTNPVEIKEELKSTSPASEKADPGAVKDKASPEPEKDFSEKAKPSPHPIKDKLKGKDETDSPTVHLGLDSDSESELVIDLGEDHSGREGRKNKKEPKEPSPKQDAVQQKEITQSPSTSTITLVTSTQSSPLVTSSGSMSTLVSSVNADLPIATASADVAADIAKYTSKMMDAIKGTMTEIYNDLSKNTTGSTIAEIRRLRIEIEKLQWLHQQELSEMKHNLELTMAEMRQSLEQERDRLIAEVKKQLELEKQQAVDETKKKQWCANCKKEAIFYCCWNTSYCDYPCQQAHWPEHMKSCTQSATAPQQEADAEVNTETLNKSSQGSSSSTQSAPSETASASKEKETSAEKSKESGSTLDLSGSRETPSSILLGSNQGSDHSRSNKSSWSSSDEKRGSTRSDHNTSTSTKSLLPKESRLDTFWD

SEQ ID NO: 27754 - protein, 1182 aa, Artificial Sequence
  Synthetic polypeptide
GRALWLMPVIPALWEAEAGGSQDPGSAERTAQKRKFPSPPHSSNGHSPQDTSTSPIKKKKKPGLLNSNNKEQSELRHGPFYYMKQPLTTDPVDVVPQDGRNDFYCWVCHREGQVLCCELCPRVYHAKCLRLTSEPEGDWFCPECEKITVAECIETQSKAMTMLTIEQLSYLLKFAIQKMKQPGTDAFQKPVPLEQHPDYAEYIFHPMDLCTLEKNAKKKMYGCTEAFLADAKWILHNCIIYNGGNHKLTQIAKVVIKICEHEMNEIEVCPECYLAACQKRDNWFCEPCSNPHPLVWAKLKGFPFWPAKALRDKDGQVDARFFGQHDRAWVPINNCYLMSKEIPFSVKKTKSIFNSAMQEMEVYVENIRRKFGVFNYSPFRTPYTPNSQYQMLLDPTNPSAGTAKIDKQEKVKLNFDMTASPKILMSKPVLSGGTGRRISLSDMPRSPMSTNSSVHTGSDVEQDAEKKATSSHFSASEESMDFLDKSTASPASTKTGQAGSLSGSPKPFSPQLSAPITTKTDKTSTTGSILNLNLDRSKAEMDLKELSESVQQQSTPVPLISPKRQIRSRFQLNLDKTIESCKAQLGINEISEDVYTAVEHSDSEDSEKSDSSDSEYISDDEQKSKNEPEDTEDKEGCQMDKEPSAVKKKPKPTNPVEIKEELKSTSPASEKADPGAVKDKASPEPEKDFSEKAKPSPHPIKDKLKGKDETDSPTVHLGLDSDSESELVIDLGEDHSGREGRKNKKEPKEPSPKQDVVGKTPPSTTVGSHSPPETPVLTRSSAQTSAAGATATTSTSSTVTVTAPAPAATGSPVKKQRPLLPKETAPAVQRVVWNSSTVQQKEITQSPSTSTITLVTSTQSSPLVTSSGSMSTLVSSVNADLPIATASADVAADIAKYTSKMMDAIKGTMTEIYNDLSKNTTGSTIAEIRRLRIEIEKLQWLHQQELSEMKHNLELTMAEMRQSLEQERDRLIAEVKKQLELEKQQAVDETKKKQWCANCKKEAIFYCCWNTSYCDYPCQQAHWPEHMKSCTQSATAPQQEADAEVNTETLNKSSQGSSSSTQSAPSETASASKEKETSAEKSKESGSTLDLSGSRETPSSILLGSNQGSVSKRCDKQPAYAPTTTDHQPHPNYPAQKYHSRSNKSSWSSSDEKRGSTRSDHNTSTSTKSLLPKESRLDTFWD

SEQ ID NO: 27755 - protein, 1228 aa, Artificial Sequence
  Synthetic polypeptide
GRALWLMPVIPALWEAEAGGSQDPGSAERTAQKRKFPSPPHSSNGHSPQDTSTSPIKKKKKPGLLNSNNKEQSELRHGPFYYMKQPLTTDPVDVVPQDGRNDFYCWVCHREGQVLCCELCPRVYHAKCLRLTSEPEGDWFCPECEKITVAECIETQSKAMTMLTIEQLSYLLKFAIQKMKQPGTDAFQKPVPLEQHPDYAEYIFHPMDLCTLEKNAKKKMYGCTEAFLADAKWILHNCIIYNGGNHKLTQIAKVVIKICEHEMNEIEVCPECYLAACQKRDNWFCEPCSNPHPLVWAKLKGFPFWPAKALRDKDGQVDARFFGQHDRAWVPINNCYLMSKEIPFSVKKTKSIFNSAMQEMEVYVENIRRKFGVFNYSPFRTPYTPNSQYQMLLDPTNPSAGTAKIDKQEKVKLNFDMTASPKILMSKPVLSGGTGRRISLSDMPRSPMSTNSSVHTGSDVEQDAEKKATSSHFSASEESMDFLDKSTASPASTKTGQAGSLSGSPKPFSPQLSAPITTKTDKTSTTGSILNLNLDRSKAEMDLKELSESVQQQSTPVPLISPKRQIRSRFQLNLDKTIESCKAQLGINEISEDVYTAVEHSDSEDSEKSDSSDSEYISDDEQKSKNEPEDTEDKEGCQMDKEPSAVKKKPKPTNPVEIKEELKSTSPASEKADPGAVKDKASPEPEKDFSEKAKPSPHPIKDKLKGKDETDSPTVHLGLDSDSESELVIDLGEDHSGREGRKNKKEPKEPSPKQDVVGKTPPSTTVGSHSPPETPVLTRSSAQTSAAGATATTSTSSTVTVTAPAPAATGSPVKKQRPLLPKETAPAVQRVVWNSSSKFQTSSQKWHMQKMQRQQQQQQQQNQQQQPQSSQGTRYQTRQAVKAVQQKEITQSPSTSTITLVTSTQSSPLVTSSGSMSTLVSSVNADLPIATASADVAADIAKYTSKMMDAIKGTMTEIYNDLSKNTTGSTIAEIRRLRIEIEKLQWLHQQELSEMKHNLELTMAEMRQSLEQERDRLIAEVKKQLELEKQQAVDETKKKQWCANCKKEAIFYCCWNTSYCDYPCQQAHWPEHMKSCTQSATAPQQEADAEVNTETLNKSSQGSSSSTQSAPSETASASKEKETSAEKSKESGSTLDLSGSRETPSSILLGSNQGSVSKRCDKQPAYAPTTTDHQPHPNYPAQKYHSRSNKSSWSSSDEKRGSTRSDHNTSTSTKSLLPKESRLDTFWD

SEQ ID NO: 27756 - protein, 1154 aa, Artificial Sequence
  Synthetic polypeptide
GRALWLMPVIPALWEAEAGGSQDPGSAERTAQKRKFPSPPHSSNGHSPQDTSTSPIKKKKKPGLLNSNNKEQSELRHGPFYYMKQPLTTDPVDVVPQDGRNDFYCWVCHREGQVLCCELCPRVYHAKCLRLTSEPEGDWFCPECEKITVAECIETQSKAMTMLTIEQLSYLLKFAIQKMKQPGTDAFQKPVPLEQHPDYAEYIFHPMDLCTLEKNAKKKMYGCTEAFLADAKWILHNCIIYNGGNHKLTQIAKVVIKICEHEMNEIEVCPECYLAACQKRDNWFCEPCSNPHPLVWAKLKGFPFWPAKALRDKDGQVDARFFGQHDRAWVPINNCYLMSKEIPFSVKKTKSIFNSAMQEMEVYVENIRRKFGVFNYSPFRTPYTPNSQYQMLLDPTNPSAGTAKIDKQEKVKLNFDMTASPKILMSKPVLSGGTGRRISLSDMPRSPMSTNSSVHTGSDVEQDAEKKATSSHFSASEESMDFLDKSTASPASTKTGQAGSLSGSPKPFSPQLSAPITTKTDKTSTTGSILNLNLDRSKAEMDLKELSESVQQQSTPVPLISPKRQIRSRFQLNLDKTIESCKAQLGINEISEDVYTAVEHSDSEDSEKSDSSDSEYISDDEQKSKNEPEDTEDKEGCQMDKEPSAVKKKPKPTNPVEIKEELKSTSPASEKADPGAVKDKASPEPEKDFSEKAKPSPHPIKDKLKGKDETDSPTVHLGLDSDSESELVIDLGEDHSGREGRKNKKEPKEPSPKQDVVGKTPPSTTVGSHSPPETPVLTRSSAQTSAAGATATTSTSSTVTVTAPAPAATGSPVKKQRPLLPKETAPAVQRVVWNSSTVQQKEITQSPSTSTITLVTSTQSSPLVTSSGSMSTLVSSVNADLPIATASADVAADIAKYTSKMMDAIKGTMTEIYNDLSKNTTGSTIAEIRRLRIEIEKLQWLHQQELSEMKHNLELTMAEMRQSLEQERDRLIAEVKKQLELEKQQAVDETKKKQWCANCKKEAIFYCCWNTSYCDYPCQQAHWPEHMKSCTQSATAPQQEADAEVNTETLNKSSQGSSSSTQSAPSETASASKEKETSAEKSKESGSTLDLSGSRETPSSILLGSNQGSDHSRSNKSSWSSSDEKRGSTRSDHNTSTSTKSLLPKESRLDTFWD

SEQ ID NO: 27757 - protein, 1175 aa, Artificial Sequence
  Synthetic polypeptide
GRALWLMPVIPALWEAEAGGSQDPGSAERTAQKRKFPSPPHSSNGHSPQDTSTSPIKKKKKPGLLNSNNKEQDGRNDFYCWVCHREGQVLCCELCPRVYHAKCLRLTSEPEGDWFCPECEKITVAECIETQSKAMTMLTIEQLSYLLKFAIQKMKQPGTDAFQKPVPLEQHPDYAEYIFHPMDLCTLEKNAKKKMYGCTEAFLADAKWILHNCIIYNGGNHKLTQIAKVVIKICEHEMNEIEVCPECYLAACQKRDNWFCEPCSNPHPLVWAKLKGFPFWPAKALRDKDGQVDARFFGQHDRAWVPINNCYLMSKEIPFSVKKTKSIFNSAMQEMEVYVENIRRKFGVFNYSPFRTPYTPNSQYQMLLDPTNPSAGTAKIDKQEKVKLNFDMTASPKILMSKPVLSGGTGRRISLSDMPRSPMSTNSSVHTGSDVEQDAEKKATSSHFSASEESMDFLDKSTASPASTKTGQAGSLSGSPKPFSPQLSAPITTKTDKTSTTGSILNLNLDRSKAEMDLKELSESVQQQSTPVPLISPKRQIRSRFQLNLDKTIESCKAQLGINEISEDVYTAVEHSDSEDSEKSDSSDSEYISDDEQKSKNEPEDTEDKEGCQMDKEPSAVKKKPKPTNPVEIKEELKSTSPASEKADPGAVKDKASPEPEKDFSEKAKPSPHPIKDKLKGKDETDSPTVHLGLDSDSESELVIDLGEDHSGREGRKNKKEPKEPSPKQDVVGKTPPSTTVGSHSPPETPVLTRSSAQTSAAGATATTSTSSTVTVTAPAPAATGSPVKKQRPLLPKETAPAVQRVVWNSSSKFQTSSQKWHMQKMQRQQQQQQQQNQQQQPQSSQGTRYQTRQAVKAVQQKEITQSPSTSTITLVTSTQSSPLVTSSGSMSTLVSSVNADLPIATASADVAADIAKYTSKMMDAIKGTMTEIYNDLSKNTTGSTIAEIRRLRIEIEKLQWLHQQELSEMKHNLELTMAEMRQSLEQERDRLIAEVKKQLELEKQQAVDETKKKQWCANCKKEAIFYCCWNTSYCDYPCQQAHWPEHMKSCTQSATAPQQEADAEVNTETLNKSSQGSSSSTQSAPSETASASKEKETSAEKSKESGSTLDLSGSRETPSSILLGSNQGSDHSRSNKSSWSSSDEKRGSTRSDHNTSTSTKSLLPKESRLDTFWD

SEQ ID NO: 27758 - protein, 1119 aa, Artificial Sequence
  Synthetic polypeptide
GRALWLMPVIPALWEAEAGGSQDPGSAERTAQKRKFPSPPHSSNGHSPQDTSTSPIKKKKKPGLLNSNNKEQDGRNDFYCWVCHREGQVLCCELCPRVYHAKCLRLTSEPEGDWFCPECETDAFQKPVPLEQHPDYAEYIFHPMDLCTLEKNAKKKMYGCTEAFLADAKWILHNCIIYNGGNHKLTQIAKVVIKICEHEMNEIEVCPECYLAACQKRDNWFCEPCSNPHPLVWAKLKGFPFWPAKALRDKDGQVDARFFGQHDRAWVPINNCYLMSKEIPFSVKKTKSIFNSAMQEMEVYVENIRRKFGVFNYSPFRTPYTPNSQYQMLLDPTNPSAGTAKIDKQEKVKLNFDMTASPKILMSKPVLSGGTGRRISLSDMPRSPMSTNSSVHTGSDVEQDAEKKATSSHFSASEESMDFLDKSTASPASTKTGQAGSLSGSPKPFSPQLSAPITTKTDKTSTTGSILNLNLDRSKAEMDLKELSESVQQQSTPVPLISPKRQIRSRFQLNLDKTIESCKAQLGINEISEDVYTAVEHSDSEDSEKSDSSDSEYISDDEQKSKNEPEDTEDKEGCQMDKEPSAVKKKPKPTNPVEIKEELKSTSPASEKADPGAVKDKASPEPEKDFSEKAKPSPHPIKDKLKGKDETDSPTVHLGLDSDSESELVIDLGEDHSGREGRKNKKEPKEPSPKQDVVGKTPPSTTVGSHSPPETPVLTRSSAQTSAAGATATTSTSSTVTVTAPAPAATGSPVKKQRPLLPKETAPAVQRVVWNSSTVQQKEITQSPSTSTITLVTSTQSSPLVTSSGSMSTLVSSVNADLPIATASADVAADIAKYTSKMMDAIKGTMTEIYNDLSKNTTGSTIAEIRRLRIEIEKLQWLHQQELSEMKHNLELTMAEMRQSLEQERDRLIAEVKKQLELEKQQAVDETKKKQWCANCKKEAIFYCCWNTSYCDYPCQQAHWPEHMKSCTQSATAPQQEADAEVNTETLNKSSQGSSSSTQSAPSETASASKEKETSAEKSKESGSTLDLSGSRETPSSILLGSNQGSVSKRCDKQPAYAPTTTDHQPHPNYPAQKYHSRSNKSSWSSSDEKRGSTRSDHNTSTSTKSLLPKESRLDTFWD

SEQ ID NO: 27759 - protein, 1130 aa, Artificial Sequence
  Synthetic polypeptide
GRALWLMPVIPALWEAEAGGSQDPGSAERTAQKRKFPSPPHSSNGHSPQDTSTSPIKKKKKPGLLNSNNKEQDGRNDFYCWVCHREGQVLCCELCPRVYHAKCLRLTSEPEGDWFCPECEKITVAECIETQSKAMTMLTIEQLSYLLKFAIQKMKQPGTDAFQKPVPLEQHPDYAEYIFHPMDLCTLEKNAKKKMYGCTEAFLADAKWILHNCIIYNGGNHKLTQIAKVVIKICEHEMNEIEVCPECYLAACQKRDNWFCEPCSNPHPLVWAKLKGFPFWPAKALRDKDGQVDARFFGQHDRAWVPINNCYLMSKEIPFSVKKTKSIFNSAMQEMEVYVENIRRKFGVFNYSPFRTPYTPNSQYQMLLDPTNPSAGTAKIDKQEKVKLNFDMTASPKILMSKPVLSGGTGRRISLSDMPRSPMSTNSSVHTGSDVEQDAEKKATSSHFSASEESMDFLDKSTASPASTKTGQAGSLSGSPKPFSPQLSAPITTKTDKTSTTGSILNLNLDRSKAEMDLKELSESVQQQSTPVPLISPKRQIRSRFQLNLDKTIESCKAQLGINEISEDVYTAVEHSDSEDSEKSDSSDSEYISDDEQKSKNEPEDTEDKEGCQMDKEPSAVKKKPKPTNPVEIKEELKSTSPASEKADPGAVKDKASPEPEKDFSEKAKPSPHPIKDKLKGKDETDSPTVHLGLDSDSESELVIDLGEDHSGREGRKNKKEPKEPSPKQDVVGKTPPSTTVGSHSPPETPVLTRSSAQTSAAGATATTSTSSTVTVTAPAPAATGSPVKKQRPLLPKETAPAVQRVVWNSSTVQQKEITQSPSTSTITLVTSTQSSPLVTSSGSMSTLVSSVNADLPIATASADVAADIAKYTSKIRRLRIEIEKLQWLHQQELSEMKHNLELTMAEMRQSLEQERDRLIAEVKKQLELEKQQAVDETKKKQWCANCKKEAIFYCCWNTSYCDYPCQQAHWPEHMKSCTQSATAPQQEADAEVNTETLNKSSQGSSSSTQSAPSETASASKEKETSAEKSKESGSTLDLSGSRETPSSILLGSNQGSVSKRCDKQPAYAPTTTDHQPHPNYPAQKYHSRSNKSSWSSSDEKRGSTRSDHNTSTSTKSLLPKESRLDTFWD

SEQ ID NO: 27760 - protein, 1128 aa, Artificial Sequence
  Synthetic polypeptide
GRALWLMPVIPALWEAEAGGSQDPGSAERTAQKRKFPSPPHSSNGHSPQDTSTSPIKKKKKPGLLNSNNKEQDGRNDFYCWVCHREGQVLCCELCPRVYHAKCLRLTSEPEGDWFCPECEKITVAECIETQSKAMTMLTIEQLSYLLKFAIQKMKQPGTDAFQKPVPLEQHPDYAEYIFHPMDLCTLEKNAKKKMYGCTEAFLADAKWILHNCIIYNGGNHKLTQIAKVVIKICEHEMNEIEVCPECYLAACQKRDNWFCEPCSNPHPLVWAKLKGFPFWPAKALRDKDGQVDARFFGQHDRAWVPINNCYLMSKEIPFSVKKTKSIFNSAMQEMEVYVENIRRKFGVFNYSPFRTPYTPNSQYQMLLDPTNPSAGTAKIDKQEKVKLNFDMTASPKILMSKPVLSGGTGRRISLSDMPRSPMSTNSSVHTGSDVEQDAEKKATSSHFSASEESMDFLDKSTDRSKAEMDLKELSESVQQQSTPVPLISPKRQIRSRFQLNLDKTIESCKAQLGINEISEDVYTAVEHSDSEDSEKSDSSDSEYISDDEQKSKNEPEDTEDKEGCQMDKEPSAVKKKPKPTNPVEIKEELKSTSPASEKADPGAVKDKASPEPEKDFSEKAKPSPHPIKDKLKGKDETDSPTVHLGLDSDSESELVIDLGEDHSGREGRKNKKEPKEPSPKQDVVGKTPPSTTVGSHSPPETPVLTRSSAQTSAAGATATTSTSSTVTVTAPAPAATGSPVKKQRPLLPKETAPAVQRVVWNSSSKFQTSSQKWHMQKMQRQQQQQQQQNQQQQPQSSQGTRYQTRQAVKAVQQKEITQSPSTSTITLVTSTQSSPLVTSSGSMSTLVSSVNADLPIATASADVAADIAKYTSKMMDAIKGTMTEIYNDLSKNTTGSTIAEIRRLRIEIEKLQWLHQQELSEMKHNLELTMAEMRQSLEQERDRLIAEVKKQLELEKQQAVDETKKKQWCANCKKEAIFYCCWNTSYCDYPCQQAHWPEHMKSCTQSATAPQQEADAEVNTETLNKSSQGSSSSTQSAPSETASASKEKETSAEKSKESGSTLDLSGSRETPSSILLGSNQGSDHSRSNKSSWSSSDEKRGSTRSDHNTSTSTKSLLPKESRLDTFWD

SEQ ID NO: 27761 - protein, 189 aa, Artificial Sequence
  Synthetic polypeptide
GRALWLMPVIPALWEAEAGGSQDPGSAERTAQKRKFPSPPHSSNGHSPQDTSTSPIKKKKKPGLLNSNNKEQDGRNDFYCWVCHREGQVLCCELCPRVYHAKCLRLTSEPEGDWFCPECEKITVAECIETQSKAMTMLTIEQLSYLLKFAIQKMKQPGTDAFQKPVPLEQHPDYAEYIFHPMDLCTLEK

SEQ ID NO: 27762 - protein, 56 aa, Artificial Sequence
  Synthetic polypeptide
GRALWLMPVIPALWEAEAGGSQDPGSAERTAQKRKFPSPPHSSNGHSPQDTSTSPI

SEQ ID NO: 27763 - protein, 47 aa, Artificial Sequence
  Synthetic polypeptide
SQHFGRPRRADHKILALQREQPRKESSPALHILPMATRRRTHQQAPL

SEQ ID NO: 27764 - protein, 38 aa, Artificial Sequence
  Synthetic polypeptide
GRALWLMPVIPALWEAEAGGSQDPGSAERTAQKRKFPS

SEQ ID NO: 27765 - protein, 29 aa, Artificial Sequence
  Synthetic polypeptide
SQHFGRPRRADHKILALQREQPRKESSPA

SEQ ID NO: 27766 - protein, 37 aa, Artificial Sequence
  Synthetic polypeptide
PGTVAHACNPSTLGGRGGRITRSWLCRENSPEKKVPQ

SEQ ID NO: 27767 - protein, 57 aa, Artificial Sequence
  Synthetic polypeptide
GRVWCLTHACDPSILGSRGGRIMRSWLCRENSPEKKVPQPSTFFQWPLAAGHINKPH

SEQ ID NO: 27768 - protein, 55 aa, Artificial Sequence
  Synthetic polypeptide
SQHFGKPRWADHEILALQREQPRKESSPALHILPMATRRRTHQQAPLKRKRNLAY

SEQ ID NO: 27769 - protein, 47 aa, Artificial Sequence
  Synthetic polypeptide
SQHFGKPRWADHEILALQREQPRKESSPALHILPMATRRRTHQQAPL

SEQ ID NO: 27770 - protein, 39 aa, Artificial Sequence
  Synthetic polypeptide
GRVWCLTHACDPSILGSRGGRIMRSWLCRENSPEKKVPQ

SEQ ID NO: 27771 - protein, 29 aa, Artificial Sequence
  Synthetic polypeptide
SQHFGKPRWADHEILALQREQPRKESSPA

SEQ ID NO: 27772 - protein, 5 aa, Artificial Sequence
  Synthetic polypeptide
WGQRV

SEQ ID NO: 27773 - protein, 306 aa, Artificial Sequence
  Synthetic polypeptide
GAREFKQKEECTIRGRSLIQISIQEDPWNLPNSIKTLVDNIQRYVEDGKNQLLLALLKCTDTELQLRRDAIFCQALVAAVCTFSKQLLAALGYRYNNNGEYEESSRDASRKWLEQVAATGVLLHCQSLLSPATVKEERTMLEDIWVTLSELDNVTFSFKQLDENYVANTNVFYHIEGSRQALKVIFYLDSYHFSKLPSRLEGGASLRLHTALFTKGELQAWGREDHGGRAKATKHTGSQPPARPRHLPSQCWRTWRGCLLQAARPRRICSRTSTRSPWRKFSSITANSGHFTWSGLTCPRMPAPRR

SEQ ID NO: 27774 - protein, 17 aa, Artificial Sequence
  Synthetic polypeptide
GPESLNRKKSVQSVAGA

SEQ ID NO: 27775 - protein, 404 aa, Artificial Sequence
  Synthetic polypeptide
GAREFKQKEECTIRGRSLIQISIQEDPWNLPNSIKTLVDNIQRYVEDGKNQLLLALLKCTDTELQLRRDAIFCQALVAAVCTFSKQLLAALGYRYNNNGEYEESSRDASRKWLEQVAATGVLLHCQSLLSPATVKEERTMLEDIWVTLSELDNVTFSFKQLDENYVANTNVFYHIEGSRQALKVIFYLDSYHFSKLPSRLEGGASLRLHTALFTKVLENVEGLPSPGSQAAEDLQQDINAQSLEKVQQYYRKLRAFYLERSNLPTDASTTAVKIDQLIRPINALDELCRLMKSFVHPKPGAAGSVGAGLIPISSELCYRLGACQMVMCGTGMQRSTLSVSLEQAAILARSHGLLPKCIMQATDIMRKQGPRVEILAKNLRVKDQMPQGAPRLYRLCQPPVDGDL

SEQ ID NO: 27776 - protein, 1109 aa, Artificial Sequence
  Synthetic polypeptide
AIFLFLEHSSEPLHLQFPLPGCPACLIPAVLEKSEFRDESQYFRFHADEEMEGTSSKNKQLRNDFKLVENILAKRLLILPQEEDYGFDIEEKNKAVVVKSVQRGSLAEVAGLQVGRKIYSINEDLVFLRPFSEVESILNQSFCSRRPLRLLVATKAKEIIKIPDQPDTLCFQIRGAAPPYVYAVGRGSEAMAAGLCAGQCILKVNGSNVMNDGAPEVLEHFQAFRSRREEALGLYQWIYHTHEDAQEARASQEASTEDPSGEQAQEEDQADSAFPLLSLGPRLSLCEDSPMVTLTVDNVHLEHGVVYEYVSTAGVRCHVLEKIVEPRGCFGLTAKILEAFAANDSVFVENCRRLMALSSAIVTMPHFEFRNICDTKLESIGQRIACYQEFAAQLKSRVSPPFKQAPLEPHPLCGLDFCPTNCHINLMEVSYPKTTPSVGRSFSIRFGRKPSLIGLDPEQGHLNPMSYTQHCITTMAAPSWKCLPAAEGDPQGQGLHDGSFGPASGTLGQEDRGLSFLLKQEDREIQDAYLQLFTKLDVALKEMKQYVTQINRLLSTITEPTSGGSCDASLAEEASSLPLVSEESEMDRSDHGGIKKVCFKVAEEDQEDSGHDTMSYRDSYSECNSNRDSVLSYTSVRSNSSYLGSDEMGSGDELPCDMRIPSDKQDKLHGCLEHLFNQVDSINALLKGPVMSRAFEETKHFPMNHSLQEFKQKEECTIRGRSLIQISIQEDPWNLPNSIKTLVDNIQRYVEDGKNQLLLALLKCTDTELQLRRDAIFCQALVAAVCTFSKQLLAALGYRYNNNGEYEESSRDASRKWLEQVAATGVLLHCQSLLSPATVKEERTMLEDIWVTLSELDNVTFSFKQLDENYVANTNVFYHIEGSRQALKVIFYLDSYHFSKLPSRLEGGASLRLHTALFTKVLENVEGLPSPGSQAAEDLQQDINAQSLEKVQQYYRKLRAFYLERSNLPTDASTTAVKIDQLIRPINALDELCRLMKSFVHPKPGAAGSVGAGLIPISSELCYRLGACQMVMCGTGMQRSTLSVSLEQAAILARSHGLLPKCIMQATDIMRKQGPRVEILAKNLRVKDQMPQGAPRLYRLCQPPVDGDL

SEQ ID NO: 27777 - protein, 70 aa, Artificial Sequence
  Synthetic polypeptide
NIPQSLCTCSFPCQGALPASSLQCWRRASSGMSPSTSAFMLTRRWRGPAARTNSFATTSSWWRTFWPSAC

SEQ ID NO: 27778 - protein, 37 aa, Artificial Sequence
  Synthetic polypeptide
HFPVSRTFLRAFALAVSLARVPCLPHPCSAGEERVQG

SEQ ID NO: 27779 - protein, 1011 aa, Artificial Sequence
  Synthetic polypeptide
AIFLFLEHSSEPLHLQFPLPGCPACLIPAVLEKSEFRDESQYFRFHADEEMEGTSSKNKQLRNDFKLVENILAKRLLILPQEEDYGFDIEEKNKAVVVKSVQRGSLAEVAGLQVGRKIYSINEDLVFLRPFSEVESILNQSFCSRRPLRLLVATKAKEIIKIPDQPDTLCFQIRGAAPPYVYAVGRGSEAMAAGLCAGQCILKVNGSNVMNDGAPEVLEHFQAFRSRREEALGLYQWIYHTHEDAQEARASQEASTEDPSGEQAQEEDQADSAFPLLSLGPRLSLCEDSPMVTLTVDNVHLEHGVVYEYVSTAGVRCHVLEKIVEPRGCFGLTAKILEAFAANDSVFVENCRRLMALSSAIVTMPHFEFRNICDTKLESIGQRIACYQEFAAQLKSRVSPPFKQAPLEPHPLCGLDFCPTNCHINLMEVSYPKTTPSVGRSFSIRFGRKPSLIGLDPEQGHLNPMSYTQHCITTMAAPSWKCLPAAEGDPQGQGLHDGSFGPASGTLGQEDRGLSFLLKQEDREIQDAYLQLFTKLDVALKEMKQYVTQINRLLSTITEPTSGGSCDASLAEEASSLPLVSEESEMDRSDHGGIKKVCFKVAEEDQEDSGHDTMSYRDSYSECNSNRDSVLSYTSVRSNSSYLGSDEMGSGDELPCDMRIPSDKQDKLHGCLEHLFNQVDSINALLKGPVMSRAFEETKHFPMNHSLQEFKQKEECTIRGRSLIQISIQEDPWNLPNSIKTLVDNIQRYVEDGKNQLLLALLKCTDTELQLRRDAIFCQALVAAVCTFSKQLLAALGYRYNNNGEYEESSRDASRKWLEQVAATGVLLHCQSLLSPATVKEERTMLEDIWVTLSELDNVTFSFKQLDENYVANTNVFYHIEGSRQALKVIFYLDSYHFSKLPSRLEGGASLRLHTALFTKGELQAWGREDHGGRAKATKHTGSQPPARPRHLPSQCWRTWRGCLLQAARPRRICSRTSTRSPWRKFSSITANSGHFTWSGLTCPRMPAPRR

SEQ ID NO: 27780 - protein, 70 aa, Artificial Sequence
  Synthetic polypeptide
GLLSHVELHSCIASGRTWPTQWRRASRRRMSRSCSRTSKTSWKFIRISWPPWSIVYTRSRSLSMNLGMFS

SEQ ID NO: 27781 - protein, 56 aa, Artificial Sequence
  Synthetic polypeptide
LYFSFAFCLDCEASSAMWNCIPASHPAERGRLSGEGPHGGECQGPVLEHRRHPGSS

SEQ ID NO: 27782 - protein, 1626 aa, Artificial Sequence
  Synthetic polypeptide
WFYKGEFPYTSSLACRHVRHNFTSHLPSALIVRPPQPCGTAFLHRIRQNVADSVEKGLTEENVKVLFSNIEDILEVHKDFLAALEYCLHPEPQSQHELGNVFLKFKDKFCVYEEYCSNHEKALRLLVELNKIPTVRAFLLSCMLLGGRKTTDIPLEGYLLSPIQRICKYPLLLKELAKRTPGKHPDHPAVQSALQAMKTVCSNINETKRQMEKLEALEQLQSHIEGWEGSNLTDICTQLLLQGTLLKISAGNIQERAFFLFDNLLVYCKRKSRVTGSKKSTKRTKSINGSLYIFRGRINTEVMEVENVEDGTADYHSNGYTVTNGWKIHNTAKNKWFVCMAKTAEEKQKWLDAIIREREQRESLKLGMERDAYVMIAEKGEKLYHMMMNKKVNLIKDRRRKLSTVPKCFLGNEFVAWLLEIGEISKTEEGVNLGQALLENGIIHHVSDKHQFKNEQVMYRFRYDDGTYKARSELEDIMSKGVRLYCRLHSLYTPVIKDRDYHLKTYKSVLPGSKLVDWLLAQGDCQTREEAVALGVGLCNNGFMHHVLEKSEFRDESQYFRFHADEEMEGTSSKNKQLRNDFKLVENILAKRLLILPQEEDYGFDIEEKNKAVVVKSVQRGSLAEVAGLQVGRKIYSINEDLVFLRPFSEVESILNQSFCSRRPLRLLVATKAKEIIKIPDQPDTLCFQIRGAAPPYVYAVGRGSEAMAAGLCAGQCILKVNGSNVMNDGAPEVLEHFQAFRSRREEALGLYQWIYHTHEDAQEARASQEASTEDPSGEQAQEEDQADSAFPLLSLGPRLSLCEDSPMVTLTVDNVHLEHGVVYEYVSTAGVRCHVLEKIVEPRGCFGLTAKILEAFAANDSVFVENCRRLMALSSAIVTMPHFEFRNICDTKLESIGQRIACYQEFAAQLKSRVSPPFKQAPLEPHPLCGLDFCPTNCHINLMEVSYPKTTPSVGRSFSIRFGRKPSLIGLDPEQGHLNPMSYTQHCITTMAAPSWKCLPAAEGDPQGQGLHDGSFGPASGTLGQEDRGLSFLLKQEDREIQDAYLQLFTKLDVALKEMKQYVTQINRLLSTITEPTSGGSCDASLAEEASSLPLVSEESEMDRSDHGGIKKVCFKVAEEDQEDSGHDTMSYRDSYSECNSNRDSVLSYTSVRSNSSYLGSDEMGSGDELPCDMRIPSDKQDKLHGCLEHLFNQVDSINALLKGPVMSRAFEETKHFPMNHSLQEFKQKEECTIRGRSLIQISIQEDPWNLPNSIKTLVDNIQRYVEDGKNQLLLALLKCTDTELQLRRDAIFCQALVAAVCTFSKQLLAALGYRYNNNGEYEESSRDASRKWLEQVAATGVLLHCQSLLSPATVKEERTMLEDIWVTLSELDNVTFSFKQLDENYVANTNVFYHIEGSRQALKVIFYLDSYHFSKLPSRLEGGASLRLHTALFTKVLENVEGLPSPGSQAAEDLQQDINAQSLEKVQQYYRKLRAFYLERSNLPTDASTTAVKIDQLIRPINALDELCRLMKSFVHPKPGAAGSVGAGLIPISSELCYRLGACQMVMCGTGMQRSTLSVSLEQAAILARSHGLLPKCIMQATDIMRKQGPRVEILAKNLRVKDQMPQGAPRLYRLCQPPVDGDL

SEQ ID NO: 27783 - protein, 1528 aa, Artificial Sequence
  Synthetic polypeptide
WFYKGEFPYTSSLACRHVRHNFTSHLPSALIVRPPQPCGTAFLHRIRQNVADSVEKGLTEENVKVLFSNIEDILEVHKDFLAALEYCLHPEPQSQHELGNVFLKFKDKFCVYEEYCSNHEKALRLLVELNKIPTVRAFLLSCMLLGGRKTTDIPLEGYLLSPIQRICKYPLLLKELAKRTPGKHPDHPAVQSALQAMKTVCSNINETKRQMEKLEALEQLQSHIEGWEGSNLTDICTQLLLQGTLLKISAGNIQERAFFLFDNLLVYCKRKSRVTGSKKSTKRTKSINGSLYIFRGRINTEVMEVENVEDGTADYHSNGYTVTNGWKIHNTAKNKWFVCMAKTAEEKQKWLDAIIREREQRESLKLGMERDAYVMIAEKGEKLYHMMMNKKVNLIKDRRRKLSTVPKCFLGNEFVAWLLEIGEISKTEEGVNLGQALLENGIIHHVSDKHQFKNEQVMYRFRYDDGTYKARSELEDIMSKGVRLYCRLHSLYTPVIKDRDYHLKTYKSVLPGSKLVDWLLAQGDCQTREEAVALGVGLCNNGFMHHVLEKSEFRDESQYFRFHADEEMEGTSSKNKQLRNDFKLVENILAKRLLILPQEEDYGFDIEEKNKAVVVKSVQRGSLAEVAGLQVGRKIYSINEDLVFLRPFSEVESILNQSFCSRRPLRLLVATKAKEIIKIPDQPDTLCFQIRGAAPPYVYAVGRGSEAMAAGLCAGQCILKVNGSNVMNDGAPEVLEHFQAFRSRREEALGLYQWIYHTHEDAQEARASQEASTEDPSGEQAQEEDQADSAFPLLSLGPRLSLCEDSPMVTLTVDNVHLEHGVVYEYVSTAGVRCHVLEKIVEPRGCFGLTAKILEAFAANDSVFVENCRRLMALSSAIVTMPHFEFRNICDTKLESIGQRIACYQEFAAQLKSRVSPPFKQAPLEPHPLCGLDFCPTNCHINLMEVSYPKTTPSVGRSFSIRFGRKPSLIGLDPEQGHLNPMSYTQHCITTMAAPSWKCLPAAEGDPQGQGLHDGSFGPASGTLGQEDRGLSFLLKQEDREIQDAYLQLFTKLDVALKEMKQYVTQINRLLSTITEPTSGGSCDASLAEEASSLPLVSEESEMDRSDHGGIKKVCFKVAEEDQEDSGHDTMSYRDSYSECNSNRDSVLSYTSVRSNSSYLGSDEMGSGDELPCDMRIPSDKQDKLHGCLEHLFNQVDSINALLKGPVMSRAFEETKHFPMNHSLQEFKQKEECTIRGRSLIQISIQEDPWNLPNSIKTLVDNIQRYVEDGKNQLLLALLKCTDTELQLRRDAIFCQALVAAVCTFSKQLLAALGYRYNNNGEYEESSRDASRKWLEQVAATGVLLHCQSLLSPATVKEERTMLEDIWVTLSELDNVTFSFKQLDENYVANTNVFYHIEGSRQALKVIFYLDSYHFSKLPSRLEGGASLRLHTALFTKGELQAWGREDHGGRAKATKHTGSQPPARPRHLPSQCWRTWRGCLLQAARPRRICSRTSTRSPWRKFSSITANSGHFTWSGLTCPRMPAPRR

SEQ ID NO: 27784 - protein, 83 aa, Artificial Sequence
  Synthetic polypeptide
ISLTRSDGFIRGFCFCFFPHSFLRPPCKKCFSPCTMILRNSPDMWNCIPASHPAERGRLSGEGPHGGECQGPVLEHRRHPGSS

SEQ ID NO: 27785 - protein, 1594 aa, Artificial Sequence
  Synthetic polypeptide
EIPQTCGTAFLHRIRQNVADSVEKGLTEENVKVLFSNIEDILEVHKDFLAALEYCLHPEPQSQHELGNVFLKFKDKFCVYEEYCSNHEKALRLLVELNKIPTVRAFLLSCMLLGGRKTTDIPLEGYLLSPIQRICKYPLLLKELAKRTPGKHPDHPAVQSALQAMKTVCSNINETKRQMEKLEALEQLQSHIEGWEGSNLTDICTQLLLQGTLLKISAGNIQERAFFLFDNLLVYCKRKSRVTGSKKSTKRTKSINGSLYIFRGRINTEVMEVENVEDGTADYHSNGYTVTNGWKIHNTAKNKWFVCMAKTAEEKQKWLDAIIREREQRESLKLGMERDAYVMIAEKGEKLYHMMMNKKVNLIKDRRRKLSTVPKCFLGNEFVAWLLEIGEISKTEEGVNLGQALLENGIIHHVSDKHQFKNEQVMYRFRYDDGTYKARSELEDIMSKGVRLYCRLHSLYTPVIKDRDYHLKTYKSVLPGSKLVDWLLAQGDCQTREEAVALGVGLCNNGFMHHVLEKSEFRDESQYFRFHADEEMEGTSSKNKQLRNDFKLVENILAKRLLILPQEEDYGFDIEEKNKAVVVKSVQRGSLAEVAGLQVGRKIYSINEDLVFLRPFSEVESILNQSFCSRRPLRLLVATKAKEIIKIPDQPDTLCFQIRGAAPPYVYAVGRGSEAMAAGLCAGQCILKVNGSNVMNDGAPEVLEHFQAFRSRREEALGLYQWIYHTHEDAQEARASQEASTEDPSGEQAQEEDQADSAFPLLSLGPRLSLCEDSPMVTLTVDNVHLEHGVVYEYVSTAGVRCHVLEKIVEPRGCFGLTAKILEAFAANDSVFVENCRRLMALSSAIVTMPHFEFRNICDTKLESIGQRIACYQEFAAQLKSRVSPPFKQAPLEPHPLCGLDFCPTNCHINLMEVSYPKTTPSVGRSFSIRFGRKPSLIGLDPEQGHLNPMSYTQHCITTMAAPSWKCLPAAEGDPQGQGLHDGSFGPASGTLGQEDRGLSFLLKQEDREIQDAYLQLFTKLDVALKEMKQYVTQINRLLSTITEPTSGGSCDASLAEEASSLPLVSEESEMDRSDHGGIKKVCFKVAEEDQEDSGHDTMSYRDSYSECNSNRDSVLSYTSVRSNSSYLGSDEMGSGDELPCDMRIPSDKQDKLHGCLEHLFNQVDSINALLKGPVMSRAFEETKHFPMNHSLQEFKQKEECTIRGRSLIQISIQEDPWNLPNSIKTLVDNIQRYVEDGKNQLLLALLKCTDTELQLRRDAIFCQALVAAVCTFSKQLLAALGYRYNNNGEYEESSRDASRKWLEQVAATGVLLHCQSLLSPATVKEERTMLEDIWVTLSELDNVTFSFKQLDENYVANTNVFYHIEGSRQALKVIFYLDSYHFSKLPSRLEGGASLRLHTALFTKVLENVEGLPSPGSQAAEDLQQDINAQSLEKVQQYYRKLRAFYLERSNLPTDASTTAVKIDQLIRPINALDELCRLMKSFVHPKPGAAGSVGAGLIPISSELCYRLGACQMVMCGTGMQRSTLSVSLEQAAILARSHGLLPKCIMQATDIMRKQGPRVEILAKNLRVKDQMPQGAPRLYRLCQPPVDGDL

SEQ ID NO: 27786 - protein, 81 aa, Artificial Sequence
  Synthetic polypeptide
EVLFALHNDSEKFPRHVELHSCIASGRTWPTQWRRASRRRMSRSCSRTSKTSWKFIRISWPPWSIVYTRSRSLSMNLGMFS

SEQ ID NO: 27787 - protein, 1496 aa, Artificial Sequence
  Synthetic polypeptide
EIPQTCGTAFLHRIRQNVADSVEKGLTEENVKVLFSNIEDILEVHKDFLAALEYCLHPEPQSQHELGNVFLKFKDKFCVYEEYCSNHEKALRLLVELNKIPTVRAFLLSCMLLGGRKTTDIPLEGYLLSPIQRICKYPLLLKELAKRTPGKHPDHPAVQSALQAMKTVCSNINETKRQMEKLEALEQLQSHIEGWEGSNLTDICTQLLLQGTLLKISAGNIQERAFFLFDNLLVYCKRKSRVTGSKKSTKRTKSINGSLYIFRGRINTEVMEVENVEDGTADYHSNGYTVTNGWKIHNTAKNKWFVCMAKTAEEKQKWLDAIIREREQRESLKLGMERDAYVMIAEKGEKLYHMMMNKKVNLIKDRRRKLSTVPKCFLGNEFVAWLLEIGEISKTEEGVNLGQALLENGIIHHVSDKHQFKNEQVMYRFRYDDGTYKARSELEDIMSKGVRLYCRLHSLYTPVIKDRDYHLKTYKSVLPGSKLVDWLLAQGDCQTREEAVALGVGLCNNGFMHHVLEKSEFRDESQYFRFHADEEMEGTSSKNKQLRNDFKLVENILAKRLLILPQEEDYGFDIEEKNKAVVVKSVQRGSLAEVAGLQVGRKIYSINEDLVFLRPFSEVESILNQSFCSRRPLRLLVATKAKEIIKIPDQPDTLCFQIRGAAPPYVYAVGRGSEAMAAGLCAGQCILKVNGSNVMNDGAPEVLEHFQAFRSRREEALGLYQWIYHTHEDAQEARASQEASTEDPSGEQAQEEDQADSAFPLLSLGPRLSLCEDSPMVTLTVDNVHLEHGVVYEYVSTAGVRCHVLEKIVEPRGCFGLTAKILEAFAANDSVFVENCRRLMALSSAIVTMPHFEFRNICDTKLESIGQRIACYQEFAAQLKSRVSPPFKQAPLEPHPLCGLDFCPTNCHINLMEVSYPKTTPSVGRSFSIRFGRKPSLIGLDPEQGHLNPMSYTQHCITTMAAPSWKCLPAAEGDPQGQGLHDGSFGPASGTLGQEDRGLSFLLKQEDREIQDAYLQLFTKLDVALKEMKQYVTQINRLLSTITEPTSGGSCDASLAEEASSLPLVSEESEMDRSDHGGIKKVCFKVAEEDQEDSGHDTMSYRDSYSECNSNRDSVLSYTSVRSNSSYLGSDEMGSGDELPCDMRIPSDKQDKLHGCLEHLFNQVDSINALLKGPVMSRAFEETKHFPMNHSLQEFKQKEECTIRGRSLIQISIQEDPWNLPNSIKTLVDNIQRYVEDGKNQLLLALLKCTDTELQLRRDAIFCQALVAAVCTFSKQLLAALGYRYNNNGEYEESSRDASRKWLEQVAATGVLLHCQSLLSPATVKEERTMLEDIWVTLSELDNVTFSFKQLDENYVANTNVFYHIEGSRQALKVIFYLDSYHFSKLPSRLEGGASLRLHTALFTKGELQAWGREDHGGRAKATKHTGSQPPARPRHLPSQCWRTWRGCLLQAARPRRICSRTSTRSPWRKFSSITANSGHFTWSGLTCPRMPAPRR

SEQ ID NO: 27788 - protein, 39 aa, Artificial Sequence
  Synthetic polypeptide
EAQMGGLLEARSWRPAWTTKLKMNQTKFVKPIEWPLKPT

SEQ ID NO: 27789 - protein, 25 aa, Artificial Sequence
  Synthetic polypeptide
SQHFRRLRWEDCLRPGVGDQPGQQS

SEQ ID NO: 27790 - protein, 906 aa, Artificial Sequence
  Synthetic polypeptide
GQELETSLDNKVEDEPNKICEADRVAIKANIVHLMLSSPEQIQKQLSDAISIIGREDFPQKWPDLLTEMVNRFQSGDFHVINGVLRTAHSLFKRYRHEFKSNELWTEIKLVLDAFALPLTNLFKATIELCSTHANDASALRILFSSLILISKLFYSLNFQDLPEFFEDNMETWMNNFHTLLTLDNKLLQTDDEEEAGLLELLKSQICDNAALYAQKYDEEFQRYLPRFVTAIWNLLVTTGQEVKYDLLVSNAIQFLASVCERPHYKNLFEDQNTLTSICEKVIVPNMEFRAADEEAFEDNSEEYIRRDLEGSDIDTRRRAACDLVRGLCKFFEGPVTGIFSGYVNSMLQEYAKNPSVNWKHKDAAIYLVTSLASKAQTQKHGITQANELVNLTEFFVNHILPDLKSANVNEFPVLKADGIKYIMIFRNQVPKEHLLVSIPLLINHLQAESIVVHTYAAHALERLFTMRGPNNATLFTAAEIAPFVEILLTNLFKALTLPGSSENEYIMKAIMRSFSLLQEAIIPYIPTLITQLTQKLLAVSKNPSKPHFNHYMFEAICLSIRITCKANPAAVVNFEEALFLVFTEILQNDVQEFIPYVFQVMSLLLETHKNDIPSSYMALFPHLLQPVLWERTGNIPALVRLLQAFLERGSNTIASAAADKIPGLLGVFQKLIASKANDHQGFYLLNSIIEHMPPESVDQYRKQIFILLFQRLQNSKTTKFIKSFLVFINLYCIKYGALALQEIFDGIQPKMFGMVLEKIIIPEIQKVSGNVEKKICAVGITKLLTECPPMMDTEYTKLWTPLLQSLIGLFELPEDDTIPDEEHFIDIEDTPGYQTAFSQLAFAGKKEHDPVGQMVNNPKIHLAQSLHKLSTACPGRVPSMVSTSLNAEALQYLQGYLQAASVTLL

SEQ ID NO: 27791 - protein, 850 aa, Artificial Sequence
  Synthetic polypeptide
GQELETSLDNKVEDEPNKICEADRVAIKANIVHLMLSSPEQIQKQLSDAISIIGREDFPQKWPDLLTEMVNRFQSGDFHVINGVLRTAHSLFKRYRHEFKSNELWTEIKLVLDAFALPLTNLFKATIELCSTHANDASALRILFSSLILISKLFYSLNFQDLPEFFEDNMETWMNNFHTLLTLDNKLLQTDLVSNAIQFLASVCERPHYKNLFEDQNTLTSICEKVIVPNMEFRAADEEAFEDNSEEYIRRDLEGSDIDTRRRAACDLVRGLCKFFEGPVTGIFSGYVNSMLQEYAKNPSVNWKHKDAAIYLVTSLASKAQTQKHGITQANELVNLTEFFVNHILPDLKSANVNEFPVLKADGIKYIMIFRNQVPKEHLLVSIPLLINHLQAESIVVHTYAAHALERLFTMRGPNNATLFTAAEIAPFVEILLTNLFKALTLPGSSENEYIMKAIMRSFSLLQEAIIPYIPTLITQLTQKLLAVSKNPSKPHFNHYMFEAICLSIRITCKANPAAVVNFEEALFLVFTEILQNDVQEFIPYVFQVMSLLLETHKNDIPSSYMALFPHLLQPVLWERTGNIPALVRLLQAFLERGSNTIASAAADKIPGLLGVFQKLIASKANDHQGFYLLNSIIEHMPPESVDQYRKQIFILLFQRLQNSKTTKFIKSFLVFINLYCIKYGALALQEIFDGIQPKMFGMVLEKIIIPEIQKVSGNVEKKICAVGITKLLTECPPMMDTEYTKLWTPLLQSLIGLFELPEDDTIPDEEHFIDIEDTPGYQTAFSQLAFAGKKEHDPVGQMVNNPKIHLAQSLHKLSTACPGRVPSMVSTSLNAEALQYLQGYLQAASVTLL

SEQ ID NO: 27792 - protein, 39 aa, Artificial Sequence
  Synthetic polypeptide
CMERKCGIFSSSHSTERTSSCNIFRQEPLPSCLHLKKKK

SEQ ID NO: 27793 - protein, 15 aa, Artificial Sequence
  Synthetic polypeptide
KKKSEWKRIRRRKSQ

SEQ ID NO: 27794 - protein, 440 aa, Artificial Sequence
  Synthetic polypeptide
SFNRKDFIMQHFSTRTSPILFAFKKKKVNGRESEEENLNKSEISQVFEIALKRNLPVNFESFPLKQVARESGPPHMKNFVTKVSVGEFVGEGEGKSKKISKKNAAIAVLEELKKLPPLPAVERVKPRIKKKTKPIVKPQTSPEYGQGINPISRLAQIQQAKKEKEPEYTLLTERGLPRRREFVMQVKVGNHTAEGTGTNKKVAKRNAAENMLEILGFKVPQAQPTKPALKSEEKTPIKKPGDGRKVTFFEPGSGDENGTSNKEDEFRMPYLSHQQLPAGILPMVPEVAQAVGVSQGHHTKDFTRAAPNPAKATVTAMIARELLYGGTSPTAETILKNNISSGHVPHGPLTRPSEQLDYLSRVQGFQVEYKDFPKNNKNEFVSLINCSSQPPLISHGIGKDVESCHDMAALNILKLLSELDQQSTEMPRTGNGPMSVCGRC

SEQ ID NO: 27795 - protein, 434 aa, Artificial Sequence
  Synthetic polypeptide
SFNRKDFIMQHFSTRTSPILFAFKKKKVNGRESEEENLNKSEISQVFEIALKRNLPVNFEVARESGPPHMKNFVTKVSVGEFVGEGEGKSKKISKKNAAIAVLEELKKLPPLPAVERVKPRIKKKTKPIVKPQTSPEYGQGINPISRLAQIQQAKKEKEPEYTLLTERGLPRRREFVMQVKVGNHTAEGTGTNKKVAKRNAAENMLEILGFKVPQAQPTKPALKSEEKTPIKKPGDGRKVTFFEPGSGDENGTSNKEDEFRMPYLSHQQLPAGILPMVPEVAQAVGVSQGHHTKDFTRAAPNPAKATVTAMIARELLYGGTSPTAETILKNNISSGHVPHGPLTRPSEQLDYLSRVQGFQVEYKDFPKNNKNEFVSLINCSSQPPLISHGIGKDVESCHDMAALNILKLLSELDQQSTEMPRTGNGPMSVCGRC

SEQ ID NO: 27796 - protein, 432 aa, Artificial Sequence
  Synthetic polypeptide
SFNRKDFIMQHFSTRTSPILFAFKKKKVNGRESEEENLNKSEISQVFEIALKRNLPVNFEVARESGPPHMKNFVTKVSVGEFVGEGEGKSKKISKKNAAIAVLEELKKLPPLPAVERVKPRIKKKTKPIVKTSPEYGQGINPISRLAQIQQAKKEKEPEYTLLTERGLPRRREFVMQVKVGNHTAEGTGTNKKVAKRNAAENMLEILGFKVPQAQPTKPALKSEEKTPIKKPGDGRKVTFFEPGSGDENGTSNKEDEFRMPYLSHQQLPAGILPMVPEVAQAVGVSQGHHTKDFTRAAPNPAKATVTAMIARELLYGGTSPTAETILKNNISSGHVPHGPLTRPSEQLDYLSRVQGFQVEYKDFPKNNKNEFVSLINCSSQPPLISHGIGKDVESCHDMAALNILKLLSELDQQSTEMPRTGNGPMSVCGRC

SEQ ID NO: 27797 - protein, 137 aa, Artificial Sequence
  Synthetic polypeptide
SFNRKDFIMQHFSTRTSPILFAFKKKKVNGRESEEENLNKSEISQVFEIALKRNLPVNFESFPLKQVARESGPPHMKNFVTKVSVGEFVGEGEGKSKKISKKNAAIAVLEELKKLPPLPAVERVKPRIKKKTKPIVK

SEQ ID NO: 27798 - protein, 10 aa, Artificial Sequence
  Synthetic polypeptide
QYLGQTQLKV

SEQ ID NO: 27799 - protein, 12 aa, Artificial Sequence
  Synthetic polypeptide
TPENNSTWDKHS

SEQ ID NO: 27800 - protein, 368 aa, Artificial Sequence
  Synthetic polypeptide
GEELLKGSSFALISEPQKITVPGTNTAEGLTRKNMSDVSGWQTFLQALDYFLKMFFGSAALGTLTGLISALVLKHIDLRKTPSLEFGMMIIFAYLPYGLAEGISLSGIMAILFSGIVMSHYTHHNLSPVTQILMQQTLRTVAFLCETCVFAFLGLSIFSFPHKFEISFVIWCIVLVLFGRAVNIFPLSYLLNFFRDHKITPKMMFIMWFSGLRGAIPYALSLHLDLEPMEKRQLIGTTTIVIVLFTILLLGGSTMPLIRLMDIEDAKAHRRNKKDVNLSKTEKMGNTVESEHLSELTEEEYEAHYIRRQDLKGFVWLDAKYLNPFFTRRLTQEDLHHGRIQMKTLTNKWYEEVRQGPSGSEDDEQELL

SEQ ID NO: 27801 - protein, 32 aa, Artificial Sequence
  Synthetic polypeptide
ISTSAGQHCGVGAPVGAHGGGVRGPLHQAAGP

SEQ ID NO: 27802 - protein, 101 aa, Artificial Sequence
  Synthetic polypeptide
ICRFPSPFRPTELAPLQGNTVESEHLSELTEEEYEAHYIRRQDLKGFVWLDAKYLNPFFTRRLTQEDLHHGRIQMKTLTNKWYEEVRQGPSGSEDDEQELL

SEQ ID NO: 27803 - protein, 41 aa, Artificial Sequence
  Synthetic polypeptide
HLCRATLWSRSTCRSSRRRSTRPTTSGGRTLRASCGWTPST

SEQ ID NO: 27804 - protein, 53 aa, Artificial Sequence
  Synthetic polypeptide
RVSVIPATREAEAGESLGSGRRRLHSVGTAHRVCGRCHRHAQCRGRQHHRVYW

SEQ ID NO: 27805 - protein, 303 aa, Artificial Sequence
  Synthetic polypeptide
FQLLGRLRQENRLDLGGGGCIQWGLPTVSAAGVIGMLSAVVASIIESIGDYYACARLSCAPPPPIHAINRGIFVEGLSCVLDGIFGTGNGSTSSSPNIGVLGITKVGSRRVIQCGAALMLALGMIGKFSALFASLPDPVLGALFCTLFGMITAVGLSNLQFIDLNSSRNLFVLGFSIFFGLVLPSYLRQNPLVTGITGIDQVLNVLLTTAMFVGGCVAFILDNTIPGTPEERGIRKWKKGVGKGNKSLDGMESYNLPFGMNIIKKYRCFSYLPISPTFVGYTWKGLRKSDNSRSSDEDSQATG

SEQ ID NO: 27806 - protein, 60 aa, Artificial Sequence
  Synthetic polypeptide
GRRIAWIWEAEVAFSGDCPPCLRPVSSACSVPWSPASSSLLVTTTPVHGCPVPHPPPSTQ

SEQ ID NO: 27807 - protein, 200 aa, Artificial Sequence
  Synthetic polypeptide
FQLLGRLRQENRLDLGGGGCIQWGLPTVSAAGVIGMLSAVVASIIESIGDYYACARLSCAPPPPIHAINRGIFVEGLSCVLDGIFGTGNGSTSSSPNIGVLGITKVGSRRVIQCGAALMLALGMIGKFSALFASLPDPVLGALFCTLFGMITAVGLSNLQFIDLNSSRNLFVLGFSIFFGLVLPSYLRQNPLVTGITGID

SEQ ID NO: 27808 - protein, 81 aa, Artificial Sequence
  Synthetic polypeptide
GRARRDMPVTPALWGGRGRRITRGQEFKTSLANMFSGDCPPCLRPVSSACSVPWSPASSSLLVTTTPVHGCPVPHPPPSTQ

SEQ ID NO: 27809 - protein, 53 aa, Artificial Sequence
  Synthetic polypeptide
PQHFGEAEAGGSPEVRSSRPAWPTCSVGTAHRVCGRCHRHAQCRGRQHHRVYW

SEQ ID NO: 27810 - protein, 316 aa, Artificial Sequence
  Synthetic polypeptide
PGAAGHACNPSTLGRPRQEDHPRSGVQDQPGQHVQWGLPTVSAAGVIGMLSAVVASIIESIGDYYACARLSCAPPPPIHAINRGIFVEGLSCVLDGIFGTGNGSTSSSPNIGVLGITKVGSRRVIQCGAALMLALGMIGKFSALFASLPDPVLGALFCTLFGMITAVGLSNLQFIDLNSSRNLFVLGFSIFFGLVLPSYLRQNPLVTGITGIDQVLNVLLTTAMFVGGCVAFILDNTIPGTPEERGIRKWKKGVGKGNKSLDGMESYNLPFGMNIIKKYRCFSYLPISPTFVGYTWKGLRKSDNSRSSDEDSQATG

SEQ ID NO: 27811 - protein, 213 aa, Artificial Sequence
  Synthetic polypeptide
PGAAGHACNPSTLGRPRQEDHPRSGVQDQPGQHVQWGLPTVSAAGVIGMLSAVVASIIESIGDYYACARLSCAPPPPIHAINRGIFVEGLSCVLDGIFGTGNGSTSSSPNIGVLGITKVGSRRVIQCGAALMLALGMIGKFSALFASLPDPVLGALFCTLFGMITAVGLSNLQFIDLNSSRNLFVLGFSIFFGLVLPSYLRQNPLVTGITGID

SEQ ID NO: 27812 - protein, 306 aa, Artificial Sequence
  Synthetic polypeptide
GRARRDMPVTPALWGGRGRRITRVQWGLPTVSAAGVIGMLSAVVASIIESIGDYYACARLSCAPPPPIHAINRGIFVEGLSCVLDGIFGTGNGSTSSSPNIGVLGITKVGSRRVIQCGAALMLALGMIGKFSALFASLPDPVLGALFCTLFGMITAVGLSNLQFIDLNSSRNLFVLGFSIFFGLVLPSYLRQNPLVTGITGIDQVLNVLLTTAMFVGGCVAFILDNTIPGTPEERGIRKWKKGVGKGNKSLDGMESYNLPFGMNIIKKYRCFSYLPISPTFVGYTWKGLRKSDNSRSSDEDSQATG

SEQ ID NO: 27813 - protein, 61 aa, Artificial Sequence
  Synthetic polypeptide
PQHFGEAEAGGSPEFSGDCPPCLRPVSSACSVPWSPASSSLLVTTTPVHGCPVPHPPPSTQ

SEQ ID NO: 27814 - protein, 51 aa, Artificial Sequence
  Synthetic polypeptide
PGAAGHACNPSTLGRPRQEDHPSSVGTAHRVCGRCHRHAQCRGRQHHRVYW

SEQ ID NO: 27815 - protein, 203 aa, Artificial Sequence
  Synthetic polypeptide
GRARRDMPVTPALWGGRGRRITRVQWGLPTVSAAGVIGMLSAVVASIIESIGDYYACARLSCAPPPPIHAINRGIFVEGLSCVLDGIFGTGNGSTSSSPNIGVLGITKVGSRRVIQCGAALMLALGMIGKFSALFASLPDPVLGALFCTLFGMITAVGLSNLQFIDLNSSRNLFVLGFSIFFGLVLPSYLRQNPLVTGITGID

SEQ ID NO: 27816 - protein, 148 aa, Artificial Sequence
  Synthetic polypeptide
GLARWFMPVIPTLWEAKFFLSKIRSHVATCSKYQNYIMEGVKATIKDASLQPRNVPNRYTFPCPYCPEKNFDQEGLVEHCKLFHSTDTKSVVCPICASMPWGDPNYRSANFREHIQRRHRFSYDTFVDYDVDEEDMMNQVLQRSIIDQ

SEQ ID NO: 27817 - protein, 31 aa, Artificial Sequence
  Synthetic polypeptide
SQHFGRPSSSCPRSGPTWLLVPNTRITSWKV

SEQ ID NO: 27818 - protein, 44 aa, Artificial Sequence
  Synthetic polypeptide
PGKVVHACNPNTLGGQVLPVQDPVPRGYLFQIPELHHGRCEGHH

SEQ ID NO: 27819 - protein, 36 aa, Artificial Sequence
  Synthetic polypeptide
GQARWLTPVIPALWEAEADESRGQEIETILVNTKSR

SEQ ID NO: 27820 - protein, 375 aa, Artificial Sequence
  Synthetic polypeptide
SQHFGRPRRTNHEVRRSRPSWLTRNQDDYQLVRKLGRGKYSEVFEAINITNNEKVVVKILKPVKKKKIKREIKILENLRGGPNIITLADIVKDPVSRTPALVFEHVNNTDFKQLYQTLTDYDIRFYMYEILKALDYCHSMGIMHRDVKPHNVMIDHEHRKLRLIDWGLAEFYHPGQEYNVRVASRYFKGPELLVDYQMYDYSLDMWSLGCMLASMIFRKEPFFHGHDNYDQLVRIAKVLGTEDLYDYIDKYNIELDPRFNDILGRHSRKRWERFVHSENQHLVSPEALDFLDKLLRYDHQSRLTAREAMEHPYFYTVVKDQARMGSSSMPGGSTPVSSANMMSEMKFCRVAQAGLELLSSTVYPPWPPKVLRLEA

SEQ ID NO: 27821 - protein, 12 aa, Artificial Sequence
  Synthetic polypeptide
HEIKMTTSWFEN

SEQ ID NO: 27822 - protein, 381 aa, Artificial Sequence
  Synthetic polypeptide
SQHFGRPRRTNHEVRRSRPSWLTRNQDDYQLVRKLGRGKYSEVFEAINITNNEKVVVKILKPVKKKKIKREIKILENLRGGPNIITLADIVKDPVSRTPALVFEHVNNTDFKQLYQTLTDYDIRFYMYEILKALDYCHSMGIMHRDVKPHNVMIDHEHRKLRLIDWGLAEFYHPGQEYNVRVASRYFKGPELLVDYQMYDYSLDMWSLGCMLASMIFRKEPFFHGHDNYDQLVRIAKVLGTEDLYDYIDKYNIELDPRFNDILGRHSRKRWERFVHSENQHLVSPEALDFLDKLLRYDHQSRLTAREAMEHPYFYTVVKDQARMGSSSMPGGSTPVSSANMMSGISSVPTPSPLGPLAGSPVIAAANPLGMPVPAAAGAQQ

SEQ ID NO: 27823 - protein, 69 aa, Artificial Sequence
  Synthetic polypeptide
SQHFGRPRRTNHEVRRSRPSWLTRNQDDYQLVRKLGRGKYSEVFEAINITNNEKVVVKILKPVKKKKIK

SEQ ID NO: 27824 - protein, 64 aa, Artificial Sequence
  Synthetic polypeptide
SQHFGRPRRTNHEVRRSRPSWLTRNQDDYQLVRKLGRGKYSEVFEAINITNNEKVVVKILKPVK

SEQ ID NO: 27825 - protein, 149 aa, Artificial Sequence
  Synthetic polypeptide
NPVSTENAKISWAWWQAPVIPATWEAEVQETLQHRRPRLQRAKITPLHSSLGVKVPRNFRLLEELEEGQKGVGDGTVSWGLEDDEDMTLTRWTGMIIGPPRVDPRAISVLAKWQNSYSIKVVLQELRRLMMSKENMKLPQPPEGQCYSN

SEQ ID NO: 27826 - protein, 33 aa, Artificial Sequence
  Synthetic polypeptide
SQLLGRLRCKKHFNTGDRGCSEPKSHHCTPAWE

SEQ ID NO: 27827 - protein, 50 aa, Artificial Sequence
  Synthetic polypeptide
GARNTSTQETEVAASQNHTTALQPGSKSPSQFPTVGRTRRRPERSRRWHS

SEQ ID NO: 27828 - protein, 191 aa, Artificial Sequence
  Synthetic polypeptide
NPVSTENAKISWAWWQAPVIPATWEAEVQETLQHRRPRLQRAKITPLHSSLGVKVPRNFRLLEELEEGQKGVGDGTVSWGLEDDEDMTLTRWTGMIIGPPRTIYENRIYSLKIECGPKYPEAPPFVRFVTKINMNGVNSSNGVVDPRAISVLAKWQNSYSIKVVLQELRRLMMSKENMKLPQPPEGQCYSN

SEQ ID NO: 27829 - protein, 110 aa, Artificial Sequence
  Synthetic polypeptide
NPVSTENAKISWAWWQAPVIPATWEAEVQETLQHRRPRLQRAKITPLHSSLGVKVPRNFRLLEELEEGQKGVGDGTVSWGLEDDEDMTLTRWTGMIIGPPRFQFIYLNPL

SEQ ID NO: 27830 - protein, 2 aa, Artificial Sequence
  Synthetic polypeptide
NE

SEQ ID NO: 27831 - protein, 90 aa, Artificial Sequence
  Synthetic polypeptide
YLQKYFPRAFAQAVPSTSSLLRSLLKYDHLRRPFLTILCCSCLGLSLPYQNYSFLFIYLLSTTRMSKSPSQFPTVGRTRRRPERSRRWHS

SEQ ID NO: 27832 - protein, 32 aa, Artificial Sequence
  Synthetic polypeptide
KLDVTAWSKSPSQFPTVGRTRRRPERSRRWHS

SEQ ID NO: 27833 - protein, 100 aa, Artificial Sequence
  Synthetic polypeptide
RLGVKVPRNFRLLEELEEGQKGVGDGTVSWGLEDDEDMTLTRWTGMIIGPPRVDPRAISVLAKWQNSYSIKVVLQELRRLMMSKENMKLPQPPEGQCYSN

SEQ ID NO: 27834 - protein, 10 aa, Artificial Sequence
  Synthetic polypeptide
GLKVGCNGLE

SEQ ID NO: 27835 - protein, 142 aa, Artificial Sequence
  Synthetic polypeptide
RLGVKVPRNFRLLEELEEGQKGVGDGTVSWGLEDDEDMTLTRWTGMIIGPPRTIYENRIYSLKIECGPKYPEAPPFVRFVTKINMNGVNSSNGVVDPRAISVLAKWQNSYSIKVVLQELRRLMMSKENMKLPQPPEGQCYSN

SEQ ID NO: 27836 - protein, 61 aa, Artificial Sequence
  Synthetic polypeptide
RLGVKVPRNFRLLEELEEGQKGVGDGTVSWGLEDDEDMTLTRWTGMIIGPPRFQFIYLNPL

SEQ ID NO: 27837 - protein, 112 aa, Artificial Sequence
  Synthetic polypeptide
GEAGDSSPSQVVVGTAGGGPGLADEGVPEAVERVHRAWQGPVLPCHDAAEPAQENLPAQSQREVPRTAGNSVPQAPGAGGQLWWAAPRSWAPRRTDHYLVPVSQLPAEAERL

SEQ ID NO: 27838 - protein, 289 aa, Artificial Sequence
  Synthetic polypeptide
RFLVCKERLVTAAPPRLLWGLQVVALASRTKGCLKLWRGCTGPGRVLSCPATTLLNQLKKTFQHRVRGKYPGQLEIACRRLLEQVVSCGGLLPGAGLPEEQIITWFQFHSYLQRQSVSDLEKHFTQLTKEVTLIEELHCAGQAKVVRKLQGKRLGQLQPLPQTLRAWALLQLDGTPRVCRAASARLAGAVRNRSFREKALLFYTNALAENDARLQQAACLALKHLKGIESIDQTASLCQSDLEAVRAAARETTLSFGEKGRLAFEKMDKLCSEQREVFCQEADVEITIF

SEQ ID NO: 27839 - protein, 23 aa, Artificial Sequence
  Synthetic polypeptide
QQPLPGCCGDCRWWPWPRGRRGA

SEQ ID NO: 27840 - protein, 287 aa, Artificial Sequence
  Synthetic polypeptide
GEAGDSSPSQVVVGTAGGGPVIPQASRTKGCLKLWRGCTGPGRVLSCPATTLLNQLKKTFQHRVRGKYPGQLEIACRRLLEQVVSCGGLLPGAGLPEEQIITWFQFHSYLQRQSVSDLEKHFTQLTKEVTLIEELHCAGQAKVVRKLQGKRLGQLQPLPQTLRAWALLQLDGTPRVCRAASARLAGAVRNRSFREKALLFYTNALAENDARLQQAACLALKHLKGIESIDQTASLCQSDLEAVRAAARETTLSFGEKGRLAFEKMDKLCSEQREVFCQEADVEITIF

SEQ ID NO: 27841 - protein, 37 aa, Artificial Sequence
  Synthetic polypeptide
RFLVCKERLVTAAPPRLLWGLQVVALSSHRPRGRRGA

SEQ ID NO: 27842 - protein, 111 aa, Artificial Sequence
  Synthetic polypeptide
QQPLPGCCGDCRWWPCHPTGLADEGVPEAVERVHRAWQGPVLPCHDAAEPAQENLPAQSQREVPRTAGNSVPQAPGAGGQLWWAAPRSWAPRRTDHYLVPVSQLPAEAERL

SEQ ID NO: 27843 - protein, 5 aa, Artificial Sequence
  Synthetic polypeptide
PPSPR

SEQ ID NO: 27844 - protein, 101 aa, Artificial Sequence
  Synthetic polypeptide
PPVPGDHHVGEVAVPVPWGHRGRGGRGPERLLRRLQQCTEPEDRKVHQQELREIANACKILQDVRHAAEGVGLCRPEAPAGEEDLRSIEKRPQGVSVCAAG

SEQ ID NO: 27845 - protein, 953 aa, Artificial Sequence
  Synthetic polypeptide
PQSQVTTMSVRLRFLSPGDTGAVGVVGRSASFAGFSSAQSRRIAKSINRNSVRSRMPAKSSKMYGTLRKGSVCADPKPQQVKKIFEALKRGLKEYLCVQQAELDHLSGRHKDTRRNSRLAFYYDLDKQTRCVERHIRKMEFHISKVDELYEDYCIQCRLRDGASSMQRAFARCPPSRAARESLQELGRSLHECAEDMWLIEGALEVHLGEFHIRMKGLVGYARLCPGDHYEVLMRLGRQRWKLKGRIESDDSQTWDEEEKAFIPTLHENLDIKVTELRGLGSLAVGAVTCDIADFFTTRPQVIVVDITELGTIKLQLEVQWNPFDTESFLVSPSPTGKFSMGSRKGSLYNWTPPSTPSFRERYYLSVLQQPTQQALLLGGPRATSILSYLSDSDLRGPSLRSQSQELPEMDSFSSEDPRDTETSTSASTSDVGFLPLTFGPHASIEEEAREDPLPPGLLPEMAHLSGGPFAEQPGWRNLGGESPSLPQGSLFHSGTASSSQNGHEEGATGDREDGPGVALEGPLQEVLELLRPTDSTQPQLRELEYQVLGFRDRLKPCRARQEHTSAESLMECILESFAFLNADFALDELSLFGGSQGLRKDRPLPPPSSLKASSRELTAGAPELDVLLMVHLQVCKALLQKLASPNLSRLVQECLLEEVAQQKHVLETLSVLDFEKVGKATSIEEIIPQASRTKGCLKLWRGCTGPGRVLSCPATTLLNQLKKTFQHRVRGKYPGQLEIACRRLLEQVVSCGGLLPGAGLPEEQIITWFQFHSYLQRQSVSDLEKHFTQLTKEVTLIEELHCAGQAKVVRKLQGKRLGQLQPLPQTLRAWALLQLDGTPRVCRAASARLAGAVRNRSFREKALLFYTNALAENDARLQQAACLALKHLKGIESIDQTASLCQSDLEAVRAAARETTLSFGEKGRLAFEKMDKLCSEQREVFCQEADVEITIF

SEQ ID NO: 27846 - protein, 37 aa, Artificial Sequence
  Synthetic polypeptide
HASEFTEFHFPLPEMLFPCSLMTICCSSFNLCEAKGG

SEQ ID NO: 27847 - protein, 137 aa, Artificial Sequence
  Synthetic polypeptide
PSAAHPSISAKQKEGNFDIVSGTRYKGNGGVYGWDLKRKIISRGANFLTQILLRPGASDLTGSFRLYRKEVLEKLIEKCVSKGYVFQMEMIVRARQLNYTIGEVPISFVDRVYGESKLGGNEIVSFLKGLLTLFATT

SEQ ID NO: 27848 - protein, 44 aa, Artificial Sequence
  Synthetic polypeptide
NAVSMLLDDHLLLILQSLRSKRRVILILSLELATKEMEVYMAGI

SEQ ID NO: 27849 - protein, 164 aa, Artificial Sequence
  Synthetic polypeptide
PSAAHPSISAKQKEGNFDIVSGTRYKGNGGVYGWDLKRKIISDGVLPCCPGWSLLGSSDPAILASWDYSRGANFLTQILLRPGASDLTGSFRLYRKEVLEKLIEKCVSKGYVFQMEMIVRARQLNYTIGEVPISFVDRVYGESKLGGNEIVSFLKGLLTLFATT

SEQ ID NO: 27850 - protein, 172 aa, Artificial Sequence
  Synthetic polypeptide
PSAAHPSISAKQKEGNFDIVSGTRYKGNGGVYGWDLKRKIISDGVLPCCPGWSLLGSSDPAILASWDYRCEPPRLASRGANFLTQILLRPGASDLTGSFRLYRKEVLEKLIEKCVSKGYVFQMEMIVRARQLNYTIGEVPISFVDRVYGESKLGGNEIVSFLKGLLTLFATT

SEQ ID NO: 27851 - protein, 25 aa, Artificial Sequence
  Synthetic polypeptide
RIKHREQKGLFQECQNGSLLEAKGG

SEQ ID NO: 27852 - protein, 145 aa, Artificial Sequence
  Synthetic polypeptide
NTVNKRVYSRNARMAHYWKQKEGNFDIVSGTRYKGNGGVYGWDLKRKIISRGANFLTQILLRPGASDLTGSFRLYRKEVLEKLIEKCVSKGYVFQMEMIVRARQLNYTIGEVPISFVDRVYGESKLGGNEIVSFLKGLLTLFATT

SEQ ID NO: 27853 - protein, 40 aa, Artificial Sequence
  Synthetic polypeptide
TKGFIPGMPEWLIIGSKRRVILILSLELATKEMEVYMAGI

SEQ ID NO: 27854 - protein, 172 aa, Artificial Sequence
  Synthetic polypeptide
NTVNKRVYSRNARMAHYWKQKEGNFDIVSGTRYKGNGGVYGWDLKRKIISDGVLPCCPGWSLLGSSDPAILASWDYSRGANFLTQILLRPGASDLTGSFRLYRKEVLEKLIEKCVSKGYVFQMEMIVRARQLNYTIGEVPISFVDRVYGESKLGGNEIVSFLKGLLTLFATT

SEQ ID NO: 27855 - protein, 180 aa, Artificial Sequence
  Synthetic polypeptide
NTVNKRVYSRNARMAHYWKQKEGNFDIVSGTRYKGNGGVYGWDLKRKIISDGVLPCCPGWSLLGSSDPAILASWDYRCEPPRLASRGANFLTQILLRPGASDLTGSFRLYRKEVLEKLIEKCVSKGYVFQMEMIVRARQLNYTIGEVPISFVDRVYGESKLGGNEIVSFLKGLLTLFATT

SEQ ID NO: 27856 - protein, 40 aa, Artificial Sequence
  Synthetic polypeptide
FVTCSLKRASKTTREKVGTRNCIYSWNETCHRKLHHYYGC

SEQ ID NO: 27857 - protein, 175 aa, Artificial Sequence
  Synthetic polypeptide
KELLRPREKKLGLGTAYIHGMKHATGNYIIIMDADLSHHPKFIPEFIRKQKEGNFDIVSGTRYKGNGGVYGWDLKRKIISRGANFLTQILLRPGASDLTGSFRLYRKEVLEKLIEKCVSKGYVFQMEMIVRARQLNYTIGEVPISFVDRVYGESKLGGNEIVSFLKGLLTLFATT

SEQ ID NO: 27858 - protein, 20 aa, Artificial Sequence
  Synthetic polypeptide
VSLSMVLLSVICYLQSEKSF

SEQ ID NO: 27859 - protein, 202 aa, Artificial Sequence
  Synthetic polypeptide
KELLRPREKKLGLGTAYIHGMKHATGNYIIIMDADLSHHPKFIPEFIRKQKEGNFDIVSGTRYKGNGGVYGWDLKRKIISDGVLPCCPGWSLLGSSDPAILASWDYSRGANFLTQILLRPGASDLTGSFRLYRKEVLEKLIEKCVSKGYVFQMEMIVRARQLNYTIGEVPISFVDRVYGESKLGGNEIVSFLKGLLTLFATT

SEQ ID NO: 27860 - protein, 210 aa, Artificial Sequence
  Synthetic polypeptide
KELLRPREKKLGLGTAYIHGMKHATGNYIIIMDADLSHHPKFIPEFIRKQKEGNFDIVSGTRYKGNGGVYGWDLKRKIISDGVLPCCPGWSLLGSSDPAILASWDYRCEPPRLASRGANFLTQILLRPGASDLTGSFRLYRKEVLEKLIEKCVSKGYVFQMEMIVRARQLNYTIGEVPISFVDRVYGESKLGGNEIVSFLKGLLTLFATT

SEQ ID NO: 27861 - protein, 170 aa, Artificial Sequence
  Synthetic polypeptide
KELLRPREKKLGLGTAYIHGMKHATGNYIIIMDADLSHHPKFIPEFISDGVLPCCPGWSLLGSSDPAILASWDYSRGANFLTQILLRPGASDLTGSFRLYRKEVLEKLIEKCVSKGYVFQMEMIVRARQLNYTIGEVPISFVDRVYGESKLGGNEIVSFLKGLLTLFATT

SEQ ID NO: 27862 - protein, 136 aa, Artificial Sequence
  Synthetic polypeptide
KELLRPREKKLGLGTAYIHGMKHATGNYIIIMDADLSHHPKFIPEFISDGVLPCCPGWSLLGSSDPAILASWDYSRGANFLTQILLRPGASDLTGSFRLYRKEVLEKLIEKCVSKGYVFQMEMIVRARQLNYTIGE

SEQ ID NO: 27863 - protein, 4 aa, Artificial Sequence
  Synthetic polypeptide
CGLS

SEQ ID NO: 27864 - protein, 21 aa, Artificial Sequence
  Synthetic polypeptide
VALVNEIIRKEFSGPPARNQT

SEQ ID NO: 27865 - protein, 10 aa, Artificial Sequence
  Synthetic polypeptide
CGLRADRHTP

SEQ ID NO: 27866 - protein, 17 aa, Artificial Sequence
  Synthetic polypeptide
VALELIDTHLSWIQNIL

SEQ ID NO: 27867 - protein, 43 aa, Artificial Sequence
  Synthetic polypeptide
QCLPTKMDSKFGRWKPRWIRTRASPTCFLLRSLNIGTSISAHL

SEQ ID NO: 27868 - protein, 43 aa, Artificial Sequence
  Synthetic polypeptide
SSAAHWQCHLRKLSIIYPLKSRDSDSAYPQRWTANLGDGSHGG

SEQ ID NO: 27869 - protein, 316 aa, Artificial Sequence
  Synthetic polypeptide
KAGTVTVPTHKDGQQIWEMEATVDKDKSQPNMLFVEIPEYRNKHIRTPVKVNFYVINGKRKRSQPQHFTYHPVPAIKTEPTDEYDPTLICSPTHGGLGSQPYYPQHPMVAESPSCLVATMAPCQQFRTGLSSPDARYQQQNPAAVLYQRSKSLSPSLLGYQQPALMAAPLSLADAHRSVLVHAGSQGQSSALLHPSPTNQQASPVIHYSPTNQQLRCGSHQEFQHIMYCENFAPGTTRPGPPPVSQGQRLSPGSYPTVIQQQNATSQRAAKNGPPVSDQKEVLPAGVTIKQEQNLDQTYLDDELIDTHLSWIQNIL

SEQ ID NO: 27870 - protein, 320 aa, Artificial Sequence
  Synthetic polypeptide
KAGTVTVPTHKDGQQIWEMEATVDKDKSQPNMLFVEIPEYRNKHIRTPVKVNFYVINGKRKRSQPQHFTYHPVPAIKTEPTDEYDPTLICSPTHGGLGSQPYYPQHPMVAESPSCLVATMAPCQQFRTGLSSPDARYQQQNPAAVLYQRSKSLSPSLLGYQQPALMAAPLSLADAHRSVLVHAGSQGQSSALLHPSPTNQQASPVIHYSPTNQQLRCGSHQEFQHIMYCENFAPGTTRPGPPPVSQGQRLSPGSYPTVIQQQNATSQRAAKNGPPVSDQKEVLPAGVTIKQEQNLDQTYLDDVNEIIRKEFSGPPARNQT

SEQ ID NO: 27871 - protein, 44 aa, Artificial Sequence
  Synthetic polypeptide
VVLSWGRACLAGDVWRCLETFLVATTGRGTGQLLLASSGRAECT

SEQ ID NO: 27872 - protein, 916 aa, Artificial Sequence
  Synthetic polypeptide
WFSAGGEPAWQEMFGDAWRHFWLPQRGEGQGSCYWHPVEEPNAHKVASPPSGPAYPDDVLDYGLKPYSPLASLSGEPPGRFGEPDRVGPQKFLSAAKPAGASGLSPRIEITPSHELIQAVGPLRMRDAGLLVEQPPLAGVAASPRFTLPVPGFEGYREPLCLSPASSGSSASFISDTFSPYTSPCVSPNNGGPDDLCPQFQNIPAHYSPRTSPIMSPRTSLAEDSCLGRHSPVPRPASRSSSPGAKRRHSCAEALVALPPGASPQRSRSPSPQPSSHVAPQDHGSPAGYPPVAGSAVIMDALNSLATDSPCGIPPKMWKTSPDPSPVSAAPSKAGLPRHIYPAVEFLGPCEQGERRNSAPESILLVPPTWPKPLVPAIPICSIPVTASLPPLEWPLSSQSGSYELRIEVQPKPHHRAHYETEGSRGAVKAPTGGHPVVQLHGYMENKPLGLQIFIGTADERILKPHAFYQVHRITGKTVTTTSYEKIVGNTKVLEIPLEPKNNMRATIDCAGILKLRNADIELRKGETDIGRKNTRVRLVFRVHIPESSGRIVSLQTASNPIECSQRSAHELPMVERQDTDSCLVYGGQQMILTGQNFTSESKVVFTEKTTDGQQIWEMEATVDKDKSQPNMLFVEIPEYRNKHIRTPVKVNFYVINGKRKRSQPQHFTYHPVPAIKTEPTDEYDPTLICSPTHGGLGSQPYYPQHPMVAESPSCLVATMAPCQQFRTGLSSPDARYQQQNPAAVLYQRSKSLSPSLLGYQQPALMAAPLSLADAHRSVLVHAGSQGQSSALLHPSPTNQQASPVIHYSPTNQQLRCGSHQEFQHIMYCENFAPGTTRPGPPPVSQGQRLSPGSYPTVIQQQNATSQRAAKNGPPVSDQKEVLPAGVTIKQEQNLDQTYLDDELIDTHLSWIQNIL

SEQ ID NO: 27873 - protein, 86 aa, Artificial Sequence
  Synthetic polypeptide
GSQLGASLPGRRCLAMPGDIFGCHNGERDRAAAIGIQWKSRMHIRSPAHPPDPHTPMMSWTMASSHTAPLLVSLASPPADSESRIG

SEQ ID NO: 27874 - protein, 920 aa, Artificial Sequence
  Synthetic polypeptide
WFSAGGEPAWQEMFGDAWRHFWLPQRGEGQGSCYWHPVEEPNAHKVASPPSGPAYPDDVLDYGLKPYSPLASLSGEPPGRFGEPDRVGPQKFLSAAKPAGASGLSPRIEITPSHELIQAVGPLRMRDAGLLVEQPPLAGVAASPRFTLPVPGFEGYREPLCLSPASSGSSASFISDTFSPYTSPCVSPNNGGPDDLCPQFQNIPAHYSPRTSPIMSPRTSLAEDSCLGRHSPVPRPASRSSSPGAKRRHSCAEALVALPPGASPQRSRSPSPQPSSHVAPQDHGSPAGYPPVAGSAVIMDALNSLATDSPCGIPPKMWKTSPDPSPVSAAPSKAGLPRHIYPAVEFLGPCEQGERRNSAPESILLVPPTWPKPLVPAIPICSIPVTASLPPLEWPLSSQSGSYELRIEVQPKPHHRAHYETEGSRGAVKAPTGGHPVVQLHGYMENKPLGLQIFIGTADERILKPHAFYQVHRITGKTVTTTSYEKIVGNTKVLEIPLEPKNNMRATIDCAGILKLRNADIELRKGETDIGRKNTRVRLVFRVHIPESSGRIVSLQTASNPIECSQRSAHELPMVERQDTDSCLVYGGQQMILTGQNFTSESKVVFTEKTTDGQQIWEMEATVDKDKSQPNMLFVEIPEYRNKHIRTPVKVNFYVINGKRKRSQPQHFTYHPVPAIKTEPTDEYDPTLICSPTHGGLGSQPYYPQHPMVAESPSCLVATMAPCQQFRTGLSSPDARYQQQNPAAVLYQRSKSLSPSLLGYQQPALMAAPLSLADAHRSVLVHAGSQGQSSALLHPSPTNQQASPVIHYSPTNQQLRCGSHQEFQHIMYCENFAPGTTRPGPPPVSQGQRLSPGSYPTVIQQQNATSQRAAKNGPPVSDQKEVLPAGVTIKQEQNLDQTYLDDVNEIIRKEFSGPPARNQT

SEQ ID NO: 27875 - protein, 34 aa, Artificial Sequence
  Synthetic polypeptide
TWKVELAVNRDRATALQPGRQSETSSQKGVAMLP

SEQ ID NO: 27876 - protein, 26 aa, Artificial Sequence
  Synthetic polypeptide
TEIAPLHSSLGDRARHRLKKVLLCCL

SEQ ID NO: 27877 - protein, 47 aa, Artificial Sequence
  Synthetic polypeptide
SQLLGRLRQENGVNLEGGACSEPRSRHCTPAWATERDIVSKRCCYVA

SEQ ID NO: 27878 - protein, 106 aa, Artificial Sequence
  Synthetic polypeptide
HAPSFTYCLQLSGLTRGDKPHKCEFCDKCFSRKDNLTMHMRCHTSVKPHKCHLCDYAAVDSSSLKKHLRIHSDERPYKCQLCPYASRNSSQLTVHLRSHTGCCYVA

SEQ ID NO: 27879 - protein, 35 aa, Artificial Sequence
  Synthetic polypeptide
MLLHLPIACSFLALQEETNRTSVSSVTSASAGRTT

SEQ ID NO: 27880 - protein, 22 aa, Artificial Sequence
  Synthetic polypeptide
CSFIYLLLAAFWPYKRRQTAQV

SEQ ID NO: 27881 - protein, 336 aa, Artificial Sequence
  Synthetic polypeptide
HAPSFTYCLQLSGLTRGDKPHKCEFCDKCFSRKDNLTMHMRCHTSVKPHKCHLCDYAAVDSSSLKKHLRIHSDERPYKCQLCPYASRNSSQLTVHLRSHTGDTPFQCWLCSAKFKISSDLKRHMIVHSGEKPFKCEFCDVRCTMKANLKSHIRIKHTFKCLHCAFQGRDRADLLEHSRLHQADHPEKCPECSYSCSSAAALRVHSRVHCKDRPFKCDFCSFDTKRPSSLAKHVDKVHRDEAKTENRAPLGKEGLREGSSQHVAKIVTQRAFRCETCGASFVRDDSLRCHKKQHSDQSENKNSDLVTFPPESGASGQLSTLVSVGQLEAPLEPSQDL

SEQ ID NO: 27882 - protein, 105 aa, Artificial Sequence
  Synthetic polypeptide
HAPSFTYCLQLSGLTRGDKPHKCEFCDKCFSRKDNLTMHMRCHTSVKPHKCHLCDYAAVDSSSLKKHLRIHSDERPYKCQLCPYASRNSSQLTVHLRSHTGPGPG

SEQ ID NO: 27883 - protein, 109 aa, Artificial Sequence
  Synthetic polypeptide
HAPSFTYCLQLSGLTRGDKPHKCEFCDKCFSRKDNLTMHMRCHTSVKPHKCHLCDYAAVDSSSLKKHLRIHSDERPYKCQLCPYASRNSSQLTVHLRSHTGDTPFQCWL

SEQ ID NO: 27884 - protein, 20 aa, Artificial Sequence
  Synthetic polypeptide
EAKAGGSLEPRSSRPAWERR

SEQ ID NO: 27885 - protein, 30 aa, Artificial Sequence
  Synthetic polypeptide
SQHFERPRREDHLSPGVRDQPGKEGDVRSD

SEQ ID NO: 27886 - protein, 359 aa, Artificial Sequence
  Synthetic polypeptide
AQEFETSLGKKVMCVQIKCFHEIITIGYNVYHSYDLPWFRTLSWYFLLCVNYFFYGETVTDYFFTLVQREEPLRILSKYHRFISFTLYLIGFCMFVLSLVKKHYRLQFYMFGWTHVTLLIVVTQSHLVIHNLFEGMIWFIVPISCVICNDIMAYMFGFFFGRTPLIKLSPKKTWEGFIGGFFATVVFGLLLSYVMSGYRCFVCPVEYNNDTNSFTVDCEPSDLFRLQEYNIPGVIQSVIGWKTVRMYPFQIHSIALSTFASLIGPFGGFFASGFKRAFKIKDFANTIPGHGGIMDRFDCQYLMATFVNVYIASFIRGPNPSKLIQQFLTLRPDQQLHIFNTLRSHLIDKGMLTSTTEDE

SEQ ID NO: 27887 - protein, 219 aa, Artificial Sequence
  Synthetic polypeptide
AQEFETSLGKKVMCVQIKCFHEIITIGYNVYHSYDLPWFRTLSWYFLLCVNYFFYGETVTDYFFTLVQREEPLRILSKYHRFISFTLYLIGFCMFVLSLVKKHYRLQFYMFGWTHVTLLIVVTQSHLVIHNLFEGMIWFIVPISCVICNDIMAYMFGFFFGRTPLIKLSPKKTWEGFIGGFFATVVFGLLLSYVMSGYRCFVCPVEYNNDTNSFTVDCE

SEQ ID NO: 27888 - protein, 19 aa, Artificial Sequence
  Synthetic polypeptide
GMGFGEPESSPGSFWYHSV

SEQ ID NO: 27889 - protein, 611 aa, Artificial Sequence
  Synthetic polypeptide
EWGLESQSQVQALFGITLYKNDDGGKIKHLTSSRECSYCGKFFRSNYYLNIHLRTHTGEKPYKCEFCEYAAAQKTSLRYHLERHHKEKQTDVAAEVKNDGKNQDTEDALLTADSAQTKNLKRFFDGAKDVTGSPPAKQLKEMPSVFQNVLGSAVLSPAHKDTQDFHKNAADDSADKVNKNPTPAYLDLLKKRSAVETQANNLICRTKADVTPPPDGSTTHNLEVSPKEKQTETAADCRYRPSVDCHEKPLNLSVGALHNCPAISLSKSLIPSITCPFCTFKTFYPEVLMMHQRLEHKYNPDVHKNCRNKSLLRSRRTGCPPALLGKDVPPLSSFCKPKPKSAFPAQSKSLPSAKGKQSPPGPGKAPLTSGIDSSTLAPSNLKSHRPQQNVGVQGAATRQQQSEMFPKTSVSPAPDKTKRPETKLKPLPVAPSQPTLGSSNINGSIDYPAKNDSPWAPPGRDYFCNRSASNTAAEFGEPLPKRLKSSVVALDVDQPGANYRRGYDLPKYHMVRGITSLLPQDCVYPSQALPPKPRFLSSSEVDSPNVLTVQKPYGGSGPLYTCVPAGSPASSSTLEGKRPVSYQHLSNSMAQKRNYENFIGNAHYRPNDKKT

SEQ ID NO: 27890 - protein, 26 aa, Artificial Sequence
  Synthetic polypeptide
NGVWRARVKSRLFLVSLCIKMMMEEK

SEQ ID NO: 27891 - protein, 57 aa, Artificial Sequence
  Synthetic polypeptide
LLLKTMTCSPVASASPRSLLGMQSSRPTQALIQILHFEKMPSQSLYRQPVREVFSAA

SEQ ID NO: 27892 - protein, 243 aa, Artificial Sequence
  Synthetic polypeptide
FRFCILRRCLVKACIDNRLEKYSQQPSADFLCDIYHQNRLSKKELYAAVTELQLAAVETTANSLMWILYNLSRNPQVQQKLLKEIQSVLPENQVPRAEDLRNMPYLKACLKESMRLTPSVPFTTRTLDKATVLGEYALPKGTVLMLNTQVLGSSEDNFEDSSQFRPERWLQEKEKINPFAHLPFGVGKRMCIGRRLAELQLHLALCWIVRKYDIQATDNEPVEMLHSGTLVPSRELPIAFCQR

SEQ ID NO: 27893 - protein, 177 aa, Artificial Sequence
  Synthetic polypeptide
FRFCILRRCLVKACIDNRLEKYSQQPSADFLCDIYHQNRLSKKELYAAVTELQLAAVETTANSLMWILYNLSRNPQVQQKLLKEIQSVLPENQVPRAEDLRNMPYLKACLKESMRLTPSVPFTTRTLDKATVLGEYALPKGIVRKYDIQATDNEPVEMLHSGTLVPSRELPIAFCQR

SEQ ID NO: 27894 - protein, 27 aa, Artificial Sequence
  Synthetic polypeptide
VRGIQVSASCCMRRDLGFSRRMQGMKL

SEQ ID NO: 27895 - protein, 49 aa, Artificial Sequence
  Synthetic polypeptide
SDLRAQNYFQMLQHTQPRIHLYAYIHTKRKKWQQDVDEFGGFRYLPRVV

SEQ ID NO: 27896 - protein, 340 aa, Artificial Sequence
  Synthetic polypeptide
ELKIIFRCFSTHNHVYTCMHTYTQRERNGSKMLMSSGDSGICLVLYEKRFGLLQKNAGDEAVNFIMAIKTMMSTFGRMMVTPVELHKSLNTKVWQDHTLAWDTIFKSVKACIDNRLEKYSQQPSADFLCDIYHQNRLSKKELYAAVTELQLAAVETTANSLMWILYNLSRNPQVQQKLLKEIQSVLPENQVPRAEDLRNMPYLKACLKESMRLTPSVPFTTRTLDKATVLGEYALPKGTVLMLNTQVLGSSEDNFEDSSQFRPERWLQEKEKINPFAHLPFGVGKRMCIGRRLAELQLHLALCWIVRKYDIQATDNEPVEMLHSGTLVPSRELPIAFCQR

SEQ ID NO: 27897 - protein, 274 aa, Artificial Sequence
  Synthetic polypeptide
ELKIIFRCFSTHNHVYTCMHTYTQRERNGSKMLMSSGDSGICLVLYEKRFGLLQKNAGDEAVNFIMAIKTMMSTFGRMMVTPVELHKSLNTKVWQDHTLAWDTIFKSVKACIDNRLEKYSQQPSADFLCDIYHQNRLSKKELYAAVTELQLAAVETTANSLMWILYNLSRNPQVQQKLLKEIQSVLPENQVPRAEDLRNMPYLKACLKESMRLTPSVPFTTRTLDKATVLGEYALPKGIVRKYDIQATDNEPVEMLHSGTLVPSRELPIAFCQR

SEQ ID NO: 27898 - protein, 365 aa, Artificial Sequence
  Synthetic polypeptide
GRARWLMPVIPAFSEAERIPLQAQKLVSSHKPVQNQKQKQLQATSVPHPVSRPLNNTQKSKQPLPSAPENNPEEELASKQKNEESKKRQWALEDFEIGRPLGKGKFGNVYLAREKQSKFILALKVLFKAQLEKAGVEHQLRREVEIQSHLRHPNILRLYGYFHDATRVYLILEYAPLGTVYRELQKLSKFDEQRTATYITELANALSYCHSKRVIHRDIKPENLLLGSAGELKIADFGWSVHAPSSRRTTLCGTLDYLPPEMIEGRMHDEKVDLWSLGVLCYEFLVGKPPFEANTYQETYKRISRVEFTFPDFVTEGARDLISRLLKHNPSQRPMLREVLEHPWITANSSKPSNCQNKESASKQS

SEQ ID NO: 27899 - protein, 44 aa, Artificial Sequence
  Synthetic polypeptide
SQHFRRPSAFLCKHKSLSPVTSRFRIRSRSNCRQPVYLILSPGH

SEQ ID NO: 27900 - protein, 54 aa, Artificial Sequence
  Synthetic polypeptide
PGAVAHARNPSIFGGRAHSFASTKACLQSQAGSESEAEAIAGNQCTSSCLQATE

SEQ ID NO: 27901 - protein, 309 aa, Artificial Sequence
  Synthetic polypeptide
GRARWLMPVIPAFSEAERIPLQAQKLVSSHKPVQNQKQKQLQATSVPHPVSRPLNNTQKSKQPLPSAPENNPEEELASKQKNEESKKRQWALEDFEIGRPLGKGKFGNVYLAREKQSKFILALKVLFKAQLEKAGVEHQLRREVEIQSHLRHPNILRLYGYFHDATRVYLILEYAPLGTVYRELQKLSKFDEQRTATYITELANALSYCHSKRVIHRDIKPENLLLGSAGELKIADFGWSVHAPSSRRTTLCGTLDYLPPEMIEGRMHDEKVDLWSLGVLCYEFLVGKPPFEANTYQETYKRISRVRRN

SEQ ID NO: 27902 - protein, 233 aa, Artificial Sequence
  Synthetic polypeptide
GRARWLMPVIPAFSEAERIPLQAQKLVSSHKPVQNQKQKQLQATSVPHPVSRPLNNTQKSKQPLPSAPENNPEEELASKQKNEESKKRQWALEDFEIGRPLGKGKFGNVYLAREKQSKFILALKVLFKAQLEKAGVEHQLRREVEIQSHLRHPNILRLYGYFHDATRVYLILEYAPLGTVYRELQKLSKFDEQRTATYITELANALSYCHSKRVIHRDIKPENLLLGSAGELK

SEQ ID NO: 27903 - protein, 150 aa, Artificial Sequence
  Synthetic polypeptide
GRARWLMPVIPAFSEAERIPLQAQKLVSSHKPVQNQKQKQLQATSVPHPVSRPLNNTQKSKQPLPSAPENNPEEELASKQKNEESKKRQWALEDFEIGRPLGKGKFGNVYLAREKQSKFILALKVLFKAQLEKAGVEHQLRREVEIQSHL

SEQ ID NO: 27904 - protein, 108 aa, Artificial Sequence
  Synthetic polypeptide
GRARWLMPVIPAFSEAERIPLQAQKLVSSHKPVQNQKQKQLQATSVPHPVSRPLNNTQKSKQPLPSAPENNPEEELASKQKNEESKKRQWALEDFEIGRPLGKGKFGN

SEQ ID NO: 27905 - protein, 68 aa, Artificial Sequence
  Synthetic polypeptide
GRARWLMPVIPAFSEAERIPLQAQKLVSSHKPVQNQKQKQLQATSVPHPVSRPLNNTQKSKQPLPSAP

SEQ ID NO: 27906 - protein, 41 aa, Artificial Sequence
  Synthetic polypeptide
GRARWLMPVIPAFSEAERIPLQAQKLVSSHKPVQNQKQKQL

SEQ ID NO: 27907 - protein, 32 aa, Artificial Sequence
  Synthetic polypeptide
SQHFRRPSAFLCKHKSLSPVTSRFRIRSRSNC

SEQ ID NO: 27908 - protein, 41 aa, Artificial Sequence
  Synthetic polypeptide
PGAVAHARNPSIFGGRAHSFASTKACLQSQAGSESEAEAIA

SEQ ID NO: 27909 - protein, 406 aa, Artificial Sequence
  Synthetic polypeptide
GRARWLMPVIPAFSEAEATAPVGGPKRVLVTQQFPCQNPLPVNSGQAQRVLCPSNSSQRIPLQAQKLVSSHKPVQNQKQKQLQATSVPHPVSRPLNNTQKSKQPLPSAPENNPEEELASKQKNEESKKRQWALEDFEIGRPLGKGKFGNVYLAREKQSKFILALKVLFKAQLEKAGVEHQLRREVEIQSHLRHPNILRLYGYFHDATRVYLILEYAPLGTVYRELQKLSKFDEQRTATYITELANALSYCHSKRVIHRDIKPENLLLGSAGELKIADFGWSVHAPSSRRTTLCGTLDYLPPEMIEGRMHDEKVDLWSLGVLCYEFLVGKPPFEANTYQETYKRISRVEFTFPDFVTEGARDLISRLLKHNPSQRPMLREVLEHPWITANSSKPSNCQNKESASKQS

SEQ ID NO: 27910 - protein, 20 aa, Artificial Sequence
  Synthetic polypeptide
SQHFRRPRLQLQLEVQNVFS

SEQ ID NO: 27911 - protein, 42 aa, Artificial Sequence
  Synthetic polypeptide
PGAVAHARNPSIFGGRGYSSSWRSKTCSRDSAISLSESITCK

SEQ ID NO: 27912 - protein, 350 aa, Artificial Sequence
  Synthetic polypeptide
GRARWLMPVIPAFSEAEATAPVGGPKRVLVTQQFPCQNPLPVNSGQAQRVLCPSNSSQRIPLQAQKLVSSHKPVQNQKQKQLQATSVPHPVSRPLNNTQKSKQPLPSAPENNPEEELASKQKNEESKKRQWALEDFEIGRPLGKGKFGNVYLAREKQSKFILALKVLFKAQLEKAGVEHQLRREVEIQSHLRHPNILRLYGYFHDATRVYLILEYAPLGTVYRELQKLSKFDEQRTATYITELANALSYCHSKRVIHRDIKPENLLLGSAGELKIADFGWSVHAPSSRRTTLCGTLDYLPPEMIEGRMHDEKVDLWSLGVLCYEFLVGKPPFEANTYQETYKRISRVRRN

SEQ ID NO: 27913 - protein, 274 aa, Artificial Sequence
  Synthetic polypeptide
GRARWLMPVIPAFSEAEATAPVGGPKRVLVTQQFPCQNPLPVNSGQAQRVLCPSNSSQRIPLQAQKLVSSHKPVQNQKQKQLQATSVPHPVSRPLNNTQKSKQPLPSAPENNPEEELASKQKNEESKKRQWALEDFEIGRPLGKGKFGNVYLAREKQSKFILALKVLFKAQLEKAGVEHQLRREVEIQSHLRHPNILRLYGYFHDATRVYLILEYAPLGTVYRELQKLSKFDEQRTATYITELANALSYCHSKRVIHRDIKPENLLLGSAGELK

SEQ ID NO: 27914 - protein, 191 aa, Artificial Sequence
  Synthetic polypeptide
GRARWLMPVIPAFSEAEATAPVGGPKRVLVTQQFPCQNPLPVNSGQAQRVLCPSNSSQRIPLQAQKLVSSHKPVQNQKQKQLQATSVPHPVSRPLNNTQKSKQPLPSAPENNPEEELASKQKNEESKKRQWALEDFEIGRPLGKGKFGNVYLAREKQSKFILALKVLFKAQLEKAGVEHQLRREVEIQSHL

SEQ ID NO: 27915 - protein, 149 aa, Artificial Sequence
  Synthetic polypeptide
GRARWLMPVIPAFSEAEATAPVGGPKRVLVTQQFPCQNPLPVNSGQAQRVLCPSNSSQRIPLQAQKLVSSHKPVQNQKQKQLQATSVPHPVSRPLNNTQKSKQPLPSAPENNPEEELASKQKNEESKKRQWALEDFEIGRPLGKGKFGN

SEQ ID NO: 27916 - protein, 109 aa, Artificial Sequence
  Synthetic polypeptide
GRARWLMPVIPAFSEAEATAPVGGPKRVLVTQQFPCQNPLPVNSGQAQRVLCPSNSSQRIPLQAQKLVSSHKPVQNQKQKQLQATSVPHPVSRPLNNTQKSKQPLPSAP

SEQ ID NO: 27917 - protein, 82 aa, Artificial Sequence
  Synthetic polypeptide
GRARWLMPVIPAFSEAEATAPVGGPKRVLVTQQFPCQNPLPVNSGQAQRVLCPSNSSQRIPLQAQKLVSSHKPVQNQKQKQL

SEQ ID NO: 27918 - protein, 32 aa, Artificial Sequence
  Synthetic polypeptide
ARDCGSHLLSQHFGRPRRGFKWTPGAPDTGCV

SEQ ID NO: 27919 - protein, 102 aa, Artificial Sequence
  Synthetic polypeptide
PGTVAHTYYPSTLGGQGAGLSGRQVHRTQAVFNHTEDYVLLPDERTISLCCWDSRTAERRNLLSLGHNNIVRCIVHSPTNPGFMTCSDDFRARFWYRRSTTD

SEQ ID NO: 27920 - protein, 19 aa, Artificial Sequence
  Synthetic polypeptide
QGLWLTPIIPALWEAKARV

SEQ ID NO: 27921 - protein, 50 aa, Artificial Sequence
  Synthetic polypeptide
SQLLRRLRQENLLNPGGRGCSEPRSHHCTPAWATERGFKWTPGAPDTGCV

SEQ ID NO: 27922 - protein, 107 aa, Artificial Sequence
  Synthetic polypeptide
TQEAEVAVSRDHTIALQPGQQSAGLSGRQVHRTQAVFNHTEDYVLLPDERTISLCCWDSRTAERRNLLSLGHNNIVRCIVHSPTNPGFMTCSDDFRARFWYRRSTTD

SEQ ID NO: 27923 - protein, 16 aa, Artificial Sequence
  Synthetic polypeptide
AEITPLHSSLGNRARV

SEQ ID NO: 27924 - protein, 314 aa, Artificial Sequence
  Synthetic polypeptide
GQPCTWDPSRLLLYLAIYLYPLKCICNKSAMVDKDAELVAQWNYCTLSQEILRRPIVACELGRLYNKDAVIEFLLDKSAEKALGKAASHIKSIKNVTELKLSDNPAWEGDKGNTKGDKHDDLQRARFICPVVGLEMNGRHRFCFLRCCGCVFSERALKEIKAEVCHTCGAAFQEDDVIMLNGTKEDVDVLKTRMEERRLRAKLEKKTKKPKAAESVSKPDVSEEAPGPSKVKTGKPEEASLDSREKKTNLAPKSTAMNESSSGKAGKPPCGATKRSIADSEESEAYKSLFTTHSSAKRSKEESAHWVTHTSYCF

SEQ ID NO: 27925 - protein, 15 aa, Artificial Sequence
  Synthetic polypeptide
NVFVINQQWSTKMLN

SEQ ID NO: 27926 - protein, 8 aa, Artificial Sequence
  Synthetic polypeptide
ISNGRQRC

SEQ ID NO: 27927 - protein, 238 aa, Artificial Sequence
  Synthetic polypeptide
GQPCTWDPSRLLLYLAIYLYPLKCICNKSAMVDKDAELVAQWNYCTLSQEILRRPIVACELGRLYNKDAVIEFLLDKSAEKALGKAASHIKSIKNVTELKLSDNPAWEGDKGNTKGDKHDDLQRARFICPVVGLEMNGRHRFCFLRCCGCVFSERALKEIKAEVCHTCGAAFQEDDVIMLNGTKEDVDVLKTRMEERRLRAKLEKKPQGHQKLRQGSLKKPALILERRKPTWLPKAQQ

SEQ ID NO: 27928 - protein, 255 aa, Artificial Sequence
  Synthetic polypeptide
GQPCTWDPSRLLLYLAIYLYPLKCICNKSAMVDKDAELVAQWNYCTLSQEILRRPIVACELGRLYNKDAVIEFLLDKSAEKALGKAASHIKSIKNVTELKLSDNPAWEGDKGNTKGDKHDDLQRARFICPVVGLEMNGRHRFCFLRCCGCVFSERALKEIKAEVCHTCGAAFQEDDVIMLNGTKEDVDVLKTRMEERRLRAKLEKKTKKPKAAESVSKPDVSEEAPGPSKVKTGKPEEASLDSREKKTNLAPKST

SEQ ID NO: 27929 - protein, 8 aa, Artificial Sequence
  Synthetic polypeptide
NKRKRNYY

SEQ ID NO: 27930 - protein, 582 aa, Artificial Sequence
  Synthetic polypeptide
PLGFSLLIYKTKESEIIIDDGQFGIHNGVETLDSGWLTCQTEIRLRLHYSEKPPVSITKKKLKKSRFRVKLTLEGLEEDDDDRVSPTVLHKMSNSLEISLISDNEFKCRHSQPECGYGLQPDRWTEYSIQTMEPDNLELIFDFFEEDLSEHVVQGDALPGHVGTACLLSSTIAESGKSAGILTLPIMSRNSRKTIGKVRVDYIIIKPLPGYSCDMKSSFSKYWKPRIPLDVGHRGAGNSTTTAQLAKVQENTIASLRNAASHGAAFVEFDVHLSKDFVPVVYHDLTCCLTMKKKFDADPVELFEIPVKELTFDQLQLLKLTHVTALKSKDRKESVVQEENSFSENQPFPSLKMVLESLPEDVGFNIEIKWICQQRDGMWDGNLSTYFDMNLFLDIILKTVLENSGKRRIVFSSFDADICTMVRQKQNKYPILFLTQGKSEIYPELMDLRSRTTPIAMSFAQFENLLGINVHTEDLLRNPSYIQEAKAKGLVIFCWGDDTNDPENRRKLKELGVNGLIYDRIYDWMPEQPNIFQVEQLERLKQELPELKSCLCPTVSRFVPSSLCGESDIHVDANGIDNVENA

SEQ ID NO: 27931 - protein, 34 aa, Artificial Sequence
  Synthetic polypeptide
ALASSSIKQKKAKLLLTMDNLESTMVLKLWILDG

SEQ ID NO: 27932 - protein, 10 aa, Artificial Sequence
  Synthetic polypeptide
NKRLSVVHVK

SEQ ID NO: 27933 - protein, 43 aa, Artificial Sequence
  Synthetic polypeptide
PLGFSLLIYKTKDYRWSMSSDSSQVGDSSTTTINNPFRKRNYY

SEQ ID NO: 27934 - protein, 605 aa, Artificial Sequence
  Synthetic polypeptide
ALASSSIKQKTIGGPCQVIVHKWETHLQPRSITPLESEIIIDDGQFGIHNGVETLDSGWLTCQTEIRLRLHYSEKPPVSITKKKLKKSRFRVKLTLEGLEEDDDDRVSPTVLHKMSNSLEISLISDNEFKCRHSQPECGYGLQPDRWTEYSIQTMEPDNLELIFDFFEEDLSEHVVQGDALPGHVGTACLLSSTIAESGKSAGILTLPIMSRNSRKTIGKVRVDYIIIKPLPGYSCDMKSSFSKYWKPRIPLDVGHRGAGNSTTTAQLAKVQENTIASLRNAASHGAAFVEFDVHLSKDFVPVVYHDLTCCLTMKKKFDADPVELFEIPVKELTFDQLQLLKLTHVTALKSKDRKESVVQEENSFSENQPFPSLKMVLESLPEDVGFNIEIKWICQQRDGMWDGNLSTYFDMNLFLDIILKTVLENSGKRRIVFSSFDADICTMVRQKQNKYPILFLTQGKSEIYPELMDLRSRTTPIAMSFAQFENLLGINVHTEDLLRNPSYIQEAKAKGLVIFCWGDDTNDPENRRKLKELGVNGLIYDRIYDWMPEQPNIFQVEQLERLKQELPELKSCLCPTVSRFVPSSLCGESDIHVDANGIDNVENA

SEQ ID NO: 27935 - protein, 30 aa, Artificial Sequence
  Synthetic polypeptide
QGSSTCCSSTWDAFPWKSLSLSCLSGLSGT

SEQ ID NO: 27936 - protein, 319 aa, Artificial Sequence
  Synthetic polypeptide
RAQALAVPPPGMPFPGKACLFLVFQDSVEHDKEFFHPRYHHREFRFDLSKIPEGEAVTAAEFRIYKDYIRERFDNETFRISVYQVLQEHLGRESDLFLLDSRTLWASEEGWLVFDITATSNHWVVNPRHNLGLQLSVETLDGQSINPKLAGLIGRHGPQNKQPFMVAFFKATEVHFRSIRSTGSKQRSQNRSKTPKNQEALRMANVAENSSSDQRQACKKHELYVSFRDLGWQDWIIAPEGYAAYYCEGECAFPLNSYMNATNHAIVQTLVHFINPETVPKPCCAPTQLNAISVLYFDDSSNVILKKYRNMVVRACGCH

SEQ ID NO: 27937 - protein, 151 aa, Artificial Sequence
  Synthetic polypeptide
GLKHLLFLHLGCLSLEKPVSFLSFRTQWNMTRNSSTHATTIESSGLIFPRSQKGKLSRQPNSGSTRTTSGNASTMRRSGSAFIRCSRSTWAGNRISSCSTAVPSGPRRRAGWCLTSQPPATTGWSIRGTTWACSSRWRRWMGRASTPSWRA

SEQ ID NO: 27938 - protein, 253 aa, Artificial Sequence
  Synthetic polypeptide
RAQALAVPPPGMPFPGKACLFLVFQDSVEHDKEFFHPRYHHREFRFDLSKIPEGEAVTAAEFRIYKDYIRERFDNETFRISVYQVLQEHLGRESDLFLLDSRTLWASEEGWLVFDITATSNHWVVNPRHNLGLQLSVETLDENSSSDQRQACKKHELYVSFRDLGWQDWIIAPEGYAAYYCEGECAFPLNSYMNATNHAIVQTLVHFINPETVPKPCCAPTQLNAISVLYFDDSSNVILKKYRNMVVRACGCH

SEQ ID NO: 27939 - protein, 188 aa, Artificial Sequence
  Synthetic polypeptide
GLKHLLFLHLGCLSLEKPVSFLSFRTQWNMTRNSSTHATTIESSGLIFPRSQKGKLSRQPNSGSTRTTSGNASTMRRSGSAFIRCSRSTWAGNRISSCSTAVPSGPRRRAGWCLTSQPPATTGWSIRGTTWACSSRWRRWMRTAAATRGRPVRSTSCMSASETWAGRTGSSRLKATPPTTVRGSVPSL

SEQ ID NO: 27940 - protein, 300 aa, Artificial Sequence
  Synthetic polypeptide
RAQALAVPPPGMPFPGKACLFLVFQDSVEHDKEFFHPRYHHREFRFDLSKIPEGEAVTAAEFRIYKDYIRERFDNETFRISVYQVLQEHLGRESDLFLLDSRTLWASEEGWLVFDITATSNHWVVNPRHNLGLQLSVETLDGQSINPKLAGLIGRHGPQNKQPFMVAFFKATEVHFRSIRSTGSKQRSQNRSKTPKNQEALRMANVAENSSSDQRQACKKHELYVSFRDLGWQDWIIAPEGYAAYYCEGECAFPLNSYMNATNHAIVQTLVGVTPSWGVVTWAGQAAGPPDPAASKLGPE

SEQ ID NO: 27941 - protein, 299 aa, Artificial Sequence
  Synthetic polypeptide
RAQALAVPPPGMPFPGKACLFLVFQDSVEHDKEFFHPRYHHREFRFDLSKIPEGEAVTAAEFRIYKDYIRERFDNETFRISVYQVLQEHLGSTGTCCMPCLRASTRTNQTRVPALWKLTFQQRRGHGRESDLFLLDSRTLWASEEGWLVFDITATSNHWVVNPRHNLGLQLSVETLDGQSINPKLAGLIGRHGPQNKQPFMVAFFKATEVHFRSIRSTGSKQRSQNRSKTPKNQEALRMANVAENSSSDQRQACKKHELYVSFRDLGWQDWIIAPEGYAAYYCEGECAFPLNSYMNATN

SEQ ID NO: 27942 - protein, 100 aa, Artificial Sequence
  Synthetic polypeptide
GLKHLLFLHLGCLSLEKPVSFLSFRTQWNMTRNSSTHATTIESSGLIFPRSQKGKLSRQPNSGSTRTTSGNASTMRRSGSAFIRCSRSTWAAQVPAACHA

SEQ ID NO: 27943 - protein, 23 aa, Artificial Sequence
  Synthetic polypeptide
HRQFLARGAERSWSLFRSSSSWW

SEQ ID NO: 27944 - protein, 162 aa, Artificial Sequence
  Synthetic polypeptide
LVELSGAGVCSDHHHRGGDDGDGGGDHVPAEPLQAVCTVLHQPAQPGAEERRCPVLRRMPVALGEHSVRQRNPRAAGLRPASAHRPPGRAALRPAGALPPLPAHLSVPAARDRPATHHLAVRRGGAPTLPGPLHPPASGPRAAAGTEPGVGARTPKQNHLRQ

SEQ ID NO: 27945 - protein, 138 aa, Artificial Sequence
  Synthetic polypeptide
LVELSGAGVCSDHHHRGGDDGDGGGDHVPAEPLQAVCTVLHQPAQPGAEERRCPVLRRMPVALGEHSVRQRNPRAAGLRPASAHRPPGRAALRPAGALPPLPAHLSVPAARDRPATHHLAVRRGGAPTLPGPLHPPAS

SEQ ID NO: 27946 - protein, 16 aa, Artificial Sequence
  Synthetic polypeptide
MAQRSWSLFRSSSSWW

SEQ ID NO: 27947 - protein, 160 aa, Artificial Sequence
  Synthetic polypeptide
WHSGAGVCSDHHHRGGDDGDGGGDHVPAEPLQAVCTVLHQPAQPGAEERRCPVLRRMPVALGEHSVRQRNPRAAGLRPASAHRPPGRAALRPAGALPPLPAHLSVPAARDRPATHHLAVRRGGAPTLPGPLHPPASGPRAAAGTEPGVGARTPKQNHLRQ

SEQ ID NO: 27948 - protein, 253 aa, Artificial Sequence
  Synthetic polypeptide
GTAELEFVQIIIIVVVMMVMVVVITCLLSHYKLSARSFISRHSQGRRREDALSSEGCLWPSESTVSGNGIPEPQVYAPPRPTDRLAVPPFAQRERFHRFQPTYPYLQHEIDLPPTISLSDGEEPPPYQGPCTLQLRDPEQQLELNRESVRAPPNRTIFDSDLMDSARLGGPCPPSSNSGISATCYGSGGRMEGPPPTYSEVIGHYPGSSFQHQQSSGPPSLLEGTRLHHTHIAPLESAAIWSKEKDKQKGHPL

SEQ ID NO: 27949 - protein, 202 aa, Artificial Sequence
  Synthetic polypeptide
GTAELEFVQIIIIVVVMMVMVVVITCLLSHYKLSARSFISRHSQGRRREDALSSEGCLWPSESTVSGNGIPEPQVYAPPRPTDRLAVPPFAQRERFHRFQPTYPYLQHEIDLPPTISLSDGEEPPPYQGPCTLQLRDPEQQLELNRESVRAPPNRTIFDSDLMDSARLGGPCPPSSNSGISATCYGSGGRMEGPPPTYSEVI

SEQ ID NO: 27950 - protein, 136 aa, Artificial Sequence
  Synthetic polypeptide
WHSGAGVCSDHHHRGGDDGDGGGDHVPAEPLQAVCTVLHQPAQPGAEERRCPVLRRMPVALGEHSVRQRNPRAAGLRPASAHRPPGRAALRPAGALPPLPAHLSVPAARDRPATHHLAVRRGGAPTLPGPLHPPAS

SEQ ID NO: 27951 - protein, 136 aa, Artificial Sequence
  Synthetic polypeptide
GTAELEFVQIIIIVVVMMVMVVVITCLLSHYKLSARSFISRHSQGRRREDALSSEGCLWPSESTVSGNGIPEPQVYAPPRPTDRLAVPPFAQRERFHRFQPTYPYLQHEIDLPPTISLSDGEEPPPYQGPCTLQLR

SEQ ID NO: 27952 - protein, 166 aa, Artificial Sequence
  Synthetic polypeptide
NLILFREEKNQASTVHHPHCPVDSQHYYTYEETGRCDPFRALAPMYYRGSAAAIIVYDITKEETFSTLKNWVKELRQHGPPNIVVAIAGNKCDLIDVREVMERDAKDYADSIHAIFVETSAKNAININELFIEISRRIPSTDANLPSGGKGFKLRRQPSEPKRSCC

SEQ ID NO: 27953 - protein, 39 aa, Artificial Sequence
  Synthetic polypeptide
YSSEKKKTKRLQCIIHTVQWTVSTTTHMKKQEGVTHFVP

SEQ ID NO: 27954 - protein, 20 aa, Artificial Sequence
  Synthetic polypeptide
PISCLSTNVLSRVGCSYNRL

SEQ ID NO: 27955 - protein, 176 aa, Artificial Sequence
  Synthetic polypeptide
ENAVMLQPFDYDPNEKSKHKFMVQSMFAPTDTSDMEAVWKEAKPEDLMDSKLRCVFELPAENDKPHDVEINKIISTTASKTETPIVSKSLSSSLDDTEVKKVMEECKRLQGEVQRLREENKQFKEEDGLRMRKTVQSNSPISALAPTGKEEGLSTRLLALVVLFFIVGVIIGKIAL

SEQ ID NO: 27956 - protein, 13 aa, Artificial Sequence
  Synthetic polypeptide
DIRECRDVTAFRL

SEQ ID NO: 27957 - protein, 32 aa, Artificial Sequence
  Synthetic polypeptide
IAGEGSPHCTGGWGGRGQLPALGTPLPAALAR

SEQ ID NO: 27958 - protein, 490 aa, Artificial Sequence
  Synthetic polypeptide
MLGKGAHTAPAAGEAGGSCLRWEPHCQQPLPDRVPSTAILPPRLNGPWISTGCEVRPGPEFLTRAYTFYPSRLFRAHQFYYEDPFCGEPAHSLLVKGKVRLRRASWVTRGATEADYHLHKVGIVFHSRRALVDVTGRLNQTRAGRDCARRLPPARAWLPGALYELRSARAQGDCLEALGLTMHELSLVRVQRRLQPQPRASPRLVEELYLGDIHTDPAERRHYRPTGYQRPLQSALHHVQPCPACGLIARSDVHHPPVLPPPLALPLHLGGWWVSSGCEVRPAVLFLTRLFTFHGHSRSWEGYYHHFSDPACRQPTFTVYAAGRYTRGTPSTRVRGGTELVFEVTRAHVTPMDQVTTAMLNFSEPSSCGGAGAWSMGTERDVTATNGCLPLGIRLPHVEYELFKMEQDPLGQSLLFIGQRPTDGSSPDTPEKRPTSYQAPLVLCHGEAPDFSRPPQHRPSLQKHPSTGGLHIAPFPLLPLVLGLAFLHWL

SEQ ID NO: 27959 - protein, 61 aa, Artificial Sequence
  Synthetic polypeptide
CWGREPTLHRRLGRPGAAACAGNPTASSPCQIECPALRSCLHALMDLGSPQAARCAQDRSS

SEQ ID NO: 27960 - protein, 58 aa, Artificial Sequence
  Synthetic polypeptide
MLGKGAHTAPAAGEAGGSCLRWEPHCQQPLPDRVPSTAILPPRLNGPWISTGCEVRPG

SEQ ID NO: 27961 - protein, 57 aa, Artificial Sequence
  Synthetic polypeptide
CWGREPTLHRRLGRPGAAACAGNPTASSPCQIECPALRSCLHALMDLGSPQAARCAQ

SEQ ID NO: 27962 - protein, 18 aa, Artificial Sequence
  Synthetic polypeptide
PGAVAHACHPSTLGGRAC

SEQ ID NO: 27963 - protein, 293 aa, Artificial Sequence
  Synthetic polypeptide
RARWLTPVIPALWEAELADDRMALVSGISLDPEAAIGVTKRPPPKWVDGVDEIQYDVGRIKQKMKELASLHDKHLNRPTLDDSSEEEHAIEITTQEITQLFHRCQRAVQALPSRARACSEQEGRLLGNVVASLAQALQELSTSFRHAQSGYLKRMKNREERSQHFFDTSVPLMDDGDDNTLYHRGFTEDQLVLVEQNTLMVEEREREIRQIVQSISDLNEIFRDLGAMIVEQGTVLDRIDYNVEQSCIKTEDGLKQLHKAEQYQKKNRKMLVILILFVIIIVLIVVLVGVKSR

SEQ ID NO: 27964 - protein, 29 aa, Artificial Sequence
  Synthetic polypeptide
GRGGSRLSSQHFGRPSLLMTVWHWCQASA

SEQ ID NO: 27965 - protein, 350 aa, Artificial Sequence
  Synthetic polypeptide
RARWLTPVIPALWEAELADDRMALVSGISLDPEAAIGVTKRPPPKWVDGVDEIQYDVGRIKQKMKELASLHDKHLNRPTLDDSSEEEHAIEITTQEITQLFHRCQRAVQALPSRARACSEQEGRLLGNVVASLAQALQELSTSFRHAQSGYLKRMKNREERSQHFFDTSVPLMDDGDDNTLYHRGFTEDQLVLVEQNTLMVEEREREIRQIVQSISDLNEIFRDLGAMIVEQGTVLDRIDYNVEQSCIKTEDGLKQLHKDFSHVEGLLSQSLRLWKSYYICQGMALVSHPLGRSSSCLSPLECRVPVCNVFANRKKSERSSYTLACSVPGTGGKKNNKKSKRPAFRMLKL

SEQ ID NO: 27966 - protein, 100 aa, Artificial Sequence
  Synthetic polypeptide
RARWLTPVIPALWEAELADDRMALVSGISLDPEAAIGVTKRPPPKWVDGVDEIQYDVGRIKQKMKELASLHDKHLNRPTLDDSSEEEHAIEITTQEITQA

SEQ ID NO: 27967 - protein, 187 aa, Artificial Sequence
  Synthetic polypeptide
RARWLTPVIPALWEAELADDRMALVSGISLDPEAAIGVTKRPPPKWVDGVDEIQYDVGRIKQKMKELASLHDKHLNRPTLDDSSEEEHAIEITTQEITQLFHRCQRAVQALPSRARACSEQEGRLLGNVVASLAQALQELSTSFRHAQSGYLKRMKNREERSQHFFDTSVPLMDDGDDNTLYHRRTS

SEQ ID NO: 27968 - protein, 49 aa, Artificial Sequence
  Synthetic polypeptide
HSLCQVPSHTLPSLQHEECRPFPPGPALHTHGVSASHHGPPASSPKPRH

SEQ ID NO: 27969 - protein, 314 aa, Artificial Sequence
  Synthetic polypeptide
TASAKCQATLFQASSMKSADPSLRGQLSTPTGSPHLTTVHRPLPPSRVIEELHRALATKHRQDSFQGRESKGSPKKRLDVRLSRTSSVERGKEREEAWSFDGALENKRTAAKESEENKENLIINSELKDDLLLYQDEEALNDSIISGTLPRKCKKELLAVKLRNRPSKQELEDRNIFPRRTDEERQEIRQQIEMKLSKRLSQRPAVEELERRNILKQRNDQTEQEERREIKQRLTRKLNQRPTVDELRDRKILIRFSDYVEVAKAQDYDRRADKPWTRLSAADKAAIRKELNEYKSNEMEVHASSKHLTRFHRP

SEQ ID NO: 27970 - protein, 15 aa, Artificial Sequence
  Synthetic polypeptide
QPLPSAKPHSSKPPA

SEQ ID NO: 27971 - protein, 28 aa, Artificial Sequence
  Synthetic polypeptide
CGNSEEHEFFSERIKEATDNNSEKYSKN

SEQ ID NO: 27972 - protein, 1205 aa, Artificial Sequence
  Synthetic polypeptide
PCLFCFHYDVVIQKNMNFSVRESKKLLTIILKNTVKISKREGKELLLYFDASLEITNVTQKIFGATKHRESIRKQGISVAKTSLHILFDASGSQILVPESQISPVGEELVSLKEKSKSPKEFAKPSKYIKNSDKGNRNNSQLEKTTPSKRKMSEASMIVSGADRYTMRSPVLFSNTSIPPRRRRIKPPLQMTSSAEKPSVSQTSENRVDNAASLKSRSSEGRHRRDNIDKHIKTAKCVENTENKNVEFPNQNFSELQDVIPDSQAAEKRDHTILPGVLDNICGNKIHSKWACWTPVTNIELCNNQRASTSSGDTLNQDIVINKKLTKQKSSSSISDHNSEGTGKVKYKKEQTDHIKIDKAEVEVCKKHNQQQNHPKYSGQKNTENAKQSDWPVESETTFKSVLLNKTIEESLIYRKKYILSKDVNTATCDKNPSASKNVQSHRKAEKELTSELNSWDSKQKKMREKSKGKEFTNVAESLISQINKRYKTKDDIKSTRKLKESLINSGFSNKPVVQLSKEKVQKKSYRKLKTTFVNVTSECPVNDVYNFNLNGADDPIIKLGIQEFQATAKEACADRSIRLVGPRNHDELKSSVKTKDKKIITNHQKKNLFSDTETEYRCDDSKTDISWLREPKSKPQLIDYSRNKNVKNHKSGKSRSSLEKGQPSSKMTPSKNITKKMDKTIPEGRIRLPRKATKTKKNYKDLSNSESECEQEFSHSFKENIPVKEENIHSRMKTVKLPKKQQKVFCAETEKELSKQWKNSSLLKDAIRDNCLDLSPRSLSGSPSSIEVTRCIEKITEKDFTQDYDCITKSISPYPKTSSLESLNSNSGVGGTIKSPKNNEKNFLCASESCSPIPRPLFLPRHTPTKSNTIVNRKKISSLVLTQETQNSNSYSDVSSYSSEERFMEIESPHINENYIQSKREESHLASSLSKSSEGREKTWFDMPCDATHVSGPTQHLSRKRIYIEDNLSNSNEVEMEEKGERRANLLPKKLCKIEDADHHIHKMSESVSSLSTNDFSIPWETWQNEFAGIEMTYETYERLNSEFKRRNNIRHKMLSYFTTQSWKTAQQHLRTMNHQSQDSRIKKLDKFQFIIIEELENFEKDSQSLKDLEKEFVDFWEKIFQKFSAYQKSEQQRLHLLKTSLAKSVFCNTDSEETVFTSEMCLMKEDMKVLQDRLLKDMLEEELLNVRRELMSVFMSHERNANV

SEQ ID NO: 27973 - protein, 698 aa, Artificial Sequence
  Synthetic polypeptide
PCLFCFHYDVVIQKNMNFSVRESKKLLTIILKNTVKISKREGKELLLYFDASLEITNVTQKIFGATKHRESIRKQGISVAKTSLHILFDASGSQILVPESQISPVGEELVSLKEKSKSPKEFAKPSKYIKNSDKGNRNNSQLEKTTPSKRKMSEASMIVSGADRYTMRSPVLFSNTSIPPRRRRIKPPLQMTSSAEKPSVSQTSENRVDNAASLKSRSSEGRHRRDNIDKHIKTAKCVENTENKNVEFPNQNFSELQDVIPDSQAAEKRDHTILPGVLDNICGNKIHSKWACWTPVTNIELCNNQRASTSSGDTLNQDIVINKKLTKQKSSSSISDHNSEGTGKVKYKKEQTDHIKIDKAEVEVCKKHNQQQNHPKYSGQKNTENAKQSDWPVESETTFKSVLLNKTIEESLIYRKKYILSKDVNTATCDKNPSASKNVQSHRKAEKELTSELNSWDSKQKKMREKSKGKEFTNVAESLISQINKRYKTKDDIKSTRKLKESLINSGFSNKPVVQLSKEKVQKKSYRKLKTTFVNVTSECPVNDVYNFNLNGADDPIIKLGIQEFQATAKEACADRSIRLVGPRNHDELKSSVKTKDKKIITNHQKKNLFSDTETEYRCDDSKTDISWLREPKSKPQLIDYSRNKNVKNHKSGKSRSSLEKGQPSSKMTPSKNITKKMDKTIPEGRIRLPRKATKTKK

SEQ ID NO: 27974 - protein, 187 aa, Artificial Sequence
  Synthetic polypeptide
LNLTFIYKTWSDVEGQRPALLICTAAAGPTQGVKAYPDATMHRQLLAPVEGRMAETLNQSKERNRFSLSRGCIIPQGRATAGRGLPQDIYKEMMPRRLTQTGKRKHGALARTPSFKKVVYDHKEDEENKAGRKQRSHLFKVMQLRNEQGGVRVQSAHSPSPLNKKACFPGDYRGESAGGHNCRAVSG

SEQ ID NO: 27975 - protein, 53 aa, Artificial Sequence
  Synthetic polypeptide
LSYIKHGQMLKARGRLCSSAQLQQDPRRELRLTQMPQCTDNSWLRWKEGWQRH

SEQ ID NO: 27976 - protein, 167 aa, Artificial Sequence
  Synthetic polypeptide
LNLTFIYKTWSDVEGQRPALLICTAAAGPTQGVKDLEEVPPSAASQSAQARCALGSWGYGKPFEPRSVKNIHSTPAYPDATMHRQLLAPVEGRMAETLNQKLHVANVLEDDPGYLPHVYSEEGECGGAPSLSSLASLEQELQPDLLDSLGSKATPFEEIYSESGVPS

SEQ ID NO: 27977 - protein, 64 aa, Artificial Sequence
  Synthetic polypeptide
LSYIKHGQMLKARGRLCSSAQLQQDPRRELRISRKCLHLQRVSQPKHAVLWGAGVMASPLSQEV

SEQ ID NO: 27978 - protein, 126 aa, Artificial Sequence
  Synthetic polypeptide
LNLTFIYKTWSDVEGQRPALLICTAAAGPTQGVKAYPDATMHRQLLAPVEGRMAETLNQKLHVANVLEDDPGYLPHVYSEEGECGGAPSLSSLASLEQELQPDLLDSLGSKATPFEEIYSESGVPS

SEQ ID NO: 27979 - protein, 82 aa, Artificial Sequence
  Synthetic polypeptide
LNLTFIYKTWSDVEGQRPALLICTAAAGPTQGVKGYGKPFEPRSVKNIHSTPAYPDATMHRQLLAPVEGRMAETLNQKLHVA

SEQ ID NO: 27980 - protein, 41 aa, Artificial Sequence
  Synthetic polypeptide
LSYIKHGQMLKARGRLCSSAQLQQDPRRELRVMASPLSQEV

SEQ ID NO: 27981 - protein, 39 aa, Artificial Sequence
  Synthetic polypeptide
GWARWLMPVIPALGVRGRRITRSSDRDHPGQHGCTTMSL

SEQ ID NO: 27982 - protein, 27 aa, Artificial Sequence
  Synthetic polypeptide
SQHWESEAGGSRGQAIETILANMGVQL

SEQ ID NO: 27983 - protein, 628 aa, Artificial Sequence
  Synthetic polypeptide
MGTVAHACNPSTGSPRQADHEVKRSRPSWPTWVYNYEPLTQLKNVRANYYGKYIALRGTVVRVSNIKPLCTKMAFLCAACGEIQSFPLPDGKYSLPTKCPVPVCRGRSFTALRSSPLTVTMDWQSIKIQELMSDDQREAGRIPRTIECELVHDLVDSCVPGDTVTITGIVKVSNAEEGSRNKNDKCMFLLYIEANSISNSKGQKTKSSEDGCKHGMLMEFSLKDLYAIQEIQAEENLFKLIVNSLCPVIFGHEAACNVAPRGVYVCGNTTTTSGLTVTLSKDSSSGDFALEAGALVLGDQGICGIDEFDKMGNQHQALLEAMEQQSISLAKAGVVCSLPARTSIIAAANPVGGHYNKAKTVSENLKMGSALLSRFDLVFILLDTPNEHHDHLLSEHVIAIRAGKQRTISSATVARMNSQDSNTSVLEVVSEKPLSERLKVVPGETIDPIPHQLLRKYIGYARQYVYPRLSTEAARVLQDFYLELRKQSQRLNSSPITTRQLESLIRLTEARARLELREEATKEDAEDIVEIMKYSMLGTYSDEFGNLDFERSQHGSGMSNRSTAKRFISALNNVAERTYNNIFQFHQLRQIAKELNIQVADFENFIGSLNDQGYLLKKGPKVYQLQTM

SEQ ID NO: 27984 - protein, 675 aa, Artificial Sequence
  Synthetic polypeptide
MGTVAHACNPSTGSPRQADHEVKRSRPSWPTWVYNYEPLTQLKNVRANYYGKYIALRGTVVRVSNIKPLCTKMAFLCAACGEIQSFPLPDGKYSLPTKCPVPVCRGRSFTALRSSPLTVTMDWQSIKIQELMSDDQREAGRIPRTIECELVHDLVDSCVPGDTVTITGIVKVSNAEEGSRNKNDKCMFLLYIEANSISNSKGQKTKSSEDGCKHGMLMEFSLKDLYAIQEIQAEENLFKLIVNSLCPVIFGHELVKAGLALALFGGSQKYADDKNRIPIRGDPHILVVGDPGLGKSQMLQAACNVAPRGVYVCGNTTTTSGLTVTLSKDSSSGDFALEAGALVLGDQGICGIDEFDKMGNQHQALLEAMEQQSISLAKAGVVCSLPARTSIIAAANPVGGHYNKAKTVSENLKMGSALLSRFDLVFILLDTPNEHHDHLLSEHVIAIRAGKQRTISSATVARMNSQDSNTSVLEVVSEKPLSERLKVVPGETIDPIPHQLLRKYIGYARQYVYPRLSTEAARVLQDFYLELRKQSQRLNSSPITTRQLESLIRLTEARARLELREEATKEDAEDIVEIMKYSMLGTYSDEFGNLDFERSQHGSGMSNRSTAKRFISALNNVAERTYNNIFQFHQLRQIAKELNIQVADFENFIGSLNDQGYLLKKGPKVYQLQTM

SEQ ID NO: 27985 - protein, 715 aa, Artificial Sequence
  Synthetic polypeptide
MGTVAHACNPSTGSPRQADHEVKRSRPSWPTWVYNYEPLTQLKNVRANYYGKYIALRGTVVRVSNIKPLCTKMAFLCAACGEIQSFPLPDGKYSLPTKCPVPVCRGRSFTALRSSPLTVTMDWQSIKIQELMSDDQREAGRIPRTIECELVHDLVDSCVPGDTVTITGIVKVSNAEEGSRNKNDKCMFLLYIEANSISNSKGQKTKSSEDGCKHGMLMEFSLKDLYAIQEIQAEENLFKLIVKWSLALSPRLEYSGAISAHCNLHLPSSNSSPTSACRVAGTTGMRHQTQLLLLVKAGLALALFGGSQKYADDKNRIPIRGDPHILVVGDPGLGKSQMLQAACNVAPRGVYVCGNTTTTSGLTVTLSKDSSSGDFALEAGALVLGDQGICGIDEFDKMGNQHQALLEAMEQQSISLAKAGVVCSLPARTSIIAAANPVGGHYNKAKTVSENLKMGSALLSRFDLVFILLDTPNEHHDHLLSEHVIAIRAGKQRTISSATVARMNSQDSNTSVLEVVSEKPLSERLKVVPGETIDPIPHQLLRKYIGYARQYVYPRLSTEAARVLQDFYLELRKQSQRLNSSPITTRQLESLIRLTEARARLELREEATKEDAEDIVEIMKYSMLGTYSDEFGNLDFERSQHGSGMSNRSTAKRFISALNNVAERTYNNIFQFHQLRQIAKELNIQVADFENFIGSLNDQGYLLKKGPKVYQLQTM

SEQ ID NO: 27986 - protein, 659 aa, Artificial Sequence
  Synthetic polypeptide
MGTVAHACNPSTGSPRQADHEVKRSRPSWPTWVYNYEPLTQLKNVRANYYGKYIALRGTVVRVSNIKPLCTKMAFLCAACGEIQSFPLPDGKYSLPTKCPVPVCRGRSFTALRSSPLTVTMDWQSIKIQELMSDDQREAGRIPRTIECELVHDLVDSCVPGDTVTITGIVKVSNAEEANSISNSKGQKTKSSEDGCKHGMLMEFSLKDLYAIQEIQAEENLFKLIVNSLCPVIFGHELVKAGLALALFGGSQKYADDKNRIPIRGDPHILVVGDPGLGKSQMLQAACNVAPRGVYVCGNTTTTSGLTVTLSKDSSSGDFALEAGALVLGDQGICGIDEFDKMGNQHQALLEAMEQQSISLAKAGVVCSLPARTSIIAAANPVGGHYNKAKTVSENLKMGSALLSRFDLVFILLDTPNEHHDHLLSEHVIAIRAGKQRTISSATVARMNSQDSNTSVLEVVSEKPLSERLKVVPGETIDPIPHQLLRKYIGYARQYVYPRLSTEAARVLQDFYLELRKQSQRLNSSPITTRQLESLIRLTEARARLELREEATKEDAEDIVEIMKYSMLGTYSDEFGNLDFERSQHGSGMSNRSTAKRFISALNNVAERTYNNIFQFHQLRQIAKELNIQVADFENFIGSLNDQGYLLKKGPKVYQLQTM

SEQ ID NO: 27987 - protein, 269 aa, Artificial Sequence
  Synthetic polypeptide
ETRAECSGWRKVRDDDDINDVASMAGVNLSEESARILATNSELVGTLTRSCKDETFLLQAPLQRRILEIGKKHGITELHPDVVSYVSHATQQRLQNLVEKISETAQQKNFSYKDDDRYEQASDVRAQLKFFEQLDQIEKQRKDEQEREILMRAAKSRSRQEDPEQLRLKQKAKEMQQQELAQMRQRDANLTALAAIGPRKKRKVDCPGPGSGAEGSGPGSVVPGSSGVGTPRQFTRQRITRVNLRDLIFCLENERETSHSLLLYKAFLK

SEQ ID NO: 27988 - protein, 33 aa, Artificial Sequence
  Synthetic polypeptide
GDALVCRKHVQNVPGGGKSGTMMTLMMLHRWLE

SEQ ID NO: 27989 - protein, 21 aa, Artificial Sequence
  Synthetic polypeptide
GMPLSVGNTCRMFRVEESQGR

SEQ ID NO: 27990 - protein, 64 aa, Artificial Sequence
  Synthetic polypeptide
ETRAECSGWRKVRDDDDINDVASMAGVNLSEESARILATNSELVGTLTRSCKDETFLLQAPLQR

SEQ ID NO: 27991 - protein, 63 aa, Artificial Sequence
  Synthetic polypeptide
KQQRGQKSSGGENLLVRTQFNRGAGYEVEEESWKAGRIDRGWCSRKRHCCSWCGEEVSGQTAG

SEQ ID NO: 27992 - protein, 241 aa, Artificial Sequence
  Synthetic polypeptide
SEHNSTEGRDMKLRRSPGKQDGSTEVGVRGRDIVVLGVEKKSVAKLQDERTVRKICALDDNVCMAFAGLTADARIVINRARVECQSHRLTVEDPVTVEYITRYIASLKQRYTQSNGRRPFGISALIVGFDFDGTPRLYQTDPSGTYHAWKANAIGRGAKSVREFLEKNYTDEAIETDDLTIKLVIKALLEVVQSGGKNIELAVMRRDQSLKILNPEEIEKYVAEIEKEKEENEKKKQKKAS

SEQ ID NO: 27993 - protein, 61 aa, Artificial Sequence
  Synthetic polypeptide
GGVLESRTDRPRLVFEEETLLFLVWRRSQWPNCRMKEQCGRSVLWMTTSAWPLQASPPMQG

SEQ ID NO: 27994 - protein, 142 aa, Artificial Sequence
  Synthetic polypeptide
SEHNSTEGRDMKLRRSPGKQDGSTEVGVRGRDIVVLGVEKKSVAKLQDERTVRKICALDDNVCMAFAGLTADARIVINRARVECQSHRLTVEDPVTVEYITRYIASLKQVGACPLACSPLAAGQSRLRHGGSCHVTSGESEN

SEQ ID NO: 27995 - protein, 131 aa, Artificial Sequence
  Synthetic polypeptide
QSRILSLNKAMAITPTSSHPTRSRATTGPSRSPRSTTMRGETPSTASSRPGTSRVPRSSRRTPSSSTPASRATPGSSRATGLPREPRHSTPATSKAKASSTEATEHRRQRRLPSSSGPTAMNRASMEITSS

SEQ ID NO: 27996 - protein, 30 aa, Artificial Sequence
  Synthetic polypeptide
IKPWRLRLPAVILHGAELRPVLRGVHAALL

SEQ ID NO: 27997 - protein, 193 aa, Artificial Sequence
  Synthetic polypeptide
SQHFGRPRRVDHEKRYFVDYRRVLVCGGNGGAGASCFHSEPRKEFGGPDGGDGGNGGHVILRVADIPGIIRGAHQNRGLGSAFLRHIERCRFLLFVVDLSQPEPWTQVDDLKYELEMYEKGLSARPHAIVANKIDLPEAQANLSQLRDHLGQEVIVLSALTGENLEQLLLHLKVLYDAYAEAELGQGRQPLRW

SEQ ID NO: 27998 - protein, 69 aa, Artificial Sequence
  Synthetic polypeptide
PGTVAHACSPSTLGGRGGWITRKGTLWTIGECLSVEETEALGQAASTVSPARSLEALMEGTEATVDTSF

SEQ ID NO: 27999 - protein, 47 aa, Artificial Sequence
  Synthetic polypeptide
RAQWLTPVVPALWEAEAGGSREKVLCGLSESACLWRKRRRWGKLLPQ

SEQ ID NO: 28000 - protein, 84 aa, Artificial Sequence
  Synthetic polypeptide
SQHFGRPRRVDHEKRYFVDYRRVLVCGGNGGAGASCFHSEPRKEFGGPDGGDGGNGGHVILRGPRGHAGEGGRQSCGRPVLRGR

SEQ ID NO: 28001 - protein, 351 aa, Artificial Sequence
  Synthetic polypeptide
SQHFGRPRRVDHEKRYFVDYRRVLVCGGNGGAGASCFHSEPRKEFGGPDGGDGGNGGHVILRVDQQVKSLSSVLSRYQGFSGEDGGSKNCFGRSGAVLYIRVPVGTLVKEGGRVVADLSCVGDEYIAALGGAGGKGNRFFLANNNRAPVTCTPGQPGQQRVLHLELKTVAHAGMVGFPNAGKSSLLRAISNARPAVASYPFTTLKPHVGIVHYEGHLQIAVADIPGIIRGAHQNRGLGSAFLRHIERCRFLLFVVDLSQPEPWTQVDDLKYELEMYEKGLSARPHAIVANKIDLPEAQANLSQLRDHLGQEVIVLSALTGENLEQLLLHLKVLYDAYAEAELGQGRQPLRW

SEQ ID NO: 28002 - protein, 178 aa, Artificial Sequence
  Synthetic polypeptide
SQHFGRPRRVDHEKRYFVDYRRVLVCGGNGGAGASCFHSEPRKEFGGPDGGDGGNGGHVILRVDQQVKSLSSVLSRYQGFSGEDGGSKNCFGRSGAVLYIRVPVGTLVKEGGRVVADLSCVGDEYIAALGGAGGKGNRFFLANNNRAPVTCTPGQPGQQRVLHLELKTVAHAGMVGFP

SEQ ID NO: 28003 - protein, 71 aa, Artificial Sequence
  Synthetic polypeptide
SQHFGRPRRVDHEVRRSRPSWPTRKGTLWTIGECLSVEETEALGQAASTVSPARSLEALMEGTEATVDTSF

SEQ ID NO: 28004 - protein, 58 aa, Artificial Sequence
  Synthetic polypeptide
PGTVAHACSPSTLGGRGGWITRSGDRDHPGQHEKVLCGLSESACLWRKRRRWGKLLPQ

SEQ ID NO: 28005 - protein, 212 aa, Artificial Sequence
  Synthetic polypeptide
RAQWLTPVVPALWEAEAGGSRGQEIETILANTKRYFVDYRRVLVCGGNGGAGASCFHSEPRKEFGGPDGGDGGNGGHVILRVADIPGIIRGAHQNRGLGSAFLRHIERCRFLLFVVDLSQPEPWTQVDDLKYELEMYEKGLSARPHAIVANKIDLPEAQANLSQLRDHLGQEVIVLSALTGENLEQLLLHLKVLYDAYAEAELGQGRQPLRW

SEQ ID NO: 28006 - protein, 103 aa, Artificial Sequence
  Synthetic polypeptide
RAQWLTPVVPALWEAEAGGSRGQEIETILANTKRYFVDYRRVLVCGGNGGAGASCFHSEPRKEFGGPDGGDGGNGGHVILRGPRGHAGEGGRQSCGRPVLRGR

SEQ ID NO: 28007 - protein, 370 aa, Artificial Sequence
  Synthetic polypeptide
RAQWLTPVVPALWEAEAGGSRGQEIETILANTKRYFVDYRRVLVCGGNGGAGASCFHSEPRKEFGGPDGGDGGNGGHVILRVDQQVKSLSSVLSRYQGFSGEDGGSKNCFGRSGAVLYIRVPVGTLVKEGGRVVADLSCVGDEYIAALGGAGGKGNRFFLANNNRAPVTCTPGQPGQQRVLHLELKTVAHAGMVGFPNAGKSSLLRAISNARPAVASYPFTTLKPHVGIVHYEGHLQIAVADIPGIIRGAHQNRGLGSAFLRHIERCRFLLFVVDLSQPEPWTQVDDLKYELEMYEKGLSARPHAIVANKIDLPEAQANLSQLRDHLGQEVIVLSALTGENLEQLLLHLKVLYDAYAEAELGQGRQPLRW

SEQ ID NO: 28008 - protein, 197 aa, Artificial Sequence
  Synthetic polypeptide
RAQWLTPVVPALWEAEAGGSRGQEIETILANTKRYFVDYRRVLVCGGNGGAGASCFHSEPRKEFGGPDGGDGGNGGHVILRVDQQVKSLSSVLSRYQGFSGEDGGSKNCFGRSGAVLYIRVPVGTLVKEGGRVVADLSCVGDEYIAALGGAGGKGNRFFLANNNRAPVTCTPGQPGQQRVLHLELKTVAHAGMVGFP

SEQ ID NO: 28009 - protein, 49 aa, Artificial Sequence
  Synthetic polypeptide
LAGHGGARLWSQLLGRLSQEDPLSPEVRGYGHRCRLPCSAEATSACGPS

SEQ ID NO: 28010 - protein, 98 aa, Artificial Sequence
  Synthetic polypeptide
AQKFEAMDIAAGSHVQQKRLQRVDHPEEVCWPGAVQDHDANRLQRASELLAADHGVHGARVPHPQGLLPAPAPGEDAVCGCFCCFGCGFPVGEDRQTI

SEQ ID NO: 28011 - protein, 455 aa, Artificial Sequence
  Synthetic polypeptide
KKIKIISWAWWCTPLVPATWEAESGGSLEPRSSRLWTSLPAPMFSRSDFSVWTILKKCVGLELSKITMPIAFNEPLSFLQRITEYMEHVYLIHRASCQPQPLERMQSVAAFAVSAVASQWERTGKPFNPLLGETYELIREDLGFRFISEQVSHHPPISAFHSEGLNHDFLFHGSIYPKLKFWGKSVEAEPRGTITLELLKHNEAYTWTNPTCCVHNVIIGKLWIEQYGTVEILNHRTGHKCVLHFKPCGLFGKELHKVEGHIQDKNKKKLFMIYGKWTECLWGIDPVSYESFKKQERRGDHLRKAKLDEDSGKADSDVADDVPVAQETVQVIPGSKLLWRINTRPPNSAQMYNFTSFTVSLNELETGMEKTLPPTDCRLRPDIRGMENGNMDLASQEKERLEEKQREARRERAKEEAEWQTRWFYPGNNPYTGTPDWLYAGDYFERNFSDCPDIY

SEQ ID NO: 28012 - protein, 15 aa, Artificial Sequence
  Synthetic polypeptide
ECGREAGRPGTWKTT

SEQ ID NO: 28013 - protein, 19 aa, Artificial Sequence
  Synthetic polypeptide
SVGARQDVRERGRRLDHLP

SEQ ID NO: 28014 - protein, 349 aa, Artificial Sequence
  Synthetic polypeptide
VWARGRTSGNVEDDLIIFPDDCEFKRVPQCPSGRVYVLKFKAGSKRLFFWMQEPKTDQDEEHCRKVNEYLNNPPMPGALGASGSSGHELSALGGEGGLQSLLGNMSHSQLMQLIGPAGLGGLGGLGALTGPGLASLLGSSGPPGSSSSSSSRSQSAAVTPSSTTSSTRATPAPSAPAAASATSPSPAPSSGNGASTAASPTQPIQLSDLQSILATMNVPAGPAGGQQVDLASVLTPEIMAPILANADVQERLLPYLPSGESLPQTADEIQNTLTSPQFQQALGMFSAALASGQLGPLMCQFGLPAEAVEAANKGDVEAFAKAMQNNAKPEQKEGDTKDKKDEEEDMSLD

SEQ ID NO: 28015 - protein, 12 aa, Artificial Sequence
  Synthetic polypeptide
ECGREAGLDHLP

SEQ ID NO: 28016 - protein, 342 aa, Artificial Sequence
  Synthetic polypeptide
SVGARQDLIIFPDDCEFKRVPQCPSGRVYVLKFKAGSKRLFFWMQEPKTDQDEEHCRKVNEYLNNPPMPGALGASGSSGHELSALGGEGGLQSLLGNMSHSQLMQLIGPAGLGGLGGLGALTGPGLASLLGSSGPPGSSSSSSSRSQSAAVTPSSTTSSTRATPAPSAPAAASATSPSPAPSSGNGASTAASPTQPIQLSDLQSILATMNVPAGPAGGQQVDLASVLTPEIMAPILANADVQERLLPYLPSGESLPQTADEIQNTLTSPQFQQALGMFSAALASGQLGPLMCQFGLPAEAVEAANKGDVEAFAKAMQNNAKPEQKEGDTKDKKDEEEDMSLD

SEQ ID NO: 28017 - protein, 7 aa, Artificial Sequence
  Synthetic polypeptide
VWARGRT

SEQ ID NO: 28018 - protein, 62 aa, Artificial Sequence
  Synthetic polypeptide
ECGREAAPGASRQRSPRHPPPLPPVPPQPLLLQQLPQQLARAPRPVPGMEPAQQPARPSPSS

SEQ ID NO: 28019 - protein, 38 aa, Artificial Sequence
  Synthetic polypeptide
SVGARQLPEPVGSGHPVIHHLFHPCHPSPFCSSSCLSN

SEQ ID NO: 28020 - protein, 205 aa, Artificial Sequence
  Synthetic polypeptide
VWARGSSRSQSAAVTPSSTTSSTRATPAPSAPAAASATSPSPAPSSGNGASTAASPTQPIQLSDLQSILATMNVPAGPAGGQQVDLASVLTPEIMAPILANADVQERLLPYLPSGESLPQTADEIQNTLTSPQFQQALGMFSAALASGQLGPLMCQFGLPAEAVEAANKGDVEAFAKAMQNNAKPEQKEGDTKDKKDEEEDMSLD

SEQ ID NO: 28021 - protein, 3224 aa, Artificial Sequence
  Synthetic polypeptide
AWKAEAAVSHDHTTALQPGQQNCDCSAAGTQGNACRKDPRVGRCLCKPNFQGTHCELCAPGFYGPGCQPCQCSSPGVADDRCDPDTGQCRCRVGFEGATCDRCAPGYFHFPLCQLCGCSPAGTLPEGCDEAGRCLCQPEFAGPHCDRCRPGYHGFPNCQACTCDPRGALDQLCGAGGLCRCRPGYTGTACQECSPGFHGFPSCVPCHCSAEGSLHAACDPRSGQCSCRPRVTGLRCDTCVPGAYNFPYCEAGSCHPAGLAPVDPALPEAQVPCMCRAHVEGPSCDRCKPGFWGLSPSNPEGCTRCSCDLRGTLGGVAECQPGTGQCFCKPHVCGQACASCKDGFFGLDQADYFGCRSCRCDIGGALGQSCEPRTGVCRCRPNTQGPTCSEPARDHYLPDLHHLRLELEEAATPEGHAVRFGFNPLEFENFSWRGYAQMAPVQPRIVARLNLTSPDLFWLVFRYVNRGAMSVSGRVSVREEGRSATCANCTAQSQPVAFPPSTEPAFITVPQRGFGEPFVLNPGTWALRVEAEGVLLDYVVLLPSAYYEAALLQLRVTEACTYRPSAQQSGDNCLLYTHLPLDGFPSAAGLEALCRQDNSLPRPCPTEQLSPSHPPLITCTGSDVDVQLQVAVPQPGRYALVVEYANEDARQEVGVAVHTPQRAPQQGLLSLHPCLYSTLCRGTARDTQDHLAVFHLDSEASVRLTAEQARFFLHGVTLVPIEEFSPEFVEPRVSCISSHGAFGPNSAACLPSRFPKPPQPIILRDCQVIPLPPGLPLTHAQDLTPAMSPAGPRPRPPTAVDPDAEPTLLREPQATVVFTTHVPTLGRYAFLLHGYQPAHPTFPVEVLINAGRVWQGHANASFCPHGYGCRTLVVCEGQALLDVTHSELTVTVRVPKGRWLWLDYVLVVPENVYSFGYLREEPLDKSYDFISHCAAQGYHISPSSSSLFCRNAAASLSLFYNNGARPCGCHEVGATGPTCEPFGGQCPCHAHVIGRDCSRCATGYWGFPNCRPCDCGARLCDELTGQCICPPRTIPPDCLLCQPQTFGCHPLVGCEECNCSGPGIQELTDPTCDTDSGQCKCRPNVTGRRCDTCSPGFHGYPRCRPCDCHEAGTAPGVCDPLTGQCYCKENVQGPKCDQCSLGTFSLDAANPKGCTRCFCFGATERCRSSSYTRQEFVDMEGWVLLSTDRQVVPHERQPGTEMLRADLRHVPEAVPEAFPELYWQAPPSYLGDRVSSYGGTLRYELHSETQRGDVFVPMESRPDVVLQGNQMSITFLEPAYPTPGHVHRGQLQLVEGNFRHTETRNTVSREELMMVLASLEQLQIRALFSQISSAVFLRRVALEVASPAGQGALASNVELCLCPASYRGDSCQECAPGFYRDVKGLFLGRCVPCQCHGHSDRCLPGSGVCVDCQHNTEGAHCERCQAGFVSSRDDPSAPCVSCPCPLSVPSNNFAEGCVLRGGRTQCLCKPGYAGASCERCAPGFFGNPLVLGSSCQPCDCSGNGDPNLLFSDCDPLTGACRGCLRHTTGPRCEICAPGFYGNALLPGNCTRCDCTPCGTEACDPHSGHCLCKAGVTGRRCDRCQEGHFGFDGCGGCRPCACGPAAEGSECHPQSGQCHCRPGTMGPQCRECAPGYWGLPEQGCRRCQCPGGRCDPHTGRCNCPPGLSGERCDTCSQQHQVPVPGGPVGHSIHCEVCDHCVVLLLDDLERAGALLPAIHEQLRGINASSMAWARLHRLNASIADLQSQLRSPLGPRHETAQQLEVLEQQSTSLGQDARRLGGQAVGTRDQASQLLAGTEATLGHAKTLLAAIRAVDRTLSELMSQTGHLGLANASAPSGEQLLRTLAEVERLLWEMRARDLGAPQAAAEAELAAAQRLLARVQEQLSSLWEENQALATQTRDRLAQHEAGLMDLREALNRAVDATREAQELNSRNQERLEEALQRKQELSRDNATLQATLHAARDTLASVFRLLHSLDQAKEELERLAASLDGARTPLLQRMQTFSPAGSKLRLVEAAEAHAQQLGQLALNLSSIILDVNQDRLTQRAIEASNAYSRILQAVQAAEDAAGQALQQADHTWATVVRQGLVDRAQQLLANSTALEEAMLQEQQRLGLVWAALQGARTQLRDVRAKKDQLEAHIQAAQAMLAMDTDETSKKIAHAKAVAAEAQDTATRVQSQLQAMQENVERWQGQYEGLRGQDLGQAVLDAGHSVSTLEKTLPQLLAKLSILENRGVHNASLALSASIGRVRELIAQARGAASKVKVPMKFNGRSGVQLRTPRDLADLAAYTALKFYLQGPEPEPGQGTEDRFVMYMGSRQATGDYMGVSLRDKKVHWVYQLGEAGPAVLSIDEDIGEQFAAVSLDRTLQFGHMSVTVERQMIQETKGDTVAPGAEGLLNLRPDDFVFYVGGYPSTFTPPPLLRFPGYRGCIEMDTLNEEVVSLYNFERTFQLDTAVDRPCARSKSTGDPWLTDGSYLDGTGFARISFDSQISTTKRFEQELRLVSYSGVLFFLKQQSQFLCLAVQEGSLVLLYDFGAGLKKAVPLQPPPPLTSASKAIQVFLLGGSRKRVLVRVERATVYSVEQDNDLELADAYYLGGVPPDQLPPSLRRLFPTGGSVRGCVKGIKALGKYVDLKRLNTTGVSAGCTADLLVGRAMTFHGHGFLRLALSNVAPLTGNVYSGFGFHSAQDSALLYYRASPDGLCQVSLQQGRVSLQLLRTEVKTQAGFADGAPHYVAFYSNATGVWLYVDDQLQQMKPHRGPPPELQPQPEGPPRLLLGGLPESGTIYNFSGCISNVFVQRLLGPQRVFDLQQNLGSVNVSTGCAPALQAQTPGLGPRGLQATARKASRRSRQPARHPACMLPPHLRTTRDSYQFGGSLSSHLEFVGILARHRNWPSLSMHVLPRSSRGLLLFTARLRPGSPSLALFLSNGHFVAQMEGLGTRLRAQSRQRSRPGRWHKVSVRWEKNRILLVTDGARAWSQEGPHRQHQGAEHPQPHTLFVGGLPASSHSSKLPVTVGFSGCVKRLRLHGRPLGAPTRMAGVTPCILGPLEAGLFFPGSGGVITLDLPGATLPDVGLELEVRPLAVTGLIFHLGQARTPPYLQLQVTEKQVLLRADDGAGEFSTSVTRPSVLCDGQWHRLAVMKSGNVLRLEVDAQSNHTVGPLLAAAAGAPAPLYLGGLPEPMAVQPWPPAYCGCMRRLAVNRSPVAMTRSVEVHGAVGASGCPAA

SEQ ID NO: 28022 - protein, 222 aa, Artificial Sequence
  Synthetic polypeptide
AMITPQHSSLGNRIVTAARQGPRATPAGRTQGWDAVCANPTSKAPIVSSARQGSTAPAASPASVPALEWPMTAVTLTQASAGAEWASRGPHVIAVPPATFTSLSASCVAAALQEPCPRAAMRPAAAYASLSLLDLIVTGAALATMVSPTAKHAPATLGEPWTSSVGREVCAAAAPATQALPARNAAPAFTASPAVSPATALLKAPCTQPVTPGVGSAAAGPV

SEQ ID NO: 28023 - protein, 12 aa, Artificial Sequence
  Synthetic polypeptide
SHHSTPAWATEL

SEQ ID NO: 28024 - protein, 408 aa, Artificial Sequence
  Synthetic polypeptide
HFGRPRPADHLRSGVRDQPGQHGETPSLPKIQKLARHGDRRLYSQLLGRLRKRVTSQRCSLEFLEDAVGCAPAQRTKHTSGSPRHKGLKKTHFIKNMRQYDTRNSRIVLICAKRSLCAAFSVLPYGEGLRISDLRVDSQKQRHPSGGVSVSSEMVFELEGVELGADGKVVSYAKFLYPTNALVTHKSDSHGLLPTPRPSVPRTLPGSRHKPAPTKSAPASTELGSDVGDTLEYNPNLLDDPQWPCGKHKRVLIFASYMTTVIEYVKPSDLKKDMNETFREKFPHVKLTLSKIRSLKREMRSLSEECSLEPVTVAMAYVYFEKLVLQGKLSKQNRKLCAGACVLLAAKISSDLRKSGVTQLIDKLEERFRFNRRDLIGFEFTVLVALELALYLPENQVLPHYRRLTQQF

SEQ ID NO: 28025 - protein, 46 aa, Artificial Sequence
  Synthetic polypeptide
QAPVLSATREAEEASHVPALLPGVSGRCRGMRSSTENQTHIWITET

SEQ ID NO: 28026 - protein, 126 aa, Artificial Sequence
  Synthetic polypeptide
DLMVLEASGVCPAVTHTVLLPSEESACFSLHHDCQHLHVLHIPHGGHLGPEHHHRQQADRHGTPGGRAGPSVHGRGRAQHIQHGHRAWQGPGPAARRARPTCSGHRLCGLLAALPRAAPHVLLHLG

SEQ ID NO: 28027 - protein, 208 aa, Artificial Sequence
  Synthetic polypeptide
KRLAFALLSLTPSCCPVKKVPASPSTMIVNTFMSFIFPMVVISVLNTIIANKLTVMVRQAAEQGQVCTVGGEHSTFSMAIEPGRVQALRHGVRVLRAVVIAFVVCWLPYHVRRLMFCYISDEQWTPFLYDFYHYFYMVTNALFYVSSTINPILYNLVSANFRHIFLATLACLCPVWRRRRKRPAFSRKADSVSSNHTLSSNATRETLY

SEQ ID NO: 28028 - protein, 24 aa, Artificial Sequence
  Synthetic polypeptide
GSPSPAELSTPSCPSYSPWWSSRS

SEQ ID NO: 28029 - protein, 138 aa, Artificial Sequence
  Synthetic polypeptide
DLMVLEASGVCPAVTHTVLLPSEESACFSLHHDCRSPEAPPALQNCQHLHVLHIPHGGHLGPEHHHRQQADRHGTPGGRAGPSVHGRGRAQHIQHGHRAWQGPGPAARRARPTCSGHRLCGLLAALPRAAPHVLLHLG

SEQ ID NO: 28030 - protein, 220 aa, Artificial Sequence
  Synthetic polypeptide
KRLAFALLSLTPSCCPVKKVPASPSTMIVGLLRLPQPCRTVNTFMSFIFPMVVISVLNTIIANKLTVMVRQAAEQGQVCTVGGEHSTFSMAIEPGRVQALRHGVRVLRAVVIAFVVCWLPYHVRRLMFCYISDEQWTPFLYDFYHYFYMVTNALFYVSSTINPILYNLVSANFRHIFLATLACLCPVWRRRRKRPAFSRKADSVSSNHTLSSNATRETLY

SEQ ID NO: 28031 - protein, 132 aa, Artificial Sequence
  Synthetic polypeptide
QPGVAEGAGLSSGQAQIQAQPPLRWSLWAGPLPCPGLGSGQHLHVLHIPHGGHLGPEHHHRQQADRHGTPGGRAGPSVHGRGRAQHIQHGHRAWQGPGPAARRARPTCSGHRLCGLLAALPRAAPHVLLHLG

SEQ ID NO: 28032 - protein, 219 aa, Artificial Sequence
  Synthetic polypeptide
SQESQKERDSAQARLKSRHSPPCAGVFGQDLYPVQDSDQVNTFMSFIFPMVVISVLNTIIANKLTVMVRQAAEQGQVCTVGGEHSTFSMAIEPGRVQALRHGVRVLRAVVIAFVVCWLPYHVRRLMFCYISDEQWTPFLYDFYHYFYMVTNALFYVSSTINPILYNLVSANFRHIFLATLACLCPVWRRRRKRPAFSRKADSVSSNHTLSSNATRETLY

SEQ ID NO: 28033 - protein, 55 aa, Artificial Sequence
  Synthetic polypeptide
ARSRRRSGTQLRPGSNPGTAPLALESLGRTSTLSRTRIRSTPSCPSYSPWWSSRS

SEQ ID NO: 28034 - protein, 58 aa, Artificial Sequence
  Synthetic polypeptide
QPGVAEGAGLSSGQAQIQAQPPLRWSLWAGPLPCPGLGSGAGSTPSCPSYSPWWSSRS

SEQ ID NO: 28035 - protein, 134 aa, Artificial Sequence
  Synthetic polypeptide
SQESQKERDSAQARLKSRHSPPCAGVFGQDLYPVQDSDQVQGQHLHVLHIPHGGHLGPEHHHRQQADRHGTPGGRAGPSVHGRGRAQHIQHGHRAWQGPGPAARRARPTCSGHRLCGLLAALPRAAPHVLLHLG

SEQ ID NO: 28036 - protein, 221 aa, Artificial Sequence
  Synthetic polypeptide
ARSRRRSGTQLRPGSNPGTAPLALESLGRTSTLSRTRIRCRVNTFMSFIFPMVVISVLNTIIANKLTVMVRQAAEQGQVCTVGGEHSTFSMAIEPGRVQALRHGVRVLRAVVIAFVVCWLPYHVRRLMFCYISDEQWTPFLYDFYHYFYMVTNALFYVSSTINPILYNLVSANFRHIFLATLACLCPVWRRRRKRPAFSRKADSVSSNHTLSSNATRETLY

SEQ ID NO: 28037 - protein, 90 aa, Artificial Sequence
  Synthetic polypeptide
SQHFGRLRFLYDFYHYFYMVTNALFYVSSTINPILYNLVSANFRHIFLATLACLCPVWRRRRKRPAFSRKADSVSSNHTLSSNATRETLY

SEQ ID NO: 28038 - protein, 18 aa, Artificial Sequence
  Synthetic polypeptide
TRWLTPVIPALWEAEVPL

SEQ ID NO: 28039 - protein, 202 aa, Artificial Sequence
  Synthetic polypeptide
HPRPHAPRRARAVTPPPHPSRDPRPLPRALRTPPRTPPTTPTPVRPRGVNRHFHMICIRDKFSQNIGRQVPSKVIWDHLSTMYDMQALHESEILPFPNPERNFVLPEEIIQEVREGKVMIEEEMKEEMKEDVDPHNGADDVFSSSGSLGKASEKSSKDKEKNSSDLGCKEGADKRKRSRVTDKVLTANSNPSSPSAAKRRRT

SEQ ID NO: 28040 - protein, 4 aa, Artificial Sequence
  Synthetic polypeptide
DREV

SEQ ID NO: 28041 - protein, 88 aa, Artificial Sequence
  Synthetic polypeptide
PSPPRSPPSPGRDTAATPVPGPPPPPTRPSDPAPDPAHDPYPRETARCEPTLPHDLYSGQVQPEHRAAGPIQGHLGPSEHHVRHAGAA

SEQ ID NO: 28042 - protein, 643 aa, Artificial Sequence
  Synthetic polypeptide
GRWRWLRPVIPALSEAWAVGSPESRMTGSRNWRATRDMCRYRHNYPDLVERDCNGDTPNLSFYRNEIRFLPNGCFIEDILQNWTDNYDLLEDNHSYIQWLFPLREPGVNWHAKPLTLREVEVFKSSQEIQERLVRAYELMLGFYGIRLEDRGTGTVGRAQNYQKRFQNLNWRSHNNLRITRILKSLGELGLEHFQAPLVRFFLEETLVRRELPGVRQSALDYFMFAVRCRHQRRQLVHFAWEHFRPRCKFVWGPQDKLRRFKPSSLPHPLEGSRKVEEEGSPGDPDHEASTQGRTCGPEHSKGGGRVDEGPQPRSVEPQDAGPLERSQGDEAGGHGEDRPEPLSPKESKKRKLELSRREQPPTEPGPQSASEVEKIALNLEGCALSQGSLRTGTQEVGGQDPGEAVQPCRQPLGARVADKVRKRRKVDEGAGDSAAVASGGAQTLALAGSPAPSGHPKAGHSENGVEEDTEGRTGPKEGTPGSPSETPGPSPAGPAGDEPAESPSETPGPRPAGPAGDEPAESPSETPGPRPAGPAGDEPAESPSETPGPSPAGPTRDEPAESPSETPGPRPAGPAGDEPAESPSETPGPRPAGPAGDEPAESPSETPGPSPAGPTRDEPAKAGEAAELQDAEVESSAKSGKP

SEQ ID NO: 28043 - protein, 16 aa, Artificial Sequence
  Synthetic polypeptide
SQHFRRPGQSDHQSPE

SEQ ID NO: 28044 - protein, 38 aa, Artificial Sequence
  Synthetic polypeptide
SVAVAQACNPSTFGGLGSRITRVQNDRVQKLASHEGHV

SEQ ID NO: 28045 - protein, 33 aa, Artificial Sequence
  Synthetic polypeptide
ISAQPGIQGHYWSLRLGGSGPPGPGRRPGEAGV

SEQ ID NO: 28046 - protein, 228 aa, Artificial Sequence
  Synthetic polypeptide
LTLLTLPFCLVSNKYQHSLAFRATTGLCVLVVVVPRAQVAALERQVFDFLGYQWAPILANFVHIIIVILGLFGTIQYRLRYVMVYTLWAAVWVTWNVFIICFYLEVGGLLKDSELLTFSLSRHRSWWRERWPGCLHEEVPAVGLGAPHGQALVSGAGCALEPSYVEALHSCLQILIALLGFVCGCQVVSVFTEEEDSFDFIGGFDPFPLYHVNEKPSSLLSKQVYLPA

SEQ ID NO: 28047 - protein, 77 aa, Artificial Sequence
  Synthetic polypeptide
WSPGPRSPPWRGRCLTSWATSGRPSWPTLSTSSSSSWDSSAPSSTGCAMSWCTRCGQPSGSPGTSSSSASTWKSVAS

SEQ ID NO: 28048 - protein, 139 aa, Artificial Sequence
  Synthetic polypeptide
EAEAGRSRGQEIKSILVNMVIILNHPGQISAGYSPVIDCHTAHIACKFAELKEKIDRRSGKKLEDNPKSLKSGDAAIVEMVPGKPMCVESFSQYPPLGRFAVRDMRQTVAVGVIKNVEKKSGGAGKVTKSAQKAQKAGK

SEQ ID NO: 28049 - protein, 27 aa, Artificial Sequence
  Synthetic polypeptide
SQHFERPRRADHEVKRSSPSWSTWSSS

SEQ ID NO: 28050 - protein, 42 aa, Artificial Sequence
  Synthetic polypeptide
MGAVVHACNPSTLRGRGGQITRSRDQVHPGQHGHHPEPPGAD

SEQ ID NO: 28051 - protein, 16 aa, Artificial Sequence
  Synthetic polypeptide
EASRWKRCAVRSTTSM

SEQ ID NO: 28052 - protein, 49 aa, Artificial Sequence
  Synthetic polypeptide
GVRRACNQPKGICAPGREVHPEGLEESHPHERHHAQEDHGLRGTGLLPA

SEQ ID NO: 28053 - protein, 458 aa, Artificial Sequence
  Synthetic polypeptide
FEIMLEERRFQKKTRVCHQQIMMEGCSKYALQAEIGGLQMEALCCEEYDEHVISPKEFVHLAGKSTLKDWKRAIRMNGIMLRKIMDSGELDFYQHDKVCSNTCRSTKIDLSGARVSLSSPTSAEYIPLTPAAADVNGSPATITIETCEDPGDWTAAIGDDTFTFWRGLKDAGLLDEVIQEFHQELVETMRGLQQRVQDPPLQLRDAVLLNNIVQNFGMLDLVKKVLASHKCQMDRSREQYARDLAALEQQCDEHRRRAKELKHKSQHLSNVLMTLTPVSLPPPVKRPRLARATSGPAAMASQVLTQSAQLALGPGVPVPQLTSVPLGKVVSTLPSTVLGKGSLQAPPASSPASPLLGGYTVLASSGSTYPSTVEIHPDASSLTVLSTAAVQDGSTVFKVVSPLQLLTLPGLGPTLQNVAQASPGSSTIVTVPAGAAPGPEEHTATIEVAAMAEDHERK

SEQ ID NO: 28054 - protein, 63 aa, Artificial Sequence
  Synthetic polypeptide
SHLLGSLRQGNCLNPRSGGCSEPRLRHCTPQPGRQDAGGAGAEAAGGAARARARGAAQGAGGE

SEQ ID NO: 28055 - protein, 105 aa, Artificial Sequence
  Synthetic polypeptide
TQEVEDAVSRDCATALLSPGDRTQEAQVLKQLAERREHEREVLHKALEENNNFSRQAEEKLNYKMELSKEIREAHLAALRERLREKELHAAEVRRNKEQREEMSG

SEQ ID NO: 28056 - protein, 20 aa, Artificial Sequence
  Synthetic polypeptide
AETAPLHSSARATGRRRRRC

SEQ ID NO: 28057 - protein, 188 aa, Artificial Sequence
  Synthetic polypeptide
YGSALCLHPSLTSNSYKEKMKELSVLSLICSCFYTQPHPNTVYQYGDMEVKQLDKRASGQSFEVILKSPSDLSPESPMLSSPPKKKDTSLEELQKRLEAAEERRKTQEAQVLKQLAERREHEREVLHKALEENNNFSRQAEEKLNYKMELSKEIREAHLAALRERLREKELHAAEVRRNKEQREEMSG

SEQ ID NO: 28058 - protein, 20 aa, Artificial Sequence
  Synthetic polypeptide
DMVRLCVSTQVSPRIPTRRR

SEQ ID NO: 28059 - protein, 70 aa, Artificial Sequence
  Synthetic polypeptide
IWFGSVSPPKSHLEFLQGEDEGAVGAVAHLLLLLHTAAPQYRLPVRGHGGEAAGQAGLRPELRGHPQVPF

SEQ ID NO: 28060 - protein, 34 aa, Artificial Sequence
  Synthetic polypeptide
KDFSVQVYQSFVCSCQNWEAARVSPSTEPQSTQH

SEQ ID NO: 28061 - protein, 990 aa, Artificial Sequence
  Synthetic polypeptide
AHPQSRRAHNIDLKGTVVIFDEAHNVEKMCEESASFDLTPHDLASGLDVIDQVLEEQTKAAQQGEPHPEFSADSPSPGLNMELEDIAKLKMILLRLEGAIDAVELPGDDSGVTKPGSYIFELFAEAQITFQTKGCILDSLDQIIQHLAGRAGVFTNTAGLQKLADIIQIVFSVDPSEGSPGSPAGLGALQSYKVHIHPDAGHRRTAQRSDAWSTTAARKRGKVLSYWCFSPGHSMHELVRQGVRSLILTSGTLAPVSSFALEMQIPFPVCLENPHIIDKHQIWVGVVPRGPDGAQLSSAFDRRFSEECLSSLGKALGNIARVVPYGLLIFFPSYPVMEKSLEFWRARDLARKMEALKPLFVEPRSKGSFSETISAYYARVAAPGSTGATFLAVCRGKASEGLDFSDTNGRGVIVTGLPYPPRMDPRVVLKMQFLDEMKGQGGAGGQFLSGQEWYRQQASRAVNQAIGRVIRHRQDYGAVFLCDHRFAFADARAQLPSWVRPHVRVYDNFGHVIRDVAQFFRVAERTMPAPAPRATAPSVRGEDAVSEAKSPGPFFSTRKAKSLDLHVPSLKQRSSGSPAAGDPESSLCVEYEQEPVPARQRPRGLLAALEHSEQRAGSPGEEQAHSCSTLSLLSEKRPAEEPRGGRKKIRLVSHPEEPVAGAQTDRAKLFMVAVKQELSQANFATFTQALQDYKGSDDFAALAACLGPLFAEDPKKHNLLQGFYQFVRPHHKQQFEEVCIQLTGRGCGYRPEHSIPRRQRAQPVLDPTGRTAPDPKLTVSTAAAQQLDPQEHLNQGRPHLSPRPPPTGDPGSQPQWGSGVPRAGKQGQHAVSAYLADARRALGSAGCSQLLAALTAYKQDDDLDKVLAVLAALTTAKPEDFPLLHRFSMFVRPHHKQRFSQTCTDLTGRPYPGMEPPGPQEERLAVPPVLTHRAPQPGPSRSEKTGKTQSKISSFLRQRPAGTVGAGGEDAGPSQSSGPPHGPAASEWGL

SEQ ID NO: 28062 - protein, 35 aa, Artificial Sequence
  Synthetic polypeptide
RLQCAGLPEFCLQLPKLGSSPREPIHRAAEHTTLT

SEQ ID NO: 28063 - protein, 1171 aa, Artificial Sequence
  Synthetic polypeptide
AHPQSRRAHNIDLKGTVVIFDEAHNVEKMCEESASFDLTPHDLASGLDVIDQVLEEQTKAAQQGEPHPEFSADSPSPGLNMELEDIAKLKMILLRLEGAIDAVELPGDDSGVTKPGSYIFELFAEAQITFQTKGCILDSLDQIIQHLAGRAGVFTNTAGLQKLADIIQIVFSVDPSEGSPGSPAGLGALQSYKVHIHPDAGHRRTAQRSDAWSTTAARKRGKVLSYWCFSPGHSMHELVRQGVRSLILTSGTLAPVSSFALEMQIPFPVCLENPHIIDKHQIWVGVVPRGPDGAQLSSAFDRRFSEECLSSLGKALGNIARVVPYGLLIFFPSYPVMEKSLEFWRARDLARKMEALKPLFVEPRSKGSFSETISAYYARVAAPGSTGATFLAVCRGKASEGLDFSDTNGRGVIVTGLPYPPRMDPRVVLKMQFLDEMKGQGGAGGQFLSGQEWYRQQASRAVNQAIGRVIRHRQDYGAVFLCDHRFAFADARAQLPSWVRPHVRVYDNFGHVIRDVAQFFRVAERTMPAPAPRATAPSVRGEDAVSEAKSPGPFFSTRKAKSLDLHVPSLKQRSSGSPAAGDPESSLCVEYEQEPVPARQRPRGLLAALEHSEQRAGSPGEEQAHSCSTLSLLSEKRPAEEPRGGRKKIRLVSHPEEPVAGAQTDRAKLFMVAVKQELSQANFATFTQALQDYKGSDDFAALAACLGPLFAEDPKKHNLLQGFYQFVRPHHKQQFEEVCIQLTGRGCGYRPEHSIPRRQRAQPVLDPTGRTAPDPKLTVSTAAAQQLDPQEHLNQGRPHLSPRPPPTGDPGSQPQWGSGVPRAGKQGQHAVSAYLADARRALGSAGCSQLLAALTAYKQDDDLDKVLAVLAALTTAKPEDFPLLHRFSMFVRPHHKQRFSQTCTDLTGRPYPGMEPPGPQEERLAVPPVLTHRAPQPGPSRSEKTGKTQSKISSFLRQRPAGTVGAGGEDAGPSQSSGPPHGPAASEWGEPHGRDIAGQQATGAPGGPLSAGCVCQGCGAEDVVPFQCPACDFQRCQACWQRHLQASRMCPACHTASRKQSVMQVFWPEPHKDHEGAGGARPVAAVPGVGAACPAAGAGCTRSGRNTHLPLAGRRDRGAAGVRPVPPRHLCAAAVPPRQPHDVWPVSTAPLHAVLELPRALPLLQRPLRGA

SEQ ID NO: 28064 - protein, 1071 aa, Artificial Sequence
  Synthetic polypeptide
AHPQSRRAHNIDLKGTVVIFDEAHNVEKMCEESASFDLTPHDLASGLDVIDQVLEEQTKAAQQGEPHPEFSADSPSPGLNMELEDIAKLKMILLRLEGAIDAVELPGDDSGVTKPGSYIFELFAEAQITFQTKGCILDSLDQIIQHLAGRAGVFTNTAGLQKLADIIQIVFSVDPSEGSPGSPAGLGALQSYKVHIHPDAGHRRTAQRSDAWSTTAARKRGKVLSYWCFSPGHSMHELVRQGVRSLILTSGTLAPVSSFALEMQIPFPVCLENPHIIDKHQIWVGVVPRGPDGAQLSSAFDRRFSEECLSSLGKALGNIARVVPYGLLIFFPSYPVMEKSLEFWRARDLARKMEALKPLFVEPRSKGSFSETISAYYARVAAPGSTGATFLAVCRGKASEGLDFSDTNGRGVIVTGLPYPPRMDPRVVLKMQFLDEMKGQGGAGGQFLSGQEWYRQQASRAVNQAIGRVIRHRQDYGAVFLCDHRFAFADARAQLPSWVRPHVRVYDNFGHVIRDVAQFFRVAERTMPAPAPRATAPSVRGEDAVSEAKSPGPFFSTRKAKSLDLHVPSLKQRSSGSPAAGDPESSLCVEYEQEPVPARQRPRGLLAALEHSEQRAGSPGEEQAHSCSTLSLLSEKRPAEEPRGGRKKIRLVSHPEEPVAGAQTDRAKLFMVAVKQELSQANFATFTQALQDYKGSDDFAALAACLGPLFAEDPKKHNLLQGFYQFVRPHHKQQFEEVCIQLTGRGCGYRPEHSIPRRQRAQPVLDPTGRTAPDPKLTVSTAAAQQLDPQEHLNQGRPHLSPRPPPTGDPGSQPQWGSGVPRAGKQGQHAVSAYLADARRALGSAGCSQLLAALTAYKQDDDLDKVLAVLAALTTAKPEDFPLLHRFSMFVRPHHKQRFSQTCTDLTGRPYPGMEPPGPQEERLAVPPVLTHRAPQPGPSRSEKTGKTQSKISSFLRQRPAGTVGAGGEDAGPSQSSGPPHGPAASEWGEPHGRDIAGQQATGAPGGPLSAGCVCQGCGAEDVVPFQCPACDFQRCQACWQRHLQASRMCPACHTASRKQSVMQVFWPEPQ

SEQ ID NO: 28065 - protein, 77 aa, Artificial Sequence
  Synthetic polypeptide
AHPQSRRAHNIDLKGTVVIFDEAHNVEKMCEESASFDLTPHDLASGLDVIDQVLEEQTKAAQQGEPHPEFSADSPSP

SEQ ID NO: 28066 - protein, 556 aa, Artificial Sequence
  Synthetic polypeptide
AHPQSRRAHNIDLKGTVVIFDEAHNVEKMCEESASFDLTPHDLASGLDVIDQVLEEQTKAAQQGEPHPEFSADSPSPGLNMELEDIAKLKSKCCPPRLLAAGWGLLLARRWVTPPRPTVILLRLEGAIDAVELPGDDSGVTKPGSYIFELFAEAQITFQTKGCILDSLDQIIQHLAGRAGVFTNTAGLQKLADIIQIVFSVDPSEGSPGSPAGLGALQSYKVHIHPDAGHRRTAQRSDAWSTTAARKRGKVLSYWCFSPGHSMHELVRQGVRSLILTSGTLAPVSSFALEMQIPFPVCLENPHIIDKHQIWVGVVPRGPDGAQLSSAFDRRFSEECLSSLGKALGNIARVVPYGLLIFFPSYPVMEKSLEFWRARDLARKMEALKPLFVEPRSKGSFSETISAYYARVAAPGSTGATFLAVCRGKASEGLDFSDTNGRGVIVTGLPYPPRMDPRVVLKMQFLDEMKGQGGAGGQFLSGQEWYRQQASRAVNQAIGRVIRHRQDYGAVFLCDHRCQRRPPGLQHPVCVEKMLSARPSRLAPSSPPGKLRVWTCMSPA

SEQ ID NO: 28067 - protein, 19 aa, Artificial Sequence
  Synthetic polypeptide
EAEAGRSPEVLPWAGGLSG

SEQ ID NO: 28068 - protein, 330 aa, Artificial Sequence
  Synthetic polypeptide
SQHFRKPRRADHLRFSHGQVVSLDELRPFQDPDLSSLQAGSACLAKHQDGLWHAARITDVDNGYYTVKFDSLLLREAVVEGDGILPPLRTEATESDSDSDGTGDSSYARVVGSDAVDSGTCSSAFAGWEVHTRGIGSRLLTKMGYEFGKGLGRHAEGRVEPIHAVVLPRGKSLDQCVETLQKQTRVGKAGTNKPPRCRGRGARPGGRPAPRNVFDFLNEKLQGQAPGALEAGAAPAGRRSKDMYHASKSAKRALSLRLFQTEEKIERTQRDIRSIQEALARNAGRHSVASAQLQEKLAGAQRQLGQLRAQEAGLQQEQRKADTHKKMTEF

SEQ ID NO: 28069 - protein, 321 aa, Artificial Sequence
  Synthetic polypeptide
SQHFRKPRRADHLRFSHGQVVSLDELRPFQDPDLSSLQAGSACLAKHQDGLWHAARITDVDNGYYTVKFDSLLLREAVVEGDGILPPLRTEATESDSDSDVVGSDAVDSGTCSSAFAGWEVHTRGIGSRLLTKMGYEFGKGLGRHAEGRVEPIHAVVLPRGKSLDQCVETLQKQTRVGKAGTNKPPRCRGRGARPGGRPAPRNVFDFLNEKLQGQAPGALEAGAAPAGRRSKDMYHASKSAKRALSLRLFQTEEKIERTQRDIRSIQEALARNAGRHSVASAQLQEKLAGAQRQLGQLRAQEAGLQQEQRKADTHKKMTEF

SEQ ID NO: 28070 - protein, 350 aa, Artificial Sequence
  Synthetic polypeptide
SQHFRKPRRADHLRFSHGQVVSLDELRPFQDPDLSSLQAGSACLAKHQDGLWHAARITDVDNGYYTVKFDSLLLREAVVEGDGILPPLRTEATESDSDSDGTGDSSYARVVGSDAVDSAQSSALCPSLAVVGSDAVDSGTCSSAFAGWEVHTRGIGSRLLTKMGYEFGKGLGRHAEGRVEPIHAVVLPRGKSLDQCVETLQKQTRVGKAGTNKPPRCRGRGARPGGRPAPRNVFDFLNEKLQGQAPGALEAGAAPAGRRSKDMYHASKSAKRALSLRLFQTEEKIERTQRDIRSIQEALARNAGRHSVASAQLQEKLAGAQRQLGQLRAQEAGLQQEQRKADTHKKMTEF

SEQ ID NO: 28071 - protein, 322 aa, Artificial Sequence
  Synthetic polypeptide
HLHRIRFSHGQVVSLDELRPFQDPDLSSLQAGSACLAKHQDGLWHAARITDVDNGYYTVKFDSLLLREAVVEGDGILPPLRTEATESDSDSDGTGDSSYARVVGSDAVDSGTCSSAFAGWEVHTRGIGSRLLTKMGYEFGKGLGRHAEGRVEPIHAVVLPRGKSLDQCVETLQKQTRVGKAGTNKPPRCRGRGARPGGRPAPRNVFDFLNEKLQGQAPGALEAGAAPAGRRSKDMYHASKSAKRALSLRLFQTEEKIERTQRDIRSIQEALARNAGRHSVASAQLQEKLAGAQRQLGQLRAQEAGLQQEQRKADTHKKMTEF

SEQ ID NO: 28072 - protein, 65 aa, Artificial Sequence
  Synthetic polypeptide
SWPLVSAGSISIISTNLELKIIGEEKDGCVCTLYNNYLHSIYIVLGSPMGRWSLWMSCAPSRTQT

SEQ ID NO: 28073 - protein, 313 aa, Artificial Sequence
  Synthetic polypeptide
HLHRIRFSHGQVVSLDELRPFQDPDLSSLQAGSACLAKHQDGLWHAARITDVDNGYYTVKFDSLLLREAVVEGDGILPPLRTEATESDSDSDVVGSDAVDSGTCSSAFAGWEVHTRGIGSRLLTKMGYEFGKGLGRHAEGRVEPIHAVVLPRGKSLDQCVETLQKQTRVGKAGTNKPPRCRGRGARPGGRPAPRNVFDFLNEKLQGQAPGALEAGAAPAGRRSKDMYHASKSAKRALSLRLFQTEEKIERTQRDIRSIQEALARNAGRHSVASAQLQEKLAGAQRQLGQLRAQEAGLQQEQRKADTHKKMTEF

SEQ ID NO: 28074 - protein, 342 aa, Artificial Sequence
  Synthetic polypeptide
HLHRIRFSHGQVVSLDELRPFQDPDLSSLQAGSACLAKHQDGLWHAARITDVDNGYYTVKFDSLLLREAVVEGDGILPPLRTEATESDSDSDGTGDSSYARVVGSDAVDSAQSSALCPSLAVVGSDAVDSGTCSSAFAGWEVHTRGIGSRLLTKMGYEFGKGLGRHAEGRVEPIHAVVLPRGKSLDQCVETLQKQTRVGKAGTNKPPRCRGRGARPGGRPAPRNVFDFLNEKLQGQAPGALEAGAAPAGRRSKDMYHASKSAKRALSLRLFQTEEKIERTQRDIRSIQEALARNAGRHSVASAQLQEKLAGAQRQLGQLRAQEAGLQQEQRKADTHKKMTEF

SEQ ID NO: 28075 - protein, 75 aa, Artificial Sequence
  Synthetic polypeptide
GWARWLTPVIPTLLEAEAGGSRGQEIETILANTLQEDSGNSFTGRTEDFSCPVHSGLCHQQEAWRHEELCDLQVV

SEQ ID NO: 28076 - protein, 105 aa, Artificial Sequence
  Synthetic polypeptide
SQHFWRLRQADHEVRRSRPSWLTRYKKTQETLSQAGQKTSAALSTVGSAISRKLGDMRNSATFKSFEDRVGTIKSKVVGDRENGSDNLPSSAGSGDKPLSDPAPF

SEQ ID NO: 28077 - protein, 34 aa, Artificial Sequence
  Synthetic polypeptide
HATRRLRKLFHRQDRRLQLPCPQWALPSAGSLET

SEQ ID NO: 28078 - protein, 89 aa, Artificial Sequence
  Synthetic polypeptide
GWARWLTPVIPTLLEAEAGGSRGQEIETILANTLQEDSGNSFTGRTEDFSCPVHSGLCHQQEAWRHEQLLHPPLNKYASHEELCDLQVV

SEQ ID NO: 28079 - protein, 119 aa, Artificial Sequence
  Synthetic polypeptide
SQHFWRLRQADHEVRRSRPSWLTRYKKTQETLSQAGQKTSAALSTVGSAISRKLGDMSSYSIRHSISMPAMRNSATFKSFEDRVGTIKSKVVGDRENGSDNLPSSAGSGDKPLSDPAPF

SEQ ID NO: 28080 - protein, 75 aa, Artificial Sequence
  Synthetic polypeptide
GWARWLTPVIPTLLEAEAGGSRGQEIETILANTLQEDSGNSFTGRTEDFSCPVHSGLCHQQEAWRHEGSSIFTLL

SEQ ID NO: 28081 - protein, 128 aa, Artificial Sequence
  Synthetic polypeptide
SQHFWRLRQADHEVRRSRPSWLTRYKKTQETLSQAGQKTSAALSTVGSAISRKLGDMRAHPFSHSFSSYSIRHSISMPAMRNSATFKSFEDRVGTIKSKVVGDRENGSDNLPSSAGSGDKPLSDPAPF

SEQ ID NO: 28082 - protein, 27 aa, Artificial Sequence
  Synthetic polypeptide
GLPSHAKLTPNYVNFWMWGTSGAWSSA

SEQ ID NO: 28083 - protein, 1135 aa, Artificial Sequence
  Synthetic polypeptide
WFYKCLVVPPEFTLSCFLVKKMPASPSSSSMIVSFLRPPQPCKTDPKLRELLDVGNIGRLEQRMITVVYGPDLVNISHLNLVAFQEEVAKEWTNEVFSLATNLLAQNMSRDAFLEKAYTKLKLQVTPEGRIPLKNIYRLFSADRKRVETALEACSLPSSRNDSIPQEDFTPEVYRVFLNNLCPRPEIDNIFSEFGAKSKPYLTVDQMMDFINLKQRDPRLNEILYPPLKQEQVQVLIEKYEPNNSLARKGQISVDGFMRYLSGEENGVVSPEKLDLNEDMSQPLSHYFINSSHNTYLTAGQLAGNSSVEMYRQVLLSGCRCVELDCWKGRTAEEEPVITHGFTMTTEISFKEVIEAIAECAFKTSPFPILLSFENHVDSPKQQAKMAEYCRLIFGDALLMEPLEKYPLESGVPLPSPMDLMYKILVKNKKKSHKSSEGSGKKKLSEQASNTYSDSSSMFEPSSPGAGEADTESDDDDDDDDCKKSSMDEGTAGSEAMATEEMSNLVNYIQPVKFESFEISKKRNKSFEMSSFVETKGLEQLTKSPVEFVEYNKMQLSRIYPKGTRVDSSNYMPQLFWNAGCQMVALNFQTMDLAMQINMGMYEYNGKSGYRLKPEFMRRPDKHFDPFTEGIVDGIVANTLSVKIISGQFLSDKKVGTYVEVDMFGLPVDTRRKAFKTKTSQGNAVNPVWEEEPIVFKKVVLPTLACLRIAVYEEGGKFIGHRILPVQAIRPGYHYICLRNERNQPLTLPAVFVYIEVKDYVPDTYADVIEALSNPIRYVNLMEQRAKQLAALTLEDEEEVKKEADPGETPSEAPSEARTTPAENGVNHTTTLTPKPPSQALHSQPAPGSVKAPAKTEDLIQSVLTEVEAQTIEELKQQKSFVKLQKKHYKEMKDLVKRHHKKTTDLIKEHTTKYNEIQNDYLRRRAALEKSAKKDSKKKSEPSSPDHGSSTIEQDLAALDAEMTQKLIDLKDKQQQQLLNLRQEQYYSEKYQKREHIKLLIQKLTDVAEECQNNQLKKLKEICEKEKKELKKKMDKKRQEKITEAKSKDKSQMEEEKTEMIRSYIQEVVQYIKRLEEAQSKRQEKLVEKHKEIRQQILDEKPKGEGSSSFLSETCHEDPSVSPNFTPPNPQALKW

SEQ ID NO: 28084 - protein, 1178 aa, Artificial Sequence
  Synthetic polypeptide
WFYKCLVVPPEFTLSCFLVKKMPASPSSSSMIVSFLRPPQPCKTDPKLRELLDVGNIGRLEQRMITVVYGPDLVNISHLNLVAFQEEVAKEWTNEVFSLATNLLAQNMSRDAFLEKAYTKLKLQVTPEGRIPLKNIYRLFSADRKRVETALEACSLPSSRNDSIPQEDFTPEVYRVFLNNLCPRPEIDNIFSEFGAKSKPYLTVDQMMDFINLKQRDPRLNEILYPPLKQEQVQVLIEKYEPNNSLARKGQISVDGFMRYLSGEENGVVSPEKLDLNEDMSQPLSHYFINSSHNTYLTAGQLAGNSSVEMYRQVLLSGCRCVELDCWKGRTAEEEPVITHGFTMTTEISFKEVIEAIAECAFKTSPFPILLSFENHVDSPKQQAKMAEYCRLIFGDALLMEPLEKYPLESGVPLPSPMDLMYKILVKNKKKSHKSSEGSGKKKLSEQASNTYSDSSSMFEPSSPGAGEADTESDDDDDDDDCKKSSMDEGTAGSEAMATEEMSNLVNYIQPVKFESFEISKKRNKSFEMSSFVETKGLEQLTKSPVEFVEYNKMQLSRIYPKGTRVDSSNYMPQLFWNAGCQMVALNFQTMDLAMQINMGMYEYNGKSGYRLKPEFMRRPDKHFDPFTEGIVDGIVANTLSVKIISGQFLSDKKVGTYVEVDMFGLPVDTRRKAFKTKTSQGNAVNPVWEEEPIVFKKVVLPTLACLRIAVYEEGGKFIGHRILPVQAIRPGYHYICLRNERNQPLTLPAVFVYIEVKDYVPDTYADVIEALSNPIRYVNLMEQRAKQLAALTLEDEEEVKKEADPGETPSEAPSEARTTPAENGVNHTTTLTPKPPSQALHSQPAPGSVKAPAKTEDLIQSVLTEVEAQTIEELKQQKSFVKLQKKHYKEMKDLVKRHHKKTTDLIKEHTTKYNEIQNDYLRRRAALEKSAKKDSKKKSEPSSPDHGSSTIEQDLAALDAEMTQKLIDLKDKQQQQLLNLRQEQYYSEKYQKREHIKLLIQKLTDVAEECQNNQLKKLKEICEKEKKELKKKMDKKRQEKITEAKSKDKSQMEEEKTEMIRSYIQEVVQYIKRLEEAQSKRQEKLVEKHKEIRQQILDEKPKLQVELEQEYQDKFKRLPLEILEFVQEAMKGKISEDSNHGSAPLSLSSDPGKVNHKTPSSEELGGDIPGKEFDTPL

SEQ ID NO: 28085 - protein, 195 aa, Artificial Sequence
  Synthetic polypeptide
WFYKCLVVPPEFTLSCFLVKKMPASPSSSSMIVSFLRPPQPCKTDPKLRELLDVGNIGRLEQRMITVVYGPDLVNISHLNLVAFQEEVAKEWTNEVFSLATNLLAQNMSRDAFLEKAYTKLKLQVTPEGRIPLKNIYRLFSADRKRVETALEACSLPSSRVEKANEAAKSEQSCGKAPPKHFHLHFIKQNKMLEP

SEQ ID NO: 28086 - protein, 18 aa, Artificial Sequence
  Synthetic polypeptide
TVRTLGHRGKQGNASTPG

SEQ ID NO: 28087 - protein, 129 aa, Artificial Sequence
  Synthetic polypeptide
EHLDTGESKEMRAHQAKISMENSKAISQDKSIKNKAERERRVRELNSSNTKKFLEERKRLAMKQSKEMDQLKKVQLEHLEFLEKQNEQLLKSCHAVSQTQGEGDAADGEIGSRDGPQTSNSSMKLQNAN

SEQ ID NO: 28088 - protein, 84 aa, Artificial Sequence
  Synthetic polypeptide
VHVLCRDMDEAGNHHSQQTITRTENQTPYVLTHRWELNSENTWTQGKARKCEHTRLRFLWKIAKPSAKINLSRIKQNGKGESGS

SEQ ID NO: 28089 - protein, 110 aa, Artificial Sequence
  Synthetic polypeptide
EHLDTGESKEMRAHQAKISMENSKAISQDKSIKNKAERERRVRELNSSNTKKFLEERKRLAMKQSKEMDQLKKVQLEHLEFLEKQNEQAKEMQQMVKLEAEMDRRPATVV

SEQ ID NO: 28090 - protein, 28 aa, Artificial Sequence
  Synthetic polypeptide
HDPLKILCHVKEASHKRTGMKRSQRTPW

SEQ ID NO: 28091 - protein, 9 aa, Artificial Sequence
  Synthetic polypeptide
KKPVTKGQG

SEQ ID NO: 28092 - protein, 786 aa, Artificial Sequence
  Synthetic polypeptide
PLEDIMPRERSQSQKDRDEEKPKNPMVELFYGRFLAVGVLEGKKFENTEMFGQYPLQVNGFKDLHECLEAAMIEGEIESLHSENSGKSGQEHWFTELPPVLTFELSRFEFNQALGRPEKIHNKLEFPQVLYLDRYMHRNREITRIKREEIKRLKDYLTVLQQRLERYLSYGSGPKRFPLVDVLQYALEFASSKPVCTSPVDDIDASSPPSGSIPSQTLPSTTEQQGALSSELPSTSPSSVAAISSRSVIHKPFTQSRIPPDLPMHPAPRHITEEELSVLESCLHRWRTEIENDTRDLQESISRIHRTIELMYSDKSMIQVPYRLHAVLVHEGQANAGHYWAYIFDHRESRWMKYNDIAVTKSSWEELVRDSFGGYRNASAYCLMYINDKAQFLIQEEFNKETGQPLVGIETLPPDLRDFVEEDNQRFEKELEEWDAQLAQKALQEKLLASQKLRESETSVTTAQAAGDPEYLEQPSRSDFSKHLKEETIQIITKASHEHEDKSPETVLQSAIKLEYARLVKLAQEDTPPETDYRLHHVVVYFIQNQAPKKIIEKTLLEQFGDRNLSFDERCHNIMKVAQAKLEMIKPEEVNLEEYEEWHQDYRKFRETTMYLIIGLENFQRESYIDSLLFLICAYQNNKELLSKGLYRGHDEELISHYRRECLLKLNEQAAELFESGEDREVNNGLIIMNEFIVPFLPLLLVDEMEEKDILAVEDMRNRWCSYLGQEMEPHLQEKLTDFLPKLLDCSMEIKSFHEPPKLPSYSTHELCERFARIMLSLSRTPADGR

SEQ ID NO: 28093 - protein, 818 aa, Artificial Sequence
  Synthetic polypeptide
PLEDIMPRERSQSQKDRDEEKPKNPMVELFYGRFLAVGVLEGKKFENTEMFGQYPLQVNGFKDLHECLEAAMIEGEIESLHSENSGKSGQEHWFTELPPVLTFELSRFEFNQALGRPEKIHNKLEFPQVLYLDRYMHRNREITRIKREEIKRLKDYLTVLQQRLERYLSYGSGPKRFPLVDVLQYALEFASSKPVCTSPVDDIDASSPPSGSIPSQTLPSTTEQQGALSSELPSTSPSSVAAISSRSVIHKPFTQSRIPPDLPMHPAPRHITEEELSVLESCLHRWRTEIENDTRDLQESISRIHRTIELMYSDKSMIQVPYRLHAVLVHEGQANAGHYWAYIFDHRESRWMKYNDIAVTKSSWEELVRDSFGGYRNASAYCLMYINDKAQFLIQEEFNKETGQPLVGIETLPPDLRDFVEEDNQRFEKELEEWDAQLAQKALQEKLLASQKLRESETSVTTAQAAGDPEYLEQPSRSDFSKHLKEETIQIITKASHEHEDKSPETVLQSIMMTPNMQGIIMAIGKSRSVYDRCGPEAGFFKAIKLEYARLVKLAQEDTPPETDYRLHHVVVYFIQNQAPKKIIEKTLLEQFGDRNLSFDERCHNIMKVAQAKLEMIKPEEVNLEEYEEWHQDYRKFRETTMYLIIGLENFQRESYIDSLLFLICAYQNNKELLSKGLYRGHDEELISHYRRECLLKLNEQAAELFESGEDREVNNGLIIMNEFIVPFLPLLLVDEMEEKDILAVEDMRNRWCSYLGQEMEPHLQEKLTDFLPKLLDCSMEIKSFHEPPKLPSYSTHELCERFARIMLSLSRTPADGR

SEQ ID NO: 28094 - protein, 856 aa, Artificial Sequence
  Synthetic polypeptide
PLEDIMPRERSQSQKDRDEEKPKNPMVELFYGRFLAVGVLEGKKFENTEMFGQYPLQVNGFKDLHECLEAAMIEGEIESLHSENSGKSGQEHWFTELPPVLTFELSRFEFNQALGRPEKIHNKLEFPQVLYLDRYMHRNREITRIKREEIKRLKDYLTVLQQRLERYLSYGSGPKRFPLVDVLQYALEFASSKPVCTSPVDDIDASSPPSGSIPSQTLPSTTEQQGALSSELPSTSPSSVAAISSRSVIHKPFTQSRIPPDLPMHPAPRHITEEELSVLESCLHRWRTEIENDTRDLQESISRIHRTIELMYSDKSMIQVPYRLHAVLVHEGQANAGHYWAYIFDHRESRWMKYNDIAVTKSSWEELVRDSFGGYRNASAYCLMYINDKAQFLIQEEFNKETGQPLVGIETLPPDLRDFVEEDNQRFEKELEEWDAQLAQKALQEKLLASQKLRESETSVTTAQAAGDPEYLEQPSRSDFSKHLKEETIQIITKASHEHEDKSPETVLQSKPENTTSQPLSNQRVVEVAIPHVGKFMIESKEGGYDDEIMMTPNMQGIIMAIGKSRSVYDRCGPEAGFFKAIKLEYARLVKLAQEDTPPETDYRLHHVVVYFIQNQAPKKIIEKTLLEQFGDRNLSFDERCHNIMKVAQAKLEMIKPEEVNLEEYEEWHQDYRKFRETTMYLIIGLENFQRESYIDSLLFLICAYQNNKELLSKGLYRGHDEELISHYRRECLLKLNEQAAELFESGEDREVNNGLIIMNEFIVPFLPLLLVDEMEEKDILAVEDMRNRWCSYLGQEMEPHLQEKLTDFLPKLLDCSMEIKSFHEPPKLPSYSTHELCERFARIMLSLSRTPADGR

SEQ ID NO: 28095 - protein, 973 aa, Artificial Sequence
  Synthetic polypeptide
NKCAALGQSHEARATFKITSGVTYNPNLQDKLSVDFKVLAFDLQQMIDEIFLSSNLKNEYKNSRVLQFENGSIIVVFDLFFAQWVSDENVKEELIQGLEANKSSQLVTFHIDLNSVDILDKLTTTSHLATPGNVSIECLPGSSPCTDALTCIKADLFCDGEVNCPDGSDEDNKMCATVCDGRFLLTGSSGSFQATHYPKPSETSVVCQWIIRVNQGLSIKLSFDDFNTYYTDILDIYEGVGSSKILRASIWETNPGTIRIFSNQVTATFLIESDESDYVGFNATYTAFNSSELNNYEKINCNFEDGFCFWVQDLNDDNEWERIQGSTFSPFTGPNFDHTFGNASGFYISTPTGPGGRQERVGLLSLPLDPTLEPACLSFWYHMYGENVHKLSINISNDQNMEKTVFQKEGNYGDNWNYGQVTLNETVKFKVAFNAFKNKILSDIALDDISLTYGICNGSLYPEPTLVPTPPPELPTDCGGPFELWEPNTTFSSTNFPNSYPNLAFCVWILNAQKGKNIQLHFQEFDLENINDVVEIRDGEEADSLLLAVYTGPGPVKDVFSTTNRMTVLLITNDVLARGGFKANFTTGYHLGIPEPCKADHFQCKNGECVPLVNLCDGHLHCEDGSDEADCVRFFNGTTNNNGLVRFRIQSIWHTACAENWTTQISNDVCQLLGLGSGNSSKPIFPTDGGPFVKLNTAPDGHLILTPSQQCLQDSLIRLQCNHKSCGKKLAAQDITPKIVGGSNAKEGAWPWVVGLYYGGRLLCGASLVSSDWLVSAAHCVYGRNLEPSKWTAILGLHMKSNLTSPQTVPRLIDEIVINPHYNRRRKDNDIAMMHLEFKVNYTDYIQPICLPEENQVFPPGRNCSIAGWGTVVYQGTTANILQEADVPLLSNERCQQQMPEYNITENMICAGYEEGGIDSCQGDSGGPLMCQENNRWFLAGVTSFGYKCALPNRPGVYARVSRFTEWIQSFLH

SEQ ID NO: 28096 - protein, 106 aa, Artificial Sequence
  Synthetic polypeptide
LEVPDLTSQKLTSTNEHGFLANEYSTLFPPKWDSSDTRSHCLTQVPSRLMFQMPMMVTGLITPSLHWLYHPPSLHFPALLMEVFWTAFKINVQHLDRVMKPERHLK

SEQ ID NO: 28097 - protein, 226 aa, Artificial Sequence
  Synthetic polypeptide
NKCAALGQSHEARATFKITSGVTYNPNLQDKLSVDFKVLAFDLQQMIDEIFLSSNLKNEYKNSRVLQFENGSIIVVFDLFFAQWVSDENVKEELIQGLEANKSSQLVTFHIDLNSVDILASLENFSTVSPATTSDKLTTTSHLATPGNVSIECLPGSSPCTDALTCIKADLFCDGEVNCPDGSDEDNKMCATVCDGRFLLTGSSGSFQATHYPKPSETSVVCQWII

SEQ ID NO: 28098 - protein, 38 aa, Artificial Sequence
  Synthetic polypeptide
TLLWVSHLPAHPAEFAFASLHNRVQHLDRVMKPERHLK

SEQ ID NO: 28099 - protein, 47 aa, Artificial Sequence
  Synthetic polypeptide
VRGILQQVVFAFELQHELSSGSPTCQPTLQSLHLLASTIGCSTWTES

SEQ ID NO: 28100 - protein, 975 aa, Artificial Sequence
  Synthetic polypeptide
PPQSGAALGQSHEARATFKITSGVTYNPNLQDKLSVDFKVLAFDLQQMIDEIFLSSNLKNEYKNSRVLQFENGSIIVVFDLFFAQWVSDENVKEELIQGLEANKSSQLVTFHIDLNSVDILDKLTTTSHLATPGNVSIECLPGSSPCTDALTCIKADLFCDGEVNCPDGSDEDNKMCATVCDGRFLLTGSSGSFQATHYPKPSETSVVCQWIIRVNQGLSIKLSFDDFNTYYTDILDIYEGVGSSKILRASIWETNPGTIRIFSNQVTATFLIESDESDYVGFNATYTAFNSSELNNYEKINCNFEDGFCFWVQDLNDDNEWERIQGSTFSPFTGPNFDHTFGNASGFYISTPTGPGGRQERVGLLSLPLDPTLEPACLSFWYHMYGENVHKLSINISNDQNMEKTVFQKEGNYGDNWNYGQVTLNETVKFKVAFNAFKNKILSDIALDDISLTYGICNGSLYPEPTLVPTPPPELPTDCGGPFELWEPNTTFSSTNFPNSYPNLAFCVWILNAQKGKNIQLHFQEFDLENINDVVEIRDGEEADSLLLAVYTGPGPVKDVFSTTNRMTVLLITNDVLARGGFKANFTTGYHLGIPEPCKADHFQCKNGECVPLVNLCDGHLHCEDGSDEADCVRFFNGTTNNNGLVRFRIQSIWHTACAENWTTQISNDVCQLLGLGSGNSSKPIFPTDGGPFVKLNTAPDGHLILTPSQQCLQDSLIRLQCNHKSCGKKLAAQDITPKIVGGSNAKEGAWPWVVGLYYGGRLLCGASLVSSDWLVSAAHCVYGRNLEPSKWTAILGLHMKSNLTSPQTVPRLIDEIVINPHYNRRRKDNDIAMMHLEFKVNYTDYIQPICLPEENQVFPPGRNCSIAGWGTVVYQGTTANILQEADVPLLSNERCQQQMPEYNITENMICAGYEEGGIDSCQGDSGGPLMCQENNRWFLAGVTSFGYKCALPNRPGVYARVSRFTEWIQSFLH

SEQ ID NO: 28101 - protein, 228 aa, Artificial Sequence
  Synthetic polypeptide
PPQSGAALGQSHEARATFKITSGVTYNPNLQDKLSVDFKVLAFDLQQMIDEIFLSSNLKNEYKNSRVLQFENGSIIVVFDLFFAQWVSDENVKEELIQGLEANKSSQLVTFHIDLNSVDILASLENFSTVSPATTSDKLTTTSHLATPGNVSIECLPGSSPCTDALTCIKADLFCDGEVNCPDGSDEDNKMCATVCDGRFLLTGSSGSFQATHYPKPSETSVVCQWII

SEQ ID NO: 28102 - protein, 38 aa, Artificial Sequence
  Synthetic polypeptide
SSVSNQHDSSEALQVLLCHSVSRLSPFAEEHWCYSSGI

SEQ ID NO: 28103 - protein, 119 aa, Artificial Sequence
  Synthetic polypeptide
PDTSNPQFLISMILQRLFRFSSVIRSAVSVHLRRNIGVTAVAFNKELDPIQKLFVDKIREYKSKRQTSGGPVDASSEYQQELERELFKLKQMFGNADMNTFPTFKFEDPKFEVIEKPQA

SEQ ID NO: 28104 - protein, 22 aa, Artificial Sequence
  Synthetic polypeptide
TQEAEMSCFRKSKTIQMTSWPT

SEQ ID NO: 28105 - protein, 22 aa, Artificial Sequence
  Synthetic polypeptide
CVPVITVLGTEAGESLEPRRQR

SEQ ID NO: 28106 - protein, 225 aa, Artificial Sequence
  Synthetic polypeptide
SQYSGLRQENRLNPGGRDELLQKEQNYSDDVLANMISEPRISYGNDALMPSLTETKTTVELLPVNGEFSLDDLQPWHSFGADSVPANTENEVEPVDARPAADRGLTTRPGSGLTNIKTEEISEVKMDAEFRHDSGYEVHHQKLVFFAEDVGSNKGAIIGLMVGGVVIATVIVITLVMLKKKQYTSIHHGVVEVDAAVTPEERHLSKMQQNGYENPTYKFFEQMQN

SEQ ID NO: 28107 - protein, 207 aa, Artificial Sequence
  Synthetic polypeptide
SQYSGLRQENRLNPGGRDELLQKEQNYSDDVLANMISEPRISYGNDALMPSLTETKTTVELLPVNGEFSLDDLQPWHSFGADSVPANTENEGSGLTNIKTEEISEVKMDAEFRHDSGYEVHHQKLVFFAEDVGSNKGAIIGLMVGGVVIATVIVITLVMLKKKQYTSIHHGVVEVDAAVTPEERHLSKMQQNGYENPTYKFFEQMQN

SEQ ID NO: 28108 - protein, 148 aa, Artificial Sequence
  Synthetic polypeptide
SQYSGLRQENRLNPGGRDELLQKEQNYSDDVLANMISEPRISYGNDALMPSLTETKTTVELLPVNGEFSLDDLQPWHSFGADSVPANTENEGSGLTNIKTEEISEVKMDAEFRHDSGYEVHHQKLVFFAEDVGSNKGAIIGLMVGGVV

SEQ ID NO: 28109 - protein, 557 aa, Artificial Sequence
  Synthetic polypeptide
GLPSHVELEDKVVEVAEEEEVAEVEEEEADDDEDDEDGDEVEEEAEEPYEEATERTTSIATTTTTTTESVEEVVREVCSEQAETGPCRAMISRWYFDVTEGKCAPFFYGGCGGNRNNFDTEEYCMAVCGSAMSQSLLKTTQEPLARDPVKLPTTAASTPDAVDKYLETPGDENEHAHFQKAKERLEAKHRERMSQVMREWEEAERQAKNLPKADKKAVIQHFQEKVESLEQEAANERQQLVETHMARVEAMLNDRRRLALENYITALQAVPPRPRHVFNMLKKYVRAEQKDRQHTLKHFEHVRMVDPKKAAQIRSQVMTHLRVIYERMNQSLSLLYNVPAVAEEIQDEVDELLQKEQNYSDDVLANMISEPRISYGNDALMPSLTETKTTVELLPVNGEFSLDDLQPWHSFGADSVPANTENEVEPVDARPAADRGLTTRPGSGLTNIKTEEISEVKMDAEFRHDSGYEVHHQKLVFFAEDVGSNKGAIIGLMVGGVVIATVIVITLVMLKKKQYTSIHHGVVEVDAAVTPEERHLSKMQQNGYENPTYKFFEQMQN

SEQ ID NO: 28110 - protein, 22 aa, Artificial Sequence
  Synthetic polypeptide
EMPFTSRHDSEASPAMWNLKTK

SEQ ID NO: 28111 - protein, 482 aa, Artificial Sequence
  Synthetic polypeptide
GLPSHVELEDKVVEVAEEEEVAEVEEEEADDDEDDEDGDEVEEEAEEPYEEATERTTSIATTTTTTTESVEEVVRVPTTAASTPDAVDKYLETPGDENEHAHFQKAKERLEAKHRERMSQVMREWEEAERQAKNLPKADKKAVIQHFQEKVESLEQEAANERQQLVETHMARVEAMLNDRRRLALENYITALQAVPPRPRHVFNMLKKYVRAEQKDRQHTLKHFEHVRMVDPKKAAQIRSQVMTHLRVIYERMNQSLSLLYNVPAVAEEIQDEVDELLQKEQNYSDDVLANMISEPRISYGNDALMPSLTETKTTVELLPVNGEFSLDDLQPWHSFGADSVPANTENEVEPVDARPAADRGLTTRPGSGLTNIKTEEISEVKMDAEFRHDSGYEVHHQKLVFFAEDVGSNKGAIIGLMVGGVVIATVIVITLVMLKKKQYTSIHHGVVEVDAAVTPEERHLSKMQQNGYENPTYKFFEQMQN

SEQ ID NO: 28112 - protein, 538 aa, Artificial Sequence
  Synthetic polypeptide
GLPSHVELEDKVVEVAEEEEVAEVEEEEADDDEDDEDGDEVEEEAEEPYEEATERTTSIATTTTTTTESVEEVVREVCSEQAETGPCRAMISRWYFDVTEGKCAPFFYGGCGGNRNNFDTEEYCMAVCGSAIPTTAASTPDAVDKYLETPGDENEHAHFQKAKERLEAKHRERMSQVMREWEEAERQAKNLPKADKKAVIQHFQEKVESLEQEAANERQQLVETHMARVEAMLNDRRRLALENYITALQAVPPRPRHVFNMLKKYVRAEQKDRQHTLKHFEHVRMVDPKKAAQIRSQVMTHLRVIYERMNQSLSLLYNVPAVAEEIQDEVDELLQKEQNYSDDVLANMISEPRISYGNDALMPSLTETKTTVELLPVNGEFSLDDLQPWHSFGADSVPANTENEVEPVDARPAADRGLTTRPGSGLTNIKTEEISEVKMDAEFRHDSGYEVHHQKLVFFAEDVGSNKGAIIGLMVGGVVIATVIVITLVMLKKKQYTSIHHGVVEVDAAVTPEERHLSKMQQNGYENPTYKFFEQMQN

SEQ ID NO: 28113 - protein, 539 aa, Artificial Sequence
  Synthetic polypeptide
GLPSHVELEDKVVEVAEEEEVAEVEEEEADDDEDDEDGDEVEEEAEEPYEEATERTTSIATTTTTTTESVEEVVREVCSEQAETGPCRAMISRWYFDVTEGKCAPFFYGGCGGNRNNFDTEEYCMAVCGSAMSQSLLKTTQEPLARDPVKLPTTAASTPDAVDKYLETPGDENEHAHFQKAKERLEAKHRERMSQVMREWEEAERQAKNLPKADKKAVIQHFQEKVESLEQEAANERQQLVETHMARVEAMLNDRRRLALENYITALQAVPPRPRHVFNMLKKYVRAEQKDRQHTLKHFEHVRMVDPKKAAQIRSQVMTHLRVIYERMNQSLSLLYNVPAVAEEIQDEVDELLQKEQNYSDDVLANMISEPRISYGNDALMPSLTETKTTVELLPVNGEFSLDDLQPWHSFGADSVPANTENEGSGLTNIKTEEISEVKMDAEFRHDSGYEVHHQKLVFFAEDVGSNKGAIIGLMVGGVVIATVIVITLVMLKKKQYTSIHHGVVEVDAAVTPEERHLSKMQQNGYENPTYKFFEQMQN

SEQ ID NO: 28114 - protein, 501 aa, Artificial Sequence
  Synthetic polypeptide
GLPSHVELEDKVVEVAEEEEVAEVEEEEADDDEDDEDGDEVEEEAEEPYEEATERTTSIATTTTTTTESVEEVVRVSQSLLKTTQEPLARDPVKLPTTAASTPDAVDKYLETPGDENEHAHFQKAKERLEAKHRERMSQVMREWEEAERQAKNLPKADKKAVIQHFQEKVESLEQEAANERQQLVETHMARVEAMLNDRRRLALENYITALQAVPPRPRHVFNMLKKYVRAEQKDRQHTLKHFEHVRMVDPKKAAQIRSQVMTHLRVIYERMNQSLSLLYNVPAVAEEIQDEVDELLQKEQNYSDDVLANMISEPRISYGNDALMPSLTETKTTVELLPVNGEFSLDDLQPWHSFGADSVPANTENEVEPVDARPAADRGLTTRPGSGLTNIKTEEISEVKMDAEFRHDSGYEVHHQKLVFFAEDVGSNKGAIIGLMVGGVVIATVIVITLVMLKKKQYTSIHHGVVEVDAAVTPEERHLSKMQQNGYENPTYKFFEQMQN

SEQ ID NO: 28115 - protein, 350 aa, Artificial Sequence
  Synthetic polypeptide
GLPSHVELEDKVVEVAEEEEVAEVEEEEADDDEDDEDGDEVEEEAEEPYEEATERTTSIATTTTTTTESVEEVVREVCSEQAETGPCRAMISRWYFDVTEGKCAPFFYGGCGGNRNNFDTEEYCMAVCGSAIPTTAASTPDAVDKYLETPGDENEHAHFQKAKERLEAKHRERMSQVMREWEEAERQAKNLPKADKKAVIQHFQEKVESLEQEAANERQQLVETHMARVEAMLNDRRRLALENYITALQAVPPRPRHVFNMLKKYVRAEQKDRQHTLKHFEHVRMVDPKKAAQIRSQVMTHLRVIYERMNQSLSLLYNVPAVAEEIQDEVGAVAHACNSSILGGQGGQMT

SEQ ID NO: 28116 - protein, 177 aa, Artificial Sequence
  Synthetic polypeptide
GLPSHVELEDKVVEVAEEEEVAEVEEEEADDDEDDEDGDEVEEEAEEPYEEATERTTSIATTTTTTTESVEEVVRVSQSLLKTTQEPLARDPVKLPTTAASTPDAVDKYLETPGDENEHAHFQKAKERLEAKHRERMSQVMREWEEAERQAKNLPKADKKAVIQHFQEKVESLEQEA

SEQ ID NO: 28117 - protein, 14 aa, Artificial Sequence
  Synthetic polypeptide
LLRSLRNLHMSKND

SEQ ID NO: 28118 - protein, 24 aa, Artificial Sequence
  Synthetic polypeptide
SRAWQCIPVVLATQKSEKLTHVQK

SEQ ID NO: 28119 - protein, 818 aa, Artificial Sequence
  Synthetic polypeptide
LGQFWAPERLAQCLPYKPVCRHIRKGLEQGNLKKALVNVEWNICQDCKTDNKVKDKAEEETEEKPSVWLCLKCGHQGCGRNSQEQHALKHYLTPRSEPHCLVLSLDNWSVWCYVCDNEVQYCSSNQLGQVVDYVRKQASITTPKPEKDNGNIELENKKLEKESKNEQEREKKENMAKENPPMNSPCQITVKGLSNLGNTCFFNAVMQNLSQTPVLRELLKEVKMSGTIVKIEPPDLALTEPLEINLEPPGPLTLAMSQFLNEMQETKKGVVTPKELFSQVCKKAVRFKGYQQQDSQELLRYLLDGMRAEEHQRVSKGILKAFGNSTEKLDEELKNKVKDYEKKKSMPSFVDRIFGGELTSMIMCDQCRTVSLVHESFLDLSLPVLDDQSGKKSVNDKNLKKTVEDEDQDSEEEKDNDSYIKERSDIPSGTSKHLQKKAKKQAKKQAKNQRRQQKIQGKVLHLNDICTIDHPEDSEYEAEMSLQGEVNIKSNHISQEGVMHKEYCVNQKDLNGQAKMIESVTDNQKSTEEVDMKNINMDNDLEVLTSSPTRNLNGAYLTEGSNGEVDISNGFKNLNLNAALHPDEINIEILNDSHTPGTKVYEVVNEDPETAFCTLANREVFNTDECSIQHCLYQFTRNEKLRDANKLLCEVCTRRQCNGPKANIKGERKHVYTNAKKQMLISLAPPVLTLHLKRFQQAGFNLRKVNKHIKFPEILDLAPFCTLKCKNVAEENTRVLYSLYGVVEHSGTMRSGHYTAYAKARTANSHLSNLVLHGDIPQDFEMESKGQWFHISDTHVQAVPTTKVLNSQAYLLFYERIL

SEQ ID NO: 28120 - protein, 21 aa, Artificial Sequence
  Synthetic polypeptide
HSACPINLCADTLEKDWNKVI

SEQ ID NO: 28121 - protein, 819 aa, Artificial Sequence
  Synthetic polypeptide
LGQFWAPERLAQCLPYKPVCRHIRKGLEQGNLKKALVNVEWNICQDCKTDNKVKDKAEEETEEKPSVWLCLKCGHQGCGRNSQEQHALKHYLTPRSEPHCLVLSLDNWSVWCYVCDNEVQYCSSNQLGQVVDYVRKQASITTPKPAEKDNGNIELENKKLEKESKNEQEREKKENMAKENPPMNSPCQITVKGLSNLGNTCFFNAVMQNLSQTPVLRELLKEVKMSGTIVKIEPPDLALTEPLEINLEPPGPLTLAMSQFLNEMQETKKGVVTPKELFSQVCKKAVRFKGYQQQDSQELLRYLLDGMRAEEHQRVSKGILKAFGNSTEKLDEELKNKVKDYEKKKSMPSFVDRIFGGELTSMIMCDQCRTVSLVHESFLDLSLPVLDDQSGKKSVNDKNLKKTVEDEDQDSEEEKDNDSYIKERSDIPSGTSKHLQKKAKKQAKKQAKNQRRQQKIQGKVLHLNDICTIDHPEDSEYEAEMSLQGEVNIKSNHISQEGVMHKEYCVNQKDLNGQAKMIESVTDNQKSTEEVDMKNINMDNDLEVLTSSPTRNLNGAYLTEGSNGEVDISNGFKNLNLNAALHPDEINIEILNDSHTPGTKVYEVVNEDPETAFCTLANREVFNTDECSIQHCLYQFTRNEKLRDANKLLCEVCTRRQCNGPKANIKGERKHVYTNAKKQMLISLAPPVLTLHLKRFQQAGFNLRKVNKHIKFPEILDLAPFCTLKCKNVAEENTRVLYSLYGVVEHSGTMRSGHYTAYAKARTANSHLSNLVLHGDIPQDFEMESKGQWFHISDTHVQAVPTTKVLNSQAYLLFYERIL

SEQ ID NO: 28122 - protein, 103 aa, Artificial Sequence
  Synthetic polypeptide
LGQFWAPERLAQCLPYKPVCRHIRKGLEQGNLKKALVNVEWNICQDCKTDNKVKDKAEEETEEKPSVWLCLKCGHQGCGRNSQEQHALKHYLTPRSEPHCLVL

SEQ ID NO: 28123 - protein, 6 aa, Artificial Sequence
  Synthetic polypeptide
RSTFQD

SEQ ID NO: 28124 - protein, 20 aa, Artificial Sequence
  Synthetic polypeptide
MGLRPVTLKGALFRIRRGCV

SEQ ID NO: 28125 - protein, 535 aa, Artificial Sequence
  Synthetic polypeptide
GPSPLKEHFSGLEEAVYRNIQACKELAQTTRTAYGPNGMNKMVINHLEKLFVTNDAATILRELEVQHPAAKMIVMASHMQEQEVGDGTNFVLVFAGALLELAEELLRIGLSVSEVIEGYEIACRKAHEILPNLVCCSAKNLRDIDEVSSLLRTSIMSKQYGNEVFLAKLIAQACVSIFPDSGHFNVDNIRVCKILGSGISSSSVLHGMVFKKETEGDVTSVKDAKIAVYSCPFDGMITETKGTVLIKTAEELMNFSKGEENLMDAQVKAIADTGANVVVTGGKVADMALHYANKYNIMLVRLNSKWDLRRLCKTVGATALPRLTPPVLEEMGHCDSVYLSEVGDTQVVVFKHEKEDGAISTIVLRGSTDNLMDDIERAVDDGVNTFKVLTRDKRLVPGGGATEIELAKQITSYGETCPGLEQYAIKKFAEAFEAIPRALAENSGVKANEVISKLYAVHQEGNKNVGLDIEAEVPAVKDMLEAGILDTYLGKYWAIKLATNAAVTVLRVDQIIMAKPAGGPKPPSGKKDWDDDQND

SEQ ID NO: 28126 - protein, 318 aa, Artificial Sequence
  Synthetic polypeptide
GPSPLKEHFSGLEEAVYRNIQACKELAQTTRTAYGPNGMNKMVINHLEKLFVTNDAATILRELEVQHPAAKMIVMASHMQEQEVGDGTNFVLVFAGALLELAEELLRIGLSVSEVIEGYEIACRKAHEILPNLVCCSAKNLRDIDEVSSLLRTSIMSKQYGNEVFLAKLIAQACVSIFPDSGHFNVDNIRVCKILGTVLIKTAEELMNFSKGEENLMDAQVKAIADTGANVVVTGGKVADMALHYANKYNIMLVRLNSKWDLRRLCKTVGATALPRLTPPVLEEMGHCDSVYLSEVGDTQVVVFKHEKEDGAISTIVL

SEQ ID NO: 28127 - protein, 47 aa, Artificial Sequence
  Synthetic polypeptide
KAAVSFSQHPMHHRGDWLDALCSIRACQTNRGANQSEEEARRWERHF

SEQ ID NO: 28128 - protein, 55 aa, Artificial Sequence
  Synthetic polypeptide
LERQLSLLANIPCTIVETGWMPCALSGHVRPTEGQIRVKRKPEDGRDIFEGTSCQ

SEQ ID NO: 28129 - protein, 36 aa, Artificial Sequence
  Synthetic polypeptide
KAAVSFSQHPMHHRGDWLDALCSIRACQTNRGANQS

SEQ ID NO: 28130 - protein, 38 aa, Artificial Sequence
  Synthetic polypeptide
LERQLSLLANIPCTIVETGWMPCALSGHVRPTEGQIRV

SEQ ID NO: 28131 - protein, 74 aa, Artificial Sequence
  Synthetic polypeptide
GLPKPCRTVFPVMFLWIRNRSYPNVKRKMVASLRLCAARGAHSILATCTDARPRILITRETCFASVLKPLKVMF

SEQ ID NO: 28132 - protein, 28 aa, Artificial Sequence
  Synthetic polypeptide
DVLCFPFVFRHDCKFPEASPSHAELCFL

SEQ ID NO: 28133 - protein, 172 aa, Artificial Sequence
  Synthetic polypeptide
VLTRSGGFKVWHLPLACSLSLLLPRKTCFASPLSSAMIASFLRPPQAMQNCVSCNVSVDKEQKLSKREKENGCVLETLCCAGCSLNLGYVYRCTPKNLDYKRDLFCLSVEAIESYVLGSSEKQIVSEDKELFNLESRVEIEKSLTQMEDVLKALQMKLWEAESKLSFATCKS

SEQ ID NO: 28134 - protein, 86 aa, Artificial Sequence
  Synthetic polypeptide
PWMEGDCLKVVCSSQLSFFLVFPVMFLWIRNRSYPNVKRKMVASLRLCAARGAHSILATCTDARPRILITRETCFASVLKPLKVMF

SEQ ID NO: 28135 - protein, 92 aa, Artificial Sequence
  Synthetic polypeptide
IPSHSRSTLLLTMVNLYGLHQYATCPVDSGWIWAMASSSRKLEGQKRARSENLISCLPPYEVTPAGDCDPGWKVIVSRWSALRNSPSFWCFL

SEQ ID NO: 28136 - protein, 136 aa, Artificial Sequence
  Synthetic polypeptide
LSQGGLLFATLLLSGVSCNVSVDKEQKLSKREKENGCVLETLCCAGCSLNLGYVYRCTPKNLDYKRDLFCLSVEAIESYVLGSSEKQIVSEDKELFNLESRVEIEKSLTQMEDVLKALQMKLWEAESKLSFATCKS

SEQ ID NO: 28137 - protein, 126 aa, Artificial Sequence
  Synthetic polypeptide
PWMEGVSCNVSVDKEQKLSKREKENGCVLETLCCAGCSLNLGYVYRCTPKNLDYKRDLFCLSVEAIESYVLGSSEKQIVSEDKELFNLESRVEIEKSLTQMEDVLKALQMKLWEAESKLSFATCKS

SEQ ID NO: 28138 - protein, 139 aa, Artificial Sequence
  Synthetic polypeptide
IPSHSRSTLLLTMVNLYGLHQYATCPVDSGWIWAMASSSRKLEGQKRARSENLISCLPPYEVTPAGDCDPGWKVFPVMFLWIRNRSYPNVKRKMVASLRLCAARGAHSILATCTDARPRILITRETCFASVLKPLKVMF

SEQ ID NO: 28139 - protein, 23 aa, Artificial Sequence
  Synthetic polypeptide
SPASLPMRSPQLVTVTLDGRCFL

SEQ ID NO: 28140 - protein, 321 aa, Artificial Sequence
  Synthetic polypeptide
RSRLRSHLTGFETSSSSPSWLRELGHGAGAQSPLLWNGDNYELKNKTVCEDQELKLHCHESKFLNIYSATYGRRTQERDICSSKAERLPPFDCLSYSALQVLSRRCYGKQRCKIIVNNHHFGSPCLPGVKKYLTVTYACVPKNILTAIDPAIANLKPSLKQKDGEYGINFDPSGSKVLRKDGILVSNSLAAFAYIRAHPERAALLFVSSVCIGLALTLCALVIRESCAKDFRDLQLGREQLVPGSDKVEEDSEDEEEEEDPSESDFPGELSGFCRTSYPIYSSIEAAELAERIERREQIIQEIWMNSGLDTSLPRNMGQFY

SEQ ID NO: 28141 - protein, 34 aa, Artificial Sequence
  Synthetic polypeptide
PVLRPPARRRPGCESLGTAPGLSLLFCGMAITMN

SEQ ID NO: 28142 - protein, 179 aa, Artificial Sequence
  Synthetic polypeptide
RSRLRSHLTGFETSSSSPSWLRELGHGAGAQSPLLWNGDNYELKNKTVCEDQELKLHCHESKFLNIYSATYGRRTQERDICSSKAERLPPFDCLSYSALQVLSRRCYGKQRCKIIVNNHHFGSPCLPGVKKYLTVTYACVPKNILTAIDPAIANLKPSLKQKDGEYGNFYGLLPAFLFK

SEQ ID NO: 28143 - protein, 273 aa, Artificial Sequence
  Synthetic polypeptide
RSRLRSHLTGFETSSSSPSWLRELGHGAGAQSPLLWNGDNYELKNKTVCEDQELKLHCHESKFLNIYSATYGRRTQERDICSSKAERLPPFVPKNILTAIDPAIANLKPSLKQKDGEYGINFDPSGSKVLRKDGILVSNSLAAFAYIRAHPERAALLFVSSVCIGLALTLCALVIRESCAKDFRDLQLGREQLVPGSDKVEEDSEDEEEEEDPSESDFPGELSGFCRTSYPIYSSIEAAELAERIERREQIIQEIWMNSGLDTSLPRNMGQFY

SEQ ID NO: 28144 - protein, 318 aa, Artificial Sequence
  Synthetic polypeptide
RSRLRSHLTGFETSSSSPSWLRELGHGAGAQSPLLWNGDNYELKNKTVCEDQELKLHCHESKFLNIYSATYGRRTQERDICSSKAERLPPFDCLSYSALQVLSRRCYGKQRCKIIVNNHHFGSPCLPGVKKYLTVTYACVPKNILTAIDPAIANLKPSLKQKDGINFDPSGSKVLRKDGILVSNSLAAFAYIRAHPERAALLFVSSVCIGLALTLCALVIRESCAKDFRDLQLGREQLVPGSDKVEEDSEDEEEEEDPSESDFPGELSGFCRTSYPIYSSIEAAELAERIERREQIIQEIWMNSGLDTSLPRNMGQFY

SEQ ID NO: 28145 - protein, 128 aa, Artificial Sequence
  Synthetic polypeptide
RSRLRSHLTGFETSSSSPSWLRELGHGAGAQSPLLWNGDNYELKNKTVCEDQELKLHCHESKFLNIYSATYGRRTQERDICSSKAERLPPFDCLSYSALQVLSRRCYGKQRCKIIVNNHHFGSPCLPG

SEQ ID NO: 28146 - protein, 291 aa, Artificial Sequence
  Synthetic polypeptide
PPCQRPRPEMEELAEHGIFLPPNMQGLTDDQIEELKLKDEWGEKCVPSGGAVFKKDDIGRRNGQAPNEKMKQVLKKTIEEAKAIISKKQVEAGVCVTMEMVKDALDQLRGAVMIVYPMGLPPYDPIRMEFENKEDLSGTQAGLNVIKEAEAQLWWAAKELRRTKKLSDYVGKNEKTKIIAKIQQRGQGAPAREPIISSEEQKQLMLYYHRRQEELKPLQQQIIRLHQELGRQKSLWADVHGKLRSHIDALREQNMELREKLRALQLQRWKARKKSAASPHAGQESHTLALE

SEQ ID NO: 28147 - protein, 12 aa, Artificial Sequence
  Synthetic polypeptide
PRVKGPGQKWKN

SEQ ID NO: 28148 - protein, 21 aa, Artificial Sequence
  Synthetic polypeptide
PVSKAQARNGRISRTWHISPS

SEQ ID NO: 28149 - protein, 259 aa, Artificial Sequence
  Synthetic polypeptide
PPCQRPRPEMEELAEHGIFLPPNMQGLTDDQIEELKLKDEWGEKCVPSGGAVFKKDDIGRRNGQAPNEKMKQVLKKTIEEAKAIISKKQVEAGVCVTMEMVKDALDQLRGAVMIVYPMGLPPYDPIRMEFENKEDLSGTQAGLNVIKEAEAQLWWAAKELRRTKKLSDYVGKNEKTKIIAKIQQPLQQQIIRLHQELGRQKSLWADVHGKLRSHIDALREQNMELREKLRALQLQRWKARKKSAASPHAGQESHTLALE

SEQ ID NO: 28150 - protein, 220 aa, Artificial Sequence
  Synthetic polypeptide
PPCQRPRPEMEELAEHGIFLPPNMQGLTDDQIEELKLKDEWGEKCVPSGGAVFKKDDIGRRNGQAPNEKMKQVLKKTIEEAKAIISKKQVEAGVCVTMEMVKDALDQLRGAVMIVYPMGLPPYDPIRMEFENKEDLSGTQAGLNVIKEAEAQLWWAAKELRRTKKLSDYVGKNEKTKIIAKIQQRLEENDDDAYLNSPWADNTALKRHFHGVKDIKWRPR

SEQ ID NO: 28151 - protein, 207 aa, Artificial Sequence
  Synthetic polypeptide
PPCQRPRPEMEELAEHGIFLPPNMQGLTDDQIEELKLKDEWGEKCVPSGGAVFKKDDIGRRNGQAPNEKMKQVLKKTIEEAKAIISKKQVEAGVCVTMEMVKDALDQLRGAVMIVYPMGLPPYDPIRMEFENKEDLSGTQAGLNVIKEAEAQLWWAAKELRRTKKLSDYVGKNEKTKIIAKIQQVSTFCFNVSVVFVISLQTDKNVQ

SEQ ID NO: 28152 - protein, 252 aa, Artificial Sequence
  Synthetic polypeptide
PPCQRPRPEMEELAEHGIFLPPNMQGLTDDQIEELKLKDEWGEKCVPSGGAVFKKDDIGRRNGQAPNEKMKQVLKKTIEEAKAIISKKQVEAGVCVTMEMVKDALDQLRGAVMIVYPMGLPPYDPIRMEFENKEDLSGTQAGLNVIKEAEAQLWWAAKELRRTKKLSDYVGKNEKTKIIAKIQQRGQGAPAREPIISSEEQKQLMLYYHRRQEELKRLEENDDDAYLNSPWADNTALKRHFHGVKDIKWRPR

SEQ ID NO: 28153 - protein, 100 aa, Artificial Sequence
  Synthetic polypeptide
PPCQRPRPEMEELAEHGIFLPPNMQGLTDDQIEELKLKDEWGEKCVPSGGAVFKKDDIGRRNGQETSGSRCLCYHGDGERCLGPASRRGDDCLPHGVATV

SEQ ID NO: 28154 - protein, 39 aa, Artificial Sequence
  Synthetic polypeptide
RTKGTPQIPSFPAARSSAPEDSPVQRRAGPELGASGPEQ

SEQ ID NO: 28155 - protein, 347 aa, Artificial Sequence
  Synthetic polypeptide
VEGGIMVPKDVHALILRVREPGNVLPDVQKGLRRYPLSQLPAPQHPKIRLYNAEQVLSWEPVALSNSTRPVVYQVQFKYTDSKWFTADIMSIGVNCTQITATECDFTAASPSAGFPMDFNVTLRLRAELGALHSAWVTMPWFQHYRNVTVGPPENIEVTPGEGSLIIRFSSPFDIADTSTAFFCYYVHYWEKGGIQQVKGPFRSNSISLDNLKPSRVYCLQVQAQLLWNKSNIFRVGHLSNISCYETMADASTELQQVILISVGTFSLLSVLAGACFFLVLKYRGLIKYWFHTPPSIPLQIEEYLKDPTQPILEALDKDSSPKDDVWDSVSIISFPEKEQEDVLQTL

SEQ ID NO: 28156 - protein, 51 aa, Artificial Sequence
  Synthetic polypeptide
WSPKMSTPSSSESVNLGMCCLTYKRDSADTLFPSCPLLSTRRFACTTQSRS

SEQ ID NO: 28157 - protein, 304 aa, Artificial Sequence
  Synthetic polypeptide
VEGGIMVPKDVHALILRVREPGNVLPDVQKGLRRCDTDSKWFTADIMSIGVNCTQITATECDFTAASPSAGFPMDFNVTLRLRAELGALHSAWVTMPWFQHYRNVTVGPPENIEVTPGEGSLIIRFSSPFDIADTSTAFFCYYVHYWEKGGIQQVKGPFRSNSISLDNLKPSRVYCLQVQAQLLWNKSNIFRVGHLSNISCYETMADASTELQQVILISVGTFSLLSVLAGACFFLVLKYRGLIKYWFHTPPSIPLQIEEYLKDPTQPILEALDKDSSPKDDVWDSVSIISFPEKEQEDVLQTL

SEQ ID NO: 28158 - protein, 43 aa, Artificial Sequence
  Synthetic polypeptide
WSPKMSTPSSSESVNLGMCCLTYKRDSADVTPTVNGSRPTSCP

SEQ ID NO: 28159 - protein, 49 aa, Artificial Sequence
  Synthetic polypeptide
VEGGIMVPKDVHALILRVREPGNVLPDVQKGLRRCDTDSKWFTADIMSI

SEQ ID NO: 28160 - protein, 17 aa, Artificial Sequence
  Synthetic polypeptide
SQHFGRPKRVDHEVPHV

SEQ ID NO: 28161 - protein, 32 aa, Artificial Sequence
  Synthetic polypeptide
PGVVAHACNPSTLGGRSGWITRFPTCESQESD

SEQ ID NO: 28162 - protein, 260 aa, Artificial Sequence
  Synthetic polypeptide
RAWWLTPVIPALWEAEAGGSRGSPRVKVKNLIESMQINGSVLKNGSLTNHFSFEKKKARVAVLISGTGSNLQALIDSTREPNSSAQIDIVISNKAAVAGLDKAERAGIPTRVINHKLYKNRVEFDSAIDLVLEEFSIDIVCLAGFMRILSGPFVQKWNGKMLNIHPSLLPSFKGSNAHEQALETGVTVTGCTVHFVAEDVDAGQIILQEAVPVKRGDTVATLSERVKLAEHKIFPAALQLVASGTVQLGENGKICWVKEE

SEQ ID NO: 28163 - protein, 25 aa, Artificial Sequence
  Synthetic polypeptide
GWAWWLTSAIPALWEAEAGGSLEPE

SEQ ID NO: 28164 - protein, 26 aa, Artificial Sequence
  Synthetic polypeptide
AGRGGSHLQSQHFGRPRRVDHLSPSD

SEQ ID NO: 28165 - protein, 29 aa, Artificial Sequence
  Synthetic polypeptide
GWAWWLTSAIPALWEAEAGGSLERTVQLP

SEQ ID NO: 28166 - protein, 29 aa, Artificial Sequence
  Synthetic polypeptide
AGRGGSHLQSQHFGRPRRVDHLREQYNCL

SEQ ID NO: 28167 - protein, 51 aa, Artificial Sequence
  Synthetic polypeptide
KGYVFIFSSLHSMFINQKRSHGRKQQEAFGMECVPIQLCIIFLISLLENQC

SEQ ID NO: 28168 - protein, 14 aa, Artificial Sequence
  Synthetic polypeptide
RDMFLFSVLCTACS

SEQ ID NO: 28169 - protein, 251 aa, Artificial Sequence
  Synthetic polypeptide
GICFYFQFFAQHVHKPEKVTWTEAAGSIRDGVRAYTALHYLSHLSPGKSVLIMDGASAFGTIAIQLAHHRGAKVISTACSLEDKQCLERFRPPIARVIDVSNGKVHVAESCLEETGGLGVDIVLDAGVRLYSKDDEPAVKLQLLPHKHDIITLLGVGGHWVTTEENLQLDPPDSHCLFLKGATLAFLNDEVWNLSNVQQGKYLCILKDVMEKLSTGVFRPQLDEPIPLYEAKVSMEAVQKNQGRKKQVVQF

SEQ ID NO: 28170 - protein, 224 aa, Artificial Sequence
  Synthetic polypeptide
GICFYFQFFAQHVHKPEKVTWTEAAGSIRDGVRAYTALHYLSHLSPGKSVLIMDGASAFGTIAIQLAHHRGAKVISTACSLEDKQCLERFRPPIARVIDVSNGKVHVAESCLEETGGLGVDIVLDAGVRLYSKDDEPAVKLQLLPHKHDIITLLGVGGHWVTTEENLQLDPPDSHCLFLKGATLAFLNDEVWNLSNVQQGKYLSTYLKGCDGEVINWCFQTSVG

SEQ ID NO: 28171 - protein, 100 aa, Artificial Sequence
  Synthetic polypeptide
GICFYFQFFAQHVHKPEKVTWTEAAGSIRDGVRAYTALHYLSHLSPGKSVLIMDGASAFGTIAIQLAHHRGAKVISTACSLEDKQCLERFRPPIENSTIA

SEQ ID NO: 28172 - protein, 137 aa, Artificial Sequence
  Synthetic polypeptide
GICFYFQFFAQHVHKPEKVTWTEAAGSIRDGVRAYTALHYLSHLSPGKSVLIMDGASAFGTIAIQLAHHRGAKVISTACSLEDKQCLERFRPPIDLSWMNPFHCMRQKFPWKLFRKIKEEKSKLFNFNFLLSQTSVG

SEQ ID NO: 28173 - protein, 203 aa, Artificial Sequence
  Synthetic polypeptide
GICFYFQFFAQHVHKPEKVTWTEAAGSIRDGVRAYTALHYLSHLSPGKSVLIMDGASAFGTIAIQLAHHRGAKVISTACSLEDKQCLERFRPPIARVIDVSNGKVHVAESCLEETGGLGVDIVLDAGVRLYSKDDEPAVKLQLLPHKHDIITLLGVGGHWVTTEENLQLDPPDSHCLFLKGATLAFLNDEVWNLSNVQQGKYL

SEQ ID NO: 28174 - protein, 199 aa, Artificial Sequence
  Synthetic polypeptide
GICFYFQFFAQHVHKPEKVTWTEAAGSIRDGVRAYTALHYLSHLSPGKSVLIMDGASAFGTIAIQLAHHRGAKVISTACSLEDKQCLERFRPPIARVIDVSNGKVHVAESCLEETGGLGVDIVLDAGVRLYSKDDEPAVKLQLLPHKHDIITLLGVGGHWVTTEENLQVKKQKHRDVDTDSRTQQVAEQESHSGSLSPF

SEQ ID NO: 28175 - protein, 112 aa, Artificial Sequence
  Synthetic polypeptide
GICFYFQFFAQHVHKPEKVTWTEAAGSIRDGVRAYTALHYLSHLSPGKSVLIMDGASAFGTIAIQLAHHRGAKVISTACSLEDKQCLERFRPPIARVIDVSNGKVHVAESCL

SEQ ID NO: 28176 - protein, 83 aa, Artificial Sequence
  Synthetic polypeptide
GICFYFQFFAQHVHKPEKVTWTEAAGSIRDGVRAYTALHYLSHLSPGKSVLIMDGASAFGTIAIQLAHHRGAKVISTACSLED

SEQ ID NO: 28177 - protein, 61 aa, Artificial Sequence
  Synthetic polypeptide
GICFYFQFFAQHVHKPEKVTWTEAAGSIRDGVRAYTALHYLSHLSPGKSVLIMDGASAFGT

SEQ ID NO: 28178 - protein, 46 aa, Artificial Sequence
  Synthetic polypeptide
GRARWLTPVIPALWEAEAGGSRGQEIETILANTLEARYHSFNQMMK

SEQ ID NO: 28179 - protein, 34 aa, Artificial Sequence
  Synthetic polypeptide
SQHFGRPRRADHEVRRSRPSWLTRWKQGIILSTR

SEQ ID NO: 28180 - protein, 278 aa, Artificial Sequence
  Synthetic polypeptide
HVGSKVSFFQPDDEVVGILPLDSEDPGLCEVVRVHEHYLVHKPEKVTWTEAAGSIRDGVRAYTALHYLSHLSPGKSVLIMDGASAFGTIAIQLAHHRGAKVISTACSLEDKQCLERFRPPIARVIDVSNGKVHVAESCLEETGGLGVDIVLDAGVRLYSKDDEPAVKLQLLPHKHDIITLLGVGGHWVTTEENLQLDPPDSHCLFLKGATLAFLNDEVWNLSNVQQGKYLCILKDVMEKLSTGVFRPQLDEPIPLYEAKVSMEAVQKNQGRKKQVVQF

SEQ ID NO: 28181 - protein, 251 aa, Artificial Sequence
  Synthetic polypeptide
HVGSKVSFFQPDDEVVGILPLDSEDPGLCEVVRVHEHYLVHKPEKVTWTEAAGSIRDGVRAYTALHYLSHLSPGKSVLIMDGASAFGTIAIQLAHHRGAKVISTACSLEDKQCLERFRPPIARVIDVSNGKVHVAESCLEETGGLGVDIVLDAGVRLYSKDDEPAVKLQLLPHKHDIITLLGVGGHWVTTEENLQLDPPDSHCLFLKGATLAFLNDEVWNLSNVQQGKYLSTYLKGCDGEVINWCFQTSVG

SEQ ID NO: 28182 - protein, 230 aa, Artificial Sequence
  Synthetic polypeptide
HVGSKVSFFQPDDEVVGILPLDSEDPGLCEVVRVHEHYLVHKPEKVTWTEAAGSIRDGVRAYTALHYLSHLSPGKSVLIMDGASAFGTIAIQLAHHRGAKVISTACSLEDKQCLERFRPPIARVIDVSNGKVHVAESCLEETGGLGVDIVLDAGVRLYSKDDEPAVKLQLLPHKHDIITLLGVGGHWVTTEENLQLDPPDSHCLFLKGATLAFLNDEVWNLSNVQQGKYL

SEQ ID NO: 28183 - protein, 127 aa, Artificial Sequence
  Synthetic polypeptide
HVGSKVSFFQPDDEVVGILPLDSEDPGLCEVVRVHEHYLVHKPEKVTWTEAAGSIRDGVRAYTALHYLSHLSPGKSVLIMDGASAFGTIAIQLAHHRGAKVISTACSLEDKQCLERFRPPIENSTIA

SEQ ID NO: 28184 - protein, 226 aa, Artificial Sequence
  Synthetic polypeptide
HVGSKVSFFQPDDEVVGILPLDSEDPGLCEVVRVHEHYLVHKPEKVTWTEAAGSIRDGVRAYTALHYLSHLSPGKSVLIMDGASAFGTIAIQLAHHRGAKVISTACSLEDKQCLERFRPPIARVIDVSNGKVHVAESCLEETGGLGVDIVLDAGVRLYSKDDEPAVKLQLLPHKHDIITLLGVGGHWVTTEENLQVKKQKHRDVDTDSRTQQVAEQESHSGSLSPF

SEQ ID NO: 28185 - protein, 139 aa, Artificial Sequence
  Synthetic polypeptide
HVGSKVSFFQPDDEVVGILPLDSEDPGLCEVVRVHEHYLVHKPEKVTWTEAAGSIRDGVRAYTALHYLSHLSPGKSVLIMDGASAFGTIAIQLAHHRGAKVISTACSLEDKQCLERFRPPIARVIDVSNGKVHVAESCL

SEQ ID NO: 28186 - protein, 110 aa, Artificial Sequence
  Synthetic polypeptide
HVGSKVSFFQPDDEVVGILPLDSEDPGLCEVVRVHEHYLVHKPEKVTWTEAAGSIRDGVRAYTALHYLSHLSPGKSVLIMDGASAFGTIAIQLAHHRGAKVISTACSLED

SEQ ID NO: 28187 - protein, 88 aa, Artificial Sequence
  Synthetic polypeptide
HVGSKVSFFQPDDEVVGILPLDSEDPGLCEVVRVHEHYLVHKPEKVTWTEAAGSIRDGVRAYTALHYLSHLSPGKSVLIMDGASAFGT

SEQ ID NO: 28188 - protein, 42 aa, Artificial Sequence
  Synthetic polypeptide
HVGSKVSFFQPDDEVVEVLSRLGAVAHVCNPSTLGGQGGRIT

SEQ ID NO: 28189 - protein, 36 aa, Artificial Sequence
  Synthetic polypeptide
GRVRWLMPVIPAFREAEADGSQGDYERLIFPTEFHR

SEQ ID NO: 28190 - protein, 316 aa, Artificial Sequence
  Synthetic polypeptide
SQHFGRPRQTDHKVTMKGLYFQQSSTDEEITFVFQEKEDLPVTEDNFVKLQVKACALSQINTKLLAEMKMKKDLFPVGREIAGIVLDVGSKVSFFQPDDEVVGILPLDSEDPGLCEVVRVHEHYLVHKPEKVTWTEAAGSIRDGVRAYTALHYLSHLSPGKSVLIMDGASAFGTIAIQLAHHRGAKVISTACSLEDKQCLERFRPPIARVIDVSNGKVHVAESCLEETGGLGVDIVLDAGVRLYSKDDEPAVKLQLLPHKHDIITLLGVGGHWVTTEENLQLDPPDSHCLFLKGATLAFLNDEVWNLSNVQQGKYL

SEQ ID NO: 28191 - protein, 22 aa, Artificial Sequence
  Synthetic polypeptide
PGAVAHACNPSISGGRGRRITR

SEQ ID NO: 28192 - protein, 22 aa, Artificial Sequence
  Synthetic polypeptide
FLHFHLRCDASVPLWSDHLPSL

SEQ ID NO: 28193 - protein, 75 aa, Artificial Sequence
  Synthetic polypeptide
ATQKTVISAFPSEVRCFSTSVVRPFAKLVRPPVQVYGIEGRYATALYSAASKQNKLEQVEKELLRVAICLLKMVD

SEQ ID NO: 28194 - protein, 214 aa, Artificial Sequence
  Synthetic polypeptide
ATQKTVISAFPSEVRCFSTSVVRPFAKLVRPPVQVYGIEGRYATALYSAASKQNKLEQVEKELLRVAQILKEPKVAASVLNPYVKRSIKVKSLNDITAKERFSPLTTNLINLLAENGRLSNTQGVVSAFSTMMSVHRGEVPCTVTSASPLEEATLSELKTVLKSFLSQGQVLKLEAKTDPSILGGMIVRIGEKYVDMSVKTKIQKLGRAMREIV

SEQ ID NO: 28195 - protein, 21 aa, Artificial Sequence
  Synthetic polypeptide
VVPLPSSLGDRATASPKKKRS

SEQ ID NO: 28196 - protein, 108 aa, Artificial Sequence
  Synthetic polypeptide
SQLLGRLRQENCLNPGGGGCSEPRSCHCPPAWVTERLRLQKKKGPNWDHLLPLEGPDGVSPLRLPLTHPPPLCRQGRKDNREEGVLLGDHLDNISPMASWIPVDYFEL

SEQ ID NO: 28197 - protein, 74 aa, Artificial Sequence
  Synthetic polypeptide
QSDCVSKKKKVLTGTTYSPWRVRMEFPLCGCLSLILHHFADKEGRTIGRRESCLATIWTISRPWQAGSLWITLS

SEQ ID NO: 28198 - protein, 20 aa, Artificial Sequence
  Synthetic polypeptide
EDLDSGPDPPVTTVTYVARS

SEQ ID NO: 28199 - protein, 83 aa, Artificial Sequence
  Synthetic polypeptide
KTWILVLTLLLLLLRTWLGPNWDHLLPLEGPDGVSPLRLPLTHPPPLCRQGRKDNREEGVLLGDHLDNISPMASWIPVDYFEL

SEQ ID NO: 28200 - protein, 34 aa, Artificial Sequence
  Synthetic polypeptide
GLPSHVELPNLSPSLGRMTRTSPFSILRASNESE

SEQ ID NO: 28201 - protein, 21 aa, Artificial Sequence
  Synthetic polypeptide
EAPFVSHHDSEASPAMWNCQI

SEQ ID NO: 28202 - protein, 212 aa, Artificial Sequence
  Synthetic polypeptide
VSQDLMGLSEVSLLFLPHFPLPPPCKKHLLSLTMILRPPQPCGTAKFESLFRTYDKDITFQYFKSFKRVRINFSNPFSAADARLQLHKTEFLGKEMKLYFAQTLHIGSSHLAPPNPDKQFLISPPASPPVGWKQVEDATPVINYDLLYAISKLGPGEKYELHAATDTTPSVVVHVCESDQEKEEEEEMERMRRPKPKIIQTRRPEYTPIHLS

SEQ ID NO: 28203 - protein, 220 aa, Artificial Sequence
  Synthetic polypeptide
VSQDLMGLSEVSLLFLPHFPLPPPCKKHLLSLTMILRPPQPCGTAKFESLFRTYDKDITFQYFKSFKRVRINFSNPFSAADARLQLHKTEFLGKEMKLYFAQTLHIGSSHLAPPNPDKQFLISPPASPPVGWKQVEDATPVINYDLLYAISKLGPGEQGPRVGGRQGETQLLPCTREQYHHYPRSSPEPMPACFVSFSVFFCATVPCAGSMPASWHHLQC

SEQ ID NO: 28204 - protein, 22 aa, Artificial Sequence
  Synthetic polypeptide
LCSSFAFHHDCEASPAMWNCQI

SEQ ID NO: 28205 - protein, 198 aa, Artificial Sequence
  Synthetic polypeptide
SPLACHHVRCDFAPPLLSTMIVRPPQPCGTAKFESLFRTYDKDITFQYFKSFKRVRINFSNPFSAADARLQLHKTEFLGKEMKLYFAQTLHIGSSHLAPPNPDKQFLISPPASPPVGWKQVEDATPVINYDLLYAISKLGPGEKYELHAATDTTPSVVVHVCESDQEKEEEEEMERMRRPKPKIIQTRRPEYTPIHLS

SEQ ID NO: 28206 - protein, 34 aa, Artificial Sequence; identical to SEQ ID NO: 28200
  Synthetic polypeptide

SEQ ID NO: 28207 - protein, 206 aa, Artificial Sequence
  Synthetic polypeptide
SPLACHHVRCDFAPPLLSTMIVRPPQPCGTAKFESLFRTYDKDITFQYFKSFKRVRINFSNPFSAADARLQLHKTEFLGKEMKLYFAQTLHIGSSHLAPPNPDKQFLISPPASPPVGWKQVEDATPVINYDLLYAISKLGPGEQGPRVGGRQGETQLLPCTREQYHHYPRSSPEPMPACFVSFSVFFCATVPCAGSMPASWHHLQC

SEQ ID NO: 28208 - protein, 615 aa, Artificial Sequence
  Synthetic polypeptide
GRARWRLMPVIPALWKTEAGRSPEIIPTASASQLTLVDLVCALSTLQTDTLLHLVKEVVKRPPQVKGGDEKSPLVDIPVLQFCYAFLQRLPVPALQENFSSLLGVLKESVQLNLAPPGYFLLLSMLNDFVTRTPNLENKKDQKDLQEITQKILEAVGNIAGSSLEQTSWLSRNLEVKAQPQASLEESDAEEDLYDAAAASAMVSSSAPSVYSVQALSLLAEVLASLLDMVYRSDEKEKAVPLISRLLYYVFPYLRNHSAYNAPSFRAGAQLLSSLSGYAYTKRAWRKEVLELFLDPAFFQMDTSCVHWKSIIDHLLTHEKTMFKDLMNMQSSSLKLFSSFEQKAMLLKRQAFAVFSGELDQYHLYLPLIQERLTDNLRVGQTSIVAAQMFLFFRVLLLRISPQHLTSLWPIMVSELIQTFTQLEEDLKDEDESLRSTNKVNRTKVSVPDANGPSVGEIPQSELILYLSACKFLDTALSFPPDKMPLFQIYRWAFIPEVDTEGPAFLSDVEENHQECKPHTVRILELLKLKFGEISSSDEITMKSEFPLLRQHSVSSIRQLMPFFMTLNGAFKTQRQLPADSPGTPFLDFPVTDSPRILKQLEECIEYDFLEHPEC

SEQ ID NO: 28209 - protein, 23 aa, Artificial Sequence
  Synthetic polypeptide
SQHFGRPRRADHLRLSQRQVHPS

SEQ ID NO: 28210 - protein, 173 aa, Artificial Sequence
  Synthetic polypeptide
GWQPGSPQRFKWLHCWDPHLGGSPGHSEGTQDPASRRNHPPPWLAGKCPWLSWHQCLLIPPGQTLLLQGHLHDISNPLFLRSGSPVWPNSCWLMVIFSRTSSEPSVPVVAILASAAEAAAARLGSSSCRCCCSSIETRGPRPAEDQHWDLLQIQSHWHRDPAWHPLPQPKSEN

SEQ ID NO: 28211 - protein, 58 aa, Artificial Sequence
  Synthetic polypeptide
KTALFSPEVGSQGAHSVSNGFIVGIHTWEVLQDTLKELRILHHVVIILLLGWLASVHG

SEQ ID NO: 28212 - protein, 43 aa, Artificial Sequence
  Synthetic polypeptide
TANIISHDERPRCFPLRLAAREPTAFQMASLLGSTPGRFSRTL

SEQ ID NO: 28213 - protein, 32 aa, Artificial Sequence
  Synthetic polypeptide
KSGFFGLPLKVIIVIVMLFLCWGNMTGPCKQT

SEQ ID NO: 28214 - protein, 28 aa, Artificial Sequence
  Synthetic polypeptide
VVKRKELWTRCHKNQGSLVCLLRSLSLL

SEQ ID NO: 28215 - protein, 214 aa, Artificial Sequence
  Synthetic polypeptide
AFVALCFTWSLARWVTGVCLFVFLAVEQEFINDSRCTVLRKQDSGEAPFSSTKVKNKSKKKKPKDSKPMLVGSGTTSVTSNNEIITSSEDHSNRNSDSAGPFAVPDHLRQDVEEFEALYDQHSNEYVVRNKKLWDMNPKQKCSTLYDYFSQFLEEHGPLDMSNKMFSAEYEFFPEETRQILEKAGGLKPFLLGCPRFVVIDNCIALKKVASRLK

SEQ ID NO: 28216 - protein, 12 aa, Artificial Sequence
  Synthetic polypeptide
NRSSSMTAAVLC

SEQ ID NO: 28217 - protein, 218 aa, Artificial Sequence
  Synthetic polypeptide
AFVALCFTWSLARWVTGVCLFVFLAVEQEFINDSRCTVLRKQDSGEAPFSSTKVKNKSKKKKPKDSKPMLVGSGTTSVTSNNEIITSSEDHSNRNSDSAGPFAVPDHLRQDVEEFEALYDQHSNEYVVRNKKLWDMNPKQKCSTLYDYFSQFLEEHGPLDMSNKMFSAEYEFFPEETRQILEKAGGLKPFLLGCPRFVVIDNCIALKKVASRLKKKRK

SEQ ID NO: 28218 - protein, 1060 aa, Artificial Sequence
  Synthetic polypeptide
AFVALCFTWSLARWVTGVCLFVFLAVEQEFINDSRCTVLRKQDSGEAPFSSTKVKNKSKKKKPKDSKPMLVGSGTTSVTSNNEIITSSEDHSNRNSDSAGPFAVPDHLRQDVEEFEALYDQHSNEYVVRNKKLWDMNPKQKCSTLYDYFSQFLEEHGPLDMSNKMFSAEYEFFPEETRQILEKAGGLKPFLLGCPRFVVIDNCIALKKVASRLKKKRKKKNIKTKVEEISKAGEYVRVKLQLNPAAREFKPDVKSKPVSDSSSAPAFENVKPKPVSANSPKPACEDVKAKPVSDNSSRQVSEDGQPKGVSSNSPKPGSEDANYKRVSCNSPKPVLEDVKPTYWAQSHLVTGYCTYLPFQRFDITQTPPAYINVLPGLPQYTSIYTPLASLSPEYQLPRSVPVVPSFVANDRADKNAAAYFEGHHLNAENVAGHQIASETQILEGSLGISVKSHCSTGDAHTVLSESNRNDEHCGNSNNKCEVIPESTSAVTNIPHVQMVAIQVSWNIIHQEVNTEPYNPFEERQGEISRIEKEHQVLQDQLQEVYENYEQIKLKGLEETRDLEEKLKRHLEENKISKTELDWFLQDLEREIKKWQQEKKEIQERLKSLKKKIKKVSNASEMYTQKNDGKEKEHELHLDQSLEISNTLTNEKMKIEEYIKKGKEDYEESHQRAVAAEVSVLENWKESEVYKLQIMESQAEAFLKKLGLISRDPAAYPDMESDIRSWELFLSNVTKEIEKAKSQFEEQIKAIKNGSRLSELSKVQISELSFPACNTVHPELLPESSGDDGQGLVTSASDVTGNHAALHRDPSVFSAGDSPGEAPSALLPGPPPGQPEATQLTGPKRAGQAALSERSPVADRKQPVPPGRAARSSQSPKKPFNSIIEHLSVVFPCYNSTELAGFIKKVRSKNKNSLSGLSIDEIVQRVTEHILDEQKKKKPNPGKDKRTYEPSSATPVTRSSQGSPSVVVAPSPKTKGQKAEDVPVRIALGASSCEICHEVFKSKNVRVLKCGHKYHKGCFKQWLKGQSACPACQGRDLLTEESPSGRGWPSQNQELPSCSSR

SEQ ID NO: 28219 - protein, 177 aa, Artificial Sequence
  Synthetic polypeptide
AFVALCFTWSLARWVTGVCLFVFLAVEQEFINDSRCTVLRKQDSGEAPFSSTKVKNKSKKKKPKDSKPMLVGSGTTSVTSNNEIITSSEDHSNRNSDSAGPFAVPDHLRQDVEEFEALYDQHSNEYVVRNKKLWDMNPKQKCSTLYDYFSQFLEEHGPLDMSNKMFSAEYEFFPEET

SEQ ID NO: 28220 - protein, 72 aa, Artificial Sequence
  Synthetic polypeptide
VLTRSGSSEVCGTSPTLSFSFSGHARHICFSFTFHYDFSFCHLGWSAVVQSRITAASTSQFKKFSCLSLLSS

SEQ ID NO: 28221 - protein, 60 aa, Artificial Sequence
  Synthetic polypeptide
EVIGSQGGTSPCFSLNNEFSQDLVLQKCVAPPLLSLSPSPAMQDISASPSPSTMISLSVT

SEQ ID NO: 28222 - protein, 1328 aa, Artificial Sequence
  Synthetic polypeptide
PFDGYSIQDQELVKIVGIRYEVGPPTLCCLKLAFIDPATGKLMDKSFSIRYHDMPDVIDFLVLRQFYDEARQRNWQSCDRFRSIIDDAWWFGTVLSQEPYQPQYPDSHFQCYIVRWDNTEIEKLSPWDMEPIPDNVDPPEELGASISVTTDELEKLLYKPQAGEWGQKSRDEECDRIISGIDQLLNLDIAAAFAGPVDLCTYPKYCTVVAYPTDLYTIRMRLVNRFYRRLSALVWEVRYIEHNARTFNEPESVIARSAKKITDQLLKFIKNQHCTNISELSNTSENDEQNAEDLDDSDLPKTSSGRRRVHDGKKSIRATNYVESNWKKQCKELVNLIFQCEDSEPFRQPVDLVEYPDYRDIIDTPMDFGTVRETLDAGNYDSPLEFCKDIRLIFSNAKAYTPNKRSKIYSMTLRLSALFEEKMKKISSDFKIGQKFNEKLRRSQRFKQRQNCKGDSQPNKSIRNLKPKRLKSQTKIIPELVGSPTQSTSSRTAYLGTHKTSAGISSGVTSGDSSDSAESSERRKRNRPITNGSTLSESEVEDSLATSLSSSASSSSEESKESSRARESSSRSGLSRSSNLRVTRTRAAQRKTGPVSLANGCGRKATRKRVYLSDSDNNSLETGEILKARAGNNRKVLRKCAAVAANKIKLMSDVEENSSSESVCSGRKLPHRNASAVARKKLLHNSEDEQSLKSEIEEEELKDENQLLPVSSSHTAQSNVDESENRDSESESDLRVARKNWHANGYKSHTPAPSKTKFLKIESSEEDSKSHDSDHACNRTAGPSTSVQKLKAESISEEADSEPGRSGGRKYNTFHKNASFFKKTKILSDSEDSESEEQDREDGKCHKMEMNPISGNLNCDPIAMSQCSSDHGCETDLDSDDDKIEKPNNFMKDSASQDNGLSRKISRKRVCSSDSDSSLQVVKKSSKARTGLLRITRRCAATAANKIKLMSDVEDVSLENVHTRSKNGRKKPLHLACTTAKKKLSDCEGSVHCEVPSEQYACEGKPPDPDSEGSTKVLSQALNGDSDSEDMLNSEHKHRHTNIHKIDAPSKRKSSSVTSSGEDSKSHIPGSETDRTFSSESTLAQKATAENNFEVELNYGLRRWNGRRLRTYGKAPFSKTKVIHDSQETAEKEVKRKRSHPELENVKISETTGNSKFRPDTSSKSSDLGSVTESDIDCTDNTKTKRRKTKGKAKVVRKEFVPRDREPNTKVRTCMHNQKDAVQMPSETLKAKMVPEKVPRRCATVAANKIKIMSNLKETISGPENVWIRKSSRKLPHRNASAAAKKKLLNVYKEDDTTINSESEKELEDINRKMLFLRGFRSWKENAQ

SEQ ID NO: 28223 - protein, 14 aa, Artificial Sequence
  Synthetic polypeptide
HLMDTPSRIKNWLK

SEQ ID NO: 28224 - protein, 10 aa, Artificial Sequence
  Synthetic polypeptide
WILHPGSRIG

SEQ ID NO: 28225 - protein, 184 aa, Artificial Sequence
  Synthetic polypeptide
PFDGYSIQDQELVKIVGIRYEVGPPTLCCLKLAFIDPATGKLMDKSFSIRYHDMPDVIDFLVLRQFYDEARQRNWQSCDRFRSIIDDAWWFGTVLSQEPYQPQYPDSHFQCYIVRWDNTEIEKLSPWDMEPIPDNVDPPEELGASISVTTDELEKLLYKPQAGEWGQKSRDEECDRIISGGCLR

SEQ ID NO: 28226 - protein, 1277 aa, Artificial Sequence
  Synthetic polypeptide
PFDGYSIQDQELVKIVGIRYEVGPPTLCCLKLAFIDPATGKLMDKSFSIRYHDMPDVIDFLVLRQFYDEARQRNWQSCDRFRSIIDDAWWFGTVLSQEPYQPQYPDSHFQCYIVRWDNTEIEKLSPWDMEPIPDNVDPPEELGASISVTTDELEKLLYKPQAGEWGQKSRDEECDRIISGIDQLLNLDIAAAFAGPVDLCTYPKYCTVVAYPTDLYTIRMRLVNRFYRRLSALVWEVRYIEHNARTFNEPESVIARSAKKITDQLLKFIKNQHCTNISELSNTSENDEQNAEDLDDSDLPKTSSGRRRVHDGKKSIRATNYVESNWKKQCKELVNLIFQCEDSEPFRQPVDLVEYPDYRDIIDTPMDFGTVRETLDAGNYDSPLEFCKDIRLIFSNAKAYTPNKRSKIYSMTLRLSALFEEKMKKISSDFKIGQKFNEKLRRSQRFKQRQNCKGDSQPNKSIRNLKPKRLKSQTKIIPELVGSPTQSTSSRTAYLGTHKTSAGISSGVTSGDSSDSAESSERRKRNRPITNGSTLSESEVEDSLATSLSSSASSSSEESKESSRARESSSRSGLSRSSNLRVTRTRAAQRKTGPVSLANGCGRKATRKRVYLSDSDNNSLETGEILKARAGNNRKVLRKCAAVAANKIKLMSDVEENSSSESVCSGRKLPHRNASAVARKKLLHNSEDEQSLKSEIEEEELKDENQLLPVSSSHTAQSNVDESENRDSESESDLRVARKNWHANGYKSHTPAPSKTKFLKIESSEEDSKSHDSDHACNRTAGPSTSVQKLKAESISEEADSEPGRSGGRKYNTFHKNASFFKKTKILSDSEDSESEEQDREDGKCHKMEMNPISGNLNCDPIAMSQCSSDHGCETDLDSDDDKIEKPNNFMKDSASQDNGLSRKISRKRVCSSDSDSSLQVVKKSSKARTGLLRITRRCAATAANKIKLMSDVEDVSLENVHTRSKNGRKKPLHLACTTAKKKLSDCEGSVHCEVPSEQYACEGKPPDPDSEGSTKVLSQALNGDSDSEDMLNSEHKHRHTNIHKIDAPSKRKSSSVTSSGEDSKSHIPGSETDRTFSSESTLAQKATAENNFEVELNYGLRRWNGRRLRTYGKAPFSKTKVIHDSQETAEKEVKRKRSHPELENVKISETTGNSKFRPDTSSKSSDLGSVTESDIDCTDNTKTKRRKTKGKAKVVRKGKTFTANISKTVRRQRQSKRPRLSVDDNDWEDLDYAKSKRVLRRSKIKTRNQGRRTVRYHDGDDDRSLENVLDFNGCTL

SEQ ID NO: 28227 - protein, 1207 aa, Artificial Sequence
  Synthetic polypeptide
PFDGYSIQDQELVKIVGIRYEVGPPTLCCLKLAFIDPATGKLMDKSFSIRYHDMPDVIDFLVLRQFYDEARQRNWQSCDRFRSIIDDAWWFGTVLSQEPYQPQYPDSHFQCYIVRWDNTEIEKLSPWDMEPIPDNVDPPEELGASISVTTDELEKLLYKPQAGEWGQKSRDEECDRIISGIDQLLNLDIAAAFAGPVDLCTYPKYCTVVAYPTDLYTIRMRLVNRFYRRLSALVWEVRYIEHNARTFNEPESVIARSAKKITDQLLKFIKNQHCTNISELSNTSENDEQNAEDLDDSDLPKTSSGRRRVHDGKKSIRATNYVESNWKKQCKELVNLIFQCEDSEPFRQPVDLVEYPDYRDIIDTPMDFGTVRETLDAGNYDSPLEFCKDIRLIFSNAKAYTPNKRSKIYSMTLRLSALFEEKMKKISSDFKIGQKFNEKLRRSQRFKQRQNCKGDSQPNKSIRNLKPKRLKSQTKIIPELVGSPTQSTSSRTAYLGTHKTSAGISSGVTSGDSSDSAESSERRKRNRPITNGSTLSESEVEDSLATSLSSSASSSSEESKESSRARESSSRSGLSRSSNLRVTRTRAAQRKTGPVSLANGCGRKATRKRVYLSDSDNNSLETGEILKARAGNNRKVLRKCAAVAANKIKLMSDVEENSSSESVCSGRKLPHRNASAVARKKLLHNSEDEQSLKSEIEEEELKDENQLLPVSSSHTAQSNVDESENRDSESESDLRVARKNWHANGYKSHTPAPSKTKFLKIESSEEDSKSHDSDHACNRTAGPSTSVQKLKAESISEEADSEPGRSGGRKYNTFHKNASFFKKTKILSDSEDSESEEQDREDGKCHKMEMNPISGNLNCDPIAMSQCSSDHGCETDLDSDDDKIEKPNNFMKDSASQDNGLSRKISRKRVCSSDSDSSLQVVKKSSKARTGLLRITRRCAATAANKIKLMSDVEDVSLENVHTRSKNGRKKPLHLACTTAKKKLSDCEGSVHCEVPSEQYACEGKPPDPDSEGSTKVLSQALNGDSDSEDMLNSEHKHRHTNIHKIDAPSKRKSSSVTSSGEDSKSHIPGSETDRTFSSESTLAQKATAENNFEVELNYGLRRWNGRRLRTYGKAPFSKTKVIHDSQETAEKEVKRKRSHPELENVKISETTGNSKFRPDTSSKSSDLGSVTESDIDCTDNTKTKRRKTKGKAKVVRKDKTFSPVYL

SEQ ID NO: 28228 - protein, 2050 aa, Artificial Sequence
  Synthetic polypeptide
DDHFYLIFSPMAKGSQRYMVSTGADGTVCFWQWDLESLKFSPRPLKFTEKPRPGVQMLCSSFSVGGMFLATGSTDHVIRMYFLGFEAPEKIAELESHTDKVDSIQFCNNGDRFLSGSRDGTARIWRFEQLEWRSILLDMATRISGDLSSEEERFMKPKVTMIAWNQNDSIVVTAVNDHVLKVWNSYTGQLLHNLMGHADEVFVLETHPFDSRIMLSAGHDGSIFIWDITKGTKMKHYFNMIEGQGHGAVFDCKFSQDGQHFACTDSHGHLLIFGFGCSKPYEKIPDQMFFHTDYRPLIRDSNNYVLDEQTQQAPHLMPPPFLVDVDGNPHPTKYQRLVPGRENSADEHLIPQLGYVATSDGEVIEQIISLQTNDNDERSPESSILDGMIRQLQQQQDQRMGADQDTIPRGLSNGEETPRRGFRRLSLDIQSPPNIGLRRSGQVEGVRQMHQNAPRSQIATERDLQAWKRRVVVPEVPLGIFRKLEDFRLEKGEEERNLYIIGRKRKTLQLSHKSDSVVLVSQSRQRTCRRKYPNYGRRNRSWRELSSGNESSSSVRHETSCDQSEGSGSSEEDEWRSDRKSESYSESSSDSSSRYSDWTADAGINLQPPLRTSCRRRITRFCSSSEDEISTENLSPPKRRRKRKKENKPKKENLRRMTPAELANMEHLYEFHPPVWITDTTLRKSPFVPQMGDEVIYFRQGHEAYIEAVRRNNIYELNPNKEPWRKMDLRDQELVKIVGIRYEVGPPTLCCLKLAFIDPATGKLMDKSFSIRYHDMPDVIDFLVLRQFYDEARQRNWQSCDRFRSIIDDAWWFGTVLSQEPYQPQYPDSHFQCYIVRWDNTEIEKLSPWDMEPIPDNVDPPEELGASISVTTDELEKLLYKPQAGEWGQKSRDEECDRIISGIDQLLNLDIAAAFAGPVDLCTYPKYCTVVAYPTDLYTIRMRLVNRFYRRLSALVWEVRYIEHNARTFNEPESVIARSAKKITDQLLKFIKNQHCTNISELSNTSENDEQNAEDLDDSDLPKTSSGRRRVHDGKKSIRATNYVESNWKKQCKELVNLIFQCEDSEPFRQPVDLVEYPDYRDIIDTPMDFGTVRETLDAGNYDSPLEFCKDIRLIFSNAKAYTPNKRSKIYSMTLRLSALFEEKMKKISSDFKIGQKFNEKLRRSQRFKQRQNCKGDSQPNKSIRNLKPKRLKSQTKIIPELVGSPTQSTSSRTAYLGTHKTSAGISSGVTSGDSSDSAESSERRKRNRPITNGSTLSESEVEDSLATSLSSSASSSSEESKESSRARESSSRSGLSRSSNLRVTRTRAAQRKTGPVSLANGCGRKATRKRVYLSDSDNNSLETGEILKARAGNNRKVLRKCAAVAANKIKLMSDVEENSSSESVCSGRKLPHRNASAVARKKLLHNSEDEQSLKSEIEEEELKDENQLLPVSSSHTAQSNVDESENRDSESESDLRVARKNWHANGYKSHTPAPSKTKFLKIESSEEDSKSHDSDHACNRTAGPSTSVQKLKAESISEEADSEPGRSGGRKYNTFHKNASFFKKTKILSDSEDSESEEQDREDGKCHKMEMNPISGNLNCDPIAMSQCSSDHGCETDLDSDDDKIEKPNNFMKDSASQDNGLSRKISRKRVCSSDSDSSLQVVKKSSKARTGLLRITRRCAATAANKIKLMSDVEDVSLENVHTRSKNGRKKPLHLACTTAKKKLSDCEGSVHCEVPSEQYACEGKPPDPDSEGSTKVLSQALNGDSDSEDMLNSEHKHRHTNIHKIDAPSKRKSSSVTSSGEDSKSHIPGSETDRTFSSESTLAQKATAENNFEVELNYGLRRWNGRRLRTYGKAPFSKTKVIHDSQETAEKEVKRKRSHPELENVKISETTGNSKFRPDTSSKSSDLGSVTESDIDCTDNTKTKRRKTKGKAKVVRKEFVPRDREPNTKVRTCMHNQKDAVQMPSETLKAKMVPEKVPRRCATVAANKIKIMSNLKETISGPENVWIRKSSRKLPHRNASAAAKKKLLNVYKEDDTTINSESEKELEDINRKMLFLRGFRSWKENAQ

SEQ ID NO: 28229 - protein, 6 aa, Artificial Sequence
  Synthetic polypeptide
SLLLNI

SEQ ID NO: 28230 - protein, 1999 aa, Artificial Sequence
  Synthetic polypeptide
DDHFYLIFSPMAKGSQRYMVSTGADGTVCFWQWDLESLKFSPRPLKFTEKPRPGVQMLCSSFSVGGMFLATGSTDHVIRMYFLGFEAPEKIAELESHTDKVDSIQFCNNGDRFLSGSRDGTARIWRFEQLEWRSILLDMATRISGDLSSEEERFMKPKVTMIAWNQNDSIVVTAVNDHVLKVWNSYTGQLLHNLMGHADEVFVLETHPFDSRIMLSAGHDGSIFIWDITKGTKMKHYFNMIEGQGHGAVFDCKFSQDGQHFACTDSHGHLLIFGFGCSKPYEKIPDQMFFHTDYRPLIRDSNNYVLDEQTQQAPHLMPPPFLVDVDGNPHPTKYQRLVPGRENSADEHLIPQLGYVATSDGEVIEQIISLQTNDNDERSPESSILDGMIRQLQQQQDQRMGADQDTIPRGLSNGEETPRRGFRRLSLDIQSPPNIGLRRSGQVEGVRQMHQNAPRSQIATERDLQAWKRRVVVPEVPLGIFRKLEDFRLEKGEEERNLYIIGRKRKTLQLSHKSDSVVLVSQSRQRTCRRKYPNYGRRNRSWRELSSGNESSSSVRHETSCDQSEGSGSSEEDEWRSDRKSESYSESSSDSSSRYSDWTADAGINLQPPLRTSCRRRITRFCSSSEDEISTENLSPPKRRRKRKKENKPKKENLRRMTPAELANMEHLYEFHPPVWITDTTLRKSPFVPQMGDEVIYFRQGHEAYIEAVRRNNIYELNPNKEPWRKMDLRDQELVKIVGIRYEVGPPTLCCLKLAFIDPATGKLMDKSFSIRYHDMPDVIDFLVLRQFYDEARQRNWQSCDRFRSIIDDAWWFGTVLSQEPYQPQYPDSHFQCYIVRWDNTEIEKLSPWDMEPIPDNVDPPEELGASISVTTDELEKLLYKPQAGEWGQKSRDEECDRIISGIDQLLNLDIAAAFAGPVDLCTYPKYCTVVAYPTDLYTIRMRLVNRFYRRLSALVWEVRYIEHNARTFNEPESVIARSAKKITDQLLKFIKNQHCTNISELSNTSENDEQNAEDLDDSDLPKTSSGRRRVHDGKKSIRATNYVESNWKKQCKELVNLIFQCEDSEPFRQPVDLVEYPDYRDIIDTPMDFGTVRETLDAGNYDSPLEFCKDIRLIFSNAKAYTPNKRSKIYSMTLRLSALFEEKMKKISSDFKIGQKFNEKLRRSQRFKQRQNCKGDSQPNKSIRNLKPKRLKSQTKIIPELVGSPTQSTSSRTAYLGTHKTSAGISSGVTSGDSSDSAESSERRKRNRPITNGSTLSESEVEDSLATSLSSSASSSSEESKESSRARESSSRSGLSRSSNLRVTRTRAAQRKTGPVSLANGCGRKATRKRVYLSDSDNNSLETGEILKARAGNNRKVLRKCAAVAANKIKLMSDVEENSSSESVCSGRKLPHRNASAVARKKLLHNSEDEQSLKSEIEEEELKDENQLLPVSSSHTAQSNVDESENRDSESESDLRVARKNWHANGYKSHTPAPSKTKFLKIESSEEDSKSHDSDHACNRTAGPSTSVQKLKAESISEEADSEPGRSGGRKYNTFHKNASFFKKTKILSDSEDSESEEQDREDGKCHKMEMNPISGNLNCDPIAMSQCSSDHGCETDLDSDDDKIEKPNNFMKDSASQDNGLSRKISRKRVCSSDSDSSLQVVKKSSKARTGLLRITRRCAATAANKIKLMSDVEDVSLENVHTRSKNGRKKPLHLACTTAKKKLSDCEGSVHCEVPSEQYACEGKPPDPDSEGSTKVLSQALNGDSDSEDMLNSEHKHRHTNIHKIDAPSKRKSSSVTSSGEDSKSHIPGSETDRTFSSESTLAQKATAENNFEVELNYGLRRWNGRRLRTYGKAPFSKTKVIHDSQETAEKEVKRKRSHPELENVKISETTGNSKFRPDTSSKSSDLGSVTESDIDCTDNTKTKRRKTKGKAKVVRKGKTFTANISKTVRRQRQSKRPRLSVDDNDWEDLDYAKSKRVLRRSKIKTRNQGRRTVRYHDGDDDRSLENVLDFNGCTL

SEQ ID NO: 28231 - protein, 1929 aa, Artificial Sequence
  Synthetic polypeptide
DDHFYLIFSPMAKGSQRYMVSTGADGTVCFWQWDLESLKFSPRPLKFTEKPRPGVQMLCSSFSVGGMFLATGSTDHVIRMYFLGFEAPEKIAELESHTDKVDSIQFCNNGDRFLSGSRDGTARIWRFEQLEWRSILLDMATRISGDLSSEEERFMKPKVTMIAWNQNDSIVVTAVNDHVLKVWNSYTGQLLHNLMGHADEVFVLETHPFDSRIMLSAGHDGSIFIWDITKGTKMKHYFNMIEGQGHGAVFDCKFSQDGQHFACTDSHGHLLIFGFGCSKPYEKIPDQMFFHTDYRPLIRDSNNYVLDEQTQQAPHLMPPPFLVDVDGNPHPTKYQRLVPGRENSADEHLIPQLGYVATSDGEVIEQIISLQTNDNDERSPESSILDGMIRQLQQQQDQRMGADQDTIPRGLSNGEETPRRGFRRLSLDIQSPPNIGLRRSGQVEGVRQMHQNAPRSQIATERDLQAWKRRVVVPEVPLGIFRKLEDFRLEKGEEERNLYIIGRKRKTLQLSHKSDSVVLVSQSRQRTCRRKYPNYGRRNRSWRELSSGNESSSSVRHETSCDQSEGSGSSEEDEWRSDRKSESYSESSSDSSSRYSDWTADAGINLQPPLRTSCRRRITRFCSSSEDEISTENLSPPKRRRKRKKENKPKKENLRRMTPAELANMEHLYEFHPPVWITDTTLRKSPFVPQMGDEVIYFRQGHEAYIEAVRRNNIYELNPNKEPWRKMDLRDQELVKIVGIRYEVGPPTLCCLKLAFIDPATGKLMDKSFSIRYHDMPDVIDFLVLRQFYDEARQRNWQSCDRFRSIIDDAWWFGTVLSQEPYQPQYPDSHFQCYIVRWDNTEIEKLSPWDMEPIPDNVDPPEELGASISVTTDELEKLLYKPQAGEWGQKSRDEECDRIISGIDQLLNLDIAAAFAGPVDLCTYPKYCTVVAYPTDLYTIRMRLVNRFYRRLSALVWEVRYIEHNARTFNEPESVIARSAKKITDQLLKFIKNQHCTNISELSNTSENDEQNAEDLDDSDLPKTSSGRRRVHDGKKSIRATNYVESNWKKQCKELVNLIFQCEDSEPFRQPVDLVEYPDYRDIIDTPMDFGTVRETLDAGNYDSPLEFCKDIRLIFSNAKAYTPNKRSKIYSMTLRLSALFEEKMKKISSDFKIGQKFNEKLRRSQRFKQRQNCKGDSQPNKSIRNLKPKRLKSQTKIIPELVGSPTQSTSSRTAYLGTHKTSAGISSGVTSGDSSDSAESSERRKRNRPITNGSTLSESEVEDSLATSLSSSASSSSEESKESSRARESSSRSGLSRSSNLRVTRTRAAQRKTGPVSLANGCGRKATRKRVYLSDSDNNSLETGEILKARAGNNRKVLRKCAAVAANKIKLMSDVEENSSSESVCSGRKLPHRNASAVARKKLLHNSEDEQSLKSEIEEEELKDENQLLPVSSSHTAQSNVDESENRDSESESDLRVARKNWHANGYKSHTPAPSKTKFLKIESSEEDSKSHDSDHACNRTAGPSTSVQKLKAESISEEADSEPGRSGGRKYNTFHKNASFFKKTKILSDSEDSESEEQDREDGKCHKMEMNPISGNLNCDPIAMSQCSSDHGCETDLDSDDDKIEKPNNFMKDSASQDNGLSRKISRKRVCSSDSDSSLQVVKKSSKARTGLLRITRRCAATAANKIKLMSDVEDVSLENVHTRSKNGRKKPLHLACTTAKKKLSDCEGSVHCEVPSEQYACEGKPPDPDSEGSTKVLSQALNGDSDSEDMLNSEHKHRHTNIHKIDAPSKRKSSSVTSSGEDSKSHIPGSETDRTFSSESTLAQKATAENNFEVELNYGLRRWNGRRLRTYGKAPFSKTKVIHDSQETAEKEVKRKRSHPELENVKISETTGNSKFRPDTSSKSSDLGSVTESDIDCTDNTKTKRRKTKGKAKVVRKDKTFSPVYL

SEQ ID NO: 28232 - protein, 375 aa, Artificial Sequence
  Synthetic polypeptide
AGSGSGNEVIEGPQNARVLKGSQARFNCTVSQGWKLIMWALSDMVVLSVRPMEPIITNDRFTSQRYDQGGNFTSEMIIHNVEPSDSGNIRCSLQNSRLHGSAYLTVQVMGELFIPSVNLVVAENEPCEVTCLPSHWTRLPDISWELGLLVSHSSYYFVPEPSDLQSAVSILALTPQSNGTLTCVATWKSLKARKSATVNLTVIRCPQDTGGGINIPGVLSSLPSLGFSLPTWGKVGLGLAGTMLLTPTCTLTIRCCCCRRRCCGCNCCCRCCFCCRRKRGFRIQFQKKSEKEKTNKETETESGNENSGYNSDEQKTTDTASLPPKSCESSDPEQRNSSCGPPHQRADQRPPRPASHPQASFNLASPEKVSNTTVV

SEQ ID NO: 28233 - protein, 9 aa, Artificial Sequence
  Synthetic polypeptide
MVLGLVMKS

SEQ ID NO: 28234 - protein, 15 aa, Artificial Sequence
  Synthetic polypeptide
GSPSHVDLSAFHTTL

SEQ ID NO: 28235 - protein, 1463 aa, Artificial Sequence
  Synthetic polypeptide
DLMVLSGISAFASSSFSLPDAIHVRWDLLLLAFCHDCEAPPATWTFPPFIQPFEFPRFSIGQRVFIPCVVVSGDLPITITWQKDGRPIPGSLGVTIDNIDFTSSLRISNLSLMHNGNYTCIARNEAAAVEHQSQLIVRVPPKFVVQPRDQDGIYGKAVILNCSAEGYPVPTIVWKFSKGAGVPQFQPIALNGRIQVLSNGSLLIKHVVEEDSGYYLCKVSNDVGADVSKSMYLTVKIPAMITSYPNTTLATQGQKKEMSCTAHGEKPIIVRWEKEDRIINPEMARYLVSTKEVGEEVISTLQILPTVREDSGFFSCHAINSYGEDRGIIQLTVQEPPDPPEIEIKDVKARTITLRWTMGFDGNSPITGYDIECKNKSDSWDSAQRTKDVSPQLNSATIIDIHPSSTYSIRMYAKNRIGKSEPSNELTITADEAAPDGPPQEVHLEPISSQSIRVTWKAPKKHLQNGIIRGYQIGYREYSTGGNFQFNIISVDTSGDSEVYTLDNLNKFTQYGLVVQACNRAGTGPSSQEIITTTLEDVPSYPPENVQAIATSPESISISWSTLSKEALNGILQGFRVIYWANLMDGELGEIKNITTTQPSLELDGLEKYTNYSIQVLAFTRAGDGVRSEQIFTRTKEDVPGPPAGVKAAAASASMVFVSWLPPLKLNGIIRKYTVFCSHPYPTVISEFEASPDSFSYRIPNLSRNRQYSVWVVAVTSAGRGNSSEIITVEPLAKAPARILTFSGTVTTPWMKDIVLPCKAVGDPSPAVKWMKDSNGTPSLVTIDGRRSIFSNGSFIIRTVKAEDSGYYSCIANNNWGSDEIILNLQVQVPPDQPRLTVSKTTSSSITLSWLPGDNGGSSIRGYILQYSEDNSEQWGSFPISPSERSYRLENLKCGTWYKFTLTAQNGVGPGRISEIIEAKTLGKEPQFSKEQELFASINTTRVRLNLIGWNDGGCPITSFTLEYRPFGTTVWTTAQRTSLSKSYILYDLQEATWYELQMRVCNSAGCAEKQANFATLNYDGSTIPPLIKSVVQNEEGLTTNEGLKMLVTISCILVGVLLLFVLLLVVRRRRREQRLKRLRDAKSLAEMLMSKNTRTSDTLSKQQQTLRMHIDIPRAQLLIEERDTMETIDDRSTVLLTDADFGEAAKQKSLTVTHTVHYQSVSQATGPLVDVSDARPGTNPTTRRNAKAGPTARNRYASQWTLNRPHPTISAHTLTTDWRLPTPRAAGSVDKESDSYSVSPSQDTDRARSSMVSTESASSTYEELARAYEHAKMEEQLRHAKFTITECFISDTSSEQLTAGTNEYTDSLTSSTPSESGICRFTASPPKPQDGGRVMNMAVPKAHRPGDLIHLPPYLRMDFLLNRGGPGTSRDLSLGQACLEPQKSRTLKRPTVLEPIPMEAASSASSTREGQSWQPGAVATLPQREGAELGQAAKMSSSQESLLDSRGHLKGNNPYAKSYTLV

SEQ ID NO: 28236 - protein, 69 aa, Artificial Sequence
  Synthetic polypeptide
GGTCFSLLSAMIVRLPQPRGPFRLSYNPLSFQDSPLGSGSSSPVLWSQGTYPSRSPGRRMAGQSLGALG

SEQ ID NO: 28237 - protein, 1445 aa, Artificial Sequence
  Synthetic polypeptide
DLMVLSGISAFASSSFSLPDAIHVRWDLLLLAFCHDCEAPPATWTFPPFIQPFEFPRFSIGQRVFIPCVVVSGDLPITITWQKDGRPIPGSLGVTIDNIDFTSSLRISNLSLMHNGNYTCIARNEAAAVEHQSQLIVRVPPKFVVQPRDQDGIYGKAVILNCSAEGYPVPTIVWKFSKGAGVPQFQPIALNGRIQVLSNGSLLIKHVVEEDSGYYLCKVSNDVGADVSKSMYLTVKIPAMITSYPNTTLATQGQKKEMSCTAHGEKPIIVRWEKEDRIINPEMARYLVSTKEVGEEVISTLQILPTVREDSGFFSCHAINSYGEDRGIIQLTVQEPPDPPEIEIKDVKARTITLRWTMGFDGNSPITGYDIECKNKSDSWDSAQRTKDVSPQLNSATIIDIHPSSTYSIRMYAKNRIGKSEPSNELTITADEAAPDGPPQEVHLEPISSQSIRVTWKAPKKHLQNGIIRGYQIGYREYSTGGNFQFNIISVDTSGDSEVYTLDNLNKFTQYGLVVQACNRAGTGPSSQEIITTTLEDVPSYPPENVQAIATSPESISISWSTLSKEALNGILQGFRVIYWANLMDGELGEIKNITTTQPSLELDGLEKYTNYSIQVLAFTRAGDGVRSEQIFTRTKEDVPGPPAGVKAAAASASMVFVSWLPPLKLNGIIRKYTVFCSHPYPTVISEFEASPDSFSYRIPNLSRNRQYSVWVVAVTSAGRGNSSEIITVEPLAKAPARILTFSGTVTTPWMKDIVLPCKAVGDPSPAVKWMKDSNGTPSLVTIDGRRSIFSNGSFIIRTVKAEDSGYYSCIANNNWGSDEIILNLQVQVPPDQPRLTVSKTTSSSITLSWLPGDNGGSSIRGYILQYSEDNSEQWGSFPISPSERSYRLENLKCGTWYKFTLTAQNGVGPGRISEIIEAKTLGKEPQFSKEQELFASINTTRVRLNLIGWNDGGCPITSFTLEYRPFGTTVWTTAQRTSLSKSYILYDLQEATWYELQMRVCNSAGCAEKQANFATLNYDGSTIPPLIKSVVQNEEGLTTNEGLKMLVTISCILVGVLLLFVLLLVVRRRRREQRLKRLRDAKSLAEMLMSKNTRTSDTLSKQQQTLRMHIDIPRAQLLIEERDTMETIDDRSTVLLTDADFGEAAKQKSLTVTHTVHYQSVSQATGPLVDVSDARPGTNPTTRRNAKAGPTARNRYASQWTLNRPHPTISAHTLTTDWRLPTPRAAGSVDKESDSYSVSPSQDTDRARSSMVSTESASSTYEELARAYEHAKMEEQLRHAKFTITECFISDTSSEQLTAGTNEYTDSLTSSTPSESGICRFTASPPKPQDGGRVMNMAVPKAHRPGGPGTSRDLSLGQACLEPQKSRTLKRPTVLEPIPMEAASSASSTREGQSWQPGAVATLPQREGAELGQAAKMSSSQESLLDSRGHLKGNNPYAKSYTLV

SEQ ID NO: 28238 - protein, 53 aa, Artificial Sequence
  Synthetic polypeptide
CHPCKFRLSYNPLSFQDSPLGSGSSSPVLWSQGTYPSRSPGRRMAGQSLGALG

SEQ ID NO: 28239 - protein, 32 aa, Artificial Sequence
  Synthetic polypeptide
DLMVLSGISAFASSSFSLPDAIHVSSAFHTTL

SEQ ID NO: 28240 - protein, 496 aa, Artificial Sequence
  Synthetic polypeptide
FPAQSFCTPRGHWQCQDIFLLVITQIKALIKKYIQRQQTINLVVVPCNVDIATTEALSMAHEVDPEGDRTIGILTKPDLMDRGTEKSVMNVVRNLTYPLKKGYMIVKCRGQQEITNRLSLAEATKKEITFFQTHPYFRVLLEEGSATVPRLAERLTTELIMHIQKSLPLLEGQIRESHQKATEELRRCGADIPSQEADKMFFLIEKIKMFNQDIEKLVEGEEVVRENETRLYNKIREDFKNWVGILATNTQKVKNIIHEEVEKYEKQYRGKELLGFVNYKTFEIIVHQYIQQLVEPALSMLQKAMEIIQQAFINVAKKHFGEFFNLNQTVQSTIEDIKVKHTAKAENMIQLQFRMEQMVFCQDQIYSVVLKKVREEIFNPLGTPSQNMKLNSHFPSNESSVSSFTEIGIHLNAYFLETSKRLANQIPFIIQYFMLRENGDSLQKAMMQILQEKNRYSWLLQEQSETATKRRILKERIYRLTQARHALCQFSSKEIH

SEQ ID NO: 28241 - protein, 33 aa, Artificial Sequence
  Synthetic polypeptide
LRSRLSSRSTSRGSRRSTWWWFPVTWTLPPRRR

SEQ ID NO: 28242 - protein, 48 aa, Artificial Sequence
  Synthetic polypeptide
VIPSPELLYPQGTLAMSGHLFACHNSDQGSHQEVHPEAADDQLGGGSL

SEQ ID NO: 28243 - protein, 30 aa, Artificial Sequence
  Synthetic polypeptide
KNPVGSAGGRKGHGSLPGRKTYQRAHHTYL

SEQ ID NO: 28244 - protein, 404 aa, Artificial Sequence
  Synthetic polypeptide
DDSVSIDGWMQKAMWSVQKHGILSALERKDILTHATTWMKLGNILLSERTQSDLLEEGKATVPCLAEKLTSELITHICKSLPLLENQIKETHQRITEELQKYGVDIPEDENEKMFFLIDKVNAFNQDITALMQGEETVGEEDIRLFTRLRHEFHKWSTIIENNFQEGHKILSRKIQKFENQYRGRELPGFVNYRTFETIVKQQIKALEEPAVDMLHTVTDMVRLAFTDVSIKNFEEFFNLHRTAKSKIEDIRAEQEREGEKLIRLHFQMEQIVYCQDQVYRGALQKVREKELEEEKKKKSWDFGAFQSSSATDSSMEEIFQHLMAYHQEASKRISSHIPLIIQFFMLQTYGQQLQKAMLQLLQDKDTYSWLLKERSDTSDKRKFLKERLARLTQARRRLAQFPG

SEQ ID NO: 28245 - protein, 37 aa, Artificial Sequence
  Synthetic polypeptide
VKEPSRICWRKERPRFPAWQKNLPASSSHISVNLCPC

SEQ ID NO: 28246 - protein, 470 aa, Artificial Sequence
  Synthetic polypeptide
QWFSVRTIWTPRDNWRCLETVWVVTSGEGVLLLGRHRGCCSTSRKAQDSPPTAKNPPETKKALCITLTLGTFLVGAALAAGLLWKFMGSKCSNSGIECDSSGTCINPSNWCDGVSHCPGGEDENRCVRLYGPNFILQVYSSQRKSWHPVCQDDWNENYGRAACRDMGYKNNFYSSQGIVDDSGSTSFMKLNTSAGNVDIYKKLYHSDACSSKAVVSLRCIACGVNLNSSRQSRIVGGESALPGAWPWQVSLHVQNVHVCGGSIITPEWIVTAAHCVEKPLNNPWHWTAFAGILRQSFMFYGAGYQVEKVISHPNYDSKTKNNDIALMKLQKPLTFNDLVKPVCLPNPGMMLQPEQLCWISGWGATEEKGKTSEVLNAAKVLLIETQRCNSRYVYDNLITPAMICAGFLQGNVDSCQGDSGGPLVTSKNNIWWLIGDTSWGSGCAKAYRPGVYGNVMVFTDWIYRQMRADG

SEQ ID NO: 28247 - protein, 33 aa, Artificial Sequence
  Synthetic polypeptide
VGTGDAAQPPARHKTAPRQQRILQRLRKHCASP

SEQ ID NO: 28248 - protein, 24 aa, Artificial Sequence
  Synthetic polypeptide
APGMLLNLPQGTRQPPDSKESSRD

SEQ ID NO: 28249 - protein, 467 aa, Artificial Sequence
  Synthetic polypeptide
QWFSVRTIWTPRDNWRCLETVWVVTSGEGVLLLGRHRGCCSTSRKAQDSPPTAKNPPETKKALCITLTLGTFLVGAALAAGLLWKFMGSKCSNSGIECDSSGTCINPSNWCDGVSHCPGGEDENRCVRLYGPNFILQVYSSQRKSWHPVCQDDWNENYGRAACRDMGYKNNFYSSQGIVDDSGSTSFMKLNTSAGNVDIYKKLYHSDACSSKAVVSLRCIACGVNLNSSRQSRIVGGESALPGAWPWQVSLHVQNVHVCGGSIITPEWIVTAAHCVEKPLNNPWHWTAFAGILRQSFMFYGAGYQVEKVISHPNYDSKTKNNDIALMKLQKPLTFNDLVKPVCLPNPGMMLQPEQLCWISGWGATEEKGKTSEVLNAAKVLLIETQRCNSRYVYDNLITPAMICAGFLQGNVDSCQGDSGGPLVTSKNNIWWLIGDTSWGSGCAKAYRPGVYGNVMVFTDWIYRQMR

SEQ ID NO: 28250 - protein, 197 aa, Artificial Sequence
  Synthetic polypeptide
QWFSVRTIWTPRDNWRCLETVWVVTSGEGVLLLGRHRGCCSTSRKAQDSPPTAKNPPETKKALCITLTLGTFLVGAALAAGLLWKFIRLYGPNFILQVYSSQRKSWHPVCQDDWNENYGRAACRDMGYKNNFYSSQGIVDDSGSTSFMKLNTSAGNVDIYKKLYHSDACSSKAVVSLRCIACGVNLNSSRQSRIVGG

SEQ ID NO: 28251 - protein, 1159 aa, Artificial Sequence
  Synthetic polypeptide
PSHCTPGHLPQRNENVSEMAEDGSEEIMFIWCEDCSQYHDSECPELGPVVMVKDSFVLSRARSSLPPNLEIRRLEDGAEGVFAITQLVKRTQFGPFESRRVAKWEKESAFPLKVFQKDGHPVCFDTSNEDDCNWMMLVRPAAEAEHQNLTAYQHGSDVYFTTSRDIPPGTELRVWYAAFYAKKMDKPMLKQAGSGVHAAGTPENSAPVESEPSQWACKVCSATFLELQLLNEHLLGHLEQAKSLPPGSQSEAAAPEKEQDTPRGEPPAVPESENVATKEQKKKPRRGRKPKVSKAEQPLVIVEDKEPTEQVAEIITEVPPDEPVSATPDERIMELVLGKLATTTTDTSSVPKFTHHQNNTITLKRSLILSSRHGIRRKLIKQLGEHKRVYQCNICSKIFQNSSNLSRHVRSHGDKLFKCEECAKLFSRKESLKQHVSYKHSRNEVDGEYRYRCGTCEKTFRIESALEFHNCRTDDKTFQCEMCFRFFSTNSNLSKHKKKHGDKKFACEVCSKMFYRKDVMLDHQRRHLEGVRRVKREDLEAGGENLVRYKKEPSGCPVCGKVFSCRSNMNKHLLTHGDKKYTCEICGRKFFRVDVLRDHIHVHFKDIALMDDHQREEFIGKIGISSEENDDNSDESADSEPHKYSCKRCQLTFGRGKEYLKHIMEVHKEKGYGCSICNRRFALKATYHAHMVIHRENLPDPNVQKYIHPCEICGRIFNSIGNLERHKLIHTGVKSHACEQCGKSFARKDMLKEHMRVHDNVREYLCAECGKGMKTKHALRHHMKLHKGIKEYECKECHRRFAQKVNMLKHCKRHTGIKDFMCELCGKTFSERNTMETHKLIHTVGKQWTCSVCDKKYVTEYMLQKHVQLTHDKVEAQSCQLCGTKVSTRASMSRHMRRKHPEVLAVRIDDLDHLPETTTIDASSIGIVQPELTLEQEDLAEGKHGKAAKRSHKRKQKPEEEAGAPVPEDATFSEYSEKETEFTGSVGDETNSAVQSIQQVVVTLGDPNVTTPSSSVGLTNITVTPITTAAATQFTNLQPVAVGHLTTPERQLQLDNSILTVTFDTVSGSAMLHNRQNDVQIHPQPEASNPQSVAHFINLTTLVNSITPLGSQLSDQHPLTWRAVPQTDVLPPSQPQAPPQQAAQPQVQAEQQQQQMYSY

SEQ ID NO: 28252 - protein, 162 aa, Artificial Sequence
  Synthetic polypeptide
ENGQKMQRPFTEEDLLILIHVAYKHVKRCSASLATREMQIKTTRRHHFTSARMTKIKNSDPPDAGEAAEKLDLSCVSGGRCKVLQPLWKTACQFIQKRNILLTDDPVIALLGIYLREMKTCQRWLKMGAKRSCSSGVKTAASTTTPNVPSWAQWSWSKTPLC

SEQ ID NO: 28253 - protein, 6 aa, Artificial Sequence
  Synthetic polypeptide
KRVRDG

SEQ ID NO: 28254 - protein, 1179 aa, Artificial Sequence
  Synthetic polypeptide
PSHCTPGHLPQRNENVSEMAEDGSEEIMFIWCEDCSQYHDSECPELGPVVMVKDSFVLSRARSSLPPNLEIRRLEDGAEGVFAITQLVKRTQFGPFESRRVAKWEKESAFPLKVFQKDGHPVCFDTSNEDDCNWMMLVRPAAEAEHQNLTAYQHGSDVYFTTSRDIPPGTELRVWYAAFYAKKMDKPMLKQAGSGVHAAGTPENSAPVESEPSQWACKVCSATFLELQLLNEHLLGHLEQAKSLPPGSQSEAAAPEKEQDTPRGEPPAVPESENVATKEQKKKPRRGRKPKVSKAEQPLVIVEDKEPTEQVAEIITEVPPDEPVSATPDERIMELVLGKLATTTTDTSSVPKFTHHQNNTITLKRSLILSSRHGIRRKLIKQLGEHKRVYQCNICSKIFQNSSNLSRHVRSHGDKLFKCEECAKLFSRKESLKQHVSYKHSRNEVDGEYRYRCGTCEKTFRIESALEFHNCRTGLIAHPGEGGPGGSRLRDLPDDKTFQCEMCFRFFSTNSNLSKHKKKHGDKKFACEVCSKMFYRKDVMLDHQRRHLEGVRRVKREDLEAGGENLVRYKKEPSGCPVCGKVFSCRSNMNKHLLTHGDKKYTCEICGRKFFRVDVLRDHIHVHFKDIALMDDHQREEFIGKIGISSEENDDNSDESADSEPHKYSCKRCQLTFGRGKEYLKHIMEVHKEKGYGCSICNRRFALKATYHAHMVIHRENLPDPNVQKYIHPCEICGRIFNSIGNLERHKLIHTGVKSHACEQCGKSFARKDMLKEHMRVHDNVREYLCAECGKGMKTKHALRHHMKLHKGIKEYECKECHRRFAQKVNMLKHCKRHTGIKDFMCELCGKTFSERNTMETHKLIHTVGKQWTCSVCDKKYVTEYMLQKHVQLTHDKVEAQSCQLCGTKVSTRASMSRHMRRKHPEVLAVRIDDLDHLPETTTIDASSIGIVQPELTLEQEDLAEGKHGKAAKRSHKRKQKPEEEAGAPVPEDATFSEYSEKETEFTGSVGDETNSAVQSIQQVVVTLGDPNVTTPSSSVGLTNITVTPITTAAATQFTNLQPVAVGHLTTPERQLQLDNSILTVTFDTVSGSAMLHNRQNDVQIHPQPEASNPQSVAHFINLTTLVNSITPLGSQLSDQHPLTWRAVPQTDVLPPSQPQAPPQQAAQPQVQAEQQQQQMYSY

SEQ ID NO: 28255 - protein, 536 aa, Artificial Sequence
  Synthetic polypeptide
PSHCTPGHLPQRNENVSEMAEDGSEEIMFIWCEDCSQYHDSECPELGPVVMVKDSFVLSRARSSLPPNLEIRRLEDGAEGVFAITQLVKRTQFGPFESRRVAKWEKESAFPLKVFQKDGHPVCFDTSNEDDCNWMMLVRPAAEAEHQNLTAYQHGSDVYFTTSRDIPPGTELRVWYAAFYAKKMDKPMLKQAGSGVHAAGTPENSAPVESEPSQWACKVCSATFLELQLLNEHLLGHLEQAKSLPPGSQSEAAAPEKEQDTPRGEPPAVPESENVATKEQKKKPRRGRKPKVSKAEQPLVIVEDKEPTEQVAEIITEVPPDEPVSATPDERIMELVLGKLATTTTDTSSVPKFTHHQNNTITLKRSLILSSRHGIRRKLIKQLGEHKRVYQCNICSKIFQNSSNLSRHVRSHGDKLFKCEECAKLFSRKESLKQHVSYKHSRNEVDGEYRYRCGTCEKTFRIESALEFHNCRTGLIAHPGEGGPGGSRLRDLPATSPSTRRSTATRSLPVRSAARCSTARTSCWTTSAGTWKECGE

SEQ ID NO: 28256 - protein, 1225 aa, Artificial Sequence
  Synthetic polypeptide
PSHCTPGHLPQRNENVSEMAEDGSEEIMFIWCEDCSQYHDSECPELGPVVMVKDSFVLSRARSWPASGHVHTQAGQGMRGYEDRDRADPQQLPEAVPAGLVRRLSGQQLPCRSTLTWGRLCHLVAQGRSSLPPNLEIRRLEDGAEGVFAITQLVKRTQFGPFESRRVAKWEKESAFPLKVFQKDGHPVCFDTSNEDDCNWMMLVRPAAEAEHQNLTAYQHGSDVYFTTSRDIPPGTELRVWYAAFYAKKMDKPMLKQAGSGVHAAGTPENSAPVESEPSQWACKVCSATFLELQLLNEHLLGHLEQAKSLPPGSQSEAAAPEKEQDTPRGEPPAVPESENVATKEQKKKPRRGRKPKVSKAEQPLVIVEDKEPTEQVAEIITEVPPDEPVSATPDERIMELVLGKLATTTTDTSSVPKFTHHQNNTITLKRSLILSSRHGIRRKLIKQLGEHKRVYQCNICSKIFQNSSNLSRHVRSHGDKLFKCEECAKLFSRKESLKQHVSYKHSRNEVDGEYRYRCGTCEKTFRIESALEFHNCRTDDKTFQCEMCFRFFSTNSNLSKHKKKHGDKKFACEVCSKMFYRKDVMLDHQRRHLEGVRRVKREDLEAGGENLVRYKKEPSGCPVCGKVFSCRSNMNKHLLTHGDKKYTCEICGRKFFRVDVLRDHIHVHFKDIALMDDHQREEFIGKIGISSEENDDNSDESADSEPHKYSCKRCQLTFGRGKEYLKHIMEVHKEKGYGCSICNRRFALKATYHAHMVIHRENLPDPNVQKYIHPCEICGRIFNSIGNLERHKLIHTGVKSHACEQCGKSFARKDMLKEHMRVHDNVREYLCAECGKGMKTKHALRHHMKLHKGIKEYECKECHRRFAQKVNMLKHCKRHTGIKDFMCELCGKTFSERNTMETHKLIHTVGKQWTCSVCDKKYVTEYMLQKHVQLTHDKVEAQSCQLCGTKVSTRASMSRHMRRKHPEVLAVRIDDLDHLPETTTIDASSIGIVQPELTLEQEDLAEGKHGKAAKRSHKRKQKPEEEAGAPVPEDATFSEYSEKETEFTGSVGDETNSAVQSIQQVVVTLGDPNVTTPSSSVGLTNITVTPITTAAATQFTNLQPVAVGHLTTPERQLQLDNSILTVTFDTVSGSAMLHNRQNDVQIHPQPEASNPQSVAHFINLTTLVNSITPLGSQLSDQHPLTWRAVPQTDVLPPSQPQAPPQQAAQPQVQAEQQQQQMYSY

SEQ ID NO: 28257 - protein, 66 aa, Artificial Sequence
  Synthetic polypeptide
LGSAERGAAGEISGLEGRPRHRCTCQRWLKMGAKRSCSSGVKTAASTTTPNVPSWAQWSWSKTPLC

SEQ ID NO: 28258 - protein, 13 aa, Artificial Sequence
  Synthetic polypeptide
KGDPGIDARVRDG

SEQ ID NO: 28259 - protein, 1146 aa, Artificial Sequence
  Synthetic polypeptide
MHVSEMAEDGSEEIMFIWCEDCSQYHDSECPELGPVVMVKDSFVLSRARSSLPPNLEIRRLEDGAEGVFAITQLVKRTQFGPFESRRVAKWEKESAFPLKVFQKDGHPVCFDTSNEDDCNWMMLVRPAAEAEHQNLTAYQHGSDVYFTTSRDIPPGTELRVWYAAFYAKKMDKPMLKQAGSGVHAAGTPENSAPVESEPSQWACKVCSATFLELQLLNEHLLGHLEQAKSLPPGSQSEAAAPEKEQDTPRGEPPAVPESENVATKEQKKKPRRGRKPKVSKAEQPLVIVEDKEPTEQVAEIITEVPPDEPVSATPDERIMELVLGKLATTTTDTSSVPKFTHHQNNTITLKRSLILSSRHGIRRKLIKQLGEHKRVYQCNICSKIFQNSSNLSRHVRSHGDKLFKCEECAKLFSRKESLKQHVSYKHSRNEVDGEYRYRCGTCEKTFRIESALEFHNCRTDDKTFQCEMCFRFFSTNSNLSKHKKKHGDKKFACEVCSKMFYRKDVMLDHQRRHLEGVRRVKREDLEAGGENLVRYKKEPSGCPVCGKVFSCRSNMNKHLLTHGDKKYTCEICGRKFFRVDVLRDHIHVHFKDIALMDDHQREEFIGKIGISSEENDDNSDESADSEPHKYSCKRCQLTFGRGKEYLKHIMEVHKEKGYGCSICNRRFALKATYHAHMVIHRENLPDPNVQKYIHPCEICGRIFNSIGNLERHKLIHTGVKSHACEQCGKSFARKDMLKEHMRVHDNVREYLCAECGKGMKTKHALRHHMKLHKGIKEYECKECHRRFAQKVNMLKHCKRHTGIKDFMCELCGKTFSERNTMETHKLIHTVGKQWTCSVCDKKYVTEYMLQKHVQLTHDKVEAQSCQLCGTKVSTRASMSRHMRRKHPEVLAVRIDDLDHLPETTTIDASSIGIVQPELTLEQEDLAEGKHGKAAKRSHKRKQKPEEEAGAPVPEDATFSEYSEKETEFTGSVGDETNSAVQSIQQVVVTLGDPNVTTPSSSVGLTNITVTPITTAAATQFTNLQPVAVGHLTTPERQLQLDNSILTVTFDTVSGSAMLHNRQNDVQIHPQPEASNPQSVAHFINLTTLVNSITPLGSQLSDQHPLTWRAVPQTDVLPPSQPQAPPQQAAQPQVQAEQQQQQMYSY

SEQ ID NO: 28260 - protein, 1166 aa, Artificial Sequence
  Synthetic polypeptide
MHVSEMAEDGSEEIMFIWCEDCSQYHDSECPELGPVVMVKDSFVLSRARSSLPPNLEIRRLEDGAEGVFAITQLVKRTQFGPFESRRVAKWEKESAFPLKVFQKDGHPVCFDTSNEDDCNWMMLVRPAAEAEHQNLTAYQHGSDVYFTTSRDIPPGTELRVWYAAFYAKKMDKPMLKQAGSGVHAAGTPENSAPVESEPSQWACKVCSATFLELQLLNEHLLGHLEQAKSLPPGSQSEAAAPEKEQDTPRGEPPAVPESENVATKEQKKKPRRGRKPKVSKAEQPLVIVEDKEPTEQVAEIITEVPPDEPVSATPDERIMELVLGKLATTTTDTSSVPKFTHHQNNTITLKRSLILSSRHGIRRKLIKQLGEHKRVYQCNICSKIFQNSSNLSRHVRSHGDKLFKCEECAKLFSRKESLKQHVSYKHSRNEVDGEYRYRCGTCEKTFRIESALEFHNCRTGLIAHPGEGGPGGSRLRDLPDDKTFQCEMCFRFFSTNSNLSKHKKKHGDKKFACEVCSKMFYRKDVMLDHQRRHLEGVRRVKREDLEAGGENLVRYKKEPSGCPVCGKVFSCRSNMNKHLLTHGDKKYTCEICGRKFFRVDVLRDHIHVHFKDIALMDDHQREEFIGKIGISSEENDDNSDESADSEPHKYSCKRCQLTFGRGKEYLKHIMEVHKEKGYGCSICNRRFALKATYHAHMVIHRENLPDPNVQKYIHPCEICGRIFNSIGNLERHKLIHTGVKSHACEQCGKSFARKDMLKEHMRVHDNVREYLCAECGKGMKTKHALRHHMKLHKGIKEYECKECHRRFAQKVNMLKHCKRHTGIKDFMCELCGKTFSERNTMETHKLIHTVGKQWTCSVCDKKYVTEYMLQKHVQLTHDKVEAQSCQLCGTKVSTRASMSRHMRRKHPEVLAVRIDDLDHLPETTTIDASSIGIVQPELTLEQEDLAEGKHGKAAKRSHKRKQKPEEEAGAPVPEDATFSEYSEKETEFTGSVGDETNSAVQSIQQVVVTLGDPNVTTPSSSVGLTNITVTPITTAAATQFTNLQPVAVGHLTTPERQLQLDNSILTVTFDTVSGSAMLHNRQNDVQIHPQPEASNPQSVAHFINLTTLVNSITPLGSQLSDQHPLTWRAVPQTDVLPPSQPQAPPQQAAQPQVQAEQQQQQMYSY

SEQ ID NO: 28261 - protein, 523 aa, Artificial Sequence
  Synthetic polypeptide
MHVSEMAEDGSEEIMFIWCEDCSQYHDSECPELGPVVMVKDSFVLSRARSSLPPNLEIRRLEDGAEGVFAITQLVKRTQFGPFESRRVAKWEKESAFPLKVFQKDGHPVCFDTSNEDDCNWMMLVRPAAEAEHQNLTAYQHGSDVYFTTSRDIPPGTELRVWYAAFYAKKMDKPMLKQAGSGVHAAGTPENSAPVESEPSQWACKVCSATFLELQLLNEHLLGHLEQAKSLPPGSQSEAAAPEKEQDTPRGEPPAVPESENVATKEQKKKPRRGRKPKVSKAEQPLVIVEDKEPTEQVAEIITEVPPDEPVSATPDERIMELVLGKLATTTTDTSSVPKFTHHQNNTITLKRSLILSSRHGIRRKLIKQLGEHKRVYQCNICSKIFQNSSNLSRHVRSHGDKLFKCEECAKLFSRKESLKQHVSYKHSRNEVDGEYRYRCGTCEKTFRIESALEFHNCRTGLIAHPGEGGPGGSRLRDLPATSPSTRRSTATRSLPVRSAARCSTARTSCWTTSAGTWKECGE

SEQ ID NO: 28262 - protein, 1212 aa, Artificial Sequence
  Synthetic polypeptide
MHVSEMAEDGSEEIMFIWCEDCSQYHDSECPELGPVVMVKDSFVLSRARSWPASGHVHTQAGQGMRGYEDRDRADPQQLPEAVPAGLVRRLSGQQLPCRSTLTWGRLCHLVAQGRSSLPPNLEIRRLEDGAEGVFAITQLVKRTQFGPFESRRVAKWEKESAFPLKVFQKDGHPVCFDTSNEDDCNWMMLVRPAAEAEHQNLTAYQHGSDVYFTTSRDIPPGTELRVWYAAFYAKKMDKPMLKQAGSGVHAAGTPENSAPVESEPSQWACKVCSATFLELQLLNEHLLGHLEQAKSLPPGSQSEAAAPEKEQDTPRGEPPAVPESENVATKEQKKKPRRGRKPKVSKAEQPLVIVEDKEPTEQVAEIITEVPPDEPVSATPDERIMELVLGKLATTTTDTSSVPKFTHHQNNTITLKRSLILSSRHGIRRKLIKQLGEHKRVYQCNICSKIFQNSSNLSRHVRSHGDKLFKCEECAKLFSRKESLKQHVSYKHSRNEVDGEYRYRCGTCEKTFRIESALEFHNCRTDDKTFQCEMCFRFFSTNSNLSKHKKKHGDKKFACEVCSKMFYRKDVMLDHQRRHLEGVRRVKREDLEAGGENLVRYKKEPSGCPVCGKVFSCRSNMNKHLLTHGDKKYTCEICGRKFFRVDVLRDHIHVHFKDIALMDDHQREEFIGKIGISSEENDDNSDESADSEPHKYSCKRCQLTFGRGKEYLKHIMEVHKEKGYGCSICNRRFALKATYHAHMVIHRENLPDPNVQKYIHPCEICGRIFNSIGNLERHKLIHTGVKSHACEQCGKSFARKDMLKEHMRVHDNVREYLCAECGKGMKTKHALRHHMKLHKGIKEYECKECHRRFAQKVNMLKHCKRHTGIKDFMCELCGKTFSERNTMETHKLIHTVGKQWTCSVCDKKYVTEYMLQKHVQLTHDKVEAQSCQLCGTKVSTRASMSRHMRRKHPEVLAVRIDDLDHLPETTTIDASSIGIVQPELTLEQEDLAEGKHGKAAKRSHKRKQKPEEEAGAPVPEDATFSEYSEKETEFTGSVGDETNSAVQSIQQVVVTLGDPNVTTPSSSVGLTNITVTPITTAAATQFTNLQPVAVGHLTTPERQLQLDNSILTVTFDTVSGSAMLHNRQNDVQIHPQPEASNPQSVAHFINLTTLVNSITPLGSQLSDQHPLTWRAVPQTDVLPPSQPQAPPQQAAQPQVQAEQQQQQMYSY

SEQ ID NO: 28263 - protein, 19 aa, Artificial Sequence
  Synthetic polypeptide
GRGQWLMPVISALWEAEVP

SEQ ID NO: 28264 - protein, 19 aa, Artificial Sequence
  Synthetic polypeptide
SQHFGRLRCRERCGDAGTL

SEQ ID NO: 28265 - protein, 55 aa, Artificial Sequence
  Synthetic polypeptide
QGHISTKNEKISQAWWRDPVVPVTWESKRGGSLEPRRSRMQKQYISTQFCGGHFC

SEQ ID NO: 28266 - protein, 442 aa, Artificial Sequence
  Synthetic polypeptide
SQSLGSLRGEDRLSPGGPGCRSSISQLSFAEDISADEDDQILSQGKHKKKGNKLLEKTNLEKEKGSRVFCVEEEDSESSLQKRRRKKKKKHHLQPENPGPGGAAPSLEQNRGREPEASGLKALKARVAEPGAEATSSTGEESGSEHPPAVPMHNKRKRPRKKSPRAHREMLESAVLPPEDMSQSGPSGSHPQGPRGSPTGGAQLLKRKRKLGVVPVNGSGLSTPAWPPLQQEGPPTGPAEGANSHTTLPQRRRLQKKKAGPGSLELCGLPSQKTASLKKRKKMRVMSNLVEHNGVLESEAGQPQALGSSGTCSSLKKQKLRAESDFVKFDTPFLPKPLFFRRAKSSTATHPPGPAVQLNKTPSSSKKVTFGLNRNMTAEFKKTDKSILVSPTGPSRVAFDPEQKPLHGVLKTPTSSPASSPLVAKKPLTTTPRRRPRAMDFF

SEQ ID NO: 28267 - protein, 41 aa, Artificial Sequence
  Synthetic polypeptide
AQEVQDAEAVYLNSVLRRTFLLMKMTKSSVKESIRRKEINF

SEQ ID NO: 28268 - protein, 63 aa, Artificial Sequence
  Synthetic polypeptide
GSVWWLTPGIPALWMAECVIQSWVTSGTAKARCTSRRTSFPSTKKKWCRLQTLSRPTSLRPSY

SEQ ID NO: 28269 - protein, 18 aa, Artificial Sequence
  Synthetic polypeptide
ARCGGSRLESQHFGWLSV

SEQ ID NO: 28270 - protein, 799 aa, Artificial Sequence
  Synthetic polypeptide
QARPHTPVVPATVEEAEAGGSLELRSLRLQRKKAPQKAEIYLQGALKNYLAEGWALPITHTRKQLAECQKHLGQIENYLQTSSLLASDHHLTEEERKHFCQEILDFASQPSDSPGHKIVLPMHSFAQLRDLHFDPSNAVVHVGGVLCVEITMYSQMPVPVHVEQIVVNVHFSIEKNSYRKTAEWLTKHKTSNGIINFPPETAPFPVSQNSLPALELYEMFERSPSDNSLNTTGIICRNVHMLLRRQESSSSLEMPSGVALEEGAHVLRCSHVTLEPGANQITFRTQAKEPGTYTLRQLCASVGSVWFVLPHIYPIVQYDVYSQEPQLHVEPLADSLLAGIPQRVKFTVTTGHYTIKNGDSLQLSNAEAMLILCQAESRAVVYSNTREQSSEAALRIQSSDKVTSISLPVAPAYHVIEFELEVLSLPSAPALGGESDMLGMAEPHRKHKDKQRTGRCMVTTDHKVSIDCPWSIYSTVIALTFSVPFRTTHSLLSSGTRKYVQVCVQNLSELDFQLSDSYLVDTGDSTDLQLVPLNTQSQQPIYSKQSVFFVWELKWTEEPPPSLHCRFSVGFSPASEEQLSISLKPYTYEFKVENFFTLYNVKAEIFPPSGMEYCRTGSLCSLEVLITRLSDLLEVDKDEALTESDEHFSTKLMYEVVDNSSNWAVCGKSCGVISMPVAARATHRVHMEVMPLFAGYLPLPDVRLFKYLPHHSAHSSQLDADSWIENDSLSVDKHGDDQPDSSSLKSRGSVHSACSSEHKGLPMPRLQALPAGQVFNSSSGTQVLVIPSQDDHVLEVSVT

SEQ ID NO: 28271 - protein, 18 aa, Artificial Sequence
  Synthetic polypeptide
DCRGKRLHKRQKSIFKEH

SEQ ID NO: 28272 - protein, 28 aa, Artificial Sequence
  Synthetic polypeptide
AEEFETAEEKGSTKGRNLSSRSTEKLPG

SEQ ID NO: 28273 - protein, 55 aa, Artificial Sequence
  Synthetic polypeptide
GQACGTLFMQSVQNREMTSERETRSQRIQSVPARKTRPRGASWLSCACLWSWRWP

SEQ ID NO: 28274 - protein, 22 aa, Artificial Sequence
  Synthetic polypeptide
QSQTPEDKPVGLCLCKVSRIGK

SEQ ID NO: 28275 - protein, 8 aa, Artificial Sequence
  Synthetic polypeptide
MFMAARRK

SEQ ID NO: 28276 - protein, 101 aa, Artificial Sequence
  Synthetic polypeptide
RYRPEDSEQGLKQMPVRECSWQPEGNDIGERDKITENPVSTGEKNAATWSILAVLCLLVVVAVAIGWVCRDRCLQHSYAGAWAVSPETELTESWNLLLLLS

SEQ ID NO: 28277 - protein, 106 aa, Artificial Sequence
  Synthetic polypeptide
GIVSFVHRGGKAEGRSCHGERCGSSSKSSAWKHCRTQQFSPSDIGQRIQNRDSNKCLSVNVHGSQKEMTSERETRSQRIQSVPARKTRPRGASWLSCACLWSWRWP

SEQ ID NO: 28278 - protein, 94 aa, Artificial Sequence
  Synthetic polypeptide
RYRPEDSEQGLKQMPVRECSWQPEGNDIGERDKITENPVSTGEKNAATWSILAVLCLLVVVAVAIGWVCRDRCLQHSYAGAWAVSPETELTGHV

SEQ ID NO: 28279 - protein, 265 aa, Artificial Sequence
  Synthetic polypeptide
RYRPEDSEQGLKQMPVRECSWQPEGNDIGERDKITENPVSTGEKNAATWSILAVLCLLVVVAVAIGWVCRDRCLQHSYAGAWAVSPETELTGEFAVGSSRFWGAQGRLGCQLSFRVSKNFQKAKVPCLEQLLFLETQRSPRWCAWHFLQPPLGMGWHPGVHFVTLRWDFPNMHRSRETSARPPRSPVPSPDQGVQGGSRHRRPAPMGCPEWVQAPAPSPRGVSRAGPGTGAQPLWGVRSGSGHRQLLSVAATPAALVCPSVPGAT

SEQ ID NO: 28280 - protein, 165 aa, Artificial Sequence
  Synthetic polypeptide
PHGGNSPSVCQRMDKHNVSIHTAERYSALERKAILTHSATRMNLESLESQLRQTQRTNTVRFHSYEVPRVVKFIETESGVCSGLGVFLGGRRLFPGGGQLLRWAYLLGEQYYLQVAGLRGLRGGAQPPHRRLQGLGGLQHHGWCLPHLLQRQGAPLQGPAAEDTL

SEQ ID NO: 28281 - protein, 90 aa, Artificial Sequence
  Synthetic polypeptide
RQKVACALDWEFFSVGEDYFLVVANSFDGRTFSVNSIIYRWQGYEGFVAVHSLPTVGCRDWEAFSTTAGAYLIYSSAKEPLSRVLRLRTR

SEQ ID NO: 28282 - protein, 39 aa, Artificial Sequence
  Synthetic polypeptide
SGQIHRDRKWRVLWTGSFSRWEKIISWWWPTPSMGVPSR

SEQ ID NO: 28283 - protein, 157 aa, Artificial Sequence
  Synthetic polypeptide
TWSGSPELTLNPPEGIVAGPMNEENFFEWEALIMGPEDTCFEFGVFPAILSFPLDYPLSPPKMRFTCEMFHPNIYPDGRVCISILHAPGDDPMGYESSAERWSPVQSVEKILLSVVSMLAEPNDESGANVDASKMWRDDREQFYKIAKQIVQKSLGL

SEQ ID NO: 28284 - protein, 24 aa, Artificial Sequence
  Synthetic polypeptide
SQTNRPVEVNSVSNLNELGVAALN

SEQ ID NO: 28285 - protein, 40 aa, Artificial Sequence
  Synthetic polypeptide
TWSGSPELTLNPPEGIVAGPMNEENFFEWEALIISALLGP

SEQ ID NO: 28286 - protein, 91 aa, Artificial Sequence
  Synthetic polypeptide
TWSGSPELTLNPPEGIVAGPMNEENFFEWEALIMGPEDTCFEFGVFPAILSFPLDYPLSPPKMRFTCEMFHPNSGQPDVQGKYASSFFHSP

SEQ ID NO: 28287 - protein, 52 aa, Artificial Sequence
  Synthetic polypeptide
ITCLHNRKAQGEAARSPEDLAKIKMKVAPKLSNRFTRINTESSGRNCSRPHE

SEQ ID NO: 28288 - protein, 156 aa, Artificial Sequence
  Synthetic polypeptide
AIDLQELTLNPPEGIVAGPMNEENFFEWEALIMGPEDTCFEFGVFPAILSFPLDYPLSPPKMRFTCEMFHPNIYPDGRVCISILHAPGDDPMGYESSAERWSPVQSVEKILLSVVSMLAEPNDESGANVDASKMWRDDREQFYKIAKQIVQKSLGL

SEQ ID NO: 28289 - protein, 4 aa, Artificial Sequence
  Synthetic polypeptide
IYKN

SEQ ID NO: 28290 - protein, 39 aa, Artificial Sequence
  Synthetic polypeptide
AIDLQELTLNPPEGIVAGPMNEENFFEWEALIISALLGP

SEQ ID NO: 28291 - protein, 90 aa, Artificial Sequence
  Synthetic polypeptide
AIDLQELTLNPPEGIVAGPMNEENFFEWEALIMGPEDTCFEFGVFPAILSFPLDYPLSPPKMRFTCEMFHPNSGQPDVQGKYASSFFHSP

SEQ ID NO: 28292 - protein, 17 aa, Artificial Sequence
  Synthetic polypeptide
CDPAGRATSPGPQSSAG

SEQ ID NO: 28293 - protein, 67 aa, Artificial Sequence
  Synthetic polypeptide
VTLQGEQQAPALRAQPDERSPETAASRGRKDPVSGAAGQSGLQSQPPGGHRADAGPADAAGRWRPAL

SEQ ID NO: 28294 - protein, 65 aa, Artificial Sequence
  Synthetic polypeptide
PCRESNKPRPSELSRMSAAQRQQLLEEERTRFQELLASPAYRASPLVAIGQTLARQMQLEDGGQL

SEQ ID NO: 28295 - protein, 16 aa, Artificial Sequence
  Synthetic polypeptide
CDPGRATSPGPQSSAG

SEQ ID NO: 28296 - protein, 66 aa, Artificial Sequence
  Synthetic polypeptide
VTLGEQQAPALRAQPDERSPETAASRGRKDPVSGAAGQSGLQSQPPGGHRADAGPADAAGRWRPAL

SEQ ID NO: 28297 - protein, 64 aa, Artificial Sequence
  Synthetic polypeptide
PWESNKPRPSELSRMSAAQRQQLLEEERTRFQELLASPAYRASPLVAIGQTLARQMQLEDGGQL

SEQ ID NO: 28298 - protein, 415 aa, Artificial Sequence
  Synthetic polypeptide
VSLMRSDGFLKHSSSARALSCRPPCKTSLCSSCIFHHDCEASPAMWNCDAFWAPSVLPHSTLSTLSHHPQPQFGRRMESKVSEGGLNVTLTIRLLMHGKEVGSIIGKKGETVKKMREESGARINISEGNCPERIVTITGPTDAIFKAFAMIAYKFEEDIINSMSNSPATSKPPVTLRLVVPASQCGSLIGKGGSKIKEIRESTGAQVQVAGDMLPNSTERAVTISGTPDAIIQCVKQICVVMLESPPKGATIPYRPKPASTPVIFAGGQAYTIQGQYAIPHPDQLTKLHQLAMQQTPFPPLGQTNPAFPGEKLPLHSSEEAQNLMGQSSGLDASPPASTHELTIPNDLIGCIIGRQGTKINEIRQMSGAQIKIANATEGSSERQITITGTPANISLAQYLINARLTSEVTGMGTL

SEQ ID NO: 28299 - protein, 54 aa, Artificial Sequence
  Synthetic polypeptide
SIVPLHVPSLAGHHVRRPFALPASSTMIVRPPQPCGTVTPSGPHLSFLTAPSAP

SEQ ID NO: 28300 - protein, 8 aa, Artificial Sequence
  Synthetic polypeptide
GLPSHVEL

SEQ ID NO: 28301 - protein, 395 aa, Artificial Sequence
  Synthetic polypeptide
VSLMRSDGFLKHSSSARALSCRPPCKTSLCSSCIFHHDCEASPAMWNCDAFWAPSVLPHSTLSTLSHHPQPQFGRRMESKVSEGGLNVTLTIRLLMHGKEVGSIIGKKGETVKKMREESGARINISEGNCPERIVTITGPTDAIFKAFAMIAYKFEEDIINSMSNSPATSKPPVTLRLVVPASQCGSLIGKGGSKIKEIRESTGAQVQVAGDMLPNSTERAVTISGTPDAIIQCVKQICVVMLESPPKGATIPYRPKPASTPVIFAGGQAYTIQGQYAIPHPDQLTKLHQLAMQQTPFPPLGQTNPAFPGLDASPPASTHELTIPNDLIGCIIGRQGTKINEIRQMSGAQIKIANATEGSSERQITITGTPANISLAQYLINARLTSEVTGMGTL

SEQ ID NO: 28302 - protein, 389 aa, Artificial Sequence
  Synthetic polypeptide
VSLMRSDGFLKHSSSARALSCRPPCKTSLCSSCIFHHDCEASPAMWNCDAFWAPSVLPHSTLSTLSHHPQPQFGRRMESKVSEGGLNVTLTIRLLMHGKEVGSIIGKKGETVKKMREESGARINISEGNCPERIVTITGPTDAIFKAFAMIAYKFEEDIINSMSNSPATSKPPVTLRLVVPASQCGSLIGKGGSKIKEIRESTGAQVQVAGDMLPNSTERAVTISGTPDAIIQCVKQICVVMLEAYTIQGQYAIPHPDLTKLHQLAMQQTPFPPLGQTNPAFPGEKLPLHSSEEAQNLMGQSSGLDASPPASTHELTIPNDLIGCIIGRQGTKINEIRQMSGAQIKIANATEGSSERQITITGTPANISLAQYLINARLTSEVTGMGTL

SEQ ID NO: 28303 - protein, 414 aa, Artificial Sequence
  Synthetic polypeptide
VSLMRSDGFLKHSSSARALSCRPPCKTSLCSSCIFHHDCEASPAMWNCDAFWAPSVLPHSTLSTLSHHPQPQFGRRMESKVSEGGLNVTLTIRLLMHGKEVGSIIGKKGETVKKMREESGARINISEGNCPERIVTITGPTDAIFKAFAMIAYKFEEDIINSMSNSPATSKPPVTLRLVVPASQCGSLIGKGGSKIKEIRESTGAQVQVAGDMLPNSTERAVTISGTPDAIIQCVKQICVVMLESPPKGATIPYRPKPASTPVIFAGGQAYTIQGQYAIPHPDLTKLHQLAMQQTPFPPLGQTNPAFPGEKLPLHSSEEAQNLMGQSSGLDASPPASTHELTIPNDLIGCIIGRQGTKINEIRQMSGAQIKIANATEGSSERQITITGTPANISLAQYLINARLTSEVTGMGTL

SEQ ID NO: 28304 - protein, 7 aa, Artificial Sequence
  Synthetic polypeptide
RRLVSRR

SEQ ID NO: 28305 - protein, 312 aa, Artificial Sequence
  Synthetic polypeptide
RKGGKEPLYCGENWQTPPQPSDAGWSPGGKARPAGNTGAWAPAEQFFPASNRTREGGGLWPPLPLQSSPAAPTMLDSSAAEQVTRLTLKLLGQKLEQERQNVEGGPEGLHLEPGNEDRPDDALQTALKRRRDLLQRLREQHLLDELSRAQAWSGPSRGALGSALPPELPPTGILPTASPSPLAPDPPRIILPTVPQPPATIIQQLPQQPLIAQIPPPQAFPTQRSGSIKEDMVELLLLQNAQVHQLVLQNWMLKALPPALQDPPHVPPRVPRAARPRLPAVHHHHHHHHAVWPPGAATVLQPAPSLWTPGPP

SEQ ID NO: 28306 - protein, 91 aa, Artificial Sequence
  Synthetic polypeptide
PLPPKECNKEKEGKSHFIVEKTGRLHLSQVTQAGLQEVRPALQATPVLGLLLSSSFLRVTEPGREVGCGLPCPYSRLLQLPPCWTHQQQSK

SEQ ID NO: 28307 - protein, 19 aa, Artificial Sequence
  Synthetic polypeptide
FIDFNQKNHTVQQIGYRSR

SEQ ID NO: 28308 - protein, 1553 aa, Artificial Sequence
  Synthetic polypeptide
TSTKKTTQYNRLDTGAGDITQKGYEKKRAKLLARYIPLIQGIDPSLQAENRIPGPSQTTAAAPKQQKSRPTASRDERFRSDVHTEAVQAALAKYKERKMPMPSKRRSVLVHSSVETYTPPDTSSASEDEGSLRRPGRLTSTPLQSHSSVEPWLDRVIQGSSTSSSASSTSSHPGGRPTTAPSAAATPGAAATTALAGLEAHTHIDLHSAPPDVTTGLVEHSYFERPQVASVRSVPRGCSGSMLETADGVPVNSRVSSKIQQLLNTLKRPKRPPLKEFFVDDFEELLEDPNQPKPEGSETSVLRGEPLTAGVPRPPSLLATLQRWGTTQPKSPCLTALDTTGKAVYTLTYGKLWSRSLKLAYTLLNKLTSKNEPLLKPGDRVALVFPNSDPVMFMVAFYGCLLAELVPVPIEVPLTRKDAGSQQVGFLLGSCGVFLALTTDACQKGLPKAQTGEVAAFKGWPPLSWLVIDGKHLAKPPKDWHPLAQDTGTGTAYIEYKTSKEGSTVGVTVSHASLLAQCRALTQACGYSEAETLTNVLDFKRDAGLWHGVLTSVMNRMHVVSVPYALMKANPLSWIQKVCFYKARAALVKSRDMHWSLLAQRGQRDVSLSSLRMLIVADGANPWSISSCDAFLNVFQSRGLRPEVICPCASSPEALTVAIRRPPDLGGPPPRKAVLSMNGLSYGVIRVDTEEKLSVLTVQDVGQVMPGANVCVVKLEGTPYLCKTDEVGEICVSSSATGTAYYGLLGITKNVFEAVPVTTGGAPIFDRPFTRTGLLGFIGPDNLVFIVGKLDGLMVTGVRRHNADDVVATALAVEPMKFVYRGRIAVFSVTVLHDDRIVLVAEQRPDASEEDSFQWMSRVLQAIDSIHQVGVYCLALVPANTLPKAPLGGIHISETKQRFLEGTLHPCNVLMCPHTCVTNLPKPRQKQPEVGPASMIVGNLVAGKRIAQASGRELAHLEDSDQARKFLFLADVLQWRAHTTPDHPLFLLLNAKGTVTSTATCVQLHKRAERVAAALMEKGRLSVGDHVALVYPPGVDLIAAFYGCLYCGCVPVTVRPPHPQNLGTTLPTVKMIVEVSKSACVLTTQAVTRLLRSKEAAAAVDIRTWPTILDTDDIPKKKIASVFRPPSPDVLAYLDFSVSTTGILAGVKMSHAATSALCRSIKLQCELYPSRQIAICLDPYCGLGFALWCLCSVYSGHQSVLVPPLELESNVSLWLSAVSQYKARVTFCSYSVMEMCTKGLGAQTGVLRMKGVNLSCVRTCMVVAEERPRIALTQSFSKLFKDLGLPARAVSTTFGCRVNVAICLQGTAGPDPTTVYVDMRALRHDRVRLVERGSPHSLPLMESGKILPGVKVIIAHTETKGPLGDSHLGEIWVSSPHNATGYYTVYGEEALHADHFSARLSFGDTQTIWARTGYLGFLRRTELTDASGGRHDALYVVGSLDETLELRGMRYHPIDIETSVIRAHRSIAECAVFTWTNLLVVVVELDGLEQDALDLVALVTNVVLEEHYLVVGVVVIVDPGVIPINSRGEKQRMHLRDGFLADQLDPIYVAYNM

SEQ ID NO: 28309 - protein, 89 aa, Artificial Sequence
  Synthetic polypeptide
NFFFLRDSPLPGFGVVSRKNVHSDLKRLLRHPTFFQLHVSLKKDLIHRLQPKKPHSTTDWIQEQVTSLKKDMKRKGQSCLHVIYRLFKE

SEQ ID NO: 28310 - protein, 1558 aa, Artificial Sequence
  Synthetic polypeptide
TSTKKTTQYNRLDTGAGDITQKGYEKKRAKLLARYIPLIQGIDPSLQAENRIPGPSQTTAAAPKQQKSRPTASRDERFRSDVHTEAVQAALAKYKERKMPMPSKRRSVLVHSSVETYTPPDTSSASEDEGSLRRPGRLTSTPLQSHSSVEPWLDRVIQGSSTSSSASSTSSHPGGRPTTAPSAAATPGAAATTALAGLEAHTHIADLHSAPPDVTTGLVEHSYFERPQVASVRSVPRGCSGSMLETADGVPVNSRVSSKIQQLLNTLKRPKRPPLKEFFVDDFEELLEVQQPDPNQPKPEGSETSVLRGEPLTAGVPRPPSLLATLQRWGTTQPKSPCLTALDTTGKAVYTLTYGKLWSRSLKLAYTLLNKLTSKNEPLLKPGDRVALVFPNSDPVMFMVAFYGCLLAELVPVPIEVPLTRKDAGSQQVGFLLGSCGVFLALTTDACQKGLPKAQTGEVAAFKGWPPLSWLVIDGKHLAKPPKDWHPLAQDTGTGTAYIEYKTSKEGSTVGVTVSHASLLAQCRALTQACGYSEAETLTNVLDFKRDAGLWHGVLTSVMNRMHVVSVPYALMKANPLSWIQKVCFYKARAALVKSRDMHWSLLAQRGQRDVSLSSLRMLIVADGANPWSISSCDAFLNVFQSRGLRPEVICPCASSPEALTVAIRRPPDLGGPPPRKAVLSMNGLSYGVIRVDTEEKLSVLTVQDVGQVMPGANVCVVKLEGTPYLCKTDEVGEICVSSSATGTAYYGLLGITKNVFEAVPVTTGGAPIFDRPFTRTGLLGFIGPDNLVFIVGKLDGLMVTGVRRHNADDVVATALAVEPMKFVYRGRIAVFSVTVLHDDRIVLVAEQRPDASEEDSFQWMSRVLQAIDSIHQVGVYCLALVPANTLPKAPLGGIHISETKQRFLEGTLHPCNVLMCPHTCVTNLPKPRQKQPEVGPASMIVGNLVAGKRIAQASGRELAHLEDSDQARKFLFLADVLQWRAHTTPDHPLFLLLNAKGTVTSTATCVQLHKRAERVAAALMEKGRLSVGDHVALVYPPGVDLIAAFYGCLYCGCVPVTVRPPHPQNLGTTLPTVKMIVEVSKSACVLTTQAVTRLLRSKEAAAAVDIRTWPTILDTDDIPKKKIASVFRPPSPDVLAYLDFSVSTTGILAGVKMSHAATSALCRSIKLQCELYPSRQIAICLDPYCGLGFALWCLCSVYSGHQSVLVPPLELESNVSLWLSAVSQYKARVTFCSYSVMEMCTKGLGAQTGVLRMKGVNLSCVRTCMVVAEERPRIALTQSFSKLFKDLGLPARAVSTTFGCRVNVAICLQGTAGPDPTTVYVDMRALRHDRVRLVERGSPHSLPLMESGKILPGVKVIIAHTETKGPLGDSHLGEIWVSSPHNATGYYTVYGEEALHADHFSARLSFGDTQTIWARTGYLGFLRRTELTDASGGRHDALYVVGSLDETLELRGMRYHPIDIETSVIRAHRSIAECAVFTWTNLLVVVVELDGLEQDALDLVALVTNVVLEEHYLVVGVVVIVDPGVIPINSRGEKQRMHLRDGFLADQLDPIYVAYNM

SEQ ID NO: 28311 - protein, 875 aa, Artificial Sequence
  Synthetic polypeptide
TSTKKTTQYNRLDTGAGDITQKGYEKKRAKLLARYIPLIQGIDPSLQAENRIPGPSQTTAAAPKQQKSRPTASRDERFRSDVHTEAVQAALAKYKERKMPMPSKRRSVLVHSSVETYTPPDTSSASEDEGSLRRPGRLTSTPLQSHSSVEPWLDRVIQGSSTSSSASSTSSHPGGRPTTAPSAAATPGAAATTALAGLEAHTHIDLHSAPPDVTTGLVEHSYFERPQVASVRSVPRGCSGSMLETADGVPVNSRVSSKIQQLLNTLKRPKRPPLKEFFVDDFEELLEVQQPDPNQPKPEGSETSVLRGEPLTAGVPRPPSLLATLQRWGTTQPKSPCLTALDTTGKAVYTLTYGKLWSRSLKLAYTLLNKLTSKNEPLLKPGDRVALVFPNSDPVMFMVAFYGCLLAELVPVPIEVPLTRKDAGSQQVGFLLGSCGVFLALTTDACQKGLPKAQTGEVAAFKGWPPLSWLVIDGKHLAKPPKDWHPLAQDTGTGTAYIEYKTSKEGSTVGVTVSHASLLAQCRALTQACGYSEAETLTNVLDFKRDAGLWHGVLTSVMNRMHVVSVPYALMKANPLSWIQKVCFYKARAALVKSRDMHWSLLAQRGQRDVSLSSLRMLIVADGANPWSISSCDAFLNVFQSRGLRPEVICPCASSPEALTVAIRRPPDLGGPPPRKAVLSMNGLSYGVIRVDTEEKLSVLTVQDVGQVMPGANVCVVKLEGTPYLCKTDEVGEICVSSSATGTAYYGLLGITKNVFEAVPVTTGGAPIFDRPFTRTGLLGFIGPDNLVFIVGKLDGLMVTGVRRHNADDVVATALAVEPMKFVYRGRIAVFSVTVLHDDRIVLVAEQRPDASEEDSFQWMSRVLQVGAPARPMVR

SEQ ID NO: 28312 - protein, 784 aa, Artificial Sequence
  Synthetic polypeptide
TSTKKTTQYNRLDTGAGDITQKGYEKKRAKLLARYIPLIQGIDPSLQAENRIPGPSQTTAAAPKQQKSRPTASRDERFRSDVHTEAVQAALAKYKERKMPMPSKRRSVLVHSSVETYTPPDTSSASEDEGSLRRPGRLTSTPLQSHSSVEPWLDRVIQGSSTSSSASSTSSHPGGRPTTAPSAAATPGAAATTALAGLEAHTHIGVPVNSRVSSKIQQLLNTLKRPKRPPLKEFFVDDFEELLEVQQPDPNQPKPEGSETSVLRGEPLTAGVPRPPSLLATLQRWGTTQPKSPCLTALDTTGKAVYTLTYGKLWSRSLKLAYTLLNKLTSKNEPLLKPGDRVALVFPNSDPVMFMVAFYGCLLAELVPVPIEVPLTRKDAGSQQVGFLLGSCGVFLALTTDACQKGLPKAQTGEVAAFKGWPPLSWLVIDGKHLAKPPKDWHPLAQDTGTGTAYIEYKTSKEGSTVGVTVSHASLLAQCRALTQACGYSEAETLTNVLDFKRDAGLWHGVLTSVMNRMHVVSVPYALMKANPLSWIQKVCFYKARAALVKSRDMHWSLLAQRGQRDVSLSSLRMLIVADGANPWSISSCDAFLNVFQSRGLRPEVICPCASSPEALTVAIRRPPDLGGPPPRKAVLSMNGLSYGVIRVDTEEKLSVLTVQDVGQVMPGANVCVVKLEGTPYLCKTDEVGEICVSSSATGTAYYGLLGITKNVFEAVPVTTGGAPIFDRPFTRTGLLGFIGPDNLVFIVGKLDGLMVTGVRRHNADDVVATALAVEPMKFVYRGR

SEQ ID NO: 28313 - protein, 827 aa, Artificial Sequence
  Synthetic polypeptide
TSTKKTTQYNRLDTGAGDITQKGYEKKRAKLLARYIPLIQGIDPSLQAENRIPGPSQTTAAAPKQQKSRPTASRDERFRSDVHTEAVQAALAKYKERKMPMPSKRRSVLVHSSVETYTPPDTSSASEDEGSLRRPGRLTSTPLQSHSSVEPWLDRVIQGSSTSSSASSTSSHPGGRPTTAPSAAATPGAAATTALAGLEAHTHIDLHSAPPDVTTGLVEHSYFERPQVASVRSVPRGCSGSMLETADGVPVNSRVSSKIQQLLNTLKRPKRPPLKEFFVDDFEELLEVQQPDPNQPKPEGSETSVLRGEPLTAGVPRPPSLLATLQRWGTTQPKSPCLTALDTTGKAVYTLTYGKLWSRSLKLAYTLLNKLTSKNEPLLKPGDRVALVFPNSDPVMFMVAFYGCLLAELVPVPIEVPLTRKDAGSQQVGFLLGSCGVFLALTTDACQKGLPKAQTGEVAAFKGWPPLSWLVIDGKHLAKPPKDWHPLAQDTGTGTAYIEYKTSKEGSTVGVTVSHASLLAQCRALTQACGYSEAETLTNVLDFKRDAGLWHGVLTSVMNRMHVVSVPYALMKANPLSWIQKVCFYKARAALVKSRDMHWSLLAQRGQRDVSLSSLRMLIVADGANPWSISSCDAFLNVFQSRGLRPEVICPCASSPEALTVAIRRPPDLGGPPPRKAVLSMNGLSYGVIRVDTEEKLSVLTVQDVGQVMPGANVCVVKLEGTPYLCKTDEVGEICVSSSATGTAYYGLLGITKNVFEAVPVTTGGAPIFDRPFTRTGLLGFIGPDNLVFIVGKLDGLMVTGVRRHNADDVVATALAVEPMKFVYRGR

SEQ ID NO: 28314 - protein, 1557 aa, Artificial Sequence
  Synthetic polypeptide
TSTKKTTQYNRLDTGAGDITQKGYEKKRAKLLARYIPLIQGIDPSLQAENRIPGPSQTTAAAPKQQKSRPTASRDERFRSDVHTEAVQAALAKYKERKMPMPSKRRSVLVHSSVETYTPPDTSSASEDEGSLRRPGRLTSTPLQSHSSVEPWLDRVIQGSSTSSSASSTSSHPGGRPTTAPSAAATPGAAATTALAGLEAHTHIDLHSAPPDVTTGLVEHSYFERPQVASVRSVPRGCSGSMLETADGVPVNSRVSSKIQQLLNTLKRPKRPPLKEFFVDDFEELLEVQQPDPNQPKPEGSETSVLRGEPLTAGVPRPPSLLATLQRWGTTQPKSPCLTALDTTGKAVYTLTYGKLWSRSLKLAYTLLNKLTSKNEPLLKPGDRVALVFPNSDPVMFMVAFYGCLLAELVPVPIEVPLTRKDAGSQQVGFLLGSCGVFLALTTDACQKGLPKAQTGEVAAFKGWPPLSWLVIDGKHLAKPPKDWHPLAQDTGTGTAYIEYKTSKEGSTVGVTVSHASLLAQCRALTQACGYSEAETLTNVLDFKRDAGLWHGVLTSVMNRMHVVSVPYALMKANPLSWIQKVCFYKARAALVKSRDMHWSLLAQRGQRDVSLSSLRMLIVADGANPWSISSCDAFLNVFQSRGLRPEVICPCASSPEALTVAIRRPPDLGGPPPRKAVLSMNGLSYGVIRVDTEEKLSVLTVQDVGQVMPGANVCVVKLEGTPYLCKTDEVGEICVSSSATGTAYYGLLGITKNVFEAVPVTTGGAPIFDRPFTRTGLLGFIGPDNLVFIVGKLDGLMVTGVRRHNADDVVATALAVEPMKFVYRGRIAVFSVTVLHDDRIVLVAEQRPDASEEDSFQWMSRVLQAIDSIHQVGVYCLALVPANTLPKAPLGGIHISETKQRFLEGTLHPCNVLMCPHTCVTNLPKPRQKQPEVGPASMIVGNLVAGKRIAQASGRELAHLEDSDQARKFLFLADVLQWRAHTTPDHPLFLLLNAKGTVTSTATCVQLHKRAERVAAALMEKGRLSVGDHVALVYPPGVDLIAAFYGCLYCGCVPVTVRPPHPQNLGTTLPTVKMIVEVSKSACVLTTQAVTRLLRSKEAAAAVDIRTWPTILDTDDIPKKKIASVFRPPSPDVLAYLDFSVSTTGILAGVKMSHAATSALCRSIKLQCELYPSRQIAICLDPYCGLGFALWCLCSVYSGHQSVLVPPLELESNVSLWLSAVSQYKARVTFCSYSVMEMCTKGLGAQTGVLRMKGVNLSCVRTCMVVAEERPRIALTQSFSKLFKDLGLPARAVSTTFGCRVNVAICLQGTAGPDPTTVYVDMRALRHDRVRLVERGSPHSLPLMESGKILPGVKVIIAHTETKGPLGDSHLGEIWVSSPHNATGYYTVYGEEALHADHFSARLSFGDTQTIWARTGYLGFLRRTELTDASGGRHDALYVVGSLDETLELRGMRYHPIDIETSVIRAHRSIAECAVFTWTNLLVVVVELDGLEQDALDLVALVTNVVLEEHYLVVGVVVIVDPGVIPINSRGEKQRMHLRDGFLADQLDPIYVAYNM

SEQ ID NO: 28315 - protein, 62 aa, Artificial Sequence
  Synthetic polypeptide
QCFSQLGNFAPSLPGDFWQLLKTFLLVTTQGRGVLLASRQPGLHRGQTGRADGHWSSQTQCR

SEQ ID NO: 28316 - protein, 790 aa, Artificial Sequence
  Synthetic polypeptide
RHFCLSQLKGGECSWHLDNLVFIVGKLDGLMVTGVRRHNADDVVATALAVEPMKFVYRGRIAVFSVTVLHDDRIVLVAEQRPDASEEDSFQWMSRVLQAIDSIHQVGVYCLALVPANTLPKAPLGGIHISETKQRFLEGTLHPCNVLMCPHTCVTNLPKPRQKQPEVGPASMIVGNLVAGKRIAQASGRELAHLEDSDQARKFLFLADVLQWRAHTTPDHPLFLLLNAKGTVTSTATCVQLHKRAERVAAALMEKGRLSVGDHVALVYPPGVDLIAAFYGCLYCGCVPVTVRPPHPQNLGTTLPTVKMIVEVSKSACVLTTQAVTRLLRSKEAAAAVDIRTWPTILDTDDIPKKKIASVFRPPSPDVLAYLDFSVSTTGILAGVKMSHAATSALCRSIKLQCELYPSRQIAICLDPYCGLGFALWCLCSVYSGHQSVLVPPLELESNVSLWLSAVSQYKARVTFCSYSVMEMCTKGLGAQTGVLRMKGVNLSCVRTCMVVAEERPRIALTQSFSKLFKDLGLPARAVSTTFGCRVNVAICLQGTAGPDPTTVYVDMRALRHDRVRLVERGSPHSLPLMESGKILPGVKVIIAHTETKGPLGDSHLGEIWVSSPHNATGYYTVYGEEALHADHFSARLSFGDTQTIWARTGYLGFLRRTELTDASGGRHDALYVVGSLDETLELRGMRYHPIDIETSVIRAHRSIAECAVFTWTNLLVVVVELDGLEQDALDLVALVTNVVLEEHYLVVGVVVIVDPGVIPINSRGEKQRMHLRDGFLADQLDPIYVAYNM

SEQ ID NO: 28317 - protein, 393 aa, Artificial Sequence
  Synthetic polypeptide
RHFCLSQLKGGECSWHLDNLVFIVGKLDGLMVTGVRRHNADDVVATALAVEPMKFVYRGRIAVFSVTVLHDDRIVLVAEQRPDASEEDSFQWMSRVLQAIDSIHQVGVYCLALVPANTLPKAPLGGIHISETKQRFLEGTLHPCNVLMCPHTCVTNLPKPRQKQPEVGPASMIVGNLVAGKRIAQASGRELAHLEDSDQARKFLFLADVLQWRAHTTPDHPLFLLLNAKGTVTSTATCVQLHKRAERVAAALMEKGRLSVGDHVALVYPPGVDLIAAFYGCLYCGCVPVTVRPPHPQNLGTTLPTVKMIVEVSKSACVLTTQAVTRLLRSKEAAAAVDIRTWPTILDTDDIPKKKIASVFRPPSPDVLAYLDFSVSTTGILAGVKAGRGGSRL

SEQ ID NO: 28318 - protein, 108 aa, Artificial Sequence
  Synthetic polypeptide
RHFCLSQLKGGECSWHLDNLVFIVGKLDGLMVTGVRRHNADDVVATALAVEPMKFVYRGRIAVFSVTVLHDDRIVLVAEQRPDASEEDSFQWMSRVLQVGAPARPMVR

SEQ ID NO: 28319 - protein, 60 aa, Artificial Sequence
  Synthetic polypeptide
RHFCLSQLKGGECSWHLDNLVFIVGKLDGLMVTGVRRHNADDVVATALAVEPMKFVYRGR

SEQ ID NO: 28320 - protein, 437 aa, Artificial Sequence
  Synthetic polypeptide
GGAWWLTPVIPALREAEAGGSQDQEMETILANMSHAATSALCRSIKLQCELYPSRQIAICLDPYCGLGFALWCLCSVYSGHQSVLVPPLELESNVSLWLSAVSQYKARVTFCSYSVMEMCTKGLGAQTGVLRMKGVNLSCVRTCMVVAEERPRIALTQSFSKLFKDLGLPARAVSTTFGCRVNVAICLQGTAGPDPTTVYVDMRALRHDRVRLVERGSPHSLPLMESGKILPGVKVIIAHTETKGPLGDSHLGEIWVSSPHNATGYYTVYGEEALHADHFSARLSFGDTQTIWARTGYLGFLRRTELTDASGGRHDALYVVGSLDETLELRGMRYHPIDIETSVIRAHRSIAECAVFTWTNLLVVVVELDGLEQDALDLVALVTNVVLEEHYLVVGVVVIVDPGVIPINSRGEKQRMHLRDGFLADQLDPIYVAYNM

SEQ ID NO: 28321 - protein, 35 aa, Artificial Sequence
  Synthetic polypeptide
SQHFGRPRRVDHKIKRWRPSWPTCRTRPQAPYAAP

SEQ ID NO: 28322 - protein, 48 aa, Artificial Sequence
  Synthetic polypeptide
RGVVAHACNPSTSGGRGGWITRSRDGDHPGQHVARGHKRLMPLHKAAV

SEQ ID NO: 28323 - protein, 164 aa, Artificial Sequence
  Synthetic polypeptide
GGAWWLTPVIPALREAEAGGSQDQEMETILANCLLGTPISAGAPAGAGEQRVPVAVGRQPVQGPRHLLLLLCDGDVHQGPRRTDGCPQDEGGEPVMCAHVHGGRRGAAQDCADPVLLQALQGPGPAGPRRKHHVRVQGQRGHLPPGHSWPGPHNRLRGHAGTAP

SEQ ID NO: 28324 - protein, 384 aa, Artificial Sequence
  Synthetic polypeptide
SQHFGRPRRVDHKIKRWRPSWPTVYSGHQSVLVPPLELESNVSLWLSAVSQYKARVTFCSYSVMEMCTKGLGAQTGVLRMKGVNLSCVRTCMVVAEERPRIALTQSFSKLFKDLGLPARAVSTTFGCRVNVAICLQGTAGPDPTTVYVDMRALRHDRVRLVERGSPHSLPLMESGKILPGVKVIIAHTETKGPLGDSHLGEIWVSSPHNATGYYTVYGEEALHADHFSARLSFGDTQTIWARTGYLGFLRRTELTDASGGRHDALYVVGSLDETLELRGMRYHPIDIETSVIRAHRSIAECAVFTWTNLLVVVVELDGLEQDALDLVALVTNVVLEEHYLVVGVVVIVDPGVIPINSRGEKQRMHLRDGFLADQLDPIYVAYNM

SEQ ID NO: 28325 - protein, 71 aa, Artificial Sequence
  Synthetic polypeptide
RGVVAHACNPSTSGGRGGWITRSRDGDHPGQLSTRDTNQCWCPRWSWRATCPCGCRPSASTRPASPSAPTL

SEQ ID NO: 28326 - protein, 438 aa, Artificial Sequence
  Synthetic polypeptide
GGAWWLTPVIPALREAEAGGSQDQEMETILANVMSHAATSALCRSIKLQCELYPSRQIAICLDPYCGLGFALWCLCSVYSGHQSVLVPPLELESNVSLWLSAVSQYKARVTFCSYSVMEMCTKGLGAQTGVLRMKGVNLSCVRTCMVVAEERPRIALTQSFSKLFKDLGLPARAVSTTFGCRVNVAICLQGTAGPDPTTVYVDMRALRHDRVRLVERGSPHSLPLMESGKILPGVKVIIAHTETKGPLGDSHLGEIWVSSPHNATGYYTVYGEEALHADHFSARLSFGDTQTIWARTGYLGFLRRTELTDASGGRHDALYVVGSLDETLELRGMRYHPIDIETSVIRAHRSIAECAVFTWTNLLVVVVELDGLEQDALDLVALVTNVVLEEHYLVVGVVVIVDPGVIPINSRGEKQRMHLRDGFLADQLDPIYVAYNM

SEQ ID NO: 28327 - protein, 49 aa, Artificial Sequence
  Synthetic polypeptide
RGVVAHACNPSTSGGRGGWITRSRDGDHPGQRDVARGHKRLMPLHKAAV

SEQ ID NO: 28328 - protein, 165 aa, Artificial Sequence
  Synthetic polypeptide
GGAWWLTPVIPALREAEAGGSQDQEMETILANVCLLGTPISAGAPAGAGEQRVPVAVGRQPVQGPRHLLLLLCDGDVHQGPRRTDGCPQDEGGEPVMCAHVHGGRRGAAQDCADPVLLQALQGPGPAGPRRKHHVRVQGQRGHLPPGHSWPGPHNRLRGHAGTAP

SEQ ID NO: 28329 - protein, 385 aa, Artificial Sequence
  Synthetic polypeptide
SQHFGRPRRVDHKIKRWRPSWPTCVYSGHQSVLVPPLELESNVSLWLSAVSQYKARVTFCSYSVMEMCTKGLGAQTGVLRMKGVNLSCVRTCMVVAEERPRIALTQSFSKLFKDLGLPARAVSTTFGCRVNVAICLQGTAGPDPTTVYVDMRALRHDRVRLVERGSPHSLPLMESGKILPGVKVIIAHTETKGPLGDSHLGEIWVSSPHNATGYYTVYGEEALHADHFSARLSFGDTQTIWARTGYLGFLRRTELTDASGGRHDALYVVGSLDETLELRGMRYHPIDIETSVIRAHRSIAECAVFTWTNLLVVVVELDGLEQDALDLVALVTNVVLEEHYLVVGVVVIVDPGVIPINSRGEKQRMHLRDGFLADQLDPIYVAYNM

SEQ ID NO: 28330 - protein, 72 aa, Artificial Sequence
  Synthetic polypeptide
RGVVAHACNPSTSGGRGGWITRSRDGDHPGQRVSTRDTNQCWCPRWSWRATCPCGCRPSASTRPASPSAPTL

SEQ ID NO: 28331 - protein, 5 aa, Artificial Sequence
  Synthetic polypeptide
VCVCS

SEQ ID NO: 28332 - protein, 284 aa, Artificial Sequence
  Synthetic polypeptide
CVCVLESEEEEYPGITAEDSNDIYILPSDNSGQVSPPESPTVTTSWQSESLPVSLSASQSWHTESLPVSLGPESWQQIAMDPEEVKSLDSNGAGEKSENNSSNSDIVHVEKEEVPEGMEEAAVASVVLPARELQEALPEAPAPLLPHITATSLLGTREPDTEVITVEKSSPATSLFVELDEEEVKAATTEPTEVEEVVPALEPTETLLSEKEINAREESLVEELSPASEKKPVPPSEGKSRLSPAGEMKPMPLSEGKSILLFGGAAAVAILAVAIGVALALRKK

SEQ ID NO: 28333 - protein, 41 aa, Artificial Sequence
  Synthetic polypeptide
VCVFLSQRRRNTLESLQKIAMTFTSCPATTLDKSVPQSLQL

SEQ ID NO: 28334 - protein, 42 aa, Artificial Sequence
  Synthetic polypeptide
CVCVLESEEEEYPGITAEDSNDIYILPSDNSGQVSPPESPTV

SEQ ID NO: 28335 - protein, 136 aa, Artificial Sequence
  Synthetic polypeptide
EGTASGPAPDLQNQKLWGMGKKDDPKLMQEWFKLVQEKNAMVRYESELMIFARELELEDRQSRLQQELRERMAVEDHLKTEEELSEEKQILNEMLEVVEQRDSLVALLEEQRLREREEDKDLEAAMLSKGFSLNWS

SEQ ID NO: 28336 - protein, 30 aa, Artificial Sequence
  Synthetic polypeptide
EPVRKAQPQALPQTCRIRNSGAWARRTTPS

SEQ ID NO: 28337 - protein, 96 aa, Artificial Sequence
  Synthetic polypeptide
GSQSVVPGPAATSPRSLLGRHSLRPCPRPAESETLGHGQEGRPQADAGVVQASAGEERHGALRVGADDLCPGAGAGRPAESTAAGAPGTHGSGRSP

SEQ ID NO: 28338 - protein, 92 aa, Artificial Sequence
  Synthetic polypeptide
EGTASGPAPDLQNQKLWGMGKKDDPKLMQEWFKLVQEKNAMVRYESELMIFARELELEDRQSRLQQELRERMAVEGEWGKAPMEARVGATSR

SEQ ID NO: 28339 - protein, 94 aa, Artificial Sequence
  Synthetic polypeptide
GSQSVVPGPAATSPRSLLGRHSLRPCPRPAESETLGHGQEGRPQADAGVVQASAGEERHGALRVGADDLCPGAGAGRPAESTAAGAPGTHGSGR

SEQ ID NO: 28340 - protein, 30 aa, Artificial Sequence
  Synthetic polypeptide
EGTASGPAPDLQNQKLWGMGKKDDPKLMQE

SEQ ID NO: 28341 - protein, 48 aa, Artificial Sequence
  Synthetic polypeptide
GSQSVVPGPAATSPRSLLGRHSLRPCPRPAESETLGHGQEGRPQADAG

SEQ ID NO: 28342 - protein, 189 aa, Artificial Sequence
  Synthetic polypeptide
GQPRTYTEEELNAKLTRRVQKAARRQAKQEELKRLHRAQIIQRQLQQVEERQRRLEERGVAVEKALRGEAGMGKKDDPKLMQEWFKLVQEKNAMVRYESELMIFARELELEDRQSRLQQELRERMAVEDHLKTEEELSEEKQILNEMLEVVEQRDSLVALLEEQRLREREEDKDLEAAMLSKGFSLNWS

SEQ ID NO: 28343 - protein, 10 aa, Artificial Sequence
  Synthetic polypeptide
ASQEPTRRRN

SEQ ID NO: 28344 - protein, 31 aa, Artificial Sequence
  Synthetic polypeptide
PAKNLHGGGTECQADPACAKGSSETGQAGGA

SEQ ID NO: 28345 - protein, 162 aa, Artificial Sequence
  Synthetic polypeptide
GQPRTYTEEELNAKLTRRVQKAARRQAKQEELKRLHRAQIIQRQLQQVEERQRRLEERGVAVEKALRGEADYWGESYYSDLIDLHLGGMGKKDDPKLMQEWFKLVQEKNAMVRYESELMIFARELELEDRQSRLQQELRERMAVEGEWGKAPMEARVGATSR

SEQ ID NO: 28346 - protein, 105 aa, Artificial Sequence
  Synthetic polypeptide
GQPRTYTEEELNAKLTRRVQKAARRQAKQEELKRLHRAQIIQRQLQQVEERQRRLEERGVAVEKALRGEAVEPSGGTPRRRPLSFCPCCVQEGMGKKDDPKLMQE

SEQ ID NO: 28347 - protein, 36 aa, Artificial Sequence
  Synthetic polypeptide
CRLWHQHPGPHPPLRFTDCGTRWAGHSASCSSLRKR

SEQ ID NO: 28348 - protein, 1195 aa, Artificial Sequence
  Synthetic polypeptide
ERGKFYCKPHYCYRLSGYAQRKRPAVAPLSGKEAKGPLQDGATTDANGRANAVASSTERTPGSGVNGLEEPSIAKRLRGTPERIELENYRLSLRQAEALQEVPEETQAEHNLSSVLDTGAEEDVASSSSESEMEEEGEEEEEEPRLPPSDLGGVPWKEAVRIHALLKGKSEEELEASKSFGPGNEEEEEEEEEYEEEEEEDYDEEEEESSEAGNQRLQQVMHAADPLEIQADVHWTHIREREEEERMAPASESSASGAPLDENDLEEDVDSEPAEIEGEAAEDGDPGDTGAELDDDQHWSDSPSDADRELRLPCPAEGEAELELRVSEDEEKLPASPKHQERGPSQATSPIRSPQESALLFIPVHSPSTEGPQLPPVPAATQEKSPEERLFPEPLLPKEKPKADAPSDLKAVHSPIRSQPVTLPEARTPVSPGSPQPQPPVAASTPPPSPLPICSQPQPSTEATVPSPTQSPIRFQPAPAKTSTPLAPLPVQSQSDTKDRLGSPLAVDEALRRSDLVEEFWMKSAEIRRSLGLTPVDRSKGPEPSFPTPAFRPVSLKSYSVEKSPQDEGLHLLKPLSIPKRLGLPKPEGEPLSLPTPRSPSDRELRSAQEERRELSSSSGLGLHGSSSNMKTLGSQSFNTSDSAMLTPPSSPPPPPPPGEEPATLRRKLREAEPNASVVPPPLPATWMRPPREPAQPPREEVRKSFVESVEEIPFADDVEDTYDDKTEDSSLQEKFFTPPSCWPRPEKPRHPPLAKENGRLPALEGTLQPQKRGLPLVSAEAKELAEERMRAREKSVKSQALRDAMARQLSRMQQMELASGAPRPRKASSAPSQGKERRPDSPTRPTLRGSEEPTLKHEATSEEVLSPPSDSGGPDGSFTSSEGSSGKSKKRSSLFSPRRNKKEKKSKGEGRPPEKPSSNLLEEAAAKPKSLWKSVFSGYKKDKKKKADDKSCPSTPSSGATVDSGKHRVLPVVRAELQLRRQLSFSEDSDLSSDDVLEKSSQKSRREPRTYTEEELNAKLTRRVQKAARRQAKQEELKRLHRAQIIQRQLQQVEERQRRLEERGVAVEKALRGEAGMGKKDDPKLMQEWFKLVQEKNAMVRYESELMIFARELELEDRQSRLQQELRERMAVEDHLKTEEELSEEKQILNEMLEVVEQRDSLVALLEEQRLREREEDKDLEAAMLSKGFSLNWS

SEQ ID NO: 28349 - protein, 80 aa, Artificial Sequence
  Synthetic polypeptide
LWDTLGRSLGLLFLAEKEVNSTVSHTTAIDSLATHKGRDRQWLPCLERRPKDPCRMAPPQMQTDGPTPWPAPLREPQVQA

SEQ ID NO: 28350 - protein, 159 aa, Artificial Sequence
  Synthetic polypeptide
ERGKFYCKPHYCYRLSGYAQRKRPAVAPLSGKEAKGPLQDGATTDANGRANAVASSTERTPGSGVNGLEEPSIAKRLRGTPERIELENYRLSLRQAEALQEVPEETQAEHNLSSVLDTGAEEDVASRDWVSPWLPRMVSNSWAQMIHPPQPPTVLGSQM

SEQ ID NO: 28351 - protein, 141 aa, Artificial Sequence
  Synthetic polypeptide
ERGKFYCKPHYCYRLSGYAQRKRPAVAPLSGKEAKGPLQDGATTDANGRANAVASSTERTPGSGVNGLEEPSIAKRLRGTPERIELENYRLSLRQAEALQEVPEETQAEHNLSSVLDTGAEEDVASRSARRAAGRPPATRP

SEQ ID NO: 28352 - protein, 142 aa, Artificial Sequence
  Synthetic polypeptide
ERGKFYCKPHYCYRLSGYAQRKRPAVAPLSGKEAKGPLQDGATTDANGRANAVASSTERTPGSLTSLFGWVARHSLGLCDKAKGMSQHLQSNISSFGQQVAQNPLDSFFMCQLLAFGVPFLYGLSEVLVQIRGEFHWQAVAQ

SEQ ID NO: 28353 - protein, 100 aa, Artificial Sequence
  Synthetic polypeptide
LWDTLGRSLGLLFLAEKEVNSTVSHTTAIDSLATHKGRDRQWLPCLERRPKDPCRMAPPQMQTDGPTPWPAPLREPQVASLPCLAGWRVTPSASVTRPRA

SEQ ID NO: 28354 - protein, 73 aa, Artificial Sequence
  Synthetic polypeptide
SQHFGRVSGNAYQSTWAKREFRLAMPAGSSSAWNTASRQTALLMLKLARSTMMTPSPPFSARLAMGSMCPGPS

SEQ ID NO: 28355 - protein, 78 aa, Artificial Sequence
  Synthetic polypeptide
LTPVIPALWKGERECISVHVGQAGVQIGNACWELFCLEHGIQADGTFDAQASKINDDDSFTTFFSETGNGKHVPRAVM

SEQ ID NO: 28356 - protein, 460 aa, Artificial Sequence
  Synthetic polypeptide
LTPVIPALWKGERECISVHVGQAGVQIGNACWELFCLEHGIQADGTFDAQASKINDDDSFTTFFSETGNGKHVPRAVMIDLEPTVVDEVRAGTYRQLFHPEQLITGKEDAANNYARGHYTVGKESIDLVLDRIRKLTDACSGLQGFLIFHSFGGGTGSGFTSLLMERLSLDYGKKSKLEFAIYPAPQVSTAVVEPYNSILTTHTTLEHSDCAFMVDNEAIYDICRRNLDIERPTYTNLNRLISQIVSSITASLRFDGALNVDLTEFQTNLVPYPRIHFPLVTYAPIISAEKAYHEQLSVAEITSSCFEPNSQMVKCDPRHGKYMACCMLYRGDVVPKDVNVAIAAIKTKRTIQFVDWCPTGFKVGINYQPPTVVPGGDLAKVQRAVCMLSNTTAIAEAWARLDHKFDLMYAKRAFVHWYVGEGMEEGEFSEAREDLAALEKDYEEVGTDSFEEENEGEEF

SEQ ID NO: 28357 - protein, 454 aa, Artificial Sequence
  Synthetic polypeptide
LTPVIPALWKGERECISVHVGQAGVQIGNACWELFCLEHGIQADGTFDAQASKINDDDSFTTFFSETGNGKHVPRAVMIDLEPTVVDEVRAGTYRQLFHPEQLITGKEDAANNYARGHYTVGKESIDLVLDRIRKLTDACSGLQGFLIFHSFGGGTGSGFTSLLMERLSLDYGKKSKLEFAIYPAPQVSTAVVEPYNSILTTHTTLEHSDCAFMVDNEAIYDICRRNLDIERPTYTNLNRLISQIVSSITASLRFDGALNVDLTEFQTNLVPYPRIHFPLVTYAPIISAEKAYHEQLSVAEITSSCFEPNSQMVKCDPRHGKYMACCMLYRGDVVPKDVNVAIAAIKTKRTIQFVDWCPTGFKVGINYQPPTVVPGGDLAKVQRAVCMLSNTTAIAEAWARLDHKFDLMYAKRAFVHWYVGEGMEEGEFSEAREDLAALEKDYEEVGTDSFEEE

SEQ ID NO: 28358 - protein, 135 aa, Artificial Sequence
  Synthetic polypeptide
LRPVIPALWEAKARGSQGDSKKPSKKRVKRKPYSTTKVTSGSTFNENTRRYAVHTNQCRRPHGSRVKKKRYPQEDDFHHTVFSNLERLDKLQPTLEASEESLVHKDRGDGERPVNVRVVQVAPLRRESRAIDTGE

SEQ ID NO: 28359 - protein, 23 aa, Artificial Sequence
  Synthetic polypeptide
SQHFGRPRQEDHKVTRRSLPKSV

SEQ ID NO: 28360 - protein, 18 aa, Artificial Sequence
  Synthetic polypeptide
TQACNPSTLGGQGKRITR

SEQ ID NO: 28361 - protein, 135 aa, Artificial Sequence; identical to SEQ ID NO: 28358
  Synthetic polypeptide

SEQ ID NO: 28362 - protein, 23 aa, Artificial Sequence
  Synthetic polypeptide
SQHFGRPRQEDHKVTRRSLPKSV

SEQ ID NO: 28363 - protein, 18 aa, Artificial Sequence
  Synthetic polypeptide
TQACNPSTLGGQGKRITR

SEQ ID NO: 28364 - protein, 32 aa, Artificial Sequence
  Synthetic polypeptide
SQNFESIRAAVQPWAVCVSQRHHPVHPPPLAV

SEQ ID NO: 28365 - protein, 45 aa, Artificial Sequence
  Synthetic polypeptide
EHKSCGATLGSLRVAAAPSSASPSPGSVTAGRLARMRATKPTVQK

SEQ ID NO: 28366 - protein, 6 aa, Artificial Sequence
  Synthetic polypeptide
QKRHPL

SEQ ID NO: 28367 - protein, 200 aa, Artificial Sequence
  Synthetic polypeptide
RSDGFIRGFSCFAWNFSFLPPCEEGHVCFPFCHDWLDMEEGKEGGTWLGISTRGKLAALTNYLQPQLDWQARGRGTYGLSNALLETPWRKLCFGKQLFLEAVERSQALPKDVLIASLLDVLNNEEAQLPDPAIEDQGGEYVQPMLSKYAAVCVRCPGYGTRTNTIILVDADGHVTFTERSMMDKDLSHWETRTYEFTLQS

SEQ ID NO: 28368 - protein, 72 aa, Artificial Sequence
  Synthetic polypeptide
GAFPALLGTSPSCHHVKKDMFASPSAMIGWTWRKARKEAHGWASAHVASWQHSPTTCSRSWTGRPEGEAPTG

SEQ ID NO: 28369 - protein, 74 aa, Artificial Sequence
  Synthetic polypeptide
RSDGFIRGFSCFAWNFSFLPPCEEGHVCFPFCHDWLDMEEGKEGGTWLGISTRGKLAALTNYLQPQLDWQARGR

SEQ ID NO: 28370 - protein, 68 aa, Artificial Sequence
  Synthetic polypeptide
GAFPALLGTSPSCHHVKKDMFASPSAMIGWTWRKARKEAHGWASAHVASWQHSPTTCSRSWTGRPEGE

SEQ ID NO: 28371 - protein, 262 aa, Artificial Sequence
  Synthetic polypeptide
RSDGFIRGFSCFAWNFSFLPPCEEGHVCFPFCHDWLDMEEGKEGGTWLGISTRGKLAALTNYLQPQLDWQARGRGELVTHFLTTDVDSLSYLKKVSMEGHLYNGFNLIAADLSTAKGDVICYYGNRGEPDPIVLTPGTYGLSNALLETPWRKLCFGKQLFLEAVERSQALPKDVLIASLLDVLNNEEAQLPDPAIEDQGGEYVQPMLSKYAAVCVRCPGYGTRTNTIILVDADGHVTFTERSMMDKDLSHWETRTYEFTLQS

SEQ ID NO: 28372 - protein, 75 aa, Artificial Sequence
  Synthetic polypeptide
GAFPALLGTSPSCHHVKKDMFASPSAMIGWTWRKARKEAHGWASAHVASWQHSPTTCSRSWTGRPEGEVNLSPTF

SEQ ID NO: 28373 - protein, 95 aa, Artificial Sequence
  Synthetic polypeptide
RSDGFIRGFSCFAWNFSFLPPCEEGHVCFPFCHDWLDMEEGKEGGTWLGISTRGKLAALTNYLQPQLDWQARGRAQQRETSFATMGTEGSLILSF

SEQ ID NO: 28374 - protein, 84 aa, Artificial Sequence
  Synthetic polypeptide
GAFPALLGTSPSCHHVKKDMFASPSAMIGWTWRKARKEAHGWASAHVASWQHSPTTCSRSWTGRPEGEHSKGRRHLLLWEPRGA

SEQ ID NO: 28375 - protein, 151 aa, Artificial Sequence
  Synthetic polypeptide
RSDGFIRGFSCFAWNFSFLPPCEEGHVCFPFCHDWLDMEEGKEGGTWLGISTRGKLAALTNYLQPQLDWQARGRGELVTHFLTTDVDSLSYLKKVSMEGHLYNGFNLIAADLSTAKGDVICYYGNRGEPDPIVLTPGTYGLSNALLETPWR

SEQ ID NO: 28376 - protein, 107 aa, Artificial Sequence
  Synthetic polypeptide
RSDGFIRGFSCFAWNFSFLPPCEEGHVCFPFCHDWLDMEEGKEGGTWLGISTRGKLAALTNYLQPQLDWQARGRGGPISVFLGEEHMPAAVDTASVPCLQVNLSPTF

SEQ ID NO: 28377 - protein, 94 aa, Artificial Sequence
  Synthetic polypeptide
GAFPALLGTSPSCHHVKKDMFASPSAMIGWTWRKARKEAHGWASAHVASWQHSPTTCSRSWTGRPEGEGAPYQCSWEKSTCLQLWTQHLSPAYR

SEQ ID NO: 28378 - protein, 212 aa, Artificial Sequence
  Synthetic polypeptide
RSDGFIRGFSCFAWNFSFLPPCEEGHVCFPFCHDWLDMEEGKEGGTWLGISTRGKLAALTNYLQPQLDWQARGRGELVTHFLTTDVDSLSYLKKVSMEGHLYNGFNLIAADLSTAKGDVICYYGNRGEPDPIVLTPGTYGLSNALLETPWRKLCFGKQLFLEAVERSQALPKDVLIASLLDVLNNEEAQLPDPAIEDQGGEYVQPMLSKYAA

SEQ ID NO: 28379 - protein, 143 aa, Artificial Sequence
  Synthetic polypeptide
RSDGFIRGFSCFAWNFSFLPPCEEGHVCFPFCHDWLDMEEGKEGGTWLGISTRGKLAALTNYLQPQLDWQARGRGELVTHFLTTDVDSLSYLKKVSMEGHLYNGFNLIAADLSTAKGDVICYYGNRGEPDPIVLTPEPTLSSW

SEQ ID NO: 28380 - protein, 75 aa, Artificial Sequence
  Synthetic polypeptide
GRAWCLMPVIPALWEAEVGRSRGQEIETILANTPELHWKSSSLTLLNRPLKRSPKTVKNSSILTTSASRTRGSTS

SEQ ID NO: 28381 - protein, 33 aa, Artificial Sequence
  Synthetic polypeptide
SQHFGRLKWADHEVRRSRPSWLTRPSYTGNPHP

SEQ ID NO: 28382 - protein, 206 aa, Artificial Sequence
  Synthetic polypeptide
HARATLEILIPDFVKQTSEEKPKDSEELEYFNHISIEDSRVYELTSKAGLLSPYQILHECLKRNHGMGDTSIKFEVVPGKNQKSEYVMACGKHTVRGWCKNKRVGKQLASQKILQLLHPHVKNWGSLLRMYGRESSKMVKQETSDKSVIELQQYAKKNKPNLHILSKLQEEMKRLAEEREETRKKPKMSIVASAQPGGEPLCTVDV

SEQ ID NO: 28383 - protein, 210 aa, Artificial Sequence
  Synthetic polypeptide
GQAWWLTPVIPALWEAKAGRSQGQEIETILANMYFNHISIEDSRVYELTSKAGLLSPYQILHECLKRNHGMGDTSIKFEVVPGKNQKSEYVMACGKHTVRGWCKNKRVGKQLASQKILQLLHPHVKNWGSLLRMYGRESSKMVKQETSDKSVIELQQYAKKNKPNLHILSKLQEEMKRLAEEREETRKKPKMSIVASAQPGGEPLCTVDV

SEQ ID NO: 28384 - protein, 38 aa, Artificial Sequence
  Synthetic polypeptide
SQHFGRPRRADHKVKRSRPSWPTCILTTSASRTRGSTS

SEQ ID NO: 28385 - protein, 34 aa, Artificial Sequence
  Synthetic polypeptide
SGMVAHTCNPSTLGGQGGQITRSRDRDHPGQHVF

SEQ ID NO: 28386 - protein, 210 aa, Artificial Sequence
  Synthetic polypeptide
GWVQWLTSVIPTLSDIEPPDPAGTQPLGNRAPLQLLRRELCQGQEAFVQQSQNELQQIRLCFERKKMVITEVWDNVAEMHMALNNQATGLLNLKKDIRGVLDQMEDIQLEILRERAQCRTRARKEKQMASMSKGRPKLGSSKGLAGQLWLLTLRLLLGALLVWTAAYVYVVNPTPFEGLVPPLLSRATVWKLRALLDPFLRLKVDGFLPF

SEQ ID NO: 28387 - protein, 73 aa, Artificial Sequence
  Synthetic polypeptide
SQHFQILSPPTRLARSPWGTGHLCSCCGGSCARGKRLSCNSPRTSCSRSACALRGRRWSSQRCGTTWLRCTWP

SEQ ID NO: 28388 - protein, 97 aa, Artificial Sequence
  Synthetic polypeptide
GWVQWLTSVIPTLSDIEPPDPAGTQPLGNRAPLQLLRRELCQGQEAFVQQSQNELQQIRLCFERKKMVITEVWDNVAEMHMALNNQATGLLVGPHRA

SEQ ID NO: 28389 - protein, 254 aa, Artificial Sequence
  Synthetic polypeptide
GWVQWLTSVIPTLSDIELEQENHSLKRQNQELREQLGALLGPGQQFLPLCPEHSSCTALAWPPDPAGTQPLGNRAPLQLLRRELCQGQEAFVQQSQNELQQIRLCFERKKMVITEVWDNVAEMHMALNNQATGLLNLKKDIRGVLDQMEDIQLEILRERAQCRTRARKEKQMASMSKGRPKLGSSKGLAGQLWLLTLRLLLGALLVWTAAYVYVVNPTPFEGLVPPLLSRATVWKLRALLDPFLRLKVDGFLPF

SEQ ID NO: 28390 - protein, 15 aa, Artificial Sequence
  Synthetic polypeptide
SQHFQILSWSRRTTA

SEQ ID NO: 28391 - protein, 141 aa, Artificial Sequence
  Synthetic polypeptide
GWVQWLTSVIPTLSDIELEQENHSLKRQNQELREQLGALLGPGQQFLPLCPEHSSCTALAWPPDPAGTQPLGNRAPLQLLRRELCQGQEAFVQQSQNELQQIRLCFERKKMVITEVWDNVAEMHMALNNQATGLLVGPHRA

SEQ ID NO: 28392 - protein, 30 aa, Artificial Sequence
  Synthetic polypeptide
GWVQWLTSVIPTLSDIENSPSCSWSRRTTA

SEQ ID NO: 28393 - protein, 102 aa, Artificial Sequence
  Synthetic polypeptide
SQHFQILRTVLPAAGAGEPQPEKAESGTSGAAGGPPGAGAAVPAPVSRTLKLHCSGLAPRPGWHAALGEQGTSAAAAAGAVPGARGFRATVPERAAADPPVL

SEQ ID NO: 28394 - protein, 25 aa, Artificial Sequence
  Synthetic polypeptide
GWVQWLTSVIPTLSDIEPGAESERH

SEQ ID NO: 28395 - protein, 329 aa, Artificial Sequence
  Synthetic polypeptide
SQHFQILSQEQRARDTEGPRQGDLEAGLGWGWPLHPGSNQGAPRQGGSIGSGTRPCPCPPLSREGGALASPRVALSQLQCGLLGSAEQSFLQLEQENHSLKRQNQELREQLGALLGPGQQFLPLCPEHSSCTALAWPPDPAGTQPLGNRAPLQLLRRELCQGQEAFVQQSQNELQQIRLCFERKKMVITEVWDNVAEMHMALNNQATGLLNLKKDIRGVLDQMEDIQLEILRERAQCRTRARKEKQMASMSKGRPKLGSSKGLAGQLWLLTLRLLLGALLVWTAAYVYVVNPTPFEGLVPPLLSRATVWKLRALLDPFLRLKVDGFLPF

SEQ ID NO: 28396 - protein, 216 aa, Artificial Sequence
  Synthetic polypeptide
SQHFQILSQEQRARDTEGPRQGDLEAGLGWGWPLHPGSNQGAPRQGGSIGSGTRPCPCPPLSREGGALASPRVALSQLQCGLLGSAEQSFLQLEQENHSLKRQNQELREQLGALLGPGQQFLPLCPEHSSCTALAWPPDPAGTQPLGNRAPLQLLRRELCQGQEAFVQQSQNELQQIRLCFERKKMVITEVWDNVAEMHMALNNQATGLLVGPHRA

SEQ ID NO: 28397 - protein, 39 aa, Artificial Sequence
  Synthetic polypeptide
YQHFGRPSEDAMRKAGVAHSKSSKDMESHVFLKAKTRIL

SEQ ID NO: 28398 - protein, 16 aa, Artificial Sequence
  Synthetic polypeptide
DYACNTSTLGGQARMP

SEQ ID NO: 28399 - protein, 24 aa, Artificial Sequence
  Synthetic polypeptide
ITPVIPALWEAKRGCHEESWCGTQ

SEQ ID NO: 28400 - protein, 40 aa, Artificial Sequence
  Synthetic polypeptide
YQHFGRPSEDAMRKAGVAHSKSSKDMESHVFLKAKTRVRP

SEQ ID NO: 28401 - protein, 733 aa, Artificial Sequence
  Synthetic polypeptide
YQHFGRPSEDAMRKAGVAHSKSSKDMESHVFLKAKTRDEYLSLVARLIIHFRDIHNKKSQASVSDPMNALQSLTGGPAAGAAGIGMPPRGPGQSLGGMGSLGAMGQPMSLSGQPPPGTSGMAPHSMAVVSTATPQTQLQLQQVALQQQQQQQQFQQQQQAALQQQQQQQQQQQFQAQQSAMQQQFQAVVQQQQQLQQQQQQQQHLIKLHHQNQQQIQQQQQQLQRIAQLQLQQQQQQQQQQQQQQQQALQAQPPIQQPPMQQPQPPPSQALPQQLQQMHHTQHHQPPPQPQQPPVAQNQPSQLPPQSQTQPLVSQAQALPGQMLYTQPPLKFVRAPMVVQQPPVQPQVQQQQTAVQTAQAAQMVAPGVQVSQSSLPMLSSPSPGQQVQTPQSMPPPPQPSPQPGQPSSQPNSNVSSGPAPSPSSFLPSPSPQPSQSPVTARTPQNFSVPSPGPLNTPVNPSSVMSPAGSSQAEEQQYLDKLKQLSKYIEPLRRMINKIDKNEDRKKDLSKMKSLLDILTDPSKRCPLKTLQKCEIALEKLKNDMAVPTPPPPPVPPTKQQYLCQPLLDAVLANIRSPVFNHSLYRTFVPAMTAIHGPPITAPVVCTRKRRLEDDERQSIPSVLQGEVARLDPKFLVNLDPSHCSNNGTVHLICKLDDKDLPSVPPLELSVPADYPAQSPLWIDRQWQYDANPFLQSVHRCMTSRLLQLPDKHSVTALLNTWAQSVHQACLSAA

SEQ ID NO: 28402 - protein, 773 aa, Artificial Sequence
  Synthetic polypeptide
YQHFGRPSEDAMRKAGVAHSKSSKDMESHVFLKAKTRDEYLSLVARLIIHFRDIHNKKSQASVSDPMNALQSLTGGPAAGAAGIGMPPRGPGQSLGGMGSLGAMGQPMSLSGQPPPGTSGMAPHSMAVVSTATPQTQLQLQQVALQQQQQQQQFQQQQQAALQQQQQQQQQQQFQAQQSAMQQQFQAVVQQQQQLQQQQQQQQHLIKLHHQNQQQIQQQQQQLQRIAQLQLQQQQQQQQQQQQQQQQALQAQPPIQQPPMQQPQPPPSQALPQQLQQMHHTQHHQPPPQPQQPPVAQNQPSQLPPQSQTQPLVSQAQALPGQMLYTQPPLKFVRAPMVVQQPPVQPQVQQQQTAVQTAQAAQMVAPGVQMITEALAQGGMHIRARFPPTTAVSAIPSSSIPLGRQPMAQVSQSSLPMLSSPSPGQQVQTPQSMPPPPQPSPQPGQPSSQPNSNVSSGPAPSPSSFLPSPSPQPSQSPVTARTPQNFSVPSPGPLNTPVNPSSVMSPAGSSQAEEQQYLDKLKQLSKYIEPLRRMINKIDKNEDRKKDLSKMKSLLDILTDPSKRCPLKTLQKCEIALEKLKNDMAVPTPPPPPVPPTKQQYLCQPLLDAVLANIRSPVFNHSLYRTFVPAMTAIHGPPITAPVVCTRKRRLEDDERQSIPSVLQGEVARLDPKFLVNLDPSHCSNNGTVHLICKLDDKDLPSVPPLELSVPADYPAQSPLWIDRQWQYDANPFLQSVHRCMTSRLLQLPDKHSVTALLNTWAQSVHQACLSAA

SEQ ID NO: 28403 - protein, 662 aa, Artificial Sequence
  Synthetic polypeptide
YQHFGRPSEDAMRKAGVAHSKSSKDMESHVFLKAKTRDEYLSLVARLIIHFRDIHNKKSQASVSAQLQLQQVALQQQQQQQQFQQQQQAALQQQQQQQQQQQFQAQQSAMQQQFQAVVQQQQQLQQQQQQQQHLIKLHHQNQQQIQQQQQQLQRIAQLQLQQQQQQQQQQQQQQQQALQAQPPIQQPPMQQPQPPPSQALPQQLQQMHHTQHHQPPPQPQQPPVAQNQPSQLPPQSQTQPLVSQAQALPGQMLYTQPPLKFVRAPMVVQQPPVQPQVQQQQTAVQTAQAAQMVAPGVQVSQSSLPMLSSPSPGQQVQTPQSMPPPPQPSPQPGQPSSQPNSNVSSGPAPSPSSFLPSPSPQPSQSPVTARTPQNFSVPSPGPLNTPVNPSSVMSPAGSSQAEEQQYLDKLKQLSKYIEPLRRMINKIDKNEDRKKDLSKMKSLLDILTDPSKRCPLKTLQKCEIALEKLKNDMAVPTPPPPPVPPTKQQYLCQPLLDAVLANIRSPVFNHSLYRTFVPAMTAIHGPPITAPVVCTRKRRLEDDERQSIPSVLQGEVARLDPKFLVNLDPSHCSNNGTVHLICKLDDKDLPSVPPLELSVPADYPAQSPLWIDRQWQYDANPFLQSVHRCMTSRLLQLPDKHSVTALLNTWAQSVHQACLSAA

SEQ ID NO: 28404 - protein, 12 aa, Artificial Sequence
  Synthetic polypeptide
YQHFGRPSEDAM

SEQ ID NO: 28405 - protein, 16 aa, Artificial Sequence
  Synthetic polypeptide
ITPVIPALWEAKRGCH

SEQ ID NO: 28406 - protein, 30 aa, Artificial Sequence
  Synthetic polypeptide
YQHFGRPSEDAMRKAGVAHSKSSKDMESHV

SEQ ID NO: 28407 - protein, 56 aa, Artificial Sequence
  Synthetic polypeptide
GQAQWLMPVILTFWDAEAGGSLEPRNSSQPEQYRISEQTSELGIGTVPAHGAGHGH

SEQ ID NO: 28408 - protein, 1043 aa, Artificial Sequence
  Synthetic polypeptide
HFGMLRREDHLSPGIQANLSNIEYLNKHQNWVSGLSQHTGLAMATESILHFAGYNKQNTTLGATQLSERPACVKKDYSNFMASLNLRNRYAGEVYGMIRFSGTTGQMSDLNKMMVQDLHSALDRSHPQHYTQAMFKLTAMLISSKDCDPQLLHHLCWGPLRMFNEHGMETALACWEWLLAGKDGVEVPFMREMAGAWHMTVEQKFGLFSAEIKEADPLAASEASQPKPCPPEVTPHYIWIDFLVQRFEIAKYCSSDQVEIFSSLLQRSMSLNIGGAKGSMNRHVAAIGPRFKLLTLGLSLLHADVVPNATIRNVLREKIYSTAFDYFSCPPKFPTQGEKRLREDISIMIKFWTAMFSDKKYLTASQLVPPDNQDTRSNLDITVGSRQQATQGWINTYPLSSGMSTISKKSGMSKKTNRGSQLHKYYMKRRTLLLSLLATEIERLITWYNPLSAPELELDQAGENSVANWRSKYISLSEKQWKDNVNLAWSISPYLAVQLPARFKNTEAIGNEVTRLVRLDPGAVSDVPEAIKFLVTWHTIDADAPELSHVLCWAPTDPPTGLSYFSSMYPPHPLTAQYGVKVLRSFPPDAILFYIPQIVQALRYDKMGYVREYILWAASKSQLLAHQFIWNMKTNIYLDEEGHQKDPDIGDLLDQLVEEITGSLSGPAKDFYQREFDFFNKITNVSAIIKPYPKGDERKKACLSALSEVKVQPGCYLPSNPEAIVLDIDYKSGTPMQSAAKAPYLAKFKVKRCGVSELEKEGLRCRSDSEDECSTQEADGQKISWQAAIFKVGDDCRQDMLALQIIDLFKNIFQLVGLDLFVFPYRVVATAPGCGVIECIPDCTSRDQLGRQTDFGMYDYFTRQYGDESTLAFQQARYNFIRSMAAYSLLLFLLQIKDRHNGNIMLDKKGHIIHIDFGFMFESSPGGNLGWEPDIKLTDEMVMIMGGKMEATPFKWFMEMCVRGYLAVRPYMDAVVSLVTLMLDTGLPCFRGQTIKLLKHRFSPNMTEREAANFIMKVIQSCFLSNRSRTYDMIQYYQNDIPY

SEQ ID NO: 28409 - protein, 15 aa, Artificial Sequence
  Synthetic polypeptide
LFDHAHPTTATHQRS

SEQ ID NO: 28410 - protein, 1336 aa, Artificial Sequence
  Synthetic polypeptide
GLIRTSCLTMLTRRLPPIKEAKPRLQKLFRDFWLYSVLMGFAVEGSGLWPEEWYEGVCEIATKSPLLTFPSKEPLRSVLQYNSAMKNDTVTPAELSELRSTIINLLDPPPEVSALINKLDFAMSTYLLSVYRLEYMRVLRSTDPDRFQVMFCYFEDKAIQKDKSGMMQCVIAVADKVFDAFLNMMADKAKTKENEEELERHAQFLLVNFNHIHKRIRRVADKYLSGLVDKFPHLLWSGTVLKTMLDILQTLSLSLSADIHKDQPYYDIPDAPYRITVPDTYEARESIVKDFAARCGMILQEAMKWAPTVTKSHLQEYLNKHQNWVSGLSQHTGLAMATESILHFAGYNKQNTTLGATQLSERPACVKKDYSNFMASLNLRNRYAGEVYGMIRFSGTTGQMSDLNKMMVQDLHSALDRSHPQHYTQAMFKLTAMLISSKDCDPQLLHHLCWGPLRMFNEHGMETALACWEWLLAGKDGVEVPFMREMAGAWHMTVEQKFGLFSAEIKEADPLAASEASQPKPCPPEVTPHYIWIDFLVQRFEIAKYCSSDQVEIFSSLLQRSMSLNIGGAKGSMNRHVAAIGPRFKLLTLGLSLLHADVVPNATIRNVLREKIYSTAFDYFSCPPKFPTQGEKRLREDISIMIKFWTAMFSDKKYLTASQLVPPDNQDTRSNLDITVGSRQQATQGWINTYPLSSGMSTISKKSGMSKKTNRGSQLHKYYMKRRTLLLSLLATEIERLITWYNPLSAPELELDQAGENSVANWRSKYISLSEKQWKDNVNLAWSISPYLAVQLPARFKNTEAIGNEVTRLVRLDPGAVSDVPEAIKFLVTWHTIDADAPELSHVLCWAPTDPPTGLSYFSSMYPPHPLTAQYGVKVLRSFPPDAILFYIPQIVQALRYDKMGYVREYILWAASKSQLLAHQFIWNMKTNIYLDEEGHQKDPDIGDLLDQLVEEITGSLSGPAKDFYQREFDFFNKITNVSAIIKPYPKGDERKKACLSALSEVKVQPGCYLPSNPEAIVLDIDYKSGTPMQSAAKAPYLAKFKVKRCGVSELEKEGLRCRSDSEDECSTQEADGQKISWQAAIFKVGDDCRQDMLALQIIDLFKNIFQLVGLDLFVFPYRVVATAPGCGVIECIPDCTSRDQLGRQTDFGMYDYFTRQYGDESTLAFQQARYNFIRSMAAYSLLLFLLQIKDRHNGNIMLDKKGHIIHIDFGFMFESSPGGNLGWEPDIKLTDEMVMIMGGKMEATPFKWFMEMCVRGYLAVRPYMDAVVSLVTLMLDTGLPCFRGQTIKLLKHRFSPNMTEREAANFIMKVIQSCFLSNRSRTYDMIQYYQNDIPY

SEQ ID NO: 28411 - protein, 29 aa, Artificial Sequence
  Synthetic polypeptide
PCSPDDCHPSKKLSLGYRSSSETSGCIPF

SEQ ID NO: 28412 - protein, 1989 aa, Artificial Sequence
  Synthetic polypeptide
MLWTSTFPDILDQLYGLRAKWFGGFAELPEGLSQRVISEILEVLLQVLHVLLGMCQALEIQDKEYLCKYAIPCLIGISRAFGRYSNMEESLLSKLFPKIPPHSLRVLEELEGVRRRSFNDFRSILPSNLLTVCQEGTLKRKTSSVSSISQVSPERGMPPPSSPGGSAFHYFEASCLPDGTALEPEYYFSTISSSFSVSPLFNGVTYKEFNIPLEMLRELLNLVKKIVEEAVLKSLDAIVASVMEANPSADLYYTSFSDPLYLTMFKMLRDTLYYMKDLPTSFVKEIHDFVLEQFNTSQGELQKILHDADRIHNELSPLKLRCQANAACVDLMVWAVKDEQGAENLCIKLSEKLQSKTSSKVIIAHLPLLICCLQGLGRLCERFPVVVHSVTPSLRDFLVIPSPVLVKLYKYHSQYHTVAGNDIKISVTNEHSESTLNVMSGKKSQPSMYEQLRDIAIDNICRCLKAGLTVDPVIVEAFLASLSNRLYISQESDKDAHLIPDHTIRALGHIAVALRDTPKVMEPILQILQQKFCQPPSPLDVLIIDQLGCLVITGNQYIYQEVWNLFQQISVKASSVVYSATKDYKDHGYRHCSLAVINALANIAANIQDEHLVDELLMNLLELFVQLGLEGKRASERASEKGPALKASSSAGNLGVLIPVIAVLTRRLPPIKEAKPRLQKLFRDFWLYSVLMGFAVEGSGLWPEEWYEGVCEIATKSPLLTFPSKEPLRSVLQYNSAMKNDTVTPAELSELRSTIINLLDPPPEVSALINKLDFAMSTYLLSVYRLEYMRVLRSTDPDRFQVMFCYFEDKAIQKDKSGMMQCVIAVADKVFDAFLNMMADKAKTKENEEELERHAQFLLVNFNHIHKRIRRVADKYLSGLVDKFPHLLWSGTVLKTMLDILQTLSLSLSADIHKDQPYYDIPDAPYRITVPDTYEARESIVKDFAARCGMILQEAMKWAPTVTKSHLQEYLNKHQNWVSGLSQHTGLAMATESILHFAGYNKQNTTLGATQLSERPACVKKDYSNFMASLNLRNRYAGEVYGMIRFSGTTGQMSDLNKMMVQDLHSALDRSHPQHYTQAMFKLTAMLISSKDCDPQLLHHLCWGPLRMFNEHGMETALACWEWLLAGKDGVEVPFMREMAGAWHMTVEQKFGLFSAEIKEADPLAASEASQPKPCPPEVTPHYIWIDFLVQRFEIAKYCSSDQVEIFSSLLQRSMSLNIGGAKGSMNRHVAAIGPRFKLLTLGLSLLHADVVPNATIRNVLREKIYSTAFDYFSCPPKFPTQGEKRLREDISIMIKFWTAMFSDKKYLTASQLVPPDNQDTRSNLDITVGSRQQATQGWINTYPLSSGMSTISKKSGMSKKTNRGSQLHKYYMKRRTLLLSLLATEIERLITWYNPLSAPELELDQAGENSVANWRSKYISLSEKQWKDNVNLAWSISPYLAVQLPARFKNTEAIGNEVTRLVRLDPGAVSDVPEAIKFLVTWHTIDADAPELSHVLCWAPTDPPTGLSYFSSMYPPHPLTAQYGVKVLRSFPPDAILFYIPQIVQALRYDKMGYVREYILWAASKSQLLAHQFIWNMKTNIYLDEEGHQKDPDIGDLLDQLVEEITGSLSGPAKDFYQREFDFFNKITNVSAIIKPYPKGDERKKACLSALSEVKVQPGCYLPSNPEAIVLDIDYKSGTPMQSAAKAPYLAKFKVKRCGVSELEKEGLRCRSDSEDECSTQEADGQKISWQAAIFKVGDDCRQDMLALQIIDLFKNIFQLVGLDLFVFPYRVVATAPGCGVIECIPDCTSRDQLGRQTDFGMYDYFTRQYGDESTLAFQQARYNFIRSMAAYSLLLFLLQIKDRHNGNIMLDKKGHIIHIDFGFMFESSPGGNLGWEPDIKLTDEMVMIMGGKMEATPFKWFMEMCVRGYLAVRPYMDAVVSLVTLMLDTGLPCFRGQTIKLLKHRFSPNMTEREAANFIMKVIQSCFLSNRSRTYDMIQYYQNDIPY

SEQ ID NO: 28413 - protein, 4 aa, Artificial Sequence
  Synthetic polypeptide
SVRF

SEQ ID NO: 28414 - protein, 320 aa, Artificial Sequence
  Synthetic polypeptide
CSREGEDGKSSRLGPAPLCYLPDDAEETAFLLEASVASLPKKDNPRRGLWLANCQRLDPSGQGLWDPASEYIYFCSKHFEEDCFELVGISGYHRLKEGAVPTIFESFSKLRRTTKTKGHSYPPGPAEVSRLRRCRKRCSEGRGPTTPFSPPPPADVTCFPVEEASAPATLPASPAGRLEPGLSSPFSDLLGPLGAQADEAGCSAQPSPERQPSPLEPRPVSPSAYMLRLPPPAGAYIQNEHSYQVGSALLWKRRAEAALDALDKAQRQLQACKRREQRLRLRLTKLQQERAREKRAQADARQTLKEHVQDFAMQLSSSMA

SEQ ID NO: 28415 - protein, 94 aa, Artificial Sequence
  Synthetic polypeptide
AVGKGRTGSLAGLDPPHSVTCQMTLRKLLFFSRPPLPHFPRRTTRGEACGWPTASGWTPAARACGTRHPSTSTSAPNTLRRTALSWWESVDITG

SEQ ID NO: 28416 - protein, 53 aa, Artificial Sequence
  Synthetic polypeptide
GNCFSSRGLRCLTSQEGQPEARLVAGQLPAAGPQRPGPVGPGIRVHLLLLQTL

SEQ ID NO: 28417 - protein, 88 aa, Artificial Sequence
  Synthetic polypeptide
PLCWQTTCVHVPSGPASCPLQEVYPSSQGRDSHSLVGATGCGGPHPAQALWNPLRHPRHRAGREVRAHPHGRHTGHRGSLAGRGHLFL

SEQ ID NO: 28418 - protein, 200 aa, Artificial Sequence
  Synthetic polypeptide
MIWLPQPPQPFETTWGWLPPTSCSPDLCAGKPPVCMFLQAQPHVPSRKSTPVPREETATHWWEQPGVEARTLLKLYGIRFDILVTGQAGKFGLIPTAVTLGTGAAWLGVVTFFCDLLLLYVDREAHFYWRTKYEEAKAPKATANSVWRELALASQARLAECLRRSSAPAPTATAAGSQTQTPGWPCPSSDTHLPTHSGSL

SEQ ID NO: 28419 - protein, 199 aa, Artificial Sequence
  Synthetic polypeptide
SGFPNLPSPSKPRGAGSHPHPVPLTSVLANHLCACSFRPSLMSPPGSLPQFPGKRQPLTGGSNRVWRPAPCSSSMESASTSSSPGRQGSSGSSPRPSHWAPGQLGWAWSPFSVTCYCCMWIEKPISTGGQSMRRPRPRKQPPTLCGGSWPLHPKPDWPSASDGAQHLHPRPLLLGVRHRHQDGPVQVLTPTCQPIPGAC

SEQ ID NO: 28420 - protein, 216 aa, Artificial Sequence
  Synthetic polypeptide
PLCWQTTCVHVPSGPASCPLQEVYPSSQGRVSSHLWNPSALSLPLHIPRCWVCLGTPLSPVLSAGRELLRDRTATHWWEQPGVEARTLLKLYGIRFDILVTGQAGKFGLIPTAVTLGTGAAWLGVVTFFCDLLLLYVDREAHFYWRTKYEEAKAPKATANSVWRELALASQARLAECLRRSSAPAPTATAAGSQTQTPGWPCPSSDTHLPTHSGSL

SEQ ID NO: 28421 - protein, 147 aa, Artificial Sequence
  Synthetic polypeptide
GTGQPLTGGSNRVWRPAPCSSSMESASTSSSPGRQGSSGSSPRPSHWAPGQLGWAWSPFSVTCYCCMWIEKPISTGGQSMRRPRPRKQPPTLCGGSWPLHPKPDWPSASDGAQHLHPRPLLLGVRHRHQDGPVQVLTPTCQPIPGAC

SEQ ID NO: 28422 - protein, 154 aa, Artificial Sequence
  Synthetic polypeptide
SGFPNLPSPSKPRGAGSHPHPVPLTSVLANHLCACSFRPSLMSPPGSLPQFPGKSEFPSLESLSPEPAPSHPPLLGLFRDSSVPRPLSRQGTSEGQDSHSLVGATGCGGPHPAQALWNPLRHPRHRAGREVRAHPHGRHTGHRGSLAGRGHLFL

SEQ ID NO: 28423 - protein, 49 aa, Artificial Sequence
  Synthetic polypeptide
GQARWLMPIIPALWEAEAGGSRASSRFAPVPTWTRSIPSLDGLLGALTY

SEQ ID NO: 28424 - protein, 37 aa, Artificial Sequence
  Synthetic polypeptide
SQHFGRPRQADHELHHVSLLCLPGQEAYHLWTGCWGL

SEQ ID NO: 28425 - protein, 169 aa, Artificial Sequence
  Synthetic polypeptide
PGAVAHAYNPSTLGGRGRRITSFITFRSCAYLDKKHTIFGRVVGGFDVLTAMENVESDPKTDRPKEEIRIDATTVFVDPYEEADAQIAQERKTQLKVAPETKVKSSQPQAGSQGPQTFRQGVGKYINPAATEQQRKSPQPVPLSPCPRRSPVGVLGTSAPGSSRLPDDH

SEQ ID NO: 28426 - protein, 162 aa, Artificial Sequence
  Synthetic polypeptide
PGAVAHAYNPSTLGGRGRRITSFITFRSCAYLDKKHTIFGRVVGGFDVLTAMENVESDPKTDRPKEEIRIDATTVFVDPYEEADAQIAQERKTQLKVAPETKVKSSQPQAGSQGPQTFRQGVGKYINPAATKRAAEEEPSTSATVPMSKKKPSRGFGDFSSW

SEQ ID NO: 28427 - protein, 152 aa, Artificial Sequence
  Synthetic polypeptide
PGAVAHAYNPSTLGGRGRRITSFITFRSCAYLDKKHTIFGRVVGGFDVLTAMENVESDPKTDRPKEEIRIDATTVFVDPYEEADAQIAQERKTQLKEASSRGRALNQCHCPHVQEEAQSGFWGLQLLVAAATCRLYLCPSFSHQSLMLKLQA

SEQ ID NO: 28428 - protein, 57 aa, Artificial Sequence
  Synthetic polypeptide
GQARWLMPIIPALWEAEAGGSRGQEIETILANTLHHVSLLCLPGQEAYHLWTGCWGL

SEQ ID NO: 28429 - protein, 171 aa, Artificial Sequence
  Synthetic polypeptide
SQHFGRPRQADHEVRRSRPSSLTRFITFRSCAYLDKKHTIFGRVVGGFDVLTAMENVESDPKTDRPKEEIRIDATTVFVDPYEEADAQIAQERKTQLKVAPETKVKSSQPQAGSQGPQTFRQGVGKYINPAATEQQRKSPQPVPLSPCPRRSPVGVLGTSAPGSSRLPDDH

SEQ ID NO: 28430 - protein, 28 aa, Artificial Sequence
  Synthetic polypeptide
HASSRFAPVPTWTRSIPSLDGLLGALTY

SEQ ID NO: 28431 - protein, 164 aa, Artificial Sequence
  Synthetic polypeptide
SQHFGRPRQADHEVRRSRPSSLTRFITFRSCAYLDKKHTIFGRVVGGFDVLTAMENVESDPKTDRPKEEIRIDATTVFVDPYEEADAQIAQERKTQLKVAPETKVKSSQPQAGSQGPQTFRQGVGKYINPAATKRAAEEEPSTSATVPMSKKKPSRGFGDFSSW

SEQ ID NO: 28432 - protein, 154 aa, Artificial Sequence
  Synthetic polypeptide
SQHFGRPRQADHEVRRSRPSSLTRFITFRSCAYLDKKHTIFGRVVGGFDVLTAMENVESDPKTDRPKEEIRIDATTVFVDPYEEADAQIAQERKTQLKEASSRGRALNQCHCPHVQEEAQSGFWGLQLLVAAATCRLYLCPSFSHQSLMLKLQA

SEQ ID NO: 28433 - protein, 41 aa, Artificial Sequence
  Synthetic polypeptide
GRARWLTPVIPALWEAEAGGSRGQEIETILANTLWTYWTKC

SEQ ID NO: 28434 - protein, 40 aa, Artificial Sequence
  Synthetic polypeptide
SQHFGRLRQADHEVRKSRPSWLTRSGLIGQNVDIQPTQED

SEQ ID NO: 28435 - protein, 76 aa, Artificial Sequence
  Synthetic polypeptide
HALDLLDKMLTFNPHKRIEVEQALAHPYLEQYYDPSDEPIAEAPFKFDMELDDLPKEKLKELIFEETARFQPGYRS

SEQ ID NO: 28436 - protein, 50 aa, Artificial Sequence
  Synthetic polypeptide
GLVMWLMPVILAHWEVNAGGSLEARNLRPAWTTYSGLIGQNVDIQPTQED

SEQ ID NO: 28437 - protein, 81 aa, Artificial Sequence
  Synthetic polypeptide
DLPGQHTLDLLDKMLTFNPHKRIEVEQALAHPYLEQYYDPSDEPIAEAPFKFDMELDDLPKEKLKELIFEETARFQPGYRS

SEQ ID NO: 28438 - protein, 19 aa, Artificial Sequence
  Synthetic polypeptide
GQEFETCLDNILWTYWTKC

SEQ ID NO: 28439 - protein, 16 aa, Artificial Sequence
  Synthetic polypeptide
FQHFGRPRQAGHQLCL

SEQ ID NO: 28440 - protein, 339 aa, Artificial Sequence
  Synthetic polypeptide
VAHACNSSTLGGQGRRVTSSAYDNVNKVRVAIKKISPFEHQTYCQRTLREIKILLRFRHENIIGINDIIRAPTIEQMKDVYIVQDLMETDLYKLLKTQHLSNDHICYFLYQILRGLKYIHSANVLHRDLKPSNLLLNTTCDLKICDFGLARVADPDHDHTGFLTEYVATRWYRAPEIMLNSKGYTKSIDIWSVGCILAEMLSNRPIFPGKHYLDQLNHILGILGSPSQEDLNCIINLKARNYLLSLPHKNKVPWNRLFPNADSKALDLLDKMLTFNPHKRIEVEQALAHPYLEQYYDPSDEPIAEAPFKFDMELDDLPKEKLKELIFEETARFQPGYRS

SEQ ID NO: 28441 - protein, 29 aa, Artificial Sequence
  Synthetic polypeptide
WLTPVIPALWEAKAGGSPALLMIMSTKFE

SEQ ID NO: 28442 - protein, 295 aa, Artificial Sequence
  Synthetic polypeptide
VAHACNSSTLGGQGRRVTSSAYDNVNKVRVAIKKISPFEHQTYCQRTLREIKILLRFRHENIIGINDIIRAPTIEQMKDVYIVQDLMETDLYKLLKTQHLSNDHICYFLYQILRGLKYIHSANVLHRDLKPSNLLLNTTCDLKICDFGLARVADPDHDHTGFLTEYVATRWYRAPEIMLNSKGYTKSIDIWSVGCILAEMLSNRPIFPGKHYLDQLNHILALDLLDKMLTFNPHKRIEVEQALAHPYLEQYYDPSDEPIAEAPFKFDMELDDLPKEKLKELIFEETARFQPGYRS

SEQ ID NO: 28443 - protein, 402 aa, Artificial Sequence
  Synthetic polypeptide
KQSPLPIPCLTLPSPSGKAPPPLAAALAHEAVSQLLQTDLSEFRKLPREEEEEEEDDDEEEKAPVTLLDAQSLAQSFFNRLWEVAGQWQKQVPLAARASQRQWLVSIHAIRNTRRKMEDRHVSLPSFNQLFGLSDPVNRAYFAVFDGHGGVDAARYAAVHVHTNAARQPELPTDPEGALREAFRRTDQMFLRKAKRERLQSGTTGVCALIAGATLHVAWLGDSQVILVQQGQVVKLMEPHRPERQDEKARIEALGGFVSHMDCWRVNGTLAVSRAIGDVFQKPYVSGEADAASRALTGSEDYLLLACDGFFDVVPHQEVVGLVQSHLTRQQGSGLRVAEELVAAARERGSHDNITVMVVFLRDPQELLEGGNQGEGDPQAEGRRQDLPSSLPEPETQAPPRS

SEQ ID NO: 28444 - protein, 54 aa, Artificial Sequence
  Synthetic polypeptide
LFHPHQGRPRHHLLLLWPTKQFHSCYRQTFPNSGSCPGRKKKRRRTMTRRKRPL

SEQ ID NO: 28445 - protein, 56 aa, Artificial Sequence
  Synthetic polypeptide
TEPIAHPLPDSSIPIREGPATTCCCSGPRSSFTAATDRPFRIQEVAQGGRRRGGGR

SEQ ID NO: 28446 - protein, 309 aa, Artificial Sequence
  Synthetic polypeptide
KQSPLPIPCLTLPSPSGKAPPPLAAALAHEAVSQLLQTDLSEFRKLPREEEEEEEDDDEEEKAPVTLLDAQSLAQSFFNRLWEVAGQWQKQVPLAARASQRQWLVSIHAIRNTRRKMEDRHVSLPSFNQLFGLSDPVNRAYFAVFDGHGGVDAARYAAVHVHTNAARQPELPTDPEGALREAFRRTDQMFLRKAKRERLQSGTTGVCALIAGATLHVAWLGDSQVILVQQGQVVKLMEPHRPERQDEKARIEALGGFVSHMDCWRVNGTLAVSRAIGESQRGRPKWEKVSRKPRPRVWPAAHQGFREAV

SEQ ID NO: 28447 - protein, 38 aa, Artificial Sequence
  Synthetic polypeptide
FKISSIQDGFHSEPIHQHECVDKPTETCGAGRAEPAEG

SEQ ID NO: 28448 - protein, 510 aa, Artificial Sequence
  Synthetic polypeptide
SRYLVYKMGSIQSRYISMSVWTSPRRLVELAGQSLLKDEALAIAALELLPRELFPPLFMAAFDGRHSQTLKAMVQAWPFTCLPLGVLMKGQHLHLETFKAVLDGLDVLLAQEVRPRRWKLQVLDLRKNSHQDFWTVWSGNRASLYSFPEPEAAQPMTKKRKVDGLSTEAEQPFIPVEVLVDLFLKEGACDELFSYLIEKVKRKKNVLRLCCKKLKIFAMPMQDIKMILKMVQLDSIEDLEVTCTWKLPTLAKFSPYLGQMINLRRLLLSHIHASSYISPEKEEQYIAQFTSQFLSLQCLQALYVDSLFFLRGRLDQLLRHVMNPLETLSITNCRLSEGDVMHLSQSPSVSQLSVLSLSGVMLTDVSPEPLQALLERASATLQDLVFDECGITDDQLLALLPSLSHCSQLTTLSFYGNSISISALQSLLQHLIGLSNLTHVLYPVPLESYEDIHGTLHLERLAYLHARLRELLCELGRPSMVWLSANPCPHCGDRTFYDPEPILCPCFMPN

SEQ ID NO: 28449 - protein, 13 aa, Artificial Sequence
  Synthetic polypeptide
YTRWVPFRADTSA

SEQ ID NO: 28450 - protein, 202 aa, Artificial Sequence
  Synthetic polypeptide
SRYLVYKMGSIQSRYISMSVWTSPRRLVELAGQSLLKDEALAIAALELLPRELFPPLFMAAFDGRHSQTLKAMVQAWPFTCLPLGVLMKGQHLHLETFKAVLDGLDVLLAQEVRPRRWKLQVLDLRKNSHQDFWTVWSGNRASLYSFPEPEAAQPMTKKRKVDGLSTEAEQPFIPVEVLVDLFLKEGACDELFSYLIEKVKR

SEQ ID NO: 28451 - protein, 166 aa, Artificial Sequence
  Synthetic polypeptide
SRYLVYKMGSIQSRYISMSVWTSPRRLVELAGQSLLKDEALAIAALELLPRELFPPLFMAAFDGRHSQTLKAMVQAWPFTCLPLGVLMKGQHLHLETFKAVLDGLDVLLAQEVRPRRWKLQVLDLRKNSHQDFWTVWSGNRASLYSFPEPEAAQPMTKKRKVDGLS

SEQ ID NO: 28452 - protein, 153 aa, Artificial Sequence
  Synthetic polypeptide
SRYLVYKMGSIQSRYISMSVWTSPRRLVELAGQSLLKDEALAIAALELLPRELFPPLFMAAFDGRHSQTLKAMVQAWPFTCLPLGVLMKGQHLHLETFKAVLDGLDVLLAQEVRPRRWKLQVLDLRKNSHQDFWTVWSGNRASLYSFPEPEAA

SEQ ID NO: 28453 - protein, 116 aa, Artificial Sequence
  Synthetic polypeptide
SRYLVYKMGSIQSRYISMSVWTSPRRLVELAGQSLLKDEALAIAALELLPRELFPPLFMAAFDGRHSQTLKAMVQAWPFTCLPLGVLMKGQHLHLETFKAVLDGLDVLLAQEVRPR

SEQ ID NO: 28454 - protein, 18 aa, Artificial Sequence
  Synthetic polypeptide
FKISSIQDGFHSEPIHQH

SEQ ID NO: 28455 - protein, 18 aa, Artificial Sequence
  Synthetic polypeptide
SRYLVYKMGSIQSRYISM

SEQ ID NO: 28456 - protein, 87 aa, Artificial Sequence
  Synthetic polypeptide
SRYLVYKMGSIQSRYISMSVWTSPRRLVELAGQSLLKDEALAIAALELLPRELFPPLFMAAFDGRHSQTLKAMVQAWPFTCLPLGVL

SEQ ID NO: 28457 - protein, 12 aa, Artificial Sequence
  Synthetic polypeptide
ACREKTRFCGFF

SEQ ID NO: 28458 - protein, 108 aa, Artificial Sequence
  Synthetic polypeptide
GTRGERAEKRPGSVVSSELTQDPAVSVALGQTVRITCQGDSLRSYYASWYQQKPGQAPVLVIYGKNNRPSGIPDRFSGSSSGNTASLTITGAQAEDEADYYCNSRDSS

SEQ ID NO: 28459 - protein, 28 aa, Artificial Sequence
  Synthetic polypeptide
EEEICTHRNEAPEVSVQRKDQVLWFLLS

SEQ ID NO: 28460 - protein, 18 aa, Artificial Sequence
  Synthetic polypeptide
LHCQSAITQVKVLWPPMS

SEQ ID NO: 28461 - protein, 110 aa, Artificial Sequence
  Synthetic polypeptide
SLPISHYTGEGSVASYELTQPLSVSVALGQTARITCGGNNIGSKNVHWYQQKPGQAPVLVIYRDSNRPSGIPERFSGSNSGNTATLTISRAQAGDEADYYCQVWDSSTAH

SEQ ID NO: 28462 - protein, 47 aa, Artificial Sequence
  Synthetic polypeptide
VPWNTSSPDEPESQKQQRCQGSNDQELSGNSALQACGPCDEEHAGPP

SEQ ID NO: 28463 - protein, 660 aa, Artificial Sequence
  Synthetic polypeptide
FHGTPALQTNLRARSNKDAKDPTTKNSLETLLYKPVDRVTRSTLVLHDLLKHTPASHPDHPLLQDALRISQNFLSSINEEITPRRQSMTVKKGEHRQLLKDSFMVELVEGARKLRHVFLFTDLLLCTKLKKQSGGKTQQYDCKWYIPLTDLSFQMVDELEAVPNIPLVPDEELDALKIKISQIKNDIQREKRANKGSKATERLKKKLSEQESLLLLMSPSMAFRVHSRNGKSYTFLISSDYERAEWRENIREQQKKCFRSFSLTSVELQMLTNSCVKLQTVHSIPLTINKEDDESPGLYGFLNVIVHSATGFKQSSNLYCTLEVDSFGYFVNKAKTRVYRDTAEPNWNEEFEIELEGSQTLRILCYEKCYNKTKIPKEDGESTDRLMGKGQVQLDPQALQDRDWQRTVIAMNGIEVKLSVKFNSREFSLKRMPSRKQTGVFGVKIAVVTKRERSKVPYIVRQCVEEIERRGMEEVGIYRVSGVATDIQALKAAFDVNNKDVSVMMSEMDVNAIAGTLKLYFRELPEPLFTDEFYPNFAEGIALSDPVAKESCMLNLLLSLPEANLLTFLFLLDHLKRVAEKEAVNKMSLHNLATVFGPTLLRPSEKESKLPANPSQPITMTDSWSLEVMSQVQVLLYFLQLEAIPAPDSKRQSILFSTEV

SEQ ID NO: 28464 - protein, 10 aa, Artificial Sequence
  Synthetic polypeptide
SMEHQLSRRT

SEQ ID NO: 28465 - protein, 616 aa, Artificial Sequence
  Synthetic polypeptide
FHGTPALQTNLRARSNKDAKDPTTKNSLETLLYKPVDRVTRSTLVLHDLLKHTPASHPDHPLLQDALRISQNFLSSINEEITPRRQSMTVKKGEHRQLLKDSFMVELVEGARKLRHVFLFTDLLLCTKLKKQSGGKTQQYDCKWYIPLTDLSFQMVDELEAVPNIPLVPDEELDALKIKISQIKNDIQREKRANKGSKATERLKKKLSEQESLLLLMSPSMAFRVHSRNGKSYTFLISSDYERAEWRENIREQQKKCFRSFSLTSVELQMLTNSCVKLQTVHSIPLTINKEDDESPGLYGFLNVIVHSATGFKQSSNLYCTLEVDSFGYFVNKAKTRVYRDTAEPNWNELDPQALQDRDWQRTVIAMNGIEVKLSVKFNSREFSLKRMPSRKQTGVFGVKIAVVTKRERSKVPYIVRQCVEEIERRGMEEVGIYRVSGVATDIQALKAAFDVNNKDVSVMMSEMDVNAIAGTLKLYFRELPEPLFTDEFYPNFAEGIALSDPVAKESCMLNLLLSLPEANLLTFLFLLDHLKRVAEKEAVNKMSLHNLATVFGPTLLRPSEKESKLPANPSQPITMTDSWSLEVMSQVQVLLYFLQLEAIPAPDSKRQSILFSTEV

SEQ ID NO: 28466 - protein, 162 aa, Artificial Sequence
  Synthetic polypeptide
FHGTPALQTNLRARSNKDAKDPTTKNSLETLLYKPVDRVTRSTLVLHDLLKHTPASHPDHPLLQDALRISQNFLSSINEEITPRRQSMTVKKGEHRQLLKDSFMVELVEGARKLRHVFLFTDLLLCTKLKKQSGGKTQQYDCKWYIPLTDLSFQMVDELEAV

SEQ ID NO: 28467 - protein, 63 aa, Artificial Sequence
  Synthetic polypeptide
GPVRWLTPAVLALRGAEVDHQNPVVQDQPGKNMREPSAHSGDCHPEHGRCGPVVPTAGDSDRR

SEQ ID NO: 28468 - protein, 65 aa, Artificial Sequence
  Synthetic polypeptide
FKTSLGKTCENPLPTVEIAIRNTGDADQWCPLLETLTDAEMEKKIRDQDRNTRRMRRLANTAPAW

SEQ ID NO: 28469 - protein, 43 aa, Artificial Sequence
  Synthetic polypeptide
GGSPEPSSSRPAWEKHARTLCPQWRLPSGTRAMRTSGAHCWRL

SEQ ID NO: 28470 - protein, 42 aa, Artificial Sequence
  Synthetic polypeptide
GRARWLTPVIPALWEAEVGGSRGQEIETILANTLGHPDLPEL

SEQ ID NO: 28471 - protein, 201 aa, Artificial Sequence
  Synthetic polypeptide
SQHFGRPRWADHEVRRSRPSWLTRSAILIYLSCKYQTPDHWYPSDLQARARVHEYLGWHADCIRGTFGIPLWVQVLGPLIGVQVPKEKVERNRTAMDQALQWLEDKFLGDRPFLAGQQVTLADLMALEELMQPVALGYELFEGRPRLAAWRGRVEAFLGAELCQEAHSIILSILEQAAKKTLPTPSPEAYQAMLLRIARIP

SEQ ID NO: 28472 - protein, 5 aa, Artificial Sequence
  Synthetic polypeptide
HARPS

SEQ ID NO: 28473 - protein, 187 aa, Artificial Sequence
  Synthetic polypeptide
SQHFGRPRWADHEVRRSRPSWLTRSAILIYLSCKYQTPDHWYPSDLQARARVHEYLGWHADCIRGTFGIPLWVQVLGPLIGVQVPKEKVERNRTAMDQALQWLEDKFLGDRPFLAGQQPVALGYELFEGRPRLAAWRGRVEAFLGAELCQEAHSIILSILEQAAKKTLPTPSPEAYQAMLLRIARIP

SEQ ID NO: 28474 - protein, 21 aa, Artificial Sequence
  Synthetic polypeptide
GSQNAKQKVQPRLGHPDLPEL

SEQ ID NO: 28475 - protein, 208 aa, Artificial Sequence
  Synthetic polypeptide
KANRSVYLTGRLLAYHRDEVLKMQSRRSSQDSAILIYLSCKYQTPDHWYPSDLQARARVHEYLGWHADCIRGTFGIPLWVQVLGPLIGVQVPKEKVERNRTAMDQALQWLEDKFLGDRPFLAGQQVTLADLMALEELMQPVALGYELFEGRPRLAAWRGRVEAFLGAELCQEAHSIILSILEQAAKKTLPTPSPEAYQAMLLRIARIP

SEQ ID NO: 28476 - protein, 40 aa, Artificial Sequence
  Synthetic polypeptide
VFSCAKRLTGVSTSQGGCWHITEMRFSKCKAEGPAKTRPS

SEQ ID NO: 28477 - protein, 194 aa, Artificial Sequence
  Synthetic polypeptide
KANRSVYLTGRLLAYHRDEVLKMQSRRSSQDSAILIYLSCKYQTPDHWYPSDLQARARVHEYLGWHADCIRGTFGIPLWVQVLGPLIGVQVPKEKVERNRTAMDQALQWLEDKFLGDRPFLAGQQPVALGYELFEGRPRLAAWRGRVEAFLGAELCQEAHSIILSILEQAAKKTLPTPSPEAYQAMLLRIARIP

SEQ ID NO: 28478 - protein, 2155 aa, Artificial Sequence
  Synthetic polypeptide
QCAVVAVSSGDEKEGLKHPGLILKYSTYKNLAQLAAQREDLETAMEFYLEAVMLDSTDVNLWYKIGHVALRLIRIPLARHAFEEGLRCNPDHWPCLDNLITVLYTLSDYTTCLYFICKALEKDCRYSKGLVLKEKIFEEQPCLRKDSLRMFLKCDMSIHDVSVSAAETQAIVDEALGLRKKRQALIVREKEPDLKLVQPIPFFTWKCLGESLLAMYNHLTTCEPPRPSLGKRIDLSDYQDPSQPLESSMVVTPVNVIQPSTVSTNPAVAVAEPVVSYTSVATTSFPLHSPGLLETGAPVGDISGGDKSKKGVKRKKISEESGETAKRRSARVRNTKCKKEEKVDFQELLMKFLPSRLRKLDPEEEDDSFNNYEVQSEAKLESFPSIGPQRLSFDSATFMESEKQDVHEFLLENLTNGGILELMMRYLKAMGHKFLVRWPPGLAEVVLSVYHSWRRHSTSLPNPLLRDCSNKHIKDMMLMSLSCMELQLDQWLLTKGRSSAVSPRNCPAGMVNGRFGPDFPGTHCLGDLLQLSFASSQRDLFEDGWLEFVVRVYWLKARFLALQGDMEQALENYDICTEMLQSSTAIQVEAGAERRDIVIRLPNLHNDSVVSLEEIDKNLKSLERCQSLEEIQRLYEAGDYKAVVHLLRPTLCTSGFDRAKHLEFMTSIPERPAQLLLLQDSLLRLKDYRQCFECSDVALNEAVQQMVNSGEAAAKEEWVATVTQLLMGIEQALSADSSGSILKVSSSTTGLVRLTNNLIQVIDCSMAVQEEAKEPHVSSVLPWIILHRIIWQEEDTFHSLCHQQQLQNPAEEGMSETPMLPSSLMLLNTAHEYLGRRSWCCNSDGALLRFYVRVLQKELAASTSEDTHPYKEELETALEQCFYCLYSFPSKKSKARYLEEHSAQQVDLIWEDALFMFEYFKPKTLPEFDSYKTSTVSADLANLLKRIATIVPRTERPALSLDKVSAYIEGTSTEVPCLPEGADPSPPVVNELYYLLADYHFKNKEQSKAIKFYMHDICICPNRFDSWAGMALARASRIQDKLNSNELKSDGPIWKHATPVLNCFRRALEIDSSNLSLWIEYGTMSYALHSFASRQLKQWRGELPPELVQQMEGRRDSMLETAKHCFTSAARCEGDGDEEEWLIHYMLGKVAEKQQQPPTVYLLHYRQAGHYLHEEAARYPKKIHYHNPPELAMEALEVYFRLHASILKLLGKPDSGVGAEVLVNFMKEAAEGPFARGEEKNTPKASEKEKACLVDEDSHSSAGTLPGPGASLPSSSGPGLTSPPYTATPIDHDYVKCKKPHQQATPDDRSQDSTAVALSDSSSTQDFFNEPTSLLEGSRKSYTEKRLPILSSQAGATGKDLQGATEERGKNEESLESTEGFRAAEQGVQKPAAETPASACIPGKPSASTPTLWDGKKRGDLPGEPVAFPQGLPAGAEEQRQFLTEQCIASFRLCLSRFPQHYKSLYRLAFLYTYSKTHRNLQWARDVLLGSSIPWQQLQHMPAQGLFCERNKTNFFNGIWRIPVDEIDRPGSFAWHMNRSIVLLLKVLAQLRDHSTLLKVSSMLQRTPDQGKKYLRDADRQVLAQRAFILTVKVLEDTLSELAEGSERPGPKVCGLPGARMTTDVSHKASPEDGQEGLPQPKKPPLADGSGPGPEPGGKVGLLNHRPVAMDAGDSADQSGERKDKESPRAGPTEPMDTSEATVCHSDLERTPPLLPGRPARDRGPESRPTELSLEELSISARQQPTPLTPAQPAPAPAPATTTGTRAGGHPEEPLSRLSRKRKLLEDTESGKTLLLDAYRVWQQGQKGVAYDLGRVERIMSETYMLIKQVDEEAALEQAVKFCQVHLGAAAQRQASGDTPTTPKHPKDSRENFFPVTVVPTAPDPVPADSVQRPSDAHTKPRPALAAATTIITCPPSASASTLDQSKDPGPPRPHRPEATPSMASLGPEGEELARVAEGTSFPPQEPRHSPQVKMAPTSSPAEPHCWPAEAALGTGAEPTCSQEGKLRPEPRRDGEAQEAASETQPLSSPPTAASSKAPSSGSAQPPEGHPGKPEPSRAKSRPLPNMPKLVIPSAATKFPPEITVTPPTPTLLSPKGSISEETKQKLKSAILSAQSAANVRKESLCQPALEVLETSSQESSLESETDEDDDYMDI

SEQ ID NO: 28479 - protein, 15 aa, Artificial Sequence
  Synthetic polypeptide
SVPWWQFHPVMRKRG

SEQ ID NO: 28480 - protein, 9 aa, Artificial Sequence
  Synthetic polypeptide
VCRGGSFIR

SEQ ID NO: 28481 - protein, 2076 aa, Artificial Sequence
  Synthetic polypeptide
QCAVVAVSSGDEKEGLKHPGLILKYSTYKNLAQLAAQREDLETAMEFYLEAVMLDSTDVNLWYKIGHVALRLIRIPLARHAFEEGLRCNPDHWPCLDNLITVLYTLSDYTTCLYFICKALEKDCRYSKGLVLKEKIFEEQPCLRKDSLRMFLKCWKCLGESLLAMYNHLTTCEPPRPSLGKRIDLSDYQDPSQPLESSMVVTPVNVIQPSTVSTNPAVAVAEPVVSYTSVATTSFPLHSPGLLETGAPVGDISGGDKSKKGVKRKKISEESGETAKRRSARVRNTKCKKEEKVDFQELLMKFLPSRLRKLDPEEEDDSFNNYEVQSEAKLESFPSIGPQRLSFDSATFMESEKQDVHEFLLENLTNGGILELMMRYLKAMGHKFLVRWPPGLAEVVLSVYHSWRRHSTSLPNPLLRDCSNKHIKDMMLMSLSCMELQLDQWLLTKGRSSAVSPRNCPAGMVNGRFGPDFPGTHCLGDLLQLSFASSQRDLFEDGWLEFVVRVYWLKARFLALQGDMEQALENYDICTEMLQSSTAIQVEAGAERRDIVIRLPNLHNDSVVSLEEIDKNLKSLERCQSLEEIQRLYEAGDYKAVVHLLRPTLCTSGFDRAKHLEFMTSIPERPAQLLLLQDSLLRLKDYRQCFECSDVALNEAVQQMVNSGEAAAKEEWVATVTQLLMGIEQALSADSSGSILKVSSSTTGLVRLTNNLIQVIDCSMAVQEEAKEPHVSSVLPWIILHRIIWQEEDTFHSLCHQQQLQNPAEEGMSETPMLPSSLMLLNTAHEYLGRRSWCCNSDGALLRFYVRVLQKELAASTSEDTHPYKEELETALEQCFYCLYSFPSKKSKARYLEEHSAQQVDLIWEDALFMFEYFKPKTLPEFDSYKTSTVSADLANLLKRIATIVPRTERPALSLDKVSAYIEGTSTEVPCLPEGADPSPPVVNELYYLLADYHFKNKEQSKAIKFYMHDICICPNRFDSWAGMALARASRIQDKLNSNELKSDGPIWKHATPVLNCFRRALEIDSSNLSLWIEYGTMSYALHSFASRQLKQWRGELPPELVQQMEGRRDSMLETAKHCFTSAARCEGDGDEEEWLIHYMLGKVAEKQQQPPTVYLLHYRQAGHYLHEEAARYPKKIHYHNPPELAMEALEVYFRLHASILKLLGKPDSGVGAEVLVNFMKEAAEGPFARGEEKNTPKASEKEKACLVDEDSHSSAGTLPGPGASLPSSSGPDRSQDSTAVALSDSSSTQDFFNEPTSLLEGSRKSYTEKRLPILSSQAGATGKDLQGATEERGKNEESLESTEGFRAAEQGVQKPAAETPASACIPGKPSASTPTLWDGKKRGDLPGEPVAFPQGLPAGAEEQRQFLTEQCIASFRLCLSRFPQHYKSLYRLAFLYTYSKTHRNLQWARDVLLGSSIPWQQLQHMPAQGLFCERNKTNFFNGIWRIPVDEIDRPGSFAWHMNRSIVLLLKVLAQLRDHSTLLKVSSMLQRTPDQGKKYLRDADRQVLAQRAFILTVKVLEDTLSELAEGSERPGPKVCGLPGARMTTDVSHKASPEDGQEGLPQPKKPPLADGSGPGPEPGGKVGLLNHRPVAMDAGDSADQSGERKDKESPRAGPTEPMDTSEATVCHSDLERTPPLLPGRPARDRGPESRPTELSLEELSISARQQPTPLTPAQPAPAPAPATTTGTRAGGHPEEPLSRLSRKRKLLEDTESGKTLLLDAYRVWQQGQKGVAYDLGRVERIMSETYMLIKQVDEEAALEQAVKFCQVHLGAAAQRQASGDTPTTPKHPKDSRENFFPVTVVPTAPDPVPADSVQRPSDAHTKPRPALAAATTIITCPPSASASTLDQSKDPGPPRPHRPEATPSMASLGPEGEELARVAEGTSFPPQEPRHSPQVKMAPTSSPAEPHCWPAEAALGTGAEPTCSQEGKLRPEPRRDGEAQEAASETQPLSSPPTAASSKAPSSGSAQPPEGHPGKPEPSRAKSRPLPNMPKLVIPSAATKFPPEITVTPPTPTLLSPKGSISEETKQKLKSAILSAQSAANVRKESLCQPALEVLETSSQESSLESETDEDDDYMDI

SEQ ID NO: 28482 - protein, 95 aa, Artificial Sequence
  Synthetic polypeptide
PTRCEYSRRNWLHPPLKTRTLTRRSWRQPWSSASTACTASPARRVRPGTWRNTRPSRWILYGRMHCSCLSILSPRPFLNLTAIRPAPCLLTWPTY

SEQ ID NO: 28483 - protein, 37 aa, Artificial Sequence
  Synthetic polypeptide
SQHFGRLRRVDHLRSGVRDQPDQQGASTPEGTGCIHL

SEQ ID NO: 28484 - protein, 1315 aa, Artificial Sequence
  Synthetic polypeptide
DQEFETSLTNKVRVLQKELAASTSEDTHPYKEELETALEQCFYCLYSFPSKKSKARYLEEHSAQQVDLIWEDALFMFEYFKPKTLPEFDSYKTSTVSADLANLLKRIATIVPRTERPALSLDKVSAYIEGTSTEVPCLPEGADPSPPVVNELYYLLADYHFKNKEQSKAIKFYMHDICICPNRFDSWAGMALARASRIQDKLNSNELKSDGPIWKHATPVLNCFRRALEIDSSNLSLWIEYGTMSYALHSFASRQLKQWRGELPPELVQQMEGRRDSMLETAKHCFTSAARCEGDGDEEEWLIHYMLGKVAEKQQQPPTVYLLHYRQAGHYLHEEAARYPKKIHYHNPPELAMEALEVYFRLHASILKLLGKPDSGVGAEVLVNFMKEAAEGPFARGEEKNTPKASEKEKACLVDEDSHSSAGTLPGPGASLPSSSGPGLTSPPYTATPIDHDYVKCKKPHQQATPDDRSQDSTAVALSDSSSTQDFFNEPTSLLEGSRKSYTEKRLPILSSQAGATGKDLQGATEERGKNEESLESTEGFRAAEQGVQKPAAETPASACIPGKPSASTPTLWDGKKRGDLPGEPVAFPQGLPAGAEEQRQFLTEQCIASFRLCLSRFPQHYKSLYRLAFLYTYSKTHRNLQWARDVLLGSSIPWQQLQHMPAQGLFCERNKTNFFNGIWRIPVDEIDRPGSFAWHMNRSIVLLLKVLAQLRDHSTLLKVSSMLQRTPDQGKKYLRDADRQVLAQRAFILTVKVLEDTLSELAEGSERPGPKVCGLPGARMTTDVSHKASPEDGQEGLPQPKKPPLADGSGPGPEPGGKVGLLNHRPVAMDAGDSADQSGERKDKESPRAGPTEPMDTSEATVCHSDLERTPPLLPGRPARDRGPESRPTELSLEELSISARQQPTPLTPAQPAPAPAPATTTGTRAGGHPEEPLSRLSRKRKLLEDTESGKTLLLDAYRVWQQGQKGVAYDLGRVERIMSETYMLIKQVDEEAALEQAVKFCQVHLGAAAQRQASGDTPTTPKHPKDSRENFFPVTVVPTAPDPVPADSVQRPSDAHTKPRPALAAATTIITCPPSASASTLDQSKDPGPPRPHRPEATPSMASLGPEGEELARVAEGTSFPPQEPRHSPQVKMAPTSSPAEPHCWPAEAALGTGAEPTCSQEGKLRPEPRRDGEAQEAASETQPLSSPPTAASSKAPSSGSAQPPEGHPGKPEPSRAKSRPLPNMPKLVIPSAATKFPPEITVTPPTPTLLSPKGSISEETKQKLKSAILSAQSAANVRKESLCQPALEVLETSSQESSLESETDEDDDYMDI

SEQ ID NO: 28485 - protein, 1286 aa, Artificial Sequence
  Synthetic polypeptide
DQEFETSLTNKVRVLQKELAASTSEDTHPYKEELETALEQCFYCLYSFPSKKSKARYLEEHSAQQVDLIWEDALFMFEYFKPKTLPEFDSYKTSTVSADLANLLKRIATIVPRTERPALSLDKVSAYIEGTSTEVPCLPEGADPSPPVVNELYYLLADYHFKNKEQSKAIKFYMHDICICPNRFDSWAGMALARASRIQDKLNSNELKSDGPIWKHATPVLNCFRRALEIDSSNLSLWIEYGTMSYALHSFASRQLKQWRGELPPELVQQMEGRRDSMLETAKHCFTSAARCEGDGDEEEWLIHYMLGKVAEKQQQPPTVYLLHYRQAGHYLHEEAARYPKKIHYHNPPELAMEALEVYFRLHASILKLLGKPDSGVGAEVLVNFMKEAAEGPFARGEEKNTPKASEKEKACLVDEDSHSSAGTLPGPGASLPSSSGPDRSQDSTAVALSDSSSTQDFFNEPTSLLEGSRKSYTEKRLPILSSQAGATGKDLQGATEERGKNEESLESTEGFRAAEQGVQKPAAETPASACIPGKPSASTPTLWDGKKRGDLPGEPVAFPQGLPAGAEEQRQFLTEQCIASFRLCLSRFPQHYKSLYRLAFLYTYSKTHRNLQWARDVLLGSSIPWQQLQHMPAQGLFCERNKTNFFNGIWRIPVDEIDRPGSFAWHMNRSIVLLLKVLAQLRDHSTLLKVSSMLQRTPDQGKKYLRDADRQVLAQRAFILTVKVLEDTLSELAEGSERPGPKVCGLPGARMTTDVSHKASPEDGQEGLPQPKKPPLADGSGPGPEPGGKVGLLNHRPVAMDAGDSADQSGERKDKESPRAGPTEPMDTSEATVCHSDLERTPPLLPGRPARDRGPESRPTELSLEELSISARQQPTPLTPAQPAPAPAPATTTGTRAGGHPEEPLSRLSRKRKLLEDTESGKTLLLDAYRVWQQGQKGVAYDLGRVERIMSETYMLIKQVDEEAALEQAVKFCQVHLGAAAQRQASGDTPTTPKHPKDSRENFFPVTVVPTAPDPVPADSVQRPSDAHTKPRPALAAATTIITCPPSASASTLDQSKDPGPPRPHRPEATPSMASLGPEGEELARVAEGTSFPPQEPRHSPQVKMAPTSSPAEPHCWPAEAALGTGAEPTCSQEGKLRPEPRRDGEAQEAASETQPLSSPPTAASSKAPSSGSAQPPEGHPGKPEPSRAKSRPLPNMPKLVIPSAATKFPPEITVTPPTPTLLSPKGSISEETKQKLKSAILSAQSAANVRKESLCQPALEVLETSSQESSLESETDEDDDYMDI

SEQ ID NO: 28486 - protein, 862 aa, Artificial Sequence
  Synthetic polypeptide
LENCHGGNIYTPEINRSQDSTAVALSDSSSTQDFFNEPTSLLEGSRKSYTEKRLPILSSQAGATGKDLQGATEERGKNEESLESTEGFRAAEQGVQKPAAETPASACIPGKPSASTPTLWDGKKRGDLPGEPVAFPQGLPAGAEEQRQFLTEQCIASFRLCLSRFPQHYKSLYRLAFLYTYSKTHRNLQWARDVLLGSSIPWQQLQHMPAQGLFCERNKTNFFNGIWRIPVDEIDRPGSFAWHMNRSIVLLLKVLAQLRDHSTLLKVSSMLQRTPDQGKKYLRDADRQVLAQRAFILTVKVLEDTLSELAEGSERPGPKVCGLPGARMTTDVSHKASPEDGQEGLPQPKKPPLADGSGPGPEPGGKVGLLNHRPVAMDAGDSADQSGERKDKESPRAGPTEPMDTSEATVCHSDLERTPPLLPGRPARDRGPESRPTELSLEELSISARQQPTPLTPAQPAPAPAPATTTGTRAGGHPEEPLSRLSRKRKLLEDTESGKTLLLDAYRVWQQGQKGVAYDLGRVERIMSETYMLIKQVDEEAALEQAVKFCQVHLGAAAQRQASGDTPTTPKHPKDSRENFFPVTVVPTAPDPVPADSVQRPSDAHTKPRPALAAATTIITCPPSASASTLDQSKDPGPPRPHRPEATPSMASLGPEGEELARVAEGTSFPPQEPRHSPQVKMAPTSSPAEPHCWPAEAALGTGAEPTCSQEGKLRPEPRRDGEAQEAASETQPLSSPPTAASSKAPSSGSAQPPEGHPGKPEPSRAKSRPLPNMPKLVIPSAATKFPPEITVTPPTPTLLSPKGSISEETKQKLKSAILSAQSAANVRKESLCQPALEVLETSSQESSLESETDEDDDYMDI

SEQ ID NO: 28487 - protein, 28 aa, Artificial Sequence
  Synthetic polypeptide
QQHVGNLKIAMVGIFTLQKSTEARTAQP

SEQ ID NO: 28488 - protein, 26 aa, Artificial Sequence
  Synthetic polypeptide
KLPWWEYLHSRNQPKPGQHSRSTLRL

SEQ ID NO: 28489 - protein, 26 aa, Artificial Sequence
  Synthetic polypeptide
SNLSCSIETFHKWTNLNIQTPDSPVR

SEQ ID NO: 28490 - protein, 9 aa, Artificial Sequence
  Synthetic polypeptide
FVMQHRDIP

SEQ ID NO: 28491 - protein, 272 aa, Artificial Sequence
  Synthetic polypeptide
LMALSLPRISMPFAFCTREKLPWTEFAESAEDGPTTRFCQKLAKNHDMVVVSPILERDSEHGDVLWNTAVVISNSGAVLGKTRKNHIPRVGDFNESTYYMEGNLGHPVFQTQFGRIAVNICYGRHHPLNWLMYSINGAEIIFNPSATIGALSESLWPIEARNAAIANHCFTCAINRVGTEHFPNEFTSGDGKKAHQDFGYFYGSSYVAAPDSSRTPGLSRSRDGLLVAKLDLNLCQQVNDVWNFKMTGRYEMYARELAEAVKSNYSPTIVKE

SEQ ID NO: 28492 - protein, 87 aa, Artificial Sequence
  Synthetic polypeptide
LFISPSSDLGTEDCPPDSWHSPCPGSLCPLPSVRERSFLGQNLLSQQRMGPPPDSVRSWRRTMTWWWCLPSWNETASMGMFCGIQPW

SEQ ID NO: 28493 - protein, 50 aa, Artificial Sequence
  Synthetic polypeptide
LPHTLSDSSFLPHLTWGQRTALLTHGTLLAQDLYALCLLYEREASLDRIC

SEQ ID NO: 28494 - protein, 191 aa, Artificial Sequence
  Synthetic polypeptide
ESEACGSRGQEMETILANMTPTFSFGILTYCSWPQGNSWNQSCVTFSSLEDIPDFAWKVSAVMLLGGWLLLAFNAIFLLSWAVAPKGLCPRRSSVPMPGVQAVAATAMIVGLLIFPIGLASPFIKEVCEASSMYYGGKCRLGWGYMTAILNAVLASLLPIISWPHTTKVQGRTIIFSSATERIIFVPEMNK

SEQ ID NO: 28495 - protein, 66 aa, Artificial Sequence
  Synthetic polypeptide
PGAVAHACNPSTLGVRGVRITRSGDGDHPGQHDPDLLLWHPHLLLLASGQQLEPELRDLQFPGGYS

SEQ ID NO: 28496 - protein, 29 aa, Artificial Sequence
  Synthetic polypeptide
QTKSSSTSKRLIHHDQYPECDAEVPCREK

SEQ ID NO: 28497 - protein, 655 aa, Artificial Sequence
  Synthetic polypeptide
FIMISIRSVMQKYLAERNEITFDKIFNQKIGFLLFKDFCLNEINEAVPQVKFYEEIKEYEKLDNEEDRLCRSRQIYDAYIMKELLSCSHPFSKQAVEHVQSHLSKKQVTSTLFQPYIEEICESLRGDIFQKFMESDKFTRFCQWKNVELNIHLTMNEFSVHRIIGRGGFGEVYGCRKADTGKMYAMKCLDKKRIKMKQGETLALNERIMLSLVSTGDCPFIVCMTYAFHTPDKLCFILDLMNGGDLHYHLSQHGVFSEKEMRFYATEIILGLEHMHNRFVVYRDLKPANILLDEHGHARISDLGLACDFSKKKPHASVGTHGYMAPEVLQKGTAYDSSADWFSLGCMLFKLLRGHSPFRQHKTKDKHEIDRMTLTVNVELPDTFSPELKSLLEGLLQRDVSKRLGCHGGGSQEVKEHSFFKGVDWQHVYLQKYPPPLIPPRGEVNAADAFDIGSFDEEDTKGIKLLDCDQELYKNFPLVISERWQQEVTETVYEAVNADTDKIEARKRAKNKQLGHEEDYALGKDCIMHGYMLKLGNPFLTQWQRRYFYLFPNRLEWRGEGESRQNLLTMEQILSVEETQIKDKKCILFRIKGGKQFVLQCESDPEFVQWKKELNETFKEAQRLLRRAPKFLNKPRSGTVELPKPSLCHRNSNGL

SEQ ID NO: 28498 - protein, 5 aa, Artificial Sequence
  Synthetic polypeptide
SVSGV

SEQ ID NO: 28499 - protein, 34 aa, Artificial Sequence
  Synthetic polypeptide
FIMISIRSVMQKYLAERNEITFDKIFNQKIDKGI

SEQ ID NO: 28500 - protein, 1843 aa, Artificial Sequence
  Synthetic polypeptide
SQHFGRLRRVDHETMLLEKSRVARQPEGESNFLVFSQMLAGLDLDLRTELNLHQMADSSSFGMGVWSKPEDKQKAAAAFAQLQGAMEMLGISESEQRAVWRVLAAIYHLGAAGACKVGRKQFMRFEWANYAAEALGCEYEELNTATFKHHLRQIIQQMTFGPSRWGLEDEETSSGLKMTGVDCVEGMASGLYQELFAAVVSLINRSFSSHHLSMASIMVVDSPGFQNPRHQGKDRAATFEELCHNYAHERLQLLFYQRTFVSTLQRYQEEGVPVQFDLPDPSPGTTVAVVDQNPSQVRLPAGGGAQDARGLFWVLDEEVHVEGSSDSVVLERLCAAFEKKGAGTEGSSALRTCEQPLQCEIFHQLGWDPVRYDLTGWLHRAKPNLSALDAPQVLHQSKREELRSLFQARAKLPPVCRAVAGLEGTSQQALQRSRMVRRTFASSLAAVRRKAPCSQIKLQMDALTSMIKRSRLHFIHCLVPNPVVESRSGQESPPPPQPGRDKPGAGGPLALDIPALRVQLAGFHILEALRLHRTGYADHMGLTRFRRQFQVLDAPLLKKLMSTSEGIDERKAVEELLETLDLEKKAVAVGHSQVFLKAGVISRLEKQREKLVSQSIVLFQAACKGFLSRQEFKKLKIRRLAAQCIQKNVAVFLAVKDWPWWQLLGSLQPLLSATIGTEQLRAKEEELTTLRRKLEKSEKLRNELRQNTDLLESKIADLTSDLADERFKGDVACQVLESERAERLQAFREVQELKSKHEQVQKKLGDVNKQLEEAQQKIQLNDLERNPTGGADEWQMRFDCAQMENEFLRKRLQQCEERLDSELTARKELEQKLGELQSAYDGAKKMAHQLKRKCHHLTCDLEDTCVLLENQQSRNHELEKKQKKFDLQLAQALGESVFEKGLREKVTQENTSVRWELGQLQQQLKQKEQEASQLKQQVEMLQDHKRELLGSPSLGENCVAGLKERLWKLESSALEQQKIQSQQENTIKQLEQLRQRFELEIERMKQMHQKDREDQEEELEDVRQSCQKRLHQLEMQLEQEYEEKQMVLHEKQDLEGLIGTLCDQIGHRDFDVEKRLRRDLRRTHALLSDVQLLLGTMEDGKTSVSKEELEKVHSQLEQSEAKCEEALKTQKVLTADLESMHSELENMTRNKSLVDEQLYRLQFEKADLLKRIDEDQDDLNELMQKHKDLIAQSAADIGQIQELQLQLEEAKKEKHKLQEQLQVAQMRIEYLEQSTVDRAIVSRQEAVICDLENKTEFQKVQIKRFEVLVIRLRDSLIKMGEELSQAATSESQQRESSQYYQRRLEELKADMEELVQREAEASRRCMELEKYVEELAAVRQTLQTDLETSIRRIADLQAALEEVASSDSDTESVQTAVDCGSSGRKEMDNVSILSSQPEGSLQSWLSCTLSLATDTMRTPSRQSATSSRILSPRINEEAGDTERTQSALALSRARSTNVHSKTSGDKPVSPHFVRRQKYCHFGDGEVLAVQRKSTERLEPASSPLASRSTNTSPLSREKLPSPSAALSEFVEGLRRKRAQRGQGSTLGLEDWPTLPIYQTTGASTLRRGRAGSDEGNLSLRVGAKSPLEIEGAAGGLLRSTSLKCISSDGVGGTTLLPEKSKTQFSSCESLLESRPSMGRKLSSPTTPRDMLLSPTLRPRRRCLESSVDDAGCPDLGKEPLVFQNRQFAHLMEEPLGSDPFSWKLPSLDYERKTKVDFDDFLPAIRKPQTPTSLAGSAKGGQDGSQRSSIHFETEEANRSFLSGIKTILKKSPEPKEDPAHLSDSSSSSGSIVSFKSADSIKSRPGIPRLAGDGGERTSPERREPGTGRKDDDVASIMKKYLQK

SEQ ID NO: 28501 - protein, 42 aa, Artificial Sequence
  Synthetic polypeptide
DGWIMRQCFWRRAAWHGSRKGKVTSWFSPRCWLDWTWISGRS

SEQ ID NO: 28502 - protein, 1844 aa, Artificial Sequence
  Synthetic polypeptide
SQHFGRLRRVDHETMLLEKSRVARQPEGESNFLVFSQMLAGLDLDLRTELNLHQMADSSSFGMGVWSKPEDKQKAAAAFAQLQGAMEMLGISESEQRAVWRVLAAIYHLGAAGACKVGRKQFMRFEWANYAAEALGCEYEELNTATFKHHLRQIIQQMTFGPSRWGLEDEETSSGLKMTGVDCVEGMASGLYQELFAAVVSLINRSFSSHHLSMASIMVVDSPGFQNPRHQGKDRAATFEELCHNYAHERLQLLFYQRTFVSTLQRYQEEGVPVQFDLPDPSPGTTVAVVDQNPSQQVRLPAGGGAQDARGLFWVLDEEVHVEGSSDSVVLERLCAAFEKKGAGTEGSSALRTCEQPLQCEIFHQLGWDPVRYDLTGWLHRAKPNLSALDAPQVLHQSKREELRSLFQARAKLPPVCRAVAGLEGTSQQALQRSRMVRRTFASSLAAVRRKAPCSQIKLQMDALTSMIKRSRLHFIHCLVPNPVVESRSGQESPPPPQPGRDKPGAGGPLALDIPALRVQLAGFHILEALRLHRTGYADHMGLTRFRRQFQVLDAPLLKKLMSTSEGIDERKAVEELLETLDLEKKAVAVGHSQVFLKAGVISRLEKQREKLVSQSIVLFQAACKGFLSRQEFKKLKIRRLAAQCIQKNVAVFLAVKDWPWWQLLGSLQPLLSATIGTEQLRAKEEELTTLRRKLEKSEKLRNELRQNTDLLESKIADLTSDLADERFKGDVACQVLESERAERLQAFREVQELKSKHEQVQKKLGDVNKQLEEAQQKIQLNDLERNPTGGADEWQMRFDCAQMENEFLRKRLQQCEERLDSELTARKELEQKLGELQSAYDGAKKMAHQLKRKCHHLTCDLEDTCVLLENQQSRNHELEKKQKKFDLQLAQALGESVFEKGLREKVTQENTSVRWELGQLQQQLKQKEQEASQLKQQVEMLQDHKRELLGSPSLGENCVAGLKERLWKLESSALEQQKIQSQQENTIKQLEQLRQRFELEIERMKQMHQKDREDQEEELEDVRQSCQKRLHQLEMQLEQEYEEKQMVLHEKQDLEGLIGTLCDQIGHRDFDVEKRLRRDLRRTHALLSDVQLLLGTMEDGKTSVSKEELEKVHSQLEQSEAKCEEALKTQKVLTADLESMHSELENMTRNKSLVDEQLYRLQFEKADLLKRIDEDQDDLNELMQKHKDLIAQSAADIGQIQELQLQLEEAKKEKHKLQEQLQVAQMRIEYLEQSTVDRAIVSRQEAVICDLENKTEFQKVQIKRFEVLVIRLRDSLIKMGEELSQAATSESQQRESSQYYQRRLEELKADMEELVQREAEASRRCMELEKYVEELAAVRQTLQTDLETSIRRIADLQAALEEVASSDSDTESVQTAVDCGSSGRKEMDNVSILSSQPEGSLQSWLSCTLSLATDTMRTPSRQSATSSRILSPRINEEAGDTERTQSALALSRARSTNVHSKTSGDKPVSPHFVRRQKYCHFGDGEVLAVQRKSTERLEPASSPLASRSTNTSPLSREKLPSPSAALSEFVEGLRRKRAQRGQGSTLGLEDWPTLPIYQTTGASTLRRGRAGSDEGNLSLRVGAKSPLEIEGAAGGLLRSTSLKCISSDGVGGTTLLPEKSKTQFSSCESLLESRPSMGRKLSSPTTPRDMLLSPTLRPRRRCLESSVDDAGCPDLGKEPLVFQNRQFAHLMEEPLGSDPFSWKLPSLDYERKTKVDFDDFLPAIRKPQTPTSLAGSAKGGQDGSQRSSIHFETEEANRSFLSGIKTILKKSPEPKEDPAHLSDSSSSSGSIVSFKSADSIKSRPGIPRLAGDGGERTSPERREPGTGRKDDDVASIMKKYLQK

SEQ ID NO: 28503 - protein, 74 aa, Artificial Sequence
  Synthetic polypeptide
SQHFGRLRRVDHETMLLEKSRVARQPEGESNFLVFSQMLAGLDLDLRTELNLHQMADSSSFGMGVWSKWVGSSS

SEQ ID NO: 28504 - protein, 17 aa, Artificial Sequence
  Synthetic polypeptide
RVNVGRTCLSLISGVQH

SEQ ID NO: 28505 - protein, 271 aa, Artificial Sequence
  Synthetic polypeptide
RRKDLFISDFWSSALETINRCLTKHLEQLKAPVGTLSDIFGNLHLDSLPEESDVATDSIPREILVTGTCHLKCVCYGIGNFATCIVARNQLTFLLLLLEKCQIPRSHCWVYDPLFSQLEIEVLNTLGVTVLSENEEGKRSIRGEPTIFYMLHCGTALYNNLLWSNWSVDALSKMVIIGNSFKGLEERLLARILQKNYPYIAKILKGLEELEFPQTSQYMDIFNDTSVHWFPVQKLEQLSIDIWEFREEPDYQDCEDLEIIRNKREDPSATD

SEQ ID NO: 28506 - protein, 7 aa, Artificial Sequence
  Synthetic polypeptide
AVEPRGP

SEQ ID NO: 28507 - protein, 789 aa, Artificial Sequence
  Synthetic polypeptide
RQARGLTSSTPEFEPYEQWNLGARDYSAPVNFISAGLKKGAAEEAELEDSDDEEKPVKQDDFPKDFGPRKLKTGGNFKPSQKGFAGGTKSFMDFGSWERHTKGIGQKLLQKMGYVPGRGLGKNAQGIINPIEAKQRKGKGAVGAYGSERTTQSMQDFPVVDSEEEAEEEFQKELSQWRKDPSGSKKKPKYSYKTVEELKAKGRISKKLTAPQKELSQVKVIDMTGREQKVYYSYSQISHKHNVPDDGLPLQSQQLPQSGKEAKAPGFALPELEHNLQLLIDLTEQEIIQNDRQLQYERDMVVNLFHELEKMTEVLDHEERVISNLSKVLEMVEECERRMQPDCSNPLTLDECARIFETLQDKYYEEYRMSDRVDLAVAIVYPLMKEYFKEWDPLKDCTYGTEIISKWKSLLENDQLLSHGGQDLSADAFHRLIWEVWMPFVRNIVTQWQPRNCDPMVDFLDSWVHIIPVWILDNILDQLIFPKLQKEVENWNPLTDTVPIHSWIHPWLPLMQARLEPLYSPIRSKLSSALQKWHPSDSSAKLILQPWKDVFTPGSWEAFMVKNIVPKLGMCLGELVINPHQQHMDAFYWVIDWEGMISVSSLVGLLEKHFFPKWLQVLCSWLSNSPNYEEITKWYLGWKSMFSDQVLAHPSVKDKFNEALDIMNRAVSSNVGAYMQPGARENIAYLTHTERRKDFQYEAMQERREAENMAQRGIGVAASSVPMNFKDLIETKAEEHNIVFMPVIGKRHEGKQLYTFGRIVIYIDRGVVFVQGEKTWVPTSLQSLIDMAK

SEQ ID NO: 28508 - protein, 73 aa, Artificial Sequence
  Synthetic polypeptide
RQARGLTSSTPEFEPYEQWNLGARDYSAPVNFISAGLKKGAAEEAELEDSDDEEKPVKQDDFPKDFGPRKLKT

SEQ ID NO: 28509 - protein, 40 aa, Artificial Sequence
  Synthetic polypeptide
RQARGLTSSTPEFEPYEQWNLGARDYSAPVNFISAGLKKG

SEQ ID NO: 28510 - protein, 38 aa, Artificial Sequence
  Synthetic polypeptide
RQARGLTSSTPEFEPYEQWNLGARDYSAPVNFISAGLK

SEQ ID NO: 28511 - protein, 51 aa, Artificial Sequence
  Synthetic polypeptide
GRARWLTPVIPALWEAKAGGSRGQEMKTTLANTQSACIREDDCSRGLLGVS

SEQ ID NO: 28512 - protein, 212 aa, Artificial Sequence
  Synthetic polypeptide
RPPWLTRKVPAFVRMIAPEGSLVFHEKAWNAYPYCRTIVTNEYMKDDFFIKIETWHKPDLGTLENVHGLDPNTWKTVEIVHIDIADRSQVEPADYKADEDPALFQSVKTKRGPLGPNWKKELANSPDCPQMCAYKLVTIKFKWWGLQSKVENFIQKQEKRIFTNFHRQLFCWIDKWIDLTMEDIRRMEDETQKELETMRKRGSVRGTSAADV

SEQ ID NO: 28513 - protein, 7 aa, Artificial Sequence
  Synthetic polypeptide
HAKCLHS

SEQ ID NO: 28514 - protein, 213 aa, Artificial Sequence
  Synthetic polypeptide
RPPWLTRKVPAFVRMIAPEGSLVFHEKAWNAYPYCRTIVTNEYMKDDFFIKIETWHKPDLGTLENVHGLDPNTWKTVEIVHIDIADRSQVEPADYKADEDPALFQSVKTKRGPLGPNWKKELANSPDCPQMCAYKLVTIKFKWWGLQSKVENFIQKQEKRIFTNFHRQLFCWIDKWIDLTMEDIRRMEDETQKELETLRNQGQVRGTSAASDE

SEQ ID NO: 28515 - protein, 106 aa, Artificial Sequence
  Synthetic polypeptide
RPPWLTRKVPAFVRMIAPEGSLVFHEKAWNAYPYCRTIVTNEYMKDDFFIKIETWHKPDLGTLENVHGLDPNTWKTVEIVHIDIADRSQVEPADYKADEDPALFQS

SEQ ID NO: 28516 - protein, 28 aa, Artificial Sequence
  Synthetic polypeptide
GRARWLTPVIPALWEAKAGGSRAKCLHS

SEQ ID NO: 28517 - protein, 31 aa, Artificial Sequence
  Synthetic polypeptide
YQHFGRPRRADHEQSACIREDDCSRGLLGVS

SEQ ID NO: 28518 - protein, 227 aa, Artificial Sequence
  Synthetic polypeptide
PGAVAHACNTSTLGGQGGRITSKVPAFVRMIAPEGSLVFHEKAWNAYPYCRTIVTNEYMKDDFFIKIETWHKPDLGTLENVHGLDPNTWKTVEIVHIDIADRSQVEPADYKADEDPALFQSVKTKRGPLGPNWKKELANSPDCPQMCAYKLVTIKFKWWGLQSKVENFIQKQEKRIFTNFHRQLFCWIDKWIDLTMEDIRRMEDETQKELETMRKRGSVRGTSAADV

SEQ ID NO: 28519 - protein, 228 aa, Artificial Sequence
  Synthetic polypeptide
PGAVAHACNTSTLGGQGGRITSKVPAFVRMIAPEGSLVFHEKAWNAYPYCRTIVTNEYMKDDFFIKIETWHKPDLGTLENVHGLDPNTWKTVEIVHIDIADRSQVEPADYKADEDPALFQSVKTKRGPLGPNWKKELANSPDCPQMCAYKLVTIKFKWWGLQSKVENFIQKQEKRIFTNFHRQLFCWIDKWIDLTMEDIRRMEDETQKELETLRNQGQVRGTSAASDE

SEQ ID NO: 28520 - protein, 121 aa, Artificial Sequence
  Synthetic polypeptide
PGAVAHACNTSTLGGQGGRITSKVPAFVRMIAPEGSLVFHEKAWNAYPYCRTIVTNEYMKDDFFIKIETWHKPDLGTLENVHGLDPNTWKTVEIVHIDIADRSQVEPADYKADEDPALFQS

SEQ ID NO: 28521 - protein, 48 aa, Artificial Sequence
  Synthetic polypeptide
GQARWLTLVIPALWEAEAGRLRGQEIETTLQSACIREDDCSRGLLGVS

SEQ ID NO: 28522 - protein, 226 aa, Artificial Sequence
  Synthetic polypeptide
SQHFGRLRRADYEVKRSRPPCKVPAFVRMIAPEGSLVFHEKAWNAYPYCRTIVTNEYMKDDFFIKIETWHKPDLGTLENVHGLDPNTWKTVEIVHIDIADRSQVEPADYKADEDPALFQSVKTKRGPLGPNWKKELANSPDCPQMCAYKLVTIKFKWWGLQSKVENFIQKQEKRIFTNFHRQLFCWIDKWIDLTMEDIRRMEDETQKELETMRKRGSVRGTSAADV

SEQ ID NO: 28523 - protein, 19 aa, Artificial Sequence
  Synthetic polypeptide
GGQITRSRDRDHPAKCLHS

SEQ ID NO: 28524 - protein, 227 aa, Artificial Sequence
  Synthetic polypeptide
SQHFGRLRRADYEVKRSRPPCKVPAFVRMIAPEGSLVFHEKAWNAYPYCRTIVTNEYMKDDFFIKIETWHKPDLGTLENVHGLDPNTWKTVEIVHIDIADRSQVEPADYKADEDPALFQSVKTKRGPLGPNWKKELANSPDCPQMCAYKLVTIKFKWWGLQSKVENFIQKQEKRIFTNFHRQLFCWIDKWIDLTMEDIRRMEDETQKELETLRNQGQVRGTSAASDE

SEQ ID NO: 28525 - protein, 120 aa, Artificial Sequence
  Synthetic polypeptide
SQHFGRLRRADYEVKRSRPPCKVPAFVRMIAPEGSLVFHEKAWNAYPYCRTIVTNEYMKDDFFIKIETWHKPDLGTLENVHGLDPNTWKTVEIVHIDIADRSQVEPADYKADEDPALFQS

SEQ ID NO: 28526 - protein, 62 aa, Artificial Sequence
  Synthetic polypeptide
ITCCDFPGCTCSDTRPCKIVIKVSLSLFFVPLSPFFGFGWPCGFAMFCSGVSGWAALLCCRS

SEQ ID NO: 28527 - protein, 272 aa, Artificial Sequence
  Synthetic polypeptide
VHSSGLDGRVVLPCSVQEYQVGQLYSVAEASKNETGGGEGIEVLKNEPYEKDGEKGQYTHKIYHLKSKVPAFVRMIAPEGSLVFHEKAWNAYPYCRTIVTNEYMKDDFFIKIETWHKPDLGTLENVHGLDPNTWKTVEIVHIDIADRSQVEPADYKADEDPALFQSVKTKRGPLGPNWKKELANSPDCPQMCAYKLVTIKFKWWGLQSKVENFIQKQEKRIFTNFHRQLFCWIDKWIDLTMEDIRRMEDETQKELETMRKRGSVRGTSAADV

SEQ ID NO: 28528 - protein, 54 aa, Artificial Sequence
  Synthetic polypeptide
SLTFAVLRASKSILRVWMAVWFCHVLFRSIRLGSFTLLQKLVRMRLVVEKELKS

SEQ ID NO: 28529 - protein, 273 aa, Artificial Sequence
  Synthetic polypeptide
VHSSGLDGRVVLPCSVQEYQVGQLYSVAEASKNETGGGEGIEVLKNEPYEKDGEKGQYTHKIYHLKSKVPAFVRMIAPEGSLVFHEKAWNAYPYCRTIVTNEYMKDDFFIKIETWHKPDLGTLENVHGLDPNTWKTVEIVHIDIADRSQVEPADYKADEDPALFQSVKTKRGPLGPNWKKELANSPDCPQMCAYKLVTIKFKWWGLQSKVENFIQKQEKRIFTNFHRQLFCWIDKWIDLTMEDIRRMEDETQKELETLRNQGQVRGTSAASDE

SEQ ID NO: 28530 - protein, 166 aa, Artificial Sequence
  Synthetic polypeptide
VHSSGLDGRVVLPCSVQEYQVGQLYSVAEASKNETGGGEGIEVLKNEPYEKDGEKGQYTHKIYHLKSKVPAFVRMIAPEGSLVFHEKAWNAYPYCRTIVTNEYMKDDFFIKIETWHKPDLGTLENVHGLDPNTWKTVEIVHIDIADRSQVEPADYKADEDPALFQS

SEQ ID NO: 28531 - protein, 15 aa, Artificial Sequence
  Synthetic polypeptide
AKIAPLHSSLGFCLF

SEQ ID NO: 28532 - protein, 349 aa, Artificial Sequence
  Synthetic polypeptide
SQLLRGLRQENCLNPGGGGCSEPRLHHCTLAWVFVFFDLTVDDQSVYPKALRDEYIMSKTLGSGACGEVKLAFERKTCKKVAIKIISKRKFAIGSAREADPALNVETEIEILKKLNHPCIIKIKNFFDAEDYYIVLELMEGGELFDKVVGNKRLKEATCKLYFYQMLLAVQITDFGHSKILGETSLMRTLCGTPTYLAPEVLVSVGTAGYNRAVDCWSLGVILFICLSGYPPFSEHRTQVSLKDQITSGKYNFIPEVWAEVSEKALDLVKKLLVVDPKARFTTEEALRHPWLQDEDMKRKFQDLLSEENESTALPQVLAQPSTSRKRPREGEAEGAETTKRPAVCAAVL

SEQ ID NO: 28533 - protein, 8 aa, Artificial Sequence
  Synthetic polypeptide
PGFLSFLI

SEQ ID NO: 28534 - protein, 124 aa, Artificial Sequence
  Synthetic polypeptide
SQLLRGLRQENCLNPGGGGCSEPRLHHCTLAWVFVFFDLTVDDQSVYPKALRDEYIMSKTLGSGACGEVKLAFERKTCKKVAIKIISKRKFAIGSAREADPALNVETEIEILKKLNHDGRGRAV

SEQ ID NO: 28535 - protein, 378 aa, Artificial Sequence
  Synthetic polypeptide
SQLLRGLRQENCLNPGGGGCSEPRLHHCTLAWVFVFFDLTVDDQSVYPKALRDEYIMSKTLGSGACGEVKLAFERKTCKKVAIKIISKRKFAIGSAREADPALNVETEIEILKKLNHPCIIKIKNFFDAEDYYIVLELMEGGELFDKVVGNKRLKEATCKLYFYQMLLAVQYLHENGIIHRDLKPENVLLSSQEEDCLIKITDFGHSKILGETSLMRTLCGTPTYLAPEVLVSVGTAGYNRAVDCWSLGVILFICLSGYPPFSEHRTQVSLKDQITSGKYNFIPEVWAEVSEKALDLVKKLLVVDPKARFTTEEALRHPWLQDEDMKRKFQDLLSEENESTALPQVLAQPSTSRKRPREGEAEGAETTKRPAVCAAVL

SEQ ID NO: 28536 - protein, 37 aa, Artificial Sequence
  Synthetic polypeptide
SQLLRGLRQENCLNPGGGGCSEPRLHHCTLAWVFVFF

SEQ ID NO: 28537 - protein, 7 aa, Artificial Sequence
  Synthetic polypeptide
PGFLSFL

SEQ ID NO: 28538 - protein, 99 aa, Artificial Sequence
  Synthetic polypeptide
SQLLRGLRQENCLNPGGGGCSEPRLHHCTLAWVFVFFDLTVDDQSVYPKALRDEYIMSKTLGSGACGEVKLAFERKTCKKVAIKIISKRKFAIGSAREA

SEQ ID NO: 28539 - protein, 38 aa, Artificial Sequence
  Synthetic polypeptide
GGARWLTSLIPALWEAEAGRSPEVRSSRPAWSTCFCLF

SEQ ID NO: 28540 - protein, 341 aa, Artificial Sequence
  Synthetic polypeptide
SQHFGRPRLADHLRSGVRDQPGQRVFVFFDLTVDDQSVYPKALRDEYIMSKTLGSGACGEVKLAFERKTCKKVAIKIISKRKFAIGSAREADPALNVETEIEILKKLNHPCIIKIKNFFDAEDYYIVLELMEGGELFDKVVGNKRLKEATCKLYFYQMLLAVQITDFGHSKILGETSLMRTLCGTPTYLAPEVLVSVGTAGYNRAVDCWSLGVILFICLSGYPPFSEHRTQVSLKDQITSGKYNFIPEVWAEVSEKALDLVKKLLVVDPKARFTTEEALRHPWLQDEDMKRKFQDLLSEENESTALPQVLAQPSTSRKRPREGEAEGAETTKRPAVCAAVL

SEQ ID NO: 28541 - protein, 17 aa, Artificial Sequence
  Synthetic polypeptide
GQEFETSLVNVFLSFLI

SEQ ID NO: 28542 - protein, 116 aa, Artificial Sequence
  Synthetic polypeptide
SQHFGRPRLADHLRSGVRDQPGQRVFVFFDLTVDDQSVYPKALRDEYIMSKTLGSGACGEVKLAFERKTCKKVAIKIISKRKFAIGSAREADPALNVETEIEILKKLNHDGRGRAV

SEQ ID NO: 28543 - protein, 370 aa, Artificial Sequence
  Synthetic polypeptide
SQHFGRPRLADHLRSGVRDQPGQRVFVFFDLTVDDQSVYPKALRDEYIMSKTLGSGACGEVKLAFERKTCKKVAIKIISKRKFAIGSAREADPALNVETEIEILKKLNHPCIIKIKNFFDAEDYYIVLELMEGGELFDKVVGNKRLKEATCKLYFYQMLLAVQYLHENGIIHRDLKPENVLLSSQEEDCLIKITDFGHSKILGETSLMRTLCGTPTYLAPEVLVSVGTAGYNRAVDCWSLGVILFICLSGYPPFSEHRTQVSLKDQITSGKYNFIPEVWAEVSEKALDLVKKLLVVDPKARFTTEEALRHPWLQDEDMKRKFQDLLSEENESTALPQVLAQPSTSRKRPREGEAEGAETTKRPAVCAAVL

SEQ ID NO: 28544 - protein, 29 aa, Artificial Sequence
  Synthetic polypeptide
SQHFGRPRLADHLRSGVRDQPGQRVFVFF

SEQ ID NO: 28545 - protein, 16 aa, Artificial Sequence
  Synthetic polypeptide
GQEFETSLVNVFLSFL

SEQ ID NO: 28546 - protein, 91 aa, Artificial Sequence
  Synthetic polypeptide
SQHFGRPRLADHLRSGVRDQPGQRVFVFFDLTVDDQSVYPKALRDEYIMSKTLGSGACGEVKLAFERKTCKKVAIKIISKRKFAIGSAREA

SEQ ID NO: 28547 - protein, 32 aa, Artificial Sequence
  Synthetic polypeptide
GGARWLTSLIPALWEAEAGRSPEMISQFILRH

SEQ ID NO: 28548 - protein, 14 aa, Artificial Sequence
  Synthetic polypeptide
SQHFGRPRLADHLR

SEQ ID NO: 28549 - protein, 31 aa, Artificial Sequence
  Synthetic polypeptide
GQAWWLTPVIPALWEAEAGGSRAKAPWNRDS

SEQ ID NO: 28550 - protein, 107 aa, Artificial Sequence
  Synthetic polypeptide
SQHFGRPRRVDHELKLHGIEIPERTDYEMDRQFLIEIMEINEKLAEAESEAAMKEIESIVKAKQKEFTDNVSSAFEQDDFEEAKEILTKMRYFSNIEEKIKLKKIPL

SEQ ID NO: 28551 - protein, 22 aa, Artificial Sequence
  Synthetic polypeptide
PGMVAHACNPSTLGGRGGWITS

SEQ ID NO: 28552 - protein, 23 aa, Artificial Sequence
  Synthetic polypeptide
GQAWWLTPVIPALWEAEAGGSRA

SEQ ID NO: 28553 - protein, 14 aa, Artificial Sequence
  Synthetic polypeptide
SQHFGRPRRVDHEL

SEQ ID NO: 28554 - protein, 116 aa, Artificial Sequence
  Synthetic polypeptide
AEITPLHSSLGDRVRLHLKKKKLKLHGIEIPERTDYEMDRQFLIEIMEINEKLAEAESEAAMKEIESIVKAKQKEFTDNVSSAFEQDDFEEAKEILTKMRYFSNIEEKIKLKKIPL

SEQ ID NO: 28555 - protein, 8 aa, Artificial Sequence
  Synthetic polypeptide
DFISKKKN

SEQ ID NO: 28556 - protein, 29 aa, Artificial Sequence
  Synthetic polypeptide
DHTTALQPGRQSETSSQKKKTKAPWNRDS

SEQ ID NO: 28557 - protein, 23 aa, Artificial Sequence
  Synthetic polypeptide
AEITPLHSSLGDRVRLHLKKKKL

SEQ ID NO: 28558 - protein, 21 aa, Artificial Sequence
  Synthetic polypeptide
DHTTALQPGRQSETSSQKKKT

SEQ ID NO: 28559 - protein, 13 aa, Artificial Sequence
  Synthetic polypeptide
SQLLGRLRTKNFC

SEQ ID NO: 28560 - protein, 164 aa, Artificial Sequence
  Synthetic polypeptide
VPVVPATREVENQKLLLENQLLREKTHGLVVENQELRQRLGMDALVAEEEAEAKGNEVRPVAGSAESAALRLRAPLQQVQAQLSPLQNISPWILAVLTLQIQSLISCWAFWTTWTQSCSSNALPQSLPAWRSSQRSTQKDPVPYQPPFLCQWGRHQPSWKPLMN

SEQ ID NO: 28561 - protein, 279 aa, Artificial Sequence
  Synthetic polypeptide
VPVVPATREVENQKLLLENQLLREKTHGLVVENQELRQRLGMDALVAEEEAEAKGNEVRPVAGSAESAAGAGPVVTPPEHLPMDSGGIDSSDSESDILLGILDNLDPVMFFKCPSPEPASLEELPEVYPEGPSSLPASLSLSVGTSSAKLEAINELIRFDHIYTKPLVLEIPSETESQANVVVKIEEAPLSPSENDHPEFIVSVKEEPVEDDLVPELGISNLLSSSHCPKPSSCLLDAYSDCGYGGSLSPFSDMSSLLGVNHSWEDTFANELFPQLISV

SEQ ID NO: 28562 - protein, 205 aa, Artificial Sequence
  Synthetic polypeptide
EAEAGGSLELRSSRSAWATQKLKNRVAAQTARDRKKARMSELEQQVVDLEEENQKLLLENQLLREKTHGLVVENQELRQRLGMDALVAEEEAEAKGNEVRPVAGSAESAALRLRAPLQQVQAQLSPLQNISPWILAVLTLQIQSLISCWAFWTTWTQSCSSNALPQSLPAWRSSQRSTQKDPVPYQPPFLCQWGRHQPSWKPLMN

SEQ ID NO: 28563 - protein, 21 aa, Artificial Sequence
  Synthetic polypeptide
RPKREVHLSSEVRDQPGQHRN

SEQ ID NO: 28564 - protein, 31 aa, Artificial Sequence
  Synthetic polypeptide
AQKFEISLGNTETEKQSSSSDCQRSKEGSNE

SEQ ID NO: 28565 - protein, 210 aa, Artificial Sequence
  Synthetic polypeptide
EAEAGGSLELRSSRSAWATQKLKNRVAAQTARDRKKARMSELEQQVVDLEEEVKLLKNQKLLLENQLLREKTHGLVVENQELRQRLGMDALVAEEEAEAKGNEVRPVAGSAESAALRLRAPLQQVQAQLSPLQNISPWILAVLTLQIQSLISCWAFWTTWTQSCSSNALPQSLPAWRSSQRSTQKDPVPYQPPFLCQWGRHQPSWKPLMN

SEQ ID NO: 28566 - protein, 320 aa, Artificial Sequence
  Synthetic polypeptide
EAEAGGSLELRSSRSAWATQKLKNRVAAQTARDRKKARMSELEQQVVDLEEENQKLLLENQLLREKTHGLVVENQELRQRLGMDALVAEEEAEAKGNEVRPVAGSAESAAGAGPVVTPPEHLPMDSGGIDSSDSESDILLGILDNLDPVMFFKCPSPEPASLEELPEVYPEGPSSLPASLSLSVGTSSAKLEAINELIRFDHIYTKPLVLEIPSETESQANVVVKIEEAPLSPSENDHPEFIVSVKEEPVEDDLVPELGISNLLSSSHCPKPSSCLLDAYSDCGYGGSLSPFSDMSSLLGVNHSWEDTFANELFPQLISV

SEQ ID NO: 28567 - protein, 218 aa, Artificial Sequence
  Synthetic polypeptide
GWAQWLTPVIPALWEAEAGDHEVRRWRPSWPTRKLKNRVAAQTARDRKKARMSELEQQVVDLEEENQKLLLENQLLREKTHGLVVENQELRQRLGMDALVAEEEAEAKGNEVRPVAGSAESAALRLRAPLQQVQAQLSPLQNISPWILAVLTLQIQSLISCWAFWTTWTQSCSSNALPQSLPAWRSSQRSTQKDPVPYQPPFLCQWGRHQPSWKPLMN

SEQ ID NO: 28568 - protein, 25 aa, Artificial Sequence
  Synthetic polypeptide
SQHFGRPRRAITRSGDGDHPGQHGN

SEQ ID NO: 28569 - protein, 52 aa, Artificial Sequence
  Synthetic polypeptide
MGAVAYACNPSTLGGRGGRSRGQEMETILANTETEKQSSSSDCQRSKEGSNE

SEQ ID NO: 28570 - protein, 223 aa, Artificial Sequence
  Synthetic polypeptide
GWAQWLTPVIPALWEAEAGDHEVRRWRPSWPTRKLKNRVAAQTARDRKKARMSELEQQVVDLEEEVKLLKNQKLLLENQLLREKTHGLVVENQELRQRLGMDALVAEEEAEAKGNEVRPVAGSAESAALRLRAPLQQVQAQLSPLQNISPWILAVLTLQIQSLISCWAFWTTWTQSCSSNALPQSLPAWRSSQRSTQKDPVPYQPPFLCQWGRHQPSWKPLMN

SEQ ID NO: 28571 - protein, 333 aa, Artificial Sequence
  Synthetic polypeptide
GWAQWLTPVIPALWEAEAGDHEVRRWRPSWPTRKLKNRVAAQTARDRKKARMSELEQQVVDLEEENQKLLLENQLLREKTHGLVVENQELRQRLGMDALVAEEEAEAKGNEVRPVAGSAESAAGAGPVVTPPEHLPMDSGGIDSSDSESDILLGILDNLDPVMFFKCPSPEPASLEELPEVYPEGPSSLPASLSLSVGTSSAKLEAINELIRFDHIYTKPLVLEIPSETESQANVVVKIEEAPLSPSENDHPEFIVSVKEEPVEDDLVPELGISNLLSSSHCPKPSSCLLDAYSDCGYGGSLSPFSDMSSLLGVNHSWEDTFANELFPQLISV

SEQ ID NO: 28572 - protein, 15 aa, Artificial Sequence
  Synthetic polypeptide
NWHHDNFEDAPTGPM

SEQ ID NO: 28573 - protein, 855 aa, Artificial Sequence
  Synthetic polypeptide
ISVTISFLICKTGIMITLKMHPLGLCNNNDEEDLYEYGWVGVVKLEQPELDPKPCLTVLGKAKRAVQRGATAVIFDVSENPEAIDQLNQGSEDPLKRPVVYVKGADAIKLMNIVNKQKVARARIQHRPPRQPTEYFDMGIFLAFFVVVSLVCLILLVKIKLKQRRSQNSMNRLAVQALEKMETRKFNSKSKGRREGSCGALDTLSSSSTSDCAICLEKYIDGEELRVIPCTHRFHRKCVDPWLLQHHTCPHCRHNIIEQKGNPSAVCVETSNLSRGRQQRVTLPVHYPGRVHRTNAIPAYPTRTSMDSHGNPVTLLTMDRHGEQSLYSPQTPAYIRSYPPLHLDHSLAAHRCGLEHRAYSPAHPFRRPKLSGRSFSKAACFSQYETMYQHYYFQGLSYPEQEGQSPPSLAPRGPARAFPPSGSGSLLFPTVVHVAPPSHLESGSTSSFSCYHGHRSVCSGYLADCPGSDSSSSSSSGQCHCSSSDSVVDCTEVSNQGVYGSCSTFRSSLSSDYDPFIYRSRSPCRASEAGGSGSSGRGPALCFEGSPPPEELPAVHSHGAGRGEPWPGPASPSGDQVSTCSLEMNYSSNSSLEHRGPNSSTSEVGLEASPGAAPDLRRTWKGGHELPSCACCCEPQPSPAGPSAGAAGSSTLFLGPHLYEGSGPAGGEPQSGSSQGLYGLHPDHLPRTDGVKYEGLPCCFYEEKQVARGGGGGSGCYTEDYSVSVQYTLTEEPPPGCYPGARDLSQRIPIIPEDVDCDLGLPSDCQGTHSLGSWGGTRGPDTPRPHRGLGATREEERALCCQARALLRPGCPPEEAGAVRANFPSALQDTQESSTTATEAAGPRSHSADSSSPGA

SEQ ID NO: 28574 - protein, 22 aa, Artificial Sequence
  Synthetic polypeptide
CSTQLPLLPPNLKQSDAPTGPM

SEQ ID NO: 28575 - protein, 839 aa, Artificial Sequence
  Synthetic polypeptide
NNLMHPLGLCNNNDEEDLYEYGWVGVVKLEQPELDPKPCLTVLGKAKRAVQRGATAVIFDVSENPEAIDQLNQGSEDPLKRPVVYVKGADAIKLMNIVNKQKVARARIQHRPPRQPTEYFDMGIFLAFFVVVSLVCLILLVKIKLKQRRSQNSMNRLAVQALEKMETRKFNSKSKGRREGSCGALDTLSSSSTSDCAICLEKYIDGEELRVIPCTHRFHRKCVDPWLLQHHTCPHCRHNIIEQKGNPSAVCVETSNLSRGRQQRVTLPVHYPGRVHRTNAIPAYPTRTSMDSHGNPVTLLTMDRHGEQSLYSPQTPAYIRSYPPLHLDHSLAAHRCGLEHRAYSPAHPFRRPKLSGRSFSKAACFSQYETMYQHYYFQGLSYPEQEGQSPPSLAPRGPARAFPPSGSGSLLFPTVVHVAPPSHLESGSTSSFSCYHGHRSVCSGYLADCPGSDSSSSSSSGQCHCSSSDSVVDCTEVSNQGVYGSCSTFRSSLSSDYDPFIYRSRSPCRASEAGGSGSSGRGPALCFEGSPPPEELPAVHSHGAGRGEPWPGPASPSGDQVSTCSLEMNYSSNSSLEHRGPNSSTSEVGLEASPGAAPDLRRTWKGGHELPSCACCCEPQPSPAGPSAGAAGSSTLFLGPHLYEGSGPAGGEPQSGSSQGLYGLHPDHLPRTDGVKYEGLPCCFYEEKQVARGGGGGSGCYTEDYSVSVQYTLTEEPPPGCYPGARDLSQRIPIIPEDVDCDLGLPSDCQGTHSLGSWGGTRGPDTPRPHRGLGATREEERALCCQARALLRPGCPPEEAGAVRANFPSALQDTQESSTTATEAAGPRSHSADSSSPGA

SEQ ID NO: 28576 - protein, 323 aa, Artificial Sequence
  Synthetic polypeptide
STSLAIKFAGMESGYACFCGNNPDYWKYGEAASTECNSVCFGDHTQPCGGDGRIILFDTLVGACGGNYSAMSSVVYSPDFPDTYATGRVCYWTIRVPGASHIHFSFPLFDIRDSADMVELLDGYTHRVLARFHGRSRPPLSFNVSLDFVILYFFSDRINQAQGFAVLYQAVKEELPQERPAVNQTVAEVITEQANLSVSAARSSKVLYVITTSPSHPPQTVPGSNSWAPPMGAGSHRVEGWTVYGLATLLILTVTAIVAKILLHVTFKSHRVPASGDLRDCHQPGTSGEIWSIFYKPSTSISIFKKKLKGQSQQDDRNPLVSD

SEQ ID NO: 28577 - protein, 124 aa, Artificial Sequence
  Synthetic polypeptide
PLSLLGWSQAMLASVETILITGSTGRQPVPNATASASGITPNPVVAMAGSSSLILSWAPAVGTTQPCLLWSIPLTSPTPMPRGGSATGPSGFRGPPTSTSASPYLTSGTRRTWWSFWMATPTVS

SEQ ID NO: 28578 - protein, 306 aa, Artificial Sequence
  Synthetic polypeptide
STSLAIKFAGMESGYACFCGNNPDYWKYGEAASTECNSVCFGDHTQPCGGDGRIILFDTLVGACGGNYSAMSSVVYSPDFPDTYATGRVCYWTIRVPGASHIHFSFPLFDIRDSADMVELLDGYTHRVLARFHGRSRPPLSFNVSLDFVILYFFSDRINQAQGFAVLYQAVKEELPQERPAVNQTVAEVITEQANLSVSAARSSKVLYVITTSPSHPPQTVPGWTVYGLATLLILTVTAIVAKILLHVTFKSHRVPASGDLRDCHQPGTSGEIWSIFYKPSTSISIFKKKLKGQSQQDDRNPLVSD

SEQ ID NO: 28579 - protein, 340 aa, Artificial Sequence
  Synthetic polypeptide
STSLAIKFAGMESGYACFCGNNPDYWKYGEAASTECNSVCFGDHTQPCGGDGRIILFDTLVGACGGNYSAMSSVVYSPDFPDTYATGRVCYWTIRVPGASHIHFSFPLFDIRDSADMVELLDGYTHRVLARFHGRSRPPLSFNVSLDFVILYFFSDRINQAQGFAVLYQAVKEELPQERPAVNQTVAEVITEQANLSVSAARSSKVLYVITTSPSHPPQTVPGSNSWAPPMGAGSHRVEGWTVYGLATLLILTVTAIVAKILLHVTFKSHRVPASGDLRDCHQPGTSGEIWSIFYKPSTSISIFKKKLKGQSQQDDRNPLAIQDSEVTSLIWSQGQPRSI

SEQ ID NO: 28580 - protein, 75 aa, Artificial Sequence
  Synthetic polypeptide
STSLAIKFAGMESGYACFCGNNPDYWKYGEAASTECNSVCFGDHTQPCGGDGRIILFDRTRRTWWSFWMATPTVS

SEQ ID NO: 28581 - protein, 71 aa, Artificial Sequence
  Synthetic polypeptide
PLSLLGWSQAMLASVETILITGSTGRQPVPNATASASGITPNPVVAMAGSSSLIGLGGHGGASGWLHPPCP

SEQ ID NO: 28582 - protein, 4 aa, Artificial Sequence
  Synthetic polypeptide
PRGR

SEQ ID NO: 28583 - protein, 381 aa, Artificial Sequence
  Synthetic polypeptide
LTDPEEDDESDSDAEEEQTTKRRRPTLGVQLDDKRKEMLKRHPLSVMLDLKCKDDSVLHLTFYYLMNLNIMTVKAKVTTAMELITPISAGDLLSPDSVLSCLYPGDHGKKTPNPANQYQFDKVGILTLSDYVLELGHPYLWVQKLGGLHFPKEQPQQTVIADHSLSASHMETTMKLLKTRVQSRLALHKQFASLEHGIVPVTSDCQYLFPAKVVSRLVKWVTVAHEDYMELHFTKDIVDAGLAGDTNLYYMALIERGTAKLQAAVVLNPGYSSIPPVFQLCLNWKGEKTNSNDDNIRAMEGEVNVCYKELCGPWPSHQLLTNQLQRLCVLLDVYLETESHDDSVEGPKEFPQEKMCLRLFRGPSRMKPFKYNHPQGFFSHR

SEQ ID NO: 28584 - protein, 37 aa, Artificial Sequence
  Synthetic polypeptide
LTPRKMTRVTQMPRRSRLRSAGDPHWGFSWTTNARRC

SEQ ID NO: 28585 - protein, 30 aa, Artificial Sequence
  Synthetic polypeptide
LTDPEEDDESDSDAEEEQTTVPSSLEAEEV

SEQ ID NO: 28586 - protein, 23 aa, Artificial Sequence
  Synthetic polypeptide
LTPRKMTRVTQMPRRSRLRCRPP

SEQ ID NO: 28587 - protein, 89 aa, Artificial Sequence
  Synthetic polypeptide
LTDPEEDDESDSDAEEEQTTKRRRPTLGVQLDDKRKEMLKRHPLSVMLDLKCKDDSVLHLTFYYLMNLNIMTVKAKVTTAMELITPISA

SEQ ID NO: 28588 - protein, 49 aa, Artificial Sequence
  Synthetic polypeptide
RTCISIPRTMKAAGSAPSLFTKWIPGRMPTPPCCPRRKPATSIRSSFTM

SEQ ID NO: 28589 - protein, 19 aa, Artificial Sequence
  Synthetic polypeptide
SVVVKCLALDEHAFLFQGQ

SEQ ID NO: 28590 - protein, 257 aa, Artificial Sequence
  Synthetic polypeptide
HLTNMHFYSKDNEGSWFRSLFVHKVDPRKDAHSTLLSKKETSNLYKIQFHNVKPEYLDAYNSLTEAVLPKLHLDEDYPCSLVGNWNTWYGEQDQAVHLWRFSGGYPALMDCMNKLKNNKEYLEFRRERSQMLLSRRNQLLLEFSFWNEPQPRMGPNIYELRTYKLKPGTMIEWGNNWARAIKYRQENQEAVGGFFSQIGELYVVHHLWAYKDLQSREETRNAAWRKRGWDENVYYTVPLVRHMESRIMIPLKISPLQ

SEQ ID NO: 28591 - protein, 177 aa, Artificial Sequence
  Synthetic polypeptide
HLTNMHFYSKDNEGSWFRSLFVHKVDPRKDAHSTLLSKKETSNLYKIQFHNVKPEYLDAYNSLTEAVLPKLHLDEDYPCSLVGNWNTWYGEQDQAVHLWRFSGGYPALMDCMNKLKNNKEYLEFRRERSQMLLSRRNQLLLEFSFWNEPQPRMGPNIYELRTYKLKPGTMIEWGNNW

SEQ ID NO: 28592 - protein, 101 aa, Artificial Sequence
  Synthetic polypeptide
HLTNMHFYSKDNEGSWFRSLFVHKVDPRKDAHSTLLSKKETSNLYKIQFHNVKPEYLDAYNSLTEAVLPKLHLDEDYPCSLVGNWNTWYGEQDQAGHSWFW

SEQ ID NO: 28593 - protein, 284 aa, Artificial Sequence
  Synthetic polypeptide
GRARWLTPVIPALWEAEAVDHEVRRSRPSWLTRFYSKDNEGSWFRSLFVHKVDPRKDAHSTLLSKKETSNLYKIQFHNVKPEYLDAYNSLTEAVLPKLHLDEDYPCSLVGNWNTWYGEQDQAVHLWRFSGGYPALMDCMNKLKNNKEYLEFRRERSQMLLSRRNQLLLEFSFWNEPQPRMGPNIYELRTYKLKPGTMIEWGNNWARAIKYRQENQEAVGGFFSQIGELYVVHHLWAYKDLQSREETRNAAWRKRGWDENVYYTVPLVRHMESRIMIPLKISPLQ

SEQ ID NO: 28594 - protein, 47 aa, Artificial Sequence
  Synthetic polypeptide
HVSIPRTMKAAGSAPSLFTKWIPGRMPTPPCCPRRKPATSIRSSFTM

SEQ ID NO: 28595 - protein, 38 aa, Artificial Sequence
  Synthetic polypeptide
PGAVAHACNPSTLGGRGGGSRGQEIETILANTFLFQGQ

SEQ ID NO: 28596 - protein, 204 aa, Artificial Sequence
  Synthetic polypeptide
GRARWLTPVIPALWEAEAVDHEVRRSRPSWLTRFYSKDNEGSWFRSLFVHKVDPRKDAHSTLLSKKETSNLYKIQFHNVKPEYLDAYNSLTEAVLPKLHLDEDYPCSLVGNWNTWYGEQDQAVHLWRFSGGYPALMDCMNKLKNNKEYLEFRRERSQMLLSRRNQLLLEFSFWNEPQPRMGPNIYELRTYKLKPGTMIEWGNNW

SEQ ID NO: 28597 - protein, 128 aa, Artificial Sequence
  Synthetic polypeptide
GRARWLTPVIPALWEAEAVDHEVRRSRPSWLTRFYSKDNEGSWFRSLFVHKVDPRKDAHSTLLSKKETSNLYKIQFHNVKPEYLDAYNSLTEAVLPKLHLDEDYPCSLVGNWNTWYGEQDQAGHSWFW

SEQ ID NO: 28598 - protein, 23 aa, Artificial Sequence
  Synthetic polypeptide
HYPPARLNYPTPISYEVEREGPL

SEQ ID NO: 28599 - protein, 134 aa, Artificial Sequence
  Synthetic polypeptide
TILLPFPMKWKGKDLFDLVCRTLGLRETWFFGLQYTIKDTVAWLKMDKKVLDHDVSKEEPVTFHFLAKFYPENAEEELVQEITQHLFFLQVKKQILDEKIYCPPEASVLLASYAVQAKLTLQSAKSRVAFFEEL

SEQ ID NO: 28600 - protein, 14 aa, Artificial Sequence
  Synthetic polypeptide
LSSSQTELSYSHFL

SEQ ID NO: 28601 - protein, 564 aa, Artificial Sequence
  Synthetic polypeptide
TILLPFPMKWKGKDLFDLVCRTLGLRETWFFGLQYTIKDTVAWLKMDKKVLDHDVSKEEPVTFHFLAKFYPENAEEELVQEITQHLFFLQVKKQILDEKIYCPPEASVLLASYAVQAKYGDYDPSVHKRGFLAQEELLPKRVINLYQMTPEMWEERITAWYAEHRGRARDEAEMEYLKIAQDLEMYGVNYFAIRNKKGTELLLGVDALGLHIYDPENRLTPKISFPWNEIRNISYSDKEFTIKPLDKKIDVFKFNSSKLRVNKLILQLCIGNHDLFMRRRKADSLEVQQMKAQAREEKARKQMERQRLAREKQMREEAERTRDELERRLLQMKEEATMANEALMRSEETADLLAEKAQITEEEAKLLAQKAAEAEQEMQRIKATAIRTEEEKRLMEQKVLEAEVLALKMAEESERRAKEADQLKQDLQEAREAERRAKQKLLEIATKPTYPPMNPIPAPLPPDIPSFNLIGDSLSFDFKDTDMKRLSMEIEKEKVEYMEKSKHLQEQLNELKTEIEALKLKERETALDILHNENSDRGGSSKHNTIKKLTLQSAKSRVAFFEEL

SEQ ID NO: 28602 - protein, 530 aa, Artificial Sequence
  Synthetic polypeptide
TILLPFPMKWKGKDLFDLVCRTLGLRETWFFGLQYTIKDTVAWLKMDKKVLDHDVSKEEPVTFHFLAKFYPENAEEELVQEITQHLFFLQVKKQILDEKIYCPPEASVLLASYAVQAKYGDYDPSVHKRGFLAQEELLPKRVINLYQMTPEMWEERITAWYAEHRGRARDEAEMEYLKIAQDLEMYGVNYFAIRNKKGTELLLGVDALGLHIYDPENRLTPKISFPWNEIRNISYSDKEFTIKPLDKKIDVFKFNSSKLRVNKLILQLCIGNHDLFMRRRKADSLEVQQMKAQAREEKARKQMKEEATMANEALMRSEETADLLAEKAQITEEEAKLLAQKAAEAEQEMQRIKATAIRTEEEKRLMEQKVLEAEVLALKMAEESERRAKEADQLKQDLQEAREAERRAKQKLLEIATKPTYPPMNPIPAPLPPDIPSFNLIGDSLSFDFKDTDMKRLSMEIEKEKVEYMEKSKHLQEQLNELKTEIEALKLKERETALDILHNENSDRGGSSKHNTIKKPQAQGRRPICI

SEQ ID NO: 28603 - protein, 518 aa, Artificial Sequence
  Synthetic polypeptide
TILLPFPMKWKGKDLFDLVCRTLGLRETWFFGLQYTIKDTVAWLKMDKKVKKQILDEKIYCPPEASVLLASYAVQAKYGDYDPSVHKRGFLAQEELLPKRVINLYQMTPEMWEERITAWYAEHRGRARDEAEMEYLKIAQDLEMYGVNYFAIRNKKGTELLLGVDALGLHIYDPENRLTPKISFPWNEIRNISYSDKEFTIKPLDKKIDVFKFNSSKLRVNKLILQLCIGNHDLFMRRRKADSLEVQQMKAQAREEKARKQMERQRLAREKQMREEAERTRDELERRLLQMKEEATMANEALMRSEETADLLAEKAQITEEEAKLLAQKAAEAEQEMQRIKATAIRTEEEKRLMEQKVLEAEVLALKMAEESERRAKEADQLKQDLQEAREAERRAKQKLLEIATKPTYPPMNPIPAPLPPDIPSFNLIGDSLSFDFKDTDMKRLSMEIEKEKVEYMEKSKHLQEQLNELKTEIEALKLKERETALDILHNENSDRGGSSKHNTIKKPQAQGRRPICI

SEQ ID NO: 28604 - protein, 559 aa, Artificial Sequence
  Synthetic polypeptide
TILLPFPMKWKGKDLFDLVCRTLGLRETWFFGLQYTIKDTVAWLKMDKKVLDHDVSKEEPVTFHFLAKFYPENAEEELVQEITQHLFFLQVKKQILDEKIYCPPEASVLLASYAVQAKYGDYDPSVHKRGFLAQEELLPKRVINLYQMTPEMWEERITAWYAEHRGRARDEAEMEYLKIAQDLEMYGVNYFAIRNKKGTELLLGVDALGLHIYDPENRLTPKISFPWNEIRNISYSDKEFTIKPLDKKIDVFKFNSSKLRVNKLILQLCIGNHDLFMRRRKADSLEVQQMKAQAREEKARKQMERQRLAREKQMREEAERTRDELERRLLQMKEEATMANEALMRSEETADLLAEKAQITEEEAKLLAQKAAEAEQEMQRIKATAIRTEEEKRLMEQKVLEAEVLALKMAEESERRAKEADQLKQDLQEAREAERRAKQKLLEIATKPTYPPMNPIPAPLPPDIPSFNLIGDSLSFDFKDTDMKRLSMEIEKEKVEYMEKSKHLQEQLNELKTEIEALKLKERETALDILHNENSDRGGSSKHNTIKKPQAQGRRPICI

SEQ ID NO: 28605 - protein, 649 aa, Artificial Sequence
  Synthetic polypeptide
DVPFTFHHDCEISPATWSYDSGDDDEATTPADKSELHHTLKNLSLKLDDLSTCNDLIAKHGAALQRSLTELDGLKIPSESGEKLKVVNERATLFRITSNAMINACRDFLELAEIHSRKWQRALQYEQEQRVHLEETIEQLAKQHNSLERAFHSAPGRPANPSKSFIEGSLLTPKGEDSEEDEDTEYFDAMEDSTSFITVITEAKEDRKAEGSTGTSSVDWSSADNVLDGASLVPKGSSKVKRRVRIPNKPNYSLNLWSIMKNCIGRELSRIPMPVNFNEPLSMLQRLTEDLEYHHLLDKAVHCTSSVEQMCLVAAFSVSSYSTTVHRIAKPFNPMLGETFELDRLDDMGLRSLCEQVSHHPPSAAHYVFSKHGWSLWQEITISSKFRGKYISIMPLGAIHLEFQASGNHYVWRKSTSTVHNIIVGKLWIDQSGDIEIVNHKTNDRCQLKFLPYSYFSKEAARKVTGVVSDSQGKAHYVLSGSWDEQMECSKVMHSSPSSPSSDGKQKTVYQTLSAKLLWKKYPLPENAENMYYFSELALTLNEHEEGVAPTDSRLRPDQRLMEKGRWDEANTEKQRLEEKQRLSRRRRLEACGPGSSCSSEEEKEADAYTPLWFEKRLDPLTGEMACVYKGGYWEAKEKQDWHMCPNIF

SEQ ID NO: 28606 - protein, 65 aa, Artificial Sequence
  Synthetic polypeptide
VSRDLMVFKKGCFPAQVIFSCLLPCETCLLPSTMIVRSPQPRGAMTLGTTTRLPPQPTRASCTTP

SEQ ID NO: 28607 - protein, 8 aa, Artificial Sequence
  Synthetic polypeptide
DLPSHVEL

SEQ ID NO: 28608 - protein, 650 aa, Artificial Sequence
  Synthetic polypeptide
DVPFTFHHDCEISPATWSYDSGDDDEATTPADKSELHHTLKNLSLKLDDLSTCNDLIAKHGAALQRSLTELDGLKIPSESGEKLKVVNERATLFRITSNAMINACRDFLELAEIHSRKWQRALQYEQEQRVHLEETIEQLAKQHNSLERAFHSAPGRPANPSKSFIEGSLLTPKGEDSEEDEDTEYFDAMEDSTSFITVITEAKEDSRKAEGSTGTSSVDWSSADNVLDGASLVPKGSSKVKRRVRIPNKPNYSLNLWSIMKNCIGRELSRIPMPVNFNEPLSMLQRLTEDLEYHHLLDKAVHCTSSVEQMCLVAAFSVSSYSTTVHRIAKPFNPMLGETFELDRLDDMGLRSLCEQVSHHPPSAAHYVFSKHGWSLWQEITISSKFRGKYISIMPLGAIHLEFQASGNHYVWRKSTSTVHNIIVGKLWIDQSGDIEIVNHKTNDRCQLKFLPYSYFSKEAARKVTGVVSDSQGKAHYVLSGSWDEQMECSKVMHSSPSSPSSDGKQKTVYQTLSAKLLWKKYPLPENAENMYYFSELALTLNEHEEGVAPTDSRLRPDQRLMEKGRWDEANTEKQRLEEKQRLSRRRRLEACGPGSSCSSEEEKEADAYTPLWFEKRLDPLTGEMACVYKGGYWEAKEKQDWHMCPNIF

SEQ ID NO: 28609 - protein, 608 aa, Artificial Sequence
  Synthetic polypeptide
DVPFTFHHDCEISPATWSYDSGDDDEATTPADKSELHHTLKNLSLKLDDLSTCNDLIAKHGAALQRSLTELDGLKIPSESGEKLKVVNERATLFRITSNAMINACRDFLELAEIHSRKWQRALQYEQEQRVHLEETIEQLAKQHNSLERAFHSAPGRPANPSKSFIEGSLLTPKGEDSEEDEDTEYFDAMEDSTSFITVITEAKEDSRKAEGSTGTSSVDWSSADNVNFNEPLSMLQRLTEDLEYHHLLDKAVHCTSSVEQMCLVAAFSVSSYSTTVHRIAKPFNPMLGETFELDRLDDMGLRSLCEQVSHHPPSAAHYVFSKHGWSLWQEITISSKFRGKYISIMPLGAIHLEFQASGNHYVWRKSTSTVHNIIVGKLWIDQSGDIEIVNHKTNDRCQLKFLPYSYFSKEAARKVTGVVSDSQGKAHYVLSGSWDEQMECSKVMHSSPSSPSSDGKQKTVYQTLSAKLLWKKYPLPENAENMYYFSELALTLNEHEEGVAPTDSRLRPDQRLMEKGRWDEANTEKQRLEEKQRLSRRRRLEACGPGSSCSSEEGEAGREGRPGGEERGARVGVPQGRIPGEQATSPPTSPLCLPSREGGGCLHATVV

SEQ ID NO: 28610 - protein, 651 aa, Artificial Sequence
  Synthetic polypeptide
DVPFTFHHDCEISPATWSYDSGDDDEATTPADKSELHHTLKNLSLKLDDLSTCNDLIAKHGAALQRSLTELDGLKIPSESGEKLKVVNERATLFRITSNAMINACRDFLELAEIHSRKWQRALQYEQEQRVHLEETIEQLAKQHNSLERAFHSAPGRPANPSKSFIEGSLLTPKGEDSEEDEDTEYFDAMEDSTSFITVITEAKEDSRKAEGSTGTSSVDWSSADNVLDGASLVPKGSSKVKRRVRIPNKPNYSLNLWSIMKNCIGRELSRIPMPVNFNEPLSMLQRLTEDLEYHHLLDKAVHCTSSVEQMCLVAAFSVSSYSTTVHRIAKPFNPMLGETFELDRLDDMGLRSLCEQVSHHPPSAAHYVFSKHGWSLWQEITISSKFRGKYISIMPLGAIHLEFQASGNHYVWRKSTSTVHNIIVGKLWIDQSGDIEIVNHKTNDRCQLKFLPYSYFSKEAARKVTGVVSDSQGKAHYVLSGSWDEQMECSKVMHSSPSSPSSDGKQKTVYQTLSAKLLWKKYPLPENAENMYYFSELALTLNEHEEGVAPTDSRLRPDQRLMEKGRWDEANTEKQRLEEKQRLSRRRRLEACGPGSSCSSEEAEKEADAYTPLWFEKRLDPLTGEMACVYKGGYWEAKEKQDWHMCPNIF

SEQ ID NO: 28611 - protein, 48 aa, Artificial Sequence
  Synthetic polypeptide
DVPFTFHHDCEISPATWSCKSIEPLSFMTLGTTTRLPPQPTRASCTTP

SEQ ID NO: 28612 - protein, 53 aa, Artificial Sequence
  Synthetic polypeptide
VSRDLMVFKKGCFPAQVIFSCLLPCETCLLPSTMIVRSPQPRGAVSPLNLFLL

SEQ ID NO: 28613 - protein, 635 aa, Artificial Sequence
  Synthetic polypeptide
TSFFYDSGDDDEATTPADKSELHHTLKNLSLKLDDLSTCNDLIAKHGAALQRSLTELDGLKIPSESGEKLKVVNERATLFRITSNAMINACRDFLELAEIHSRKWQRALQYEQEQRVHLEETIEQLAKQHNSLERAFHSAPGRPANPSKSFIEGSLLTPKGEDSEEDEDTEYFDAMEDSTSFITVITEAKEDRKAEGSTGTSSVDWSSADNVLDGASLVPKGSSKVKRRVRIPNKPNYSLNLWSIMKNCIGRELSRIPMPVNFNEPLSMLQRLTEDLEYHHLLDKAVHCTSSVEQMCLVAAFSVSSYSTTVHRIAKPFNPMLGETFELDRLDDMGLRSLCEQVSHHPPSAAHYVFSKHGWSLWQEITISSKFRGKYISIMPLGAIHLEFQASGNHYVWRKSTSTVHNIIVGKLWIDQSGDIEIVNHKTNDRCQLKFLPYSYFSKEAARKVTGVVSDSQGKAHYVLSGSWDEQMECSKVMHSSPSSPSSDGKQKTVYQTLSAKLLWKKYPLPENAENMYYFSELALTLNEHEEGVAPTDSRLRPDQRLMEKGRWDEANTEKQRLEEKQRLSRRRRLEACGPGSSCSSEEEKEADAYTPLWFEKRLDPLTGEMACVYKGGYWEAKEKQDWHMCPNIF

SEQ ID NO: 28614 - protein, 636 aa, Artificial Sequence
  Synthetic polypeptide
TSFFYDSGDDDEATTPADKSELHHTLKNLSLKLDDLSTCNDLIAKHGAALQRSLTELDGLKIPSESGEKLKVVNERATLFRITSNAMINACRDFLELAEIHSRKWQRALQYEQEQRVHLEETIEQLAKQHNSLERAFHSAPGRPANPSKSFIEGSLLTPKGEDSEEDEDTEYFDAMEDSTSFITVITEAKEDSRKAEGSTGTSSVDWSSADNVLDGASLVPKGSSKVKRRVRIPNKPNYSLNLWSIMKNCIGRELSRIPMPVNFNEPLSMLQRLTEDLEYHHLLDKAVHCTSSVEQMCLVAAFSVSSYSTTVHRIAKPFNPMLGETFELDRLDDMGLRSLCEQVSHHPPSAAHYVFSKHGWSLWQEITISSKFRGKYISIMPLGAIHLEFQASGNHYVWRKSTSTVHNIIVGKLWIDQSGDIEIVNHKTNDRCQLKFLPYSYFSKEAARKVTGVVSDSQGKAHYVLSGSWDEQMECSKVMHSSPSSPSSDGKQKTVYQTLSAKLLWKKYPLPENAENMYYFSELALTLNEHEEGVAPTDSRLRPDQRLMEKGRWDEANTEKQRLEEKQRLSRRRRLEACGPGSSCSSEEEKEADAYTPLWFEKRLDPLTGEMACVYKGGYWEAKEKQDWHMCPNIF

SEQ ID NO: 28615 - protein, 594 aa, Artificial Sequence
  Synthetic polypeptide
TSFFYDSGDDDEATTPADKSELHHTLKNLSLKLDDLSTCNDLIAKHGAALQRSLTELDGLKIPSESGEKLKVVNERATLFRITSNAMINACRDFLELAEIHSRKWQRALQYEQEQRVHLEETIEQLAKQHNSLERAFHSAPGRPANPSKSFIEGSLLTPKGEDSEEDEDTEYFDAMEDSTSFITVITEAKEDSRKAEGSTGTSSVDWSSADNVNFNEPLSMLQRLTEDLEYHHLLDKAVHCTSSVEQMCLVAAFSVSSYSTTVHRIAKPFNPMLGETFELDRLDDMGLRSLCEQVSHHPPSAAHYVFSKHGWSLWQEITISSKFRGKYISIMPLGAIHLEFQASGNHYVWRKSTSTVHNIIVGKLWIDQSGDIEIVNHKTNDRCQLKFLPYSYFSKEAARKVTGVVSDSQGKAHYVLSGSWDEQMECSKVMHSSPSSPSSDGKQKTVYQTLSAKLLWKKYPLPENAENMYYFSELALTLNEHEEGVAPTDSRLRPDQRLMEKGRWDEANTEKQRLEEKQRLSRRRRLEACGPGSSCSSEEGEAGREGRPGGEERGARVGVPQGRIPGEQATSPPTSPLCLPSREGGGCLHATVV

SEQ ID NO: 28616 - protein, 637 aa, Artificial Sequence
  Synthetic polypeptide
TSFFYDSGDDDEATTPADKSELHHTLKNLSLKLDDLSTCNDLIAKHGAALQRSLTELDGLKIPSESGEKLKVVNERATLFRITSNAMINACRDFLELAEIHSRKWQRALQYEQEQRVHLEETIEQLAKQHNSLERAFHSAPGRPANPSKSFIEGSLLTPKGEDSEEDEDTEYFDAMEDSTSFITVITEAKEDSRKAEGSTGTSSVDWSSADNVLDGASLVPKGSSKVKRRVRIPNKPNYSLNLWSIMKNCIGRELSRIPMPVNFNEPLSMLQRLTEDLEYHHLLDKAVHCTSSVEQMCLVAAFSVSSYSTTVHRIAKPFNPMLGETFELDRLDDMGLRSLCEQVSHHPPSAAHYVFSKHGWSLWQEITISSKFRGKYISIMPLGAIHLEFQASGNHYVWRKSTSTVHNIIVGKLWIDQSGDIEIVNHKTNDRCQLKFLPYSYFSKEAARKVTGVVSDSQGKAHYVLSGSWDEQMECSKVMHSSPSSPSSDGKQKTVYQTLSAKLLWKKYPLPENAENMYYFSELALTLNEHEEGVAPTDSRLRPDQRLMEKGRWDEANTEKQRLEEKQRLSRRRRLEACGPGSSCSSEEAEKEADAYTPLWFEKRLDPLTGEMACVYKGGYWEAKEKQDWHMCPNIF

SEQ ID NO: 28617 - protein, 8 aa, Artificial Sequence
  Synthetic polypeptide
GLLSHAEL

SEQ ID NO: 28618 - protein, 683 aa, Artificial Sequence
  Synthetic polypeptide
MSPHEIWLFDKCLALPYAPALSLLLPCEEGASFSFAFHHDYKFPEASSAMQNYDSGDDDEATTPADKSELHHTLKNLSLKLDDLSTCNDLIAKHGAALQRSLTELDGLKIPSESGEKLKVVNERATLFRITSNAMINACRDFLELAEIHSRKWQRALQYEQEQRVHLEETIEQLAKQHNSLERAFHSAPGRPANPSKSFIEGSLLTPKGEDSEEDEDTEYFDAMEDSTSFITVITEAKEDRKAEGSTGTSSVDWSSADNVLDGASLVPKGSSKVKRRVRIPNKPNYSLNLWSIMKNCIGRELSRIPMPVNFNEPLSMLQRLTEDLEYHHLLDKAVHCTSSVEQMCLVAAFSVSSYSTTVHRIAKPFNPMLGETFELDRLDDMGLRSLCEQVSHHPPSAAHYVFSKHGWSLWQEITISSKFRGKYISIMPLGAIHLEFQASGNHYVWRKSTSTVHNIIVGKLWIDQSGDIEIVNHKTNDRCQLKFLPYSYFSKEAARKVTGVVSDSQGKAHYVLSGSWDEQMECSKVMHSSPSSPSSDGKQKTVYQTLSAKLLWKKYPLPENAENMYYFSELALTLNEHEEGVAPTDSRLRPDQRLMEKGRWDEANTEKQRLEEKQRLSRRRRLEACGPGSSCSSEEEKEADAYTPLWFEKRLDPLTGEMACVYKGGYWEAKEKQDWHMCPNIF

SEQ ID NO: 28619 - protein, 72 aa, Artificial Sequence
  Synthetic polypeptide
VLMRSGCLISVWHFPMLLLSLSCCLVKKVLLSPLLSTMIISFLRPPQPCRTMTLGTTTRLPPQPTRASCTTP

SEQ ID NO: 28620 - protein, 684 aa, Artificial Sequence
  Synthetic polypeptide
MSPHEIWLFDKCLALPYAPALSLLLPCEEGASFSFAFHHDYKFPEASSAMQNYDSGDDDEATTPADKSELHHTLKNLSLKLDDLSTCNDLIAKHGAALQRSLTELDGLKIPSESGEKLKVVNERATLFRITSNAMINACRDFLELAEIHSRKWQRALQYEQEQRVHLEETIEQLAKQHNSLERAFHSAPGRPANPSKSFIEGSLLTPKGEDSEEDEDTEYFDAMEDSTSFITVITEAKEDSRKAEGSTGTSSVDWSSADNVLDGASLVPKGSSKVKRRVRIPNKPNYSLNLWSIMKNCIGRELSRIPMPVNFNEPLSMLQRLTEDLEYHHLLDKAVHCTSSVEQMCLVAAFSVSSYSTTVHRIAKPFNPMLGETFELDRLDDMGLRSLCEQVSHHPPSAAHYVFSKHGWSLWQEITISSKFRGKYISIMPLGAIHLEFQASGNHYVWRKSTSTVHNIIVGKLWIDQSGDIEIVNHKTNDRCQLKFLPYSYFSKEAARKVTGVVSDSQGKAHYVLSGSWDEQMECSKVMHSSPSSPSSDGKQKTVYQTLSAKLLWKKYPLPENAENMYYFSELALTLNEHEEGVAPTDSRLRPDQRLMEKGRWDEANTEKQRLEEKQRLSRRRRLEACGPGSSCSSEEEKEADAYTPLWFEKRLDPLTGEMACVYKGGYWEAKEKQDWHMCPNIF

SEQ ID NO: 28621 - protein, 642 aa, Artificial Sequence
  Synthetic polypeptide
MSPHEIWLFDKCLALPYAPALSLLLPCEEGASFSFAFHHDYKFPEASSAMQNYDSGDDDEATTPADKSELHHTLKNLSLKLDDLSTCNDLIAKHGAALQRSLTELDGLKIPSESGEKLKVVNERATLFRITSNAMINACRDFLELAEIHSRKWQRALQYEQEQRVHLEETIEQLAKQHNSLERAFHSAPGRPANPSKSFIEGSLLTPKGEDSEEDEDTEYFDAMEDSTSFITVITEAKEDSRKAEGSTGTSSVDWSSADNVNFNEPLSMLQRLTEDLEYHHLLDKAVHCTSSVEQMCLVAAFSVSSYSTTVHRIAKPFNPMLGETFELDRLDDMGLRSLCEQVSHHPPSAAHYVFSKHGWSLWQEITISSKFRGKYISIMPLGAIHLEFQASGNHYVWRKSTSTVHNIIVGKLWIDQSGDIEIVNHKTNDRCQLKFLPYSYFSKEAARKVTGVVSDSQGKAHYVLSGSWDEQMECSKVMHSSPSSPSSDGKQKTVYQTLSAKLLWKKYPLPENAENMYYFSELALTLNEHEEGVAPTDSRLRPDQRLMEKGRWDEANTEKQRLEEKQRLSRRRRLEACGPGSSCSSEEGEAGREGRPGGEERGARVGVPQGRIPGEQATSPPTSPLCLPSREGGGCLHATVV

SEQ ID NO: 28622 - protein, 685 aa, Artificial Sequence
  Synthetic polypeptide
MSPHEIWLFDKCLALPYAPALSLLLPCEEGASFSFAFHHDYKFPEASSAMQNYDSGDDDEATTPADKSELHHTLKNLSLKLDDLSTCNDLIAKHGAALQRSLTELDGLKIPSESGEKLKVVNERATLFRITSNAMINACRDFLELAEIHSRKWQRALQYEQEQRVHLEETIEQLAKQHNSLERAFHSAPGRPANPSKSFIEGSLLTPKGEDSEEDEDTEYFDAMEDSTSFITVITEAKEDSRKAEGSTGTSSVDWSSADNVLDGASLVPKGSSKVKRRVRIPNKPNYSLNLWSIMKNCIGRELSRIPMPVNFNEPLSMLQRLTEDLEYHHLLDKAVHCTSSVEQMCLVAAFSVSSYSTTVHRIAKPFNPMLGETFELDRLDDMGLRSLCEQVSHHPPSAAHYVFSKHGWSLWQEITISSKFRGKYISIMPLGAIHLEFQASGNHYVWRKSTSTVHNIIVGKLWIDQSGDIEIVNHKTNDRCQLKFLPYSYFSKEAARKVTGVVSDSQGKAHYVLSGSWDEQMECSKVMHSSPSSPSSDGKQKTVYQTLSAKLLWKKYPLPENAENMYYFSELALTLNEHEEGVAPTDSRLRPDQRLMEKGRWDEANTEKQRLEEKQRLSRRRRLEACGPGSSCSSEEAEKEADAYTPLWFEKRLDPLTGEMACVYKGGYWEAKEKQDWHMCPNIF

SEQ ID NO: 28623 - protein, 44 aa, Artificial Sequence
  Synthetic polypeptide
GRVLWLTPVIPALWEAEVGGSRGQEIETILVNMNHSRILVWCPC

SEQ ID NO: 28624 - protein, 26 aa, Artificial Sequence
  Synthetic polypeptide
HEPLTNSCLVPLLNWLIMQEMLMPPE

SEQ ID NO: 28625 - protein, 12 aa, Artificial Sequence
  Synthetic polypeptide
MNHSRILVWCPC

SEQ ID NO: 28626 - protein, 52 aa, Artificial Sequence
  Synthetic polypeptide
QFLRGLYEMMFVKFLAHTVVHSKHCVNEPLTNSCLVPLLNWLIMQEMLMPPE

SEQ ID NO: 28627 - protein, 1037 aa, Artificial Sequence
  Synthetic polypeptide
QCGAVKRPCACKPAKPGLECFLAVSLDRTTHEFLFGALAELVDNARDADATRIDIYAERREDLRGGFMLCFLDDGAGMDPSDAASVIQFGKSAKRTPESTQIGQYGNGLKSGSMRIGKDFILFTKKEDTMTCLFLSRTFHEEEGIDEVIVPLPTWNARTREPVTDNVEKFAIETELIYKYSPFRTEEEVMTQFMKIPGDSGTLVIIFNLKLMDNGEPELDIISNPRDIQMAETSPEGTKPERRSFRAYAAVLYIDPRMRIFIHGHKVQTKRLSCCLYKPRMYKYTSSRFKTRAEQEVKKAEHVARIAEEKAREAESKARTLEVRLGGDLTRDSRVMLRQVQNRAITLRREADVKKRIKEAKQRALKEPKELNFVFGVNIEHRDLDGMFIYNCSRLIKMYEKVGPQLEGGMACGGVVGVVDVPYLVLEPTHNKQDFADAKEYRHLLRAMGEHLAQYWKDIAIAQRGIIKFWDEFGYLSANWNQPPSSELRYKRRRAMEIPTTIQCDLCLKWRTLPFQLSSVEKDYPDTWVCSMNPDPEQDRCEASEQKQKVPLGTFRKDMKTQEEKQKQLTEKIRQQQEKLEALQKTTPIRSQADLKKLPLEVTTRPSTEEPVRRPQRPRSPPLPAVIRNAPSRPPSLPTPRPASQPRKAPVISSTPKLPALAAREEASTSRLLQPPEAPRKPANTLVKTASRPAPLVQQLSPSLLPNSKSPREVPSPKVIKTPVVKKTESPIKLSPATPSRKRSVAVSDEEEVEEEAERRKERCKRGRFVVKEEKKDSNELSDSAGEEDSADLKRAQKDKGLHVEVRVNREWYTGRVTAVEVGKHVVRWKVKFDYVPTDTTPRDRWVEKGSEDVRLMKPPSPEHQSLDTQQEGGEEEVGPVAQQAIAVAEPSTSECLRIEPDTTALSTNHETIDLLVQILRNCLRYFLPPSFPISKKQLSAMNSDELISFPLKEYFKQYEVGLQNLCNSYQSRADSRAKASEESLRTSERKLRETEEKLQKLRTNIVALLQKVQEDIDINTDDELDAYIEDLITKGD

SEQ ID NO: 28628 - protein, 47 aa, Artificial Sequence
  Synthetic polypeptide
KDRVLANQPNLDLSVSWLCPWTEPLTNSCLVPLLNWLIMQEMLMPPE

SEQ ID NO: 28629 - protein, 20 aa, Artificial Sequence
  Synthetic polypeptide
VFPGCVLGQNHSRILVWCPC

SEQ ID NO: 28630 - protein, 14 aa, Artificial Sequence
  Synthetic polypeptide
AHTTLHPPFSASDR

SEQ ID NO: 28631 - protein, 410 aa, Artificial Sequence
  Synthetic polypeptide
SVLLSMLVSELTQPFTLLSQPVIGEDVWRCPGCGDHIAPSQIWYRTVNETWHGSCFRRSNSISKSPGPSSPKEPLLFSRDISRSESLRCSSSYSQQIFRPCDLIHGEVLGKGFFGQAIKVTHKATGKVMVMKELIRCDEETQKTFLTEVKVMRSLDHPNVLKFIGVLYKDKKLNLLTEYIEGGTLKDFLRSMDPFPWQQKVRFAKGIASGMAYLHSMCIIHRDLNSHNCLIKLDKTVVVADFGLSRLIVEERKRAPMEKATTKKRTLRKNDRKKRYTVVGNPYWMAPEMLNGKSYDETVDIFSFGIVLCEIIGQVYADPDCLPRTLDFGLNVKLFWEKFVPTDCPPAFFPLAAICCRLEPESRPAFSKLEDSFEALSLYLGELGIPLPAELEELDHTVSMQYGLTRDSPP

SEQ ID NO: 28632 - protein, 656 aa, Artificial Sequence
  Synthetic polypeptide
SVLLSMLVSELTQPFTLLSQPVIGEDVWRCPGCGDHIAPSQIWYRTVNETWHGSCFRCSECQDSLTNWYYEKDGKLYCPKDYWGKFGEFCHGCSLLMTGPFMVAGEFKYHPECFACMSCKVIIEDGDAYALVQHATLYCGKCHNEVVLAPMFERLSTESVQEQLPYSVTLISMPATTEGRRGFSVSVESACSNYATTVQVKEVNRMHISPNNRNAIHPGDRILEINGTPVRTLRVEEVEDAISQTSQTLQLLIEHDPVSQRLDQLRLEARLAPHMQNAGHPHALSTLDTKENLEGTLRRRSLRRSNSISKSPGPSSPKEPLLFSRDISRSESLRCSSSYSQQIFRPCDLIHGEVLGKGFFGQAIKVTHKATGKVMVMKELIRCDEETQKTFLTEVKVMRSLDHPNVLKFIGVLYKDKKLNLLTEYIEGGTLKDFLRSMDPFPWQQKVRFAKGIASGMAYLHSMCIIHRDLNSHNCLIKLDKTVVVADFGLSRLIVEERKRAPMEKATTKKRTLRKNDRKKRYTVVGNPYWMAPEMLNGKSYDETVDIFSFGIVLCEIIGQVYADPDCLPRTLDFGLNVKLFWEKFVPTDCPPAFFPLAAICCRLEPESRPAFSKLEDSFEALSLYLGELGIPLPAELEELDHTVSMQYGLTRDSPP

SEQ ID NO: 28633 - protein, 65 aa, Artificial Sequence
  Synthetic polypeptide
NRHPPPLSEWKLHPSKCSDFTMSSDYYGRSSKNGKRSGGFSSTSGNSVFELTVTTGCGGARGGSD

SEQ ID NO: 28634 - protein, 35 aa, Artificial Sequence
  Synthetic polypeptide
QLHWVSHHSMPETEIVILPLSVSGNSILPSAQILL

SEQ ID NO: 28635 - protein, 1010 aa, Artificial Sequence
  Synthetic polypeptide
VETPSFQVLRFYYEQRLLRKVFEEWKEEWWVFQHEWKLCVRADCHYRVWWSTWRQRLGQVRVSRALHASALKHRALSLQVQAWSQWREQLLYVQKEKQKVVSAVKHHQHWQKRRFLKAWLEYLQVRRVKRQQNEMAERFHHVTVLQIYFCDWQQAWERRESLYAHHAQVEKLARKMALRRAFTHWKHYMLLCAEEAAQFEMAEEHHRHSQLYFCFRALKDNVTHAHLQQIRRNLAHQQHGVTLLHRFWNLWRSQIEQKKERELLPLLHAAWDHYRIALLCKCIELWLQYTQKRRYKQLLQARADGHFQQRALPAAFHTWNRLWRWRHQENVLSARATRFHRETLEKQVFSLWRQKMFQHRENRLAERMAILHAERQLLYRSWFMWHQQAAARHQEQEWQTVACAHHRHGRLKKAFCLWRESAQGLRTERTGRVRAAEFHMAQLLRWAWSQWRECLALRGAERQKLMRADLHHQHSVLHRALQAWVTYQGRVRSILREVAARESQHNRQLLRGALRRWKENTMARVDEAKKTFQASTHYRRTICSKVLVQWREAVSVQMYYRQQEDCAIWEAQKVLDRGCLRTWFQRWWDCSRRSAQQRLQLERAVQHHHRQLLLEGLARWKTHHLQCVRKRLLHRQSTQLLAQRLSRTCFRQWRQQLAARRQEQRATVRALWFWAFSLQAKVWATWLAFVLERRRKKARLQWALQAYQGQLLQEGATRLLRFAASMKASRQQLQAQQQVQAAHSLHRAVRRCATLWKQKVLGRGGKPQPLAAIAPSRKVTFEGPLLNRIAAGAGDGTLETKRPQASRPLGALGRLAAEEPHALELNTAHSARKQPRRPHFLLEPAQSQRPQKPQEHGLGMAQPAAPSLTRPFLAEAPTALVPHSPLPGALSSAPGPKQPPTASTGPELLLLPLSSFMPCGAAAPARVSAQRATPRDKPPVPSSLASVPDPHLLLPGDFSATRAGPGLSTAAWTLRLNLRRSSSNYCTTRPPSRTSGPVGGKRAACAGGWS

SEQ ID NO: 28636 - protein, 61 aa, Artificial Sequence
  Synthetic polypeptide
NRHPPPLSEWKLHPSKCSDFTMSSDYYGRSSKNGKRSGGFSSTSGNSVFELTVTTGITCTT

SEQ ID NO: 28637 - protein, 1139 aa, Artificial Sequence
  Synthetic polypeptide
VETPSFQVLRFYYEQRLLRKVFEEWKEEWWVFQHEWKLCVRADCHYRYYLYNLMFQTWKTYVRQQQEMRNKYIRAEVHDAKQKMRQAWKSWLIYVVVRRTKLQMQTTALEFRQRIILRVWWSTWRQRLGQVRVSRALHASALKHRALSLQVQAWSQWREQLLYVQKEKQKVVSAVKHHQHWQKRRFLKAWLEYLQVRRVKRQQNEMAERFHHVTVLQIYFCDWQQAWERRESLYAHHAQVEKLARKMALRRAFTHWKHYMLLCAEEAAQFEMAEEHHRHSQLYFCFRALKDNVTHAHLQQIRRNLAHQQHGVTLLHRFWNLWRSQIEQKKERELLPLLHAAWDHYRIALLCKCIELWLQYTQKRRYKQLLQARADGHFQQRALPAAFHTWNRLWRWRHQENVLSARATRFHRETLEKQVFSLWRQKMFQHRENRLAERMAILHAERQLLYRSWFMWHQQAAARHQEQEWQTVACAHHRHGRLKKAFCLWRESAQGLRTERTGRVRAAEFHMAQLLRWAWSQWRECLALRGAERQKLMRADLHHQHSVLHRALQAWVTYQGRVRSILREVAARESQHNRQLLRGALRRWKENTMARVDEAKKTFQASTHYRRTICSKVLVQWREAVSVQMYYRQQEDCAIWEAQKVLDRGCLRTWFQRWWDCSRRSAQQRLQLERAVQHHHRQLLLEGLARWKTHHLQCVRKRLLHRQSTQLLAQRLSRTCFRQWRQQLAARRQEQRATVRALWFWAFSLQAKVWATWLAFVLERRRKKARLQWALQAYQGQLLQEGATRLLRFAASMKASRQQLQAQQQVQAAHSLHRAVRRCATLWKQKVLGRGGKPQPLAAIAPSRKVTFEGPLLNRIAAGAGDGTLETKRPQASRPLGALGRLAAEEPHALELNTAHSARKQPRRPHFLLEPAQSQRPQKPQEHGLGMAQPAAPSLTRPFLAEAPTALVPHSPLPGALSSAPGPKQPPTASTGPELLLLPLSSFMPCGAAAPARVSAQRATPRDKPPVPSSLASVPDPHLLLPGDFSATRAGPGLSTAGSLDLEAELEEIQQQLLHYQTTKQNLWSCRRQASSLRRWLELNREEPGPEDQEVEQQVQKELEQVEMQIQLLAEELQAQRQPIGACVARIQALRQALC

SEQ ID NO: 28638 - protein, 1108 aa, Artificial Sequence
  Synthetic polypeptide
VETPSFQVLRFYYEQRLLRKVFEEWKEEWWVFQHEWKLCVRADCHYRYYLYNLMFQTWKTYVRQQQEMRNKYIRAEVHDAKQKMRQAWKSWLIYVVVRRTKLQMQTTALEFRQRIILRVWWSTWRQRLGQVRVSRALHASALKHRALSLQVQAWSQWREQLLYVQKEKQKVVSAVKHHQHWQKRRFLKAWLEYLQVRRVKRQQNEMAERFHHVTVLQIYFCDWQQAWERRESLYAHHAQVEKLARKMALRRAFTHWKHYMLLCAEEAAQFEMAEEHHRHSQLLLHRFWNLWRSQIEQKKERELLPLLHAAWDHYRIALLCKCIELWLQYTQKRRYKQLLQARADGHFQQRALPAAFHTWNRLWRWRHQENVLSARATRFHRETLEKQVFSLWRQKMFQHRENRLAERMAILHAERQLLYRSWFMWHQQAAARHQEQEWQTVACAHHRHGRLKKAFCLWRESAQGLRTERTGRVRAAEFHMAQLLRWAWSQWRECLALRGAERQKLMRADLHHQHSVLHRALQAWVTYQGRVRSILREVAARESQHNRQLLRGALRRWKENTMARVDEAKKTFQASTHYRRTICSKVLVQWREAVSVQMYYRQQEDCAIWEAQKVLDRGCLRTWFQRWWDCSRRSAQQRLQLERAVQHHHRQLLLEGLARWKTHHLQCVRKRLLHRQSTQLLAQRLSRTCFRQWRQQLAARRQEQRATVRALWFWAFSLQAKVWATWLAFVLERRRKKARLQWALQAYQGQLLQEGATRLLRFAASMKASRQQLQAQQQVQAAHSLHRAVRRCATLWKQKVLGRGGKPQPLAAIAPSRKVTFEGPLLNRIAAGAGDGTLETKRPQASRPLGALGRLAAEEPHALELNTAHSARKQPRRPHFLLEPAQSQRPQKPQEHGLGMAQPAAPSLTRPFLAEAPTALVPHSPLPGALSSAPGPKQPPTASTGPELLLLPLSSFMPCGAAAPARVSAQRATPRDKPPVPSSLASVPDPHLLLPGDFSATRAGPGLSTAGSLDLEAELEEIQQQLLHYQTTKQNLWSCRRQASSLRRWLELNREEPGPEDQEVEQQVQKELEQVEMQIQLLAEELQAQRQPIGACVARIQALRQALC

SEQ ID NO: 28639 - protein, 1068 aa, Artificial Sequence
  Synthetic polypeptide
VETPSFQVLRFYYEQRLLRKVFEEWKEEWWVFQHEWKLCVRADCHYRVWWSTWRQRLGQVRVSRALHASALKHRALSLQVQAWSQWREQLLYVQKEKQKVVSAVKHHQHWQKRRFLKAWLEYLQVRRVKRQQNEMAERFHHVTVLQIYFCDWQQAWERRESLYAHHAQVEKLARKMALRRAFTHWKHYMLLCAEEAAQFEMAEEHHRHSQLYFCFRALKDNVTHAHLQQIRRNLAHQQHGVTLLHRFWNLWRSQIEQKKERELLPLLHAAWDHYRIALLCKCIELWLQYTQKRRYKQLLQARADGHFQQRALPAAFHTWNRLWRWRHQENVLSARATRFHRETLEKQVFSLWRQKMFQHRENRLAERMAILHAERQLLYRSWFMWHQQAAARHQEQEWQTVACAHHRHGRLKKAFCLWRESAQGLRTERTGRVRAAEFHMAQLLRWAWSQWRECLALRGAERQKLMRADLHHQHSVLHRALQAWVTYQGRVRSILREVAARESQHNRQLLRGALRRWKENTMARVDEAKKTFQASTHYRRTICSKVLVQWREAVSVQMYYRQQEDCAIWEAQKVLDRGCLRTWFQRWWDCSRRSAQQRLQLERAVQHHHRQLLLEGLARWKTHHLQCVRKRLLHRQSTQLLAQRLSRTCFRQWRQQLAARRQEQRATVRALWFWAFSLQAKVWATWLAFVLERRRKKARLQWALQAYQGQLLQEGATRLLRFAASMKASRQQLQAQQQVQAAHSLHRAVRRCATLWKQKVLGRGGKPQPLAAIAPSRKVTFEGPLLNRIAAGAGDGTLETKRPQASRPLGALGRLAAEEPHALELNTAHSARKQPRRPHFLLEPAQSQRPQKPQEHGLGMAQPAAPSLTRPFLAEAPTALVPHSPLPGALSSAPGPKQPPTASTGPELLLLPLSSFMPCGAAAPARVSAQRATPRDKPPVPSSLASVPDPHLLLPGDFSATRAGPGLSTAGSLDLEAELEEIQQQLLHYQTTKQNLWSCRRQASSLRRWLELNREEPGPEDQEVEQQVQKELEQVEMQIQLLAEELQAQRQPIGACVARIQALRQALC

SEQ ID NO: 28640 - protein, 286 aa, Artificial Sequence
  Synthetic polypeptide
VETPSFQVLRFYYEQRLLRKVFEEWKEEWWVFQHEWKLCVRADCHYRYYLYNLMFQTWKTYVRQQQEMRNKYIRAEVHDAKQKMRQAWKSWLIYVVVRRTKLQMQTTALEFRQRIILRVWWSTWRQRLGQVRVSRALHASALKHRALSLQVQAWSQWREQLLYVQKEKQKVVSAVKHHQHWQKRRFLKAWLEYLQVRRVKRQQNAATGQSGWSFPAESPACCLPHMEQTLAMAPPGKCPQCKSNTFPQGDIREASIFSLEAEDVSASRKPPGRENGHPSRRATASV

SEQ ID NO: 28641 - protein, 21 aa, Artificial Sequence
  Synthetic polypeptide
SSSFSQSVMQSKRCDRPGSPG

SEQ ID NO: 28642 - protein, 41 aa, Artificial Sequence
  Synthetic polypeptide
SLAIIVALLLPESNPHLFPRVLCKAKDATGLEVLVDLRGCS

SEQ ID NO: 28643 - protein, 1082 aa, Artificial Sequence
  Synthetic polypeptide
HLQSSLHCYCLRVILIFFPECYAKQKMRQAWKSWLIYVVVRRTKLQMQTTALEFRQRIILRVWWSTWRQRLGQVRVSRALHASALKHRALSLQVQAWSQWREQLLYVQKEKQKVVSAVKHHQHWQKRRFLKAWLEYLQVRRVKRQQNEMAERFHHVTVLQIYFCDWQQAWERRESLYAHHAQVEKLARKMALRRAFTHWKHYMLLCAEEAAQFEMAEEHHRHSQLYFCFRALKDNVTHAHLQQIRRNLAHQQHGVTLLHRFWNLWRSQIEQKKERELLPLLHAAWDHYRIALLCKCIELWLQYTQKRRYKQLLQARADGHFQQRALPAAFHTWNRLWRWRHQENVLSARATRFHRETLEKQVFSLWRQKMFQHRENRLAERMAILHAERQLLYRSWFMWHQQAAARHQEQEWQTVACAHHRHGRLKKAFCLWRESAQGLRTERTGRVRAAEFHMAQLLRWAWSQWRECLALRGAERQKLMRADLHHQHSVLHRALQAWVTYQGRVRSILREVAARESQHNRQLLRGALRRWKENTMARVDEAKKTFQASTHYRRTICSKVLVQWREAVSVQMYYRQQEDCAIWEAQKVLDRGCLRTWFQRWWDCSRRSAQQRLQLERAVQHHHRQLLLEGLARWKTHHLQCVRKRLLHRQSTQLLAQRLSRTCFRQWRQQLAARRQEQRATVRALWFWAFSLQAKVWATWLAFVLERRRKKARLQWALQAYQGQLLQEGATRLLRFAASMKASRQQLQAQQQVQAAHSLHRAVRRCATLWKQKVLGRGGKPQPLAAIAPSRKVTFEGPLLNRIAAGAGDGTLETKRPQASRPLGALGRLAAEEPHALELNTAHSARKQPRRPHFLLEPAQSQRPQKPQEHGLGMAQPAAPSLTRPFLAEAPTALVPHSPLPGALSSAPGPKQPPTASTGPELLLLPLSSFMPCGAAAPARVSAQRATPRDKPPVPSSLASVPDPHLLLPGDFSATRAGPGLSTAGSLDLEAELEEIQQQLLHYQTTKQNLWSCRRQASSLRRWLELNREEPGPEDQEVEQQVQKELEQVEMQIQLLAEELQAQRQPIGACVARIQALRQALC

SEQ ID NO: 28644 - protein, 1051 aa, Artificial Sequence
  Synthetic polypeptide
HLQSSLHCYCLRVILIFFPECYAKQKMRQAWKSWLIYVVVRRTKLQMQTTALEFRQRIILRVWWSTWRQRLGQVRVSRALHASALKHRALSLQVQAWSQWREQLLYVQKEKQKVVSAVKHHQHWQKRRFLKAWLEYLQVRRVKRQQNEMAERFHHVTVLQIYFCDWQQAWERRESLYAHHAQVEKLARKMALRRAFTHWKHYMLLCAEEAAQFEMAEEHHRHSQLLLHRFWNLWRSQIEQKKERELLPLLHAAWDHYRIALLCKCIELWLQYTQKRRYKQLLQARADGHFQQRALPAAFHTWNRLWRWRHQENVLSARATRFHRETLEKQVFSLWRQKMFQHRENRLAERMAILHAERQLLYRSWFMWHQQAAARHQEQEWQTVACAHHRHGRLKKAFCLWRESAQGLRTERTGRVRAAEFHMAQLLRWAWSQWRECLALRGAERQKLMRADLHHQHSVLHRALQAWVTYQGRVRSILREVAARESQHNRQLLRGALRRWKENTMARVDEAKKTFQASTHYRRTICSKVLVQWREAVSVQMYYRQQEDCAIWEAQKVLDRGCLRTWFQRWWDCSRRSAQQRLQLERAVQHHHRQLLLEGLARWKTHHLQCVRKRLLHRQSTQLLAQRLSRTCFRQWRQQLAARRQEQRATVRALWFWAFSLQAKVWATWLAFVLERRRKKARLQWALQAYQGQLLQEGATRLLRFAASMKASRQQLQAQQQVQAAHSLHRAVRRCATLWKQKVLGRGGKPQPLAAIAPSRKVTFEGPLLNRIAAGAGDGTLETKRPQASRPLGALGRLAAEEPHALELNTAHSARKQPRRPHFLLEPAQSQRPQKPQEHGLGMAQPAAPSLTRPFLAEAPTALVPHSPLPGALSSAPGPKQPPTASTGPELLLLPLSSFMPCGAAAPARVSAQRATPRDKPPVPSSLASVPDPHLLLPGDFSATRAGPGLSTAGSLDLEAELEEIQQQLLHYQTTKQNLWSCRRQASSLRRWLELNREEPGPEDQEVEQQVQKELEQVEMQIQLLAEELQAQRQPIGACVARIQALRQALC

SEQ ID NO: 28645 - protein, 229 aa, Artificial Sequence
  Synthetic polypeptide
HLQSSLHCYCLRVILIFFPECYAKQKMRQAWKSWLIYVVVRRTKLQMQTTALEFRQRIILRVWWSTWRQRLGQVRVSRALHASALKHRALSLQVQAWSQWREQLLYVQKEKQKVVSAVKHHQHWQKRRFLKAWLEYLQVRRVKRQQNAATGQSGWSFPAESPACCLPHMEQTLAMAPPGKCPQCKSNTFPQGDIREASIFSLEAEDVSASRKPPGRENGHPSRRATASV

SEQ ID NO: 28646 - protein, 75 aa, Artificial Sequence
  Synthetic polypeptide
HLQSSLHCYCLRVILIFFPECYAKQKMRQAWKSWLIYVVVRRTKLQMQTTALEFRQRIILRVWWSTWRQRLGQVR

SEQ ID NO: 28647 - protein, 367 aa, Artificial Sequence
  Synthetic polypeptide
SQHFGRPRQADHELAARRQEQRATVRALWFWAFSLQAKVWATWLAFVLERRRKKARLQWALQAYQGQLLQEGATRLLRFAASMKASRQQLQAQQQVQAAHSLHRAVRRCATLWKQKVLGRGGKPQPLAAIAPSRKVTFEGPLLNRIAAGAGDGTLETKRPQASRPLGALGRLAAEEPHALELNTAHSARKQPRRPHFLLEPAQSQRPQKPQEHGLGMAQPAAPSLTRPFLAEAPTALVPHSPLPGALSSAPGPKQPPTASTGPELLLLPLSSFMPCGAAAPARVSAQRATPRDKPPVPSSLASVPDPHLLLPGDFSATRAGPGLSTAAWTLRLNLRRSSSNYCTTRPPSRTSGPVGGKRAACAGGWS

SEQ ID NO: 28648 - protein, 91 aa, Artificial Sequence
  Synthetic polypeptide
PGAVAHACNPSTLGGRGRRIMSWQPGGRSSGRQCGPCGSGPSRCRQRCGPRGWPLYWKGGERRRGCSGRSRPTRGSSSRRVPRGSCALQPA

SEQ ID NO: 28649 - protein, 425 aa, Artificial Sequence
  Synthetic polypeptide
SQHFGRPRQADHELAARRQEQRATVRALWFWAFSLQAKVWATWLAFVLERRRKKARLQWALQAYQGQLLQEGATRLLRFAASMKASRQQLQAQQQVQAAHSLHRAVRRCATLWKQKVLGRGGKPQPLAAIAPSRKVTFEGPLLNRIAAGAGDGTLETKRPQASRPLGALGRLAAEEPHALELNTAHSARKQPRRPHFLLEPAQSQRPQKPQEHGLGMAQPAAPSLTRPFLAEAPTALVPHSPLPGALSSAPGPKQPPTASTGPELLLLPLSSFMPCGAAAPARVSAQRATPRDKPPVPSSLASVPDPHLLLPGDFSATRAGPGLSTAGSLDLEAELEEIQQQLLHYQTTKQNLWSCRRQASSLRRWLELNREEPGPEDQEVEQQVQKELEQVEMQIQLLAEELQAQRQPIGACVARIQALRQALC

SEQ ID NO: 28650 - protein, 83 aa, Artificial Sequence
  Synthetic polypeptide
SQHFGRPRQADHELAARRQEQRATVRALWFWAFSLQAKVWATWLAFVLERRRKKARLQWALQAYQGQLLQEGATRLLRFAASM

SEQ ID NO: 28651 - protein, 205 aa, Artificial Sequence
  Synthetic polypeptide
SQHFGRPRQADHELAARRQEQRATVRALWFWAFSLQAKVWATWLAFVLERRRKKARLQWALQAYQGQLLQEGATRLLRFAASMKASRQQLQAQQQVQAAHSLHRAVRRCATLWKQKVLGRGGKPQPLAAIAPSRKVTFEGPLLNRIAAGAGDGTLETKRPQASRPLGALGRLAAEEPHALELNTAHSARKQPRRPHFLLEPAQSQ

SEQ ID NO: 28652 - protein, 365 aa, Artificial Sequence
  Synthetic polypeptide
GQEIETILANTLAARRQEQRATVRALWFWAFSLQAKVWATWLAFVLERRRKKARLQWALQAYQGQLLQEGATRLLRFAASMKASRQQLQAQQQVQAAHSLHRAVRRCATLWKQKVLGRGGKPQPLAAIAPSRKVTFEGPLLNRIAAGAGDGTLETKRPQASRPLGALGRLAAEEPHALELNTAHSARKQPRRPHFLLEPAQSQRPQKPQEHGLGMAQPAAPSLTRPFLAEAPTALVPHSPLPGALSSAPGPKQPPTASTGPELLLLPLSSFMPCGAAAPARVSAQRATPRDKPPVPSSLASVPDPHLLLPGDFSATRAGPGLSTAAWTLRLNLRRSSSNYCTTRPPSRTSGPVGGKRAACAGGWS

SEQ ID NO: 28653 - protein, 93 aa, Artificial Sequence
  Synthetic polypeptide
SQHFGRPRQADHEVRRSRPSWLTRWQPGGRSSGRQCGPCGSGPSRCRQRCGPRGWPLYWKGGERRRGCSGRSRPTRGSSSRRVPRGSCALQPA

SEQ ID NO: 28654 - protein, 126 aa, Artificial Sequence
  Synthetic polypeptide
HAGSQEAGAAGDSAGPVVLGLLAAGKGVGHVAGLCTGKEEKEGAAAVGAPGLPGAAPPGGCHAAPALCSQHEGLPAAAAGPAAGPGGSQSPSCRPPLCHALETESAGPGREASAPGSHRTQQESDV

SEQ ID NO: 28655 - protein, 423 aa, Artificial Sequence
  Synthetic polypeptide
GQEIETILANTLAARRQEQRATVRALWFWAFSLQAKVWATWLAFVLERRRKKARLQWALQAYQGQLLQEGATRLLRFAASMKASRQQLQAQQQVQAAHSLHRAVRRCATLWKQKVLGRGGKPQPLAAIAPSRKVTFEGPLLNRIAAGAGDGTLETKRPQASRPLGALGRLAAEEPHALELNTAHSARKQPRRPHFLLEPAQSQRPQKPQEHGLGMAQPAAPSLTRPFLAEAPTALVPHSPLPGALSSAPGPKQPPTASTGPELLLLPLSSFMPCGAAAPARVSAQRATPRDKPPVPSSLASVPDPHLLLPGDFSATRAGPGLSTAGSLDLEAELEEIQQQLLHYQTTKQNLWSCRRQASSLRRWLELNREEPGPEDQEVEQQVQKELEQVEMQIQLLAEELQAQRQPIGACVARIQALRQALC

SEQ ID NO: 28656 - protein, 81 aa, Artificial Sequence
  Synthetic polypeptide
GQEIETILANTLAARRQEQRATVRALWFWAFSLQAKVWATWLAFVLERRRKKARLQWALQAYQGQLLQEGATRLLRFAASM

SEQ ID NO: 28657 - protein, 71 aa, Artificial Sequence
  Synthetic polypeptide
HAGSQEAGAAGDSAGPVVLGLLAAGKGVGHVAGLCTGKEEKEGAAAVGAPGLPGAAPPGGCHAAPALCSQH

SEQ ID NO: 28658 - protein, 203 aa, Artificial Sequence
  Synthetic polypeptide
GQEIETILANTLAARRQEQRATVRALWFWAFSLQAKVWATWLAFVLERRRKKARLQWALQAYQGQLLQEGATRLLRFAASMKASRQQLQAQQQVQAAHSLHRAVRRCATLWKQKVLGRGGKPQPLAAIAPSRKVTFEGPLLNRIAAGAGDGTLETKRPQASRPLGALGRLAAEEPHALELNTAHSARKQPRRPHFLLEPAQSQ

SEQ ID NO: 28659 - protein, 19 aa, Artificial Sequence
  Synthetic polypeptide
KTENFPPRSVTRRRTVVMK

SEQ ID NO: 28660 - protein, 5 aa, Artificial Sequence
  Synthetic polypeptide
QGEEL

SEQ ID NO: 28661 - protein, 1304 aa, Artificial Sequence
  Synthetic polypeptide
KLSPKISNKEKNCSHEVTVVLFSRTFYDAKSVDEFPEINRASIRQDHKGRFYEDFYKVVVQNERREEWTSLLVTIKKLFIQYPVLVRLEQAEGFPQGDNSTSAQGNYLEAINLSFNVFDKHYINRNFDRTGQMSVVITPGVGVFEVDRLLMILTKQRMIDNGIGVDLVCMGEQPLHAVPLFKLHNRSAPRDSRLGDDYNIPHWINHSFYTSKSQLFCNSFTPRIKLAGKKPASEKAKNGRDTSLGSPKESENALPIQVDYDAYDAQVFRLPGPSRAQCLTTCRSVRERESHSRKSASSCDVSSSPSLPSRTLPTEEVRSQASDDSSLGKSANILMIPHPHLHQYEVSSSLGYTSTRDVLENMMEPPQRDSSAPGRFHVGSAESMLHVRPGGYTPQRALINPFAPSRMPMKLTSNRRRWMHTFPVGMNPRTQNKDSLEDSVSTSPDPILTLSAPPVVPGFCCTVGVDWKSLTTPACLPLTTDYFPDRQGLQNDYTEGCYDLLPEADIDRRDEDGVQMTAQQVFEEFICQRLMQGYQIIVQPKTQKPNPAVPPPLSSSPLYSRGLVSRNRPEEEDQYWLSMGRTFHKVTLKDKMITVTRYLPKYPYESAQIHYTYSLCPSHSDSEFVSCWVEFSHERLEEYKWNYLDQYICSAGSEDFSLIESLKFWRTRFLLLPACVTATKRITEGEAHCDIYGDRPRADEDEWQLLDGFVRFVEGLNRIRRRHRSDRMMRKGTAMKGLQMTGPISTHSLESTAPPVGKKGTSALSALLEMEASQKCLGEQQAAVHGGKSSAQSAESSSVAMTPTYMDSPRKVSVDQTATPMLDGTSLGICTGQSMDRGNSQTFGNSQNIGEQGYSSTNSSDSSSQQLVASSLTSSSTLTEILEAMKHPSTGVQLLSEQKGLSPYCFISAEVVHWLVNHVEGIQTQAMAIDIMQKMLEEQLITHASGEAWRTFIYGFYFYKIVTDKEPDRVAMQQPATTWHTAGVDDFASFQRKWFEVAFVAEELVHSEIPAFLLPWLPSRPASYASRHSSFSRSFGGRSQAAALLAATVPEQRTVTLDVDVNNRTDRLEWCSCYYHGNFSLNAAFEIKLHWMAVTAAVLFEMVQGWHRKATSCGFLLVPVLEGPFALPSYLYGDPLRAQLFIPLNISCLLKEGSEHLFDSFEPETYWDRMHLFQEAIAHRFGFVQDKYSASAFNFPAENKPQYIHVTGTVFLQLPYSKRKFSGQQRRRRNSTSSTNQNMFCEERVGYNWAYNTMLTKTWRSSATGDEKFADRLLKDFTDFCINRDNRLVTFWTSCLEKMHASAP

SEQ ID NO: 28662 - protein, 493 aa, Artificial Sequence
  Synthetic polypeptide
KLSPKISNKEKNCSHEVTVVLFSRTFYDAKSVDEFPEINRASIRQDHKGRFYEDFYKVVVQNERREEWTSLLVTIKKLFIQYPVLVRLEQAEGFPQGDNSTSAQGNYLEAINLSFNVFDKHYINRNFDRTGQMSVVITPGVGVFEVDRLLMILTKQRMIDNGIGVDLVCMGEQPLHAVPLFKLHNRSAPRDSRLGDDYNIPHWINHSFYTSKSQLFCNSFTPRIKLAGKKPASEKAKNGRDTSLGSPKESENALPIQVDYDAYDAQVFRLPGPSRAQCLTTCRSVRERESHSRKSASSCDVSSSPSLPSRTLPTEEVRSQASDDSSLGKSANILMIPHPHLHQYEVSSSLGYTSTRDVLENMMEPPQRDSSAPGRFHVGSAESMLHVRPGGYTPQRALINPFAPSRMPMKLTSNRRRWMHTFPVGMNPRTQNKDSLEDSVSTSPDPSKRGQLTGERGRQGVWGGQSMRKQEEALWEVSGPEVHIPLGYGKAMW

SEQ ID NO: 28663 - protein, 360 aa, Artificial Sequence
  Synthetic polypeptide
KLSPKISNKEKNCSHEVTVVLFSRTFYDAKSVDEFPEINRASIRQDHKGRFYEDFYKVVVQNERREEWTSLLVTIKKLFIQYPVLVRLEQAEGFPQGDNSTSAQGNYLEAINLSFNVFDKHYINRNFDRTGQMSVVITPGVGVFEVDRLLMILTKQRMIDNGIGVDLVCMGEQPLHAVPLFKLHNRSAPRDSRLGDDYNIPHWINHSFYTSKSQLFCNSFTPRIKLAGKKPASEKAKNGRDTSLGSPKESENALPIQVDYDAYDAQVFRLPGPSRAQCLTTCRSVRERESHSRKSASSCDVSSSPSLPSRTLPTEEVRSQASDDSSLGKSANILMIPHPHLHQYEVSSSLGYTSTREHLG

SEQ ID NO: 28664 - protein, 1382 aa, Artificial Sequence
  Synthetic polypeptide
KLSPKISNKEKNCSHEVTVVLFSRTFYDAKSVDEFPEINRASIRQDHKGRFYEDFYKVVVQNERREEWTSLLVTIKKLFIQYPVLVRLEQAEGFPQGDNSTSAQGNYLEAINLSFNVFDKHYINRNFDRTGQMSVVITPGVGVFEVDRLLMILTKQRMIDNGIGVDLVCMGEQPLHAVPLFKLHNRSAPRDSRLGDDYNIPHWINHSFYTSKSQLFCNSFTPRIKLAGKKPASEKAKNGRDTSLGSPKESENALPIQVDYDAYDAQVFRLPGPSRAQCLTTCRSVRERESHSRKSASSCDVSSSPSLPSRTLPTEEVRSQASDDSSLGKSANILMIPHPHLHQYEVSSSLGYTSTRDVLENMMEPPQRDSSAPGRFHVGSAESMLHVRPGGYTPQRALINPFAPSRMPMKLTSNRRRWMHTFPVGPSGEAIQIHHQTRQNMAELQGSGQRDPTHSSAELLELAYHEAAGRHSNSRQPGDGMSFLNFSGTEELSVGLLSNSGAGMNPRTQNKDSLEDSVSTSPDPILTLSAPPVVPGFCCTVGVDWKSLTTPACLPLTTDYFPDRQGLQNDYTEGCYDLLPEADIDRRDEDGVQMTAQQVFEEFICQRLMQGYQIIVQPKTQKPNPAVPPPLSSSPLYSRGLVSRNRPEEEDQYWLSMGRTFHKVTLKDKMITVTRYLPKYPYESAQIHYTYSLCPSHSDSEFVSCWVEFSHERLEEYKWNYLDQYICSAGSEDFSLIESLKFWRTRFLLLPACVTATKRITEGEAHCDIYGDRPRADEDEWQLLDGFVRFVEGLNRIRRRHRSDRMMRKGTAMKGLQMTGPISTHSLESTAPPVGKKGTSALSALLEMEASQKCLGEQQAAVHGGKSSAQSAESSSVAMTPTYMDSPRKVSVDQTATPMLDGTSLGICTGQSMDRGNSQTFGNSQNIGEQGYSSTNSSDSSSQQLVASSLTSSSTLTEILEAMKHPSTGVQLLSEQKGLSPYCFISAEVVHWLVNHVEGIQTQAMAIDIMQKMLEEQLITHASGEAWRTFIYGFYFYKIVTDKEPDRVAMQQPATTWHTAGVDDFASFQRKWFEVAFVAEELVHSEIPAFLLPWLPSRPASYASRHSSFSRSFGGRSQAAALLAATVPEQRTVTLDVDVNNRTDRLEWCSCYYHGNFSLNAAFEIKLHWMAVTAAVLFEMVQGWHRKATSCGFLLVPVLEGPFALPSYLYGDPLRAQLFIPLNISCLLKEGSEHLFDSFEPETYWDRMHLFQEAIAHRFGFVQDKYSASAFNFPAENKPQYIHVTGTVFLQLPYSKRKFSGQQRRRRNSTSSTNQNMFCEERVGYNWAYNTMLTKTWRSSATGDEKFADRLLKDFTDFCINRDNRLVTFWTSCLEKMHASAP

SEQ ID NO: 28665 - protein, 1030 aa, Artificial Sequence
  Synthetic polypeptide
KLSPKISNKEKNCSHEVTVVLFSRTFYDAKSVDEFPEINRASIRQDHKGRFYEDFYKVVVQNERREEWTSLLVTIKKLFIQYPVLVRLEQAEGFPQGDNSTSAQGNYLEAINLSFNVFDKHYINRNFDRTGQMSVVITPGVGVFEVDRLLMILTKQRMIDNGIGVDLVCMGEQPLHAVPLFKLHNRSAPRDSRLGDDYNIPHWINHSFYTSKSQLFCNSFTPRIKLAGKKPASEKAKNGRDTSLGSPKESENALPIQVDYDAYDAQVFRLPGPSRAQCLTTCRSVRERESHSRKSASSCDVSSSPSLPSRTLPTEEVRSQASDDSSLGKSANILMIPHPHLHQYEVSSSLGYTSTRDVLENMMEPPQRDSSAPGRFHVGSAESMLHVRPGGYTPQRALINPFAPSRMPMKLTSNRRRWMHTFPVGMNPRTQNKDSLEDSVSTSPDPILTLSAPPVVPGFCCTVGVDWKSLTTPACLPLTTDYFPDRQGLQNDYTEGCYDLLPEADIDRRDEDGVQMTAQQVFEEFICQRLMQGYQIIVQPKTQKPNPAVPPPLSSSPLYSRGLVSRNRPEEEDQYWLSMGRTFHKVTLKDKMITVTRYLPKYPYESAQIHYTYSLCPSHSDSEFVSCWVEFSHERLEEYKWNYLDQYICSAGSEDFSLIESLKFWRTRFLLLPACVTATKRITEGEAHCDIYGDRPRADEDEWQLLDGFVRFVEGLNRIRRRHRSDRMMRKGTAMKGLQMTGPISTHSLESTAPPVGKKGTSALSALLEMEASQKCLGEQQAAVHGGKSSAQSAESSSVAMTPTYMDSPRKDGAFFMEFVRSPRTASSAFYPQVSVDQTATPMLDGTSLGICTGQSMDRGNSQTFGNSQNIGEQGYSSTNSSDSSSQQLVASSLTSSSTLTEILEAMKHPSTGVQLLSEQKGLSPYCFISAEVVHWLVNHVEGIQTQAMAIDIMQWPCSSPPPPGTQQEWTTSPASSASGLRWPLWQKSSCTLRFLPFSCPGCLAGQPPMQVGTAPLAEVLEDGARRQHF

SEQ ID NO: 28666 - protein, 1353 aa, Artificial Sequence
  Synthetic polypeptide
KLSPKISNKEKNCSHEVTVVLFSRTFYDAKSVDEFPEINRASIRQDHKGRFYEDFYKVVVQNERREEWTSLLVTIKKLFIQYPVLVRLEQAEGFPQGDNSTSAQGNYLEAINLSFNVFDKHYINRNFDRTGQMSVVITPGVGVFEVDRLLMILTKQRMIDNGIGVDLVCMGEQPLHAVPLFKLHNRSAPRDSRLGDDYNIPHWINHSFYTSKSQLFCNSFTPRIKLAGKKPASEKAKNGRDTSLGSPKESENALPIQVDYDAYDAQVFRLPGPSRAQCLTTCRSVRERESHSRKSASSCDVSSSPSLPSRTLPTEEVRSQASDDSSLGKSANILMIPHPHLHQYEVSSSLGYTSTRDVLENMMEPPQRDSSAPGRFHVGSAESMLHVRPGGYTPQRALINPFAPSRMPMKLTSNRRRWMHTFPVGPSGEAIQIHHQTRQNMAELQGSGQRDPTHSSAELLELAYHEAAGRHSNSRQPGDGMSFLNFSGTEELSVGLLSNSGAGMNPRTQNKDSLEDSVSTSPDPILTLSAPPVVPGFCCTVGVDWKSLTTPACLPLTTDYFPDRQGLQNDYTEGCYDLLPEADIDRRDEDGVQMTAQQVFEEFICQRLMQGYQIIVQPKTQKPNPAVPPPLSSSPLYSRGLVSRNRPEEEDQYWLSMGRTFHKVTLKDKMITVTRYLPKYPYESAQIHYTYSLCPSHSDSEFVSCWVEFSHERLEEYKWNYLDQYICSAGSEDFSLIESLKFWRTRFLLLPACVTATKRITEGEAHCDIYGDRPRADEDEWQLLDGFVRFVEGLNRIRRRHRSDRMMRKGTAMKGLQMTGPISTHSLESTAPPVGKKGTSALSALLEMEASQKCLGEQQAAVHGGKSSAQSAESSSVAMTPTYMDSPRKDGAFFMEFVRSPRTASSAFYPQVSVDQTATPMLDGTSLGICTGQSMDRGNSQTFGNSQNIGEQGYSSTNSSDSSSQQLVASSLTSSSTLTEILEAMKHPSTGVQLLSEQKGLSPYCFISAEVVHWLVNHVEGIQTQAMAIDIMQKMLEEQLITHASGEAWRTFIYGFYFYKIVTDKEPDRVAMQQPATTWHTAGVDDFASFQRKWFEVAFVAEELVHSEIPAFLLPWLPSRPASYASRHSSFSRSFGGRSQAAALLAATVPEQRTVTLDVDVNNRTDRLEWCSCYYHGNFSLNAAFEIKLHWMAVTAAVLFEMVQGWHRKATSCGFLLVPVLEGPFALPSYLYGDPLRAQLFIPLNISCLLKEGSEHLFDSLGLYKINILPLLLTSLLRTSLSISTLQEQCFCSCPTPSASSQGSSGGGGTPPAPPTRTCSARSGSATTGPTTPCSPKHGAPAPQGMKSLLIGC

SEQ ID NO: 28667 - protein, 1373 aa, Artificial Sequence
  Synthetic polypeptide
KLSPKISNKEKNCSHEVTVVLFSRTFYDAKSVDEFPEINRASIRQDHKGRFYEDFYKVVVQNERREEWTSLLVTIKKLFIQYPVLVRLEQAEGFPQGDNSTSAQGNYLEAINLSFNVFDKHYINRNFDRTGQMSVVITPGVGVFEVDRLLMILTKQRMIDNGIGVDLVCMGEQPLHAVPLFKLHNRSAPRDSRLGDDYNIPHWINHSFYTSKSQLFCNSFTPRIKLAGKKPASEKAKNGRDTSLGSPKESENALPIQVDYDAYDAQVFRLPGPSRAQCLTTCRSVRERESHSRKSASSCDVSSSPSLPSRTLPTEEVRSQASDDSSLGKSANILMIPHPHLHQYEVSSSLGYTSTRDVLENMMEPPQRDSSAPGRFHVGSAESMLHVRPGGYTPQRALINPFAPSRMPMKLTSNRRRWMHTFPVGPSGEAIQIHHQTRQNMAELQGSGQRDPTHSSAELLELAYHEAAGRHSNSRQPGDGMSFLNFSGTEELSVGLLSNSGAGMNPRTQNKDSLEDSVSTSPDPMPGFCCTVGVDWKSLTTPACLPLTTDYFPDRQGLQNDYTEGCYDLLPEADIDRRDEDGVQMTAQQVFEEFICQRLMQGYQIIVQPKTQKPNPAVPPPLSSSPLYSRGLVSRNRPEEEDQYWLSMGRTFHKVTLKDKMITVTRYLPKYPYESAQIHYTYSLCPSHSDSEFVSCWVEFSHERLEEYKWNYLDQYICSAGSEDFSLIESLKFWRTRFLLLPACVTATKRITEGEAHCDIYGDRPRADEDEWQLLDGFVRFVEGLNRIRRRHRSDRMMRKGTAMKGLQMTGPISTHSLESTAPPVGKKGTSALSALLEMEASQKCLGEQQAAVHGGKSSAQSAESSSVAMTPTYMDSPRKVSVDQTATPMLDGTSLGICTGQSMDRGNSQTFGNSQNIGEQGYSSTNSSDSSSQQLVASSLTSSSTLTEILEAMKHPSTGVQLLSEQKGLSPYCFISAEVVHWLVNHVEGIQTQAMAIDIMQKMLEEQLITHASGEAWRTFIYGFYFYKIVTDKEPDRVAMQQPATTWHTAGVDDFASFQRKWFEVAFVAEELVHSEIPAFLLPWLPSRPASYASRHSSFSRSFGGRSQAAALLAATVPEQRTVTLDVDVNNRTDRLEWCSCYYHGNFSLNAAFEIKLHWMAVTAAVLFEMVQGWHRKATSCGFLLVPVLEGPFALPSYLYGDPLRAQLFIPLNISCLLKEGSEHLFDSFEPETYWDRMHLFQEAIAHRFGFVQDKYSASAFNFPAENKPQYIHVTGTVFLQLPYSKRKFSGQQRRRRNSTSSTNQNMFCEERVGYNWAYNTMLTKTWRSSATGDEKFADRLLKDFTDFCINRDNRLVTFWTSCLEKMHASAP

SEQ ID NO: 28668 - protein, 1395 aa, Artificial Sequence
  Synthetic polypeptide
KLSPKISNKEKNCSHEVTVVLFSRTFYDAKSVDEFPEINRASIRQDHKGRFYEDFYKVVVQNERREEWTSLLVTIKKLFIQYPVLVRLEQAEGFPQGDNSTSAQGNYLEAINLSFNVFDKHYINRNFDRTGQMSVVITPGVGVFEVDRLLMILTKQRMIDNGIGVDLVCMGEQPLHAVPLFKLHNRSAPRDSRLGDDYNIPHWINHSFYTSKSQLFCNSFTPRIKLAGKKPASEKAKNGRDTSLGSPKESENALPIQVDYDAYDAQVFRLPGPSRAQCLTTCRSVRERESHSRKSASSCDVSSSPSLPSRTLPTEEVRSQASDDSSLGKSANILMIPHPHLHQYEVSSSLGYTSTRDVLENMMEPPQRDSSAPGRFHVGSAESMLHVRPGGYTPQRALINPFAPSRMPMKLTSNRRRWMHTFPVGPSGEAIQIHHQTRQNMAELQGSGQRDPTHSSAELLELAYHEAAGRHSNSRQPGDGMSFLNFSGTEELSVGLLSNSGAGMNPRTQNKDSLEDSVSTSPDPMPGFCCTVGVDWKSLTTPACLPLTTDYFPDRQGLQNDYTEGCYDLLPEADIDRRDEDGVQMTAQQVFEEFICQRLMQGYQIIVQPKTQKPNPAVPPPLSSSPLYSRGLVSRNRPEEEDQYWLSMGRTFHKVTLKDKMITVTRYLPKYPYESAQIHYTYSLCPSHSDSEFVSCWVEFSHERLEEYKWNYLDQYICSAGSEDFSLIESLKFWRTRFLLLPACVTATKRITEGEAHCDIYGDRPRADEDEWQLLDGFVRFVEGLNRIRRRHRSDRMMRKGTAMKGLQMTGPISTHSLESTAPPVGKKGTSALSALLEMEASQKCLGEQQAAVHGGKSSAQSAESSSVAMTPTYMDSPRKDGAFFMEFVRSPRTASSAFYPQVSVDQTATPMLDGTSLGICTGQSMDRGNSQTFGNSQNIGEQGYSSTNSSDSSSQQLVASSLTSSSTLTEILEAMKHPSTGVQLLSEQKGLSPYCFISAEVVHWLVNHVEGIQTQAMAIDIMQKMLEEQLITHASGEAWRTFIYGFYFYKIVTDKEPDRVAMQQPATTWHTAGVDDFASFQRKWFEVAFVAEELVHSEIPAFLLPWLPSRPASYASRHSSFSRSFGGRSQAAALLAATVPEQRTVTLDVDVNNRTDRLEWCSCYYHGNFSLNAAFEIKLHWMAVTAAVLFEMVQGWHRKATSCGFLLVPVLEGPFALPSYLYGDPLRAQLFIPLNISCLLKEGSEHLFDSFEPETYWDRMHLFQEAIAHRFGFVQDKYSASAFNFPAENKPQYIHVTGTVFLQLPYSKRKFSGQQRRRRNSTSSTNQNMFCEERVGYNWAYNTMLTKTWRSSATGDEKFADRLLKDFTDFCINRDNRLVTFWTSCLEKMHASAP

SEQ ID NO: 28669 - protein, 6 aa, Artificial Sequence
  Synthetic polypeptide
DLQYES

SEQ ID NO: 28670 - protein, 891 aa, Artificial Sequence
  Synthetic polypeptide
IQVPPTYCEIFSMNPRTQNKDSLEDSVSTSPDPILTLSAPPVVPGFCCTVGVDWKSLTTPACLPLTTDYFPDRQGLQNDYTEGCYDLLPEADIDRRDEDGVQMTAQQVFEEFICQRLMQGYQIIVQPKTQKPNPAVPPPLSSSPLYSRGLVSRNRPEEEDQYWLSMGRTFHKVTLKDKMITVTRYLPKYPYESAQIHYTYSLCPSHSDSEFVSCWVEFSHERLEEYKWNYLDQYICSAGSEDFSLIESLKFWRTRFLLLPACVTATKRITEGEAHCDIYGDRPRADEDEWQLLDGFVRFVEGLNRIRRRHRSDRMMRKGTAMKGLQMTGPISTHSLESTAPPVGKKGTSALSALLEMEASQKCLGEQQAAVHGGKSSAQSAESSSVAMTPTYMDSPRKVSVDQTATPMLDGTSLGICTGQSMDRGNSQTFGNSQNIGEQGYSSTNSSDSSSQQLVASSLTSSSTLTEILEAMKHPSTGVQLLSEQKGLSPYCFISAEVVHWLVNHVEGIQTQAMAIDIMQKMLEEQLITHASGEAWRTFIYGFYFYKIVTDKEPDRVAMQQPATTWHTAGVDDFASFQRKWFEVAFVAEELVHSEIPAFLLPWLPSRPASYASRHSSFSRSFGGRSQAAALLAATVPEQRTVTLDVDVNNRTDRLEWCSCYYHGNFSLNAAFEIKLHWMAVTAAVLFEMVQGWHRKATSCGFLLVPVLEGPFALPSYLYGDPLRAQLFIPLNISCLLKEGSEHLFDSFEPETYWDRMHLFQEAIAHRFGFVQDKYSASAFNFPAENKPQYIHVTGTVFLQLPYSKRKFSGQQRRRRNSTSSTNQNMFCEERVGYNWAYNTMLTKTWRSSATGDEKFADRLLKDFTDFCINRDNRLVTFWTSCLEKMHASAP

SEQ ID NO: 28671 - protein, 23 aa, Artificial Sequence
  Synthetic polypeptide
SICKVEQKESKFRFLLLTVRSSV

SEQ ID NO: 28672 - protein, 80 aa, Artificial Sequence
  Synthetic polypeptide
IQVPPTYCEIFSMNPRTQNKDSLEDSVSTSPDPSKRGQLTGERGRQGVWGGQSMRKQEEALWEVSGPEVHIPLGYGKAMW

SEQ ID NO: 28673 - protein, 617 aa, Artificial Sequence
  Synthetic polypeptide
IQVPPTYCEIFSMNPRTQNKDSLEDSVSTSPDPILTLSAPPVVPGFCCTVGVDWKSLTTPACLPLTTDYFPDRQGLQNDYTEGCYDLLPEADIDRRDEDGVQMTAQQVFEEFICQRLMQGYQIIVQPKTQKPNPAVPPPLSSSPLYSRGLVSRNRPEEEDQYWLSMGRTFHKVTLKDKMITVTRYLPKYPYESAQIHYTYSLCPSHSDSEFVSCWVEFSHERLEEYKWNYLDQYICSAGSEDFSLIESLKFWRTRFLLLPACVTATKRITEGEAHCDIYGDRPRADEDEWQLLDGFVRFVEGLNRIRRRHRSDRMMRKGTAMKGLQMTGPISTHSLESTAPPVGKKGTSALSALLEMEASQKCLGEQQAAVHGGKSSAQSAESSSVAMTPTYMDSPRKDGAFFMEFVRSPRTASSAFYPQVSVDQTATPMLDGTSLGICTGQSMDRGNSQTFGNSQNIGEQGYSSTNSSDSSSQQLVASSLTSSSTLTEILEAMKHPSTGVQLLSEQKGLSPYCFISAEVVHWLVNHVEGIQTQAMAIDIMQWPCSSPPPPGTQQEWTTSPASSASGLRWPLWQKSSCTLRFLPFSCPGCLAGQPPMQVGTAPLAEVLEDGARRQHF

SEQ ID NO: 28674 - protein, 862 aa, Artificial Sequence
  Synthetic polypeptide
IQVPPTYCEIFSMNPRTQNKDSLEDSVSTSPDPILTLSAPPVVPGFCCTVGVDWKSLTTPACLPLTTDYFPDRQGLQNDYTEGCYDLLPEADIDRRDEDGVQMTAQQVFEEFICQRLMQGYQIIVQPKTQKPNPAVPPPLSSSPLYSRGLVSRNRPEEEDQYWLSMGRTFHKVTLKDKMITVTRYLPKYPYESAQIHYTYSLCPSHSDSEFVSCWVEFSHERLEEYKWNYLDQYICSAGSEDFSLIESLKFWRTRFLLLPACVTATKRITEGEAHCDIYGDRPRADEDEWQLLDGFVRFVEGLNRIRRRHRSDRMMRKGTAMKGLQMTGPISTHSLESTAPPVGKKGTSALSALLEMEASQKCLGEQQAAVHGGKSSAQSAESSSVAMTPTYMDSPRKDGAFFMEFVRSPRTASSAFYPQVSVDQTATPMLDGTSLGICTGQSMDRGNSQTFGNSQNIGEQGYSSTNSSDSSSQQLVASSLTSSSTLTEILEAMKHPSTGVQLLSEQKGLSPYCFISAEVVHWLVNHVEGIQTQAMAIDIMQKMLEEQLITHASGEAWRTFIYGFYFYKIVTDKEPDRVAMQQPATTWHTAGVDDFASFQRKWFEVAFVAEELVHSEIPAFLLPWLPSRPASYASRHSSFSRSFGGRSQAAALLAATVPEQRTVTLDVDVNNRTDRLEWCSCYYHGNFSLNAAFEIKLHWMAVTAAVLFEMVQGWHRKATSCGFLLVPVLEGPFALPSYLYGDPLRAQLFIPLNISCLLKEGSEHLFDSLGLYKINILPLLLTSLLRTSLSISTLQEQCFCSCPTPSASSQGSSGGGGTPPAPPTRTCSARSGSATTGPTTPCSPKHGAPAPQGMKSLLIGC

SEQ ID NO: 28675 - protein, 882 aa, Artificial Sequence
  Synthetic polypeptide
IQVPPTYCEIFSMNPRTQNKDSLEDSVSTSPDPMPGFCCTVGVDWKSLTTPACLPLTTDYFPDRQGLQNDYTEGCYDLLPEADIDRRDEDGVQMTAQQVFEEFICQRLMQGYQIIVQPKTQKPNPAVPPPLSSSPLYSRGLVSRNRPEEEDQYWLSMGRTFHKVTLKDKMITVTRYLPKYPYESAQIHYTYSLCPSHSDSEFVSCWVEFSHERLEEYKWNYLDQYICSAGSEDFSLIESLKFWRTRFLLLPACVTATKRITEGEAHCDIYGDRPRADEDEWQLLDGFVRFVEGLNRIRRRHRSDRMMRKGTAMKGLQMTGPISTHSLESTAPPVGKKGTSALSALLEMEASQKCLGEQQAAVHGGKSSAQSAESSSVAMTPTYMDSPRKVSVDQTATPMLDGTSLGICTGQSMDRGNSQTFGNSQNIGEQGYSSTNSSDSSSQQLVASSLTSSSTLTEILEAMKHPSTGVQLLSEQKGLSPYCFISAEVVHWLVNHVEGIQTQAMAIDIMQKMLEEQLITHASGEAWRTFIYGFYFYKIVTDKEPDRVAMQQPATTWHTAGVDDFASFQRKWFEVAFVAEELVHSEIPAFLLPWLPSRPASYASRHSSFSRSFGGRSQAAALLAATVPEQRTVTLDVDVNNRTDRLEWCSCYYHGNFSLNAAFEIKLHWMAVTAAVLFEMVQGWHRKATSCGFLLVPVLEGPFALPSYLYGDPLRAQLFIPLNISCLLKEGSEHLFDSFEPETYWDRMHLFQEAIAHRFGFVQDKYSASAFNFPAENKPQYIHVTGTVFLQLPYSKRKFSGQQRRRRNSTSSTNQNMFCEERVGYNWAYNTMLTKTWRSSATGDEKFADRLLKDFTDFCINRDNRLVTFWTSCLEKMHASAP

SEQ ID NO: 28676 - protein, 904 aa, Artificial Sequence
  Synthetic polypeptide
IQVPPTYCEIFSMNPRTQNKDSLEDSVSTSPDPMPGFCCTVGVDWKSLTTPACLPLTTDYFPDRQGLQNDYTEGCYDLLPEADIDRRDEDGVQMTAQQVFEEFICQRLMQGYQIIVQPKTQKPNPAVPPPLSSSPLYSRGLVSRNRPEEEDQYWLSMGRTFHKVTLKDKMITVTRYLPKYPYESAQIHYTYSLCPSHSDSEFVSCWVEFSHERLEEYKWNYLDQYICSAGSEDFSLIESLKFWRTRFLLLPACVTATKRITEGEAHCDIYGDRPRADEDEWQLLDGFVRFVEGLNRIRRRHRSDRMMRKGTAMKGLQMTGPISTHSLESTAPPVGKKGTSALSALLEMEASQKCLGEQQAAVHGGKSSAQSAESSSVAMTPTYMDSPRKDGAFFMEFVRSPRTASSAFYPQVSVDQTATPMLDGTSLGICTGQSMDRGNSQTFGNSQNIGEQGYSSTNSSDSSSQQLVASSLTSSSTLTEILEAMKHPSTGVQLLSEQKGLSPYCFISAEVVHWLVNHVEGIQTQAMAIDIMQKMLEEQLITHASGEAWRTFIYGFYFYKIVTDKEPDRVAMQQPATTWHTAGVDDFASFQRKWFEVAFVAEELVHSEIPAFLLPWLPSRPASYASRHSSFSRSFGGRSQAAALLAATVPEQRTVTLDVDVNNRTDRLEWCSCYYHGNFSLNAAFEIKLHWMAVTAAVLFEMVQGWHRKATSCGFLLVPVLEGPFALPSYLYGDPLRAQLFIPLNISCLLKEGSEHLFDSFEPETYWDRMHLFQEAIAHRFGFVQDKYSASAFNFPAENKPQYIHVTGTVFLQLPYSKRKFSGQQRRRRNSTSSTNQNMFCEERVGYNWAYNTMLTKTWRSSATGDEKFADRLLKDFTDFCINRDNRLVTFWTSCLEKMHASAP

SEQ ID NO: 28677 - protein, 88 aa, Artificial Sequence
  Synthetic polypeptide
PGVVAHVATQEAEWPCSSPPPPGTQQEWTTSPASSASGLRWPLWQKSSCTLRFLPFSCPGCLAGQPPMQVGTAPLAEVLEDGARRQHF

SEQ ID NO: 28678 - protein, 56 aa, Artificial Sequence
  Synthetic polypeptide
DQPGQHGEIPSTKNTKISRAWWRMLLLKRLSGHAAARHHLAHSRSGRLRQLPAQVV

SEQ ID NO: 28679 - protein, 332 aa, Artificial Sequence
  Synthetic polypeptide
SQHFGRPRRAGYLKSGVQDQPGQNDLSAQWKQLEDRGASSRRVDMAALFQEASSCPVCSDYLEKPMSLECGCAVCLKCINSLQKEPHGEDLLCCCSSMVSRKNKIRRNRQLERLASHIKELEPKLKKILQMNPRMRKFQVDMTLDANTANNFLLISDDLRSVRSGRIRQNRQDLAERFDVSVCILGSPRFTCGRHCWEVDVGTSTEWDLGVCRESVHRKGRIQLTTELGFWTVSLRDGGRLSATTVPLTFLFVDRKLQRVGIFLDMGMQNVSFFDAESGSHVYTFRSVSAEEPLRPFLAPSVPPNGDQGVLSICPLMNSGTTDAPVRPGEAK

SEQ ID NO: 28680 - protein, 12 aa, Artificial Sequence
  Synthetic polypeptide
SQEFKTSLDKMT

SEQ ID NO: 28681 - protein, 620 aa, Artificial Sequence
  Synthetic polypeptide
RLSAGVAMLKTNRGTIGGFFLAGRDMAWWPMGASLFASNIGSNHYVGLAGTGAASGVATVTFEWTSSVMLLILGWIFVPIYIKSGVMTMPEYLKKRFGGERLQVYLSILSLFICVVLLISADIFAGAIFIKLALGLDLYLAIFILLAMTAVYTTTGGLASVIYTDTLQTIIMLIGSFILMGFAFNEVGGYESFTEKYVNATPSVVEGDNLTISASCYTPRADSFHIFRDAVTGDIPWPGIIFGMPITALWYWCTNQVIVQRCLCGKDMSHVKAACIMCAYLKLLPMFLMVMPGMISRILYTDMVACVVPSECVKHCGVDVGCTNYAYPTMVLELMPQGLRGLMLSVMLASLMSSLTSIFNSASTLFTIDLYTKMRKQASEKELLIAGRIFVLLLTVVSIVWVPLVQVSQNGQLIHYTESISSYLGPPIAAVFVLAIFCKRVNEQGAFWGLMVGLAMGLIRMITEFAYGTGSCLAPSNCPKIICGVHYLYFSIVLFFGSMLVTLGISLLTKPIPDVHLYRLCWVLRNSTEERIDIDAEEKSQEETDDGVEEDYPEKSRGCLKKAYDLFCGLQKGPKLTKEEEEALSKKLTDTSERPSWRTIVNINAILLLAVVVFIHGYYA

SEQ ID NO: 28682 - protein, 50 aa, Artificial Sequence
  Synthetic polypeptide
SRLSWLCLPSCFMPGGGAACWRLELVAPPLASLWLVAAMETKDSALEWRC

SEQ ID NO: 28683 - protein, 65 aa, Artificial Sequence
  Synthetic polypeptide
LGFLGFACPVVSCQEEEPPAGGWSLWHHRSPRCGWWRPWRLKTQRWSGDAEDQPRYYRRLLPRWS

SEQ ID NO: 28684 - protein, 3 aa, Artificial Sequence
  Synthetic polypeptide
QSS

SEQ ID NO: 28685 - protein, 48 aa, Artificial Sequence
  Synthetic polypeptide
AKIMPLHSSLDDKAPESYKNVTDVVNTCHDAGISKKAIKLRPIAVIKG

SEQ ID NO: 28686 - protein, 10 aa, Artificial Sequence
  Synthetic polypeptide
MTKLLSPIRM

SEQ ID NO: 28687 - protein, 40 aa, Artificial Sequence
  Synthetic polypeptide
NPIPTHNTKVNQAWWHTPVVPATQETEVVSGLTSTVVSAC

SEQ ID NO: 28688 - protein, 12 aa, Artificial Sequence
  Synthetic polypeptide
SQLLRRLRWCRV

SEQ ID NO: 28689 - protein, 93 aa, Artificial Sequence
  Synthetic polypeptide
ITWFSKLPHAVIFTLKKPVCPGHHTRREHAPSWDFYGGLLERNSAGSKWKTSLTSRTSPAWSPWPKPTPPPRPSSTPSTTSASRKLDPTTRLT

SEQ ID NO: 28690 - protein, 37 aa, Artificial Sequence
  Synthetic polypeptide
KNQYVPAITPGGSMLQAGTSMEACWRETQQDQSGKPA

SEQ ID NO: 28691 - protein, 362 aa, Artificial Sequence
  Synthetic polypeptide
ITSCSYLYFKKTSMSRPSHQEGACSKLGLLWRLAGEKLSRIKVENQLDFQDITSVVAMAKTYATTEAFIDSKYDIRIQKIGSNYKAYMRTSISGNWKANTGSAMLEQVAMTERYRLWVDSCSEMFGGLDICAVKAVHSKDGRDYIIEVMDSSMPLIGEHVEEDRQLMADLVVSKMSQLPMPGGTAPSPLRPWAPQIKSAKSPGQAQLGPQLGQPQPRPPPQGGPRQAQSPQPQRSGSPSQQRLSPQGQQPLSPQSGSPQQQRSPGSPQLSRASSGSSPNQASKPGATLASQPRPPVQGRSTSQQGEESKKPAPPHPHLNKSQSLTNSLSTSDTSQRGTPSEDEAKAETIRNLRKSFASLFSD

SEQ ID NO: 28692 - protein, 41 aa, Artificial Sequence
  Synthetic polypeptide
SVTVSHHPQMGPSSWKKISSGLPLILHDAKKEEHVGLPGVL

SEQ ID NO: 28693 - protein, 200 aa, Artificial Sequence
  Synthetic polypeptide
FYMMPKKKNMSAYQVFCKEYRVTIVADHPGIDFGELSKKLAEVWKQLPEKDKLIWKQKAQYLQHKQNKAEATTVKRKASSSEGSMKVKASSVGVLSPQKKSPPTTMLLPASPAKAPETEPIDVAAHLQLLGESLSLIGHRLQETEGMVAVSGSLSVLLDSIICALGPLACLTTQLPELNGCPKQVLSNTLDNIAYIMPGL

SEQ ID NO: 28694 - protein, 102 aa, Artificial Sequence
  Synthetic polypeptide
PLGFFSPPRPPPHSVWPPLSSSKASSSSAPKTLVQALTLTQTALPPLPPGGPSHLSRPNYKTTPSEVFSDHPHPHLCSFSRTCLFLALLWISPQVPKMPSEQ

SEQ ID NO: 28695 - protein, 70 aa, Artificial Sequence
  Synthetic polypeptide
PKLLCPHSPQVVLPIFQGPTTRPPPRRSFLTTPILTSALFPGPAYSLLFFGSPRKSQRCPPSSKEENRGE

SEQ ID NO: 28696 - protein, 146 aa, Artificial Sequence
  Synthetic polypeptide
PPPSSPLLFFQDLLIPCSSLDLPASPKDALRAVKKRIVGNKNFHEVMLALTVLETCVKNCGHRFHVLVASQDFVESVLVRTILPKNNPPTIVHDKVLNLIQSWADAFRSSPDLTGVVTIYEDLRRKGLEFPMTDLDMLSPIHTPQR

SEQ ID NO: 28697 - protein, 472 aa, Artificial Sequence
  Synthetic polypeptide
PPPSSPLLFFQDLLIPCSSLDLPASPKDALRAVKKRIVGNKNFHEVMLALTVLETCVKNCGHRFHVLVASQDFVESVLVRTILPKNNPPTIVHDKVLNLIQSWADAFRSSPDLTGVVTIYEDLRRKGLEFPMTDLDMLSPIHTPQRTVFNSETQSGQDSVGTDSSQQEDSGQHAAPLPAPPILSGDTPIAPTPEQIGKLRSELEMVSGNVRVMSEMLTELVPTQAEPADLELLQELNRTCRAMQQRVLELIPQIANEQLTEELLIVNDNLNNVFLRHERFERFRTGQTTKAPSEAEPAADLIDMGPDPAATGNLSSQLAGMNLGSSSVRAGLQSLEASGRLEDEFDMFALTRGSSLADQRKEVKYEAPQATDGLAGALDARQQSTGAIPVTQACLMEDIEQWLSTDVGNDAEEPKGVTSEGKFDKFLEERAKAADRLPNLSSPSAEGPPGPPSGPAPRKKTQEKDDDMLFAL

SEQ ID NO: 28698 - protein, 137 aa, Artificial Sequence
  Synthetic polypeptide
PPPSSPLLFFQDLLIPCSSLDLPASPKDALRAVKKRIVGNKNFHEVMLALTVLETCVKNCGHRFHVLVASQDFVESVLVRTILPKNNPPTIVHDKVLNLIQSWADAFRSSPDLTGVVTIYEDLRRKGLEFPMTDLDM

SEQ ID NO: 28699 - protein, 313 aa, Artificial Sequence
  Synthetic polypeptide
PPPSSPLLFFQDLLIPCSSLDLPASPKDALRAVKKRIVGNKNFHEVLETCVKNCGHRFHVLVASQDFVESVLVRTILPKNNPPTIVHDKVLNLIQSWADAFRSSPDLTGVVTIYEDLRRKGLEFPMTDLDMLSPIHTPQRTVFNSETQSGQDSVGTDSSQQEDSGQHAAPLPAPPILSGDTPIAPTPEQIGKLRSELEMVSGNVRVMSEMLTELVPTQAEPADLELLQELNRTCRAMQQRVLELIPQIANEQLTEELLIVNDNLNNVFLRHERFERFRTGQTTKAPSEAEPAADLIDMGPDPAATGNLSSQLA

SEQ ID NO: 28700 - protein, 471 aa, Artificial Sequence
  Synthetic polypeptide
PPPSSPLLFFQDLLIPCSSLDLPASPKDALRAVKKRIVGNKNFHEVMLALTVLETCVKNCGHRFHVLVASQDFVESVLVRTILPKNNPPTIVHDKVLNLIQSWADAFRSSPDLTGVVTIYEDLRRKGLEFPMTDLDMLSPIHTPQRTVFNSETQSGQDSVGTDSSQQEDSGQHAAPLPAPPILSGDTPIAPTPEQIGKLRSELEMVSGNVRVMSEMLTELVPTQAEPADLELLQELNRTCRAMQQRVLELIPQIANEQLTEELLIVNDNLNNVFLRHERFERFRTGQTTKAPSEAEPAADLIDMGPDPAATGNLSSQLAGMNLGSSSVRAGLQSLEASGRLEDEFDMFALTRGSSLADQRKEVKYEAPQATDGLAGALDARQQSTGAIPVTQACLMEDIEQWLSTDVGNDAEEPKGVTSEEFDKFLEERAKAADRLPNLSSPSAEGPPGPPSGPAPRKKTQEKDDDMLFAL

SEQ ID NO: 28701 - protein, 426 aa, Artificial Sequence
  Synthetic polypeptide
PPPSSPLLFFQDLLIPCSSLDLPASPKDALRAVKKRIVGNKNFHEVMLALTVLETCVKNCGHRFHVLVASQDFVESVLVRTILPKNNPPTIVHDKVLNLIQTVFNSETQSGQDSVGTDSSQQEDSGQHAAPLPAPPILSGDTPIAPTPEQIGKLRSELEMVSGNVRVMSEMLTELVPTQAEPADLELLQELNRTCRAMQQRVLELIPQIANEQLTEELLIVNDNLNNVFLRHERFERFRTGQTTKAPSEAEPAADLIDMGPDPAATGNLSSQLAGMNLGSSSVRAGLQSLEASGRLEDEFDMFALTRGSSLADQRKEVKYEAPQATDGLAGALDARQQSTGAIPVTQACLMEDIEQWLSTDVGNDAEEPKGVTSEEFDKFLEERAKAADRLPNLSSPSAEGPPGPPSGPAPRKKTQEKDDDMLFAL

SEQ ID NO: 28702 - protein, 62 aa, Artificial Sequence
  Synthetic polypeptide
PPPSSPLLFFQDLLIPCSSLDLPASPKDALRAVKKRIVGNKNFHEVMLALTVLDGTSRPSRS

SEQ ID NO: 28703 - protein, 63 aa, Artificial Sequence
  Synthetic polypeptide
PKLLCPHSPQVVLPIFQGPTTRPPPRRSFLTTPILTSALFPGPAYSLLFFGSPRKSQRCPPSS

SEQ ID NO: 28704 - protein, 33 aa, Artificial Sequence
  Synthetic polypeptide
PPPSSPLLFFQDLLIPCSSLDLPASPKDALRAV

SEQ ID NO: 28705 - protein, 112 aa, Artificial Sequence
  Synthetic polypeptide
PPPSSPLLFFQDLLIPCSSLDLPASPKDALRAVKKRIVGNKNFHEVMLALTVLETCVKNCGHRFHVLVASQDFVESVLVRTILPKNNPPTIVHDKVLNLIQLARSDRCGHHL

SEQ ID NO: 28706 - protein, 163 aa, Artificial Sequence
  Synthetic polypeptide
PPPSSPLLFFQDLLIPCSSLDLPASPKDALRAVKKRIVGNKNFHEVMLALTVLETCVKNCGHRFHVLVASQDFVESVLVRTILPKNNPPTIVHDKVLNLIQSWADAFRSSPDLTGVVTIYEDLRRKGLEFPMTDLDMLSPIHTPQRTVFNSETQSGQDSVGTD

SEQ ID NO: 28707 - protein, 9 aa, Artificial Sequence
  Synthetic polypeptide
QLVTCQQPG

SEQ ID NO: 28708 - protein, 363 aa, Artificial Sequence
  Synthetic polypeptide
PASSQGNQEPTTTPDAMVQPFTTIPFPPPPQNGIPTEYGVPHTQDYAGQTGEHNLTLYGSTQAHGEQSSNSPSTQNGSLTQTEGGAQTDGQQSQTQSSENSESKSTPKRLHVSNIPFRFRDPDLRQMFGQFGKILDVEIIFNERGSKGFGFVTFENSADADRAREKLHGTVVEGRKIEVNNATARVMTNKKMVTPYANGWKLSPVVGAVYGPELYAASSFQADVSLGNDAAVPLSGRGGINTYIPLIIPGFPYPTAATTAAAFRGAHLRGRGRTVYGAVRAVPPTAIPAYPGVDMQPTDMHSLLLQPQPPLLQPLQPLTVTVMAGCTQPTPTMPLPLPLAMELALWRVYTEVATADLPPTEVT

SEQ ID NO: 28709 - protein, 62 aa, Artificial Sequence
  Synthetic polypeptide
CLGLTASDLPAARVTRSRQQLLTQWFSLLLPSHFHHLRRMEFPQSMGCHTLKTMPARPVSIT

SEQ ID NO: 28710 - protein, 366 aa, Artificial Sequence
  Synthetic polypeptide
PASSQGNQEPTTTPDAMVQPFTTIPFPPPPQNGIPTEYGVPHTQDYAGQTGEHNLTLYGSTQAHGEQSSNSPSTQNGSLTTEGGAQTDGQQSQTQSSENSESKSTPKRLHVSNIPFRFRDPDLRQMFGQFGKILDVEIIFNERGSKGFGFVTFENSADADRAREKLHGTVVEGRKIEVNNATARVMTNKKMVTPYANGWKLSPVVGAVYGPELYAASSFQADVSLGNDAAVPLSGRGGINTYIPLISLPLVPGFPYPTAATTAAAFRGAHLRGRGRTVYGAVRAVPPTAIPAYPGVDMQPTDMHSLLLQPQPPLLQPLQPLTVTVMAGCTQPTPTMPLPLPLAMELALWRVYTEVATADLPPTEVT

SEQ ID NO: 28711 - protein, 376 aa, Artificial Sequence
  Synthetic polypeptide
PASSQGNQEPTTTPDAMVQPFTTIPFPPPPQNGIPTEYGVPHTQDYAGQTGEHNLTLYGSTQAHGEQSSNSPSTQNGSLTTEGGAQTDGQQSQTQSSENSESKSTPKRLHVSNIPFRFRDPDLRQMFGQFGKILDVEIIFNERGSKGFGFVTFENSADADRAREKLHGTVVEGRKIEVNNATARVMTNKKMVTPYANGWKLSPVVGAVYGPELYAASSFQADVSLGNDAAVPLSGRGGINTYIPLISLPLVPGFPYPTAATTAAAFRGAHLRGRGRTVYGAVRAVPPTAIPAYPGVVYQDGFYGADLYGGYAAYRYAQPATATAATAAAAAAAAYSDGYGRVYTADPYHALAPAASYGVGAVASLYRGGYSRFAPY

SEQ ID NO: 28712 - protein, 354 aa, Artificial Sequence
  Synthetic polypeptide
PASSQGNQEPTTTPDAMVQPFTTIPFPPPPQNGIPTEYGVPHTQDYAGQTGEHNLTLYGSTQAHGEQSSNSPSTQNGSLTTEGGAQTDGQQSQTQSSENSESKSTPKRLHVSNIPFRFRDPDLRQMFGGFGFVTFENSADADRAREKLHGTVVEGRKIEVNNATARVMTNKKMVTPYANGWKLSPVVGAVYGPELYAASSFQADVSLGNDAAVPLSGRGGINTYIPLIIPGFPYPTAATTAAAFRGAHLRGRGRTVYGAVRAVPPTAIPAYPGVVYQDGFYGADLYGGYAAYRYAQPATATAATAAAAAAAAYSDGYGRVYTADPYHALAPAASYGVGAVASLYRGGYSRFAPY

SEQ ID NO: 28713 - protein, 372 aa, Artificial Sequence
  Synthetic polypeptide
PASSQGNQEPTTTPDAMVQPFTTIPFPPPPQNGIPTEYGVPHTQDYAGQTGEHNLTLYGSTQAHGEQSSNSPSTQNGSLTTEGGAQTDGQQSQTQSSENSESKSTPKRLHVSNIPFRFRDPDLRQMFGQFGKILDVEIIFNERGSKGFGFVTFENSADADRAREKLHGTVVEGRKIEVNNATARVMTNKKMVTPYANGWKLSPVVGAVYGPELYAASSFQADVSLGNDAAVPLSGRGGINTYIPLIIPGFPYPTAATTAAAFRGAHLRGRGRTVYGAVRAVPPTAIPAYPGVVYQDGFYGADLYGGYAAYRYAQPATATAATAAAAAAAAYSDGYGRVYTADPYHALAPAASYGVGAVASLYRGGYSRFAPY

SEQ ID NO: 28714 - protein, 377 aa, Artificial Sequence
  Synthetic polypeptide
PASSQGNQEPTTTPDAMVQPFTTIPFPPPPQNGIPTEYGVPHTQDYAGQTGEHNLTLYGSTQAHGEQSSNSPSTQNGSLTQTEGGAQTDGQQSQTQSSENSESKSTPKRLHVSNIPFRFRDPDLRQMFGQFGKILDVEIIFNERGSKGFGFVTFENSADADRAREKLHGTVVEGRKIEVNNATARVMTNKKMVTPYANGWKLSPVVGAVYGPELYAASSFQADVSLGNDAAVPLSGRGGINTYIPLISLPLVPGFPYPTAATTAAAFRGAHLRGRGRTVYGAVRAVPPTAIPAYPGVVYQDGFYGADLYGGYAAYRYAQPATATAATAAAAAAAAYSDGYGRVYTADPYHALAPAASYGVGAVASLYRGGYSRFAPY

SEQ ID NO: 28715 - protein, 174 aa, Artificial Sequence
  Synthetic polypeptide
PASSQGNQEPTTTPDAMVQPFTTIPFPPPPQNGIPTEYGVPHTQDYAGQTGEHNLTLYGSTQAHGEQSSNSPSTQNGSLTQTEGGAQTDGQQSQTQSSENSESKSTPKRLHVSNIPFRFRDPDLRQMFGQFGKILDVEIIFNERGSKGFGFVTFENSADADRAREKLHGTVVEG

SEQ ID NO: 28716 - protein, 24 aa, Artificial Sequence
  Synthetic polypeptide
SESGGQVLTFPLPSKRTKGPCLGV

SEQ ID NO: 28717 - protein, 15 aa, Artificial Sequence
  Synthetic polypeptide
PSPCPPRGQKDPALV

SEQ ID NO: 28718 - protein, 23 aa, Artificial Sequence
  Synthetic polypeptide
RVRRSGVDLPPALQEDKRTLPWC

SEQ ID NO: 28719 - protein, 57 aa, Artificial Sequence
  Synthetic polypeptide
AKEEALQRHGGSCFAESLCPLHLDECTFPWCGSEGRGSWSEGATKRSKWDRYWRSSK

SEQ ID NO: 28720 - protein, 406 aa, Artificial Sequence
  Synthetic polypeptide
PRRRPCSDMEGAALLRVSVLCIWMSALFLGVGVRAEEAGARVQQNVPSGTDTGDPQSKPLGDWAAGTMDPESSIFIEDAIKYFKEKVSTQNLLLLLTDNEAWNGFVAAAELPRNEADELRKALDNLARQMIMKDKNWHDKGQQYRNWFLKEFPRLKSELEDNIRRLRALADGVQKVHKGTTIANVVSGSLSISSGILTLVGMGLAPFTEGGSLVLLEPGMELGITAALTGITSSTMDYGKKWWTQAQAHDLVIKSLDKLKEVREFLGENISNFLSLAGNTYQLTRGIGKDIRALRRARANLQSVPHASASRPRVTEPISAESGEQVERVNEPSILEMSRGVKLTDVAPVSFFLVLDVVYLVYESKHLHEGAKSETAEELKKVAQELEEKLNILNNNYKILQADQEL

SEQ ID NO: 28721 - protein, 14 aa, Artificial Sequence
  Synthetic polypeptide
QGGGPAATWRELLC

SEQ ID NO: 28722 - protein, 97 aa, Artificial Sequence
  Synthetic polypeptide
PRRRPCSDMEGAALLRVSVLCIWMSALFLGVGVRAEEAGARVQQNVPSGTDTGDPQSKPLGDWAAGTMDPESSIFIEDAIKYFKEKVSTQNLLLLLT

SEQ ID NO: 28723 - protein, 63 aa, Artificial Sequence
  Synthetic polypeptide
GRARWLMPVIPALWEAETGGSRGQEIETILANTVVWTLQDPGAEVREDGGQAAREGGDGQGGY

SEQ ID NO: 28724 - protein, 102 aa, Artificial Sequence
  Synthetic polypeptide
SQHFGRPRQADHEVRRSRPSWLTRWCGPCKILGPRLEKMVAKQHGKVVMAKVDIDDHTDLAIEYEVSAVPTVLAMKNGDVVDKFVGIKDEDQLEAFLKKLIG

SEQ ID NO: 28725 - protein, 13 aa, Artificial Sequence
  Synthetic polypeptide
HGGVDPARSWGRG

SEQ ID NO: 28726 - protein, 82 aa, Artificial Sequence
  Synthetic polypeptide
SQHFGRPRQADHEVRRSRPSWLTRWCGPCKILGPRLEKMVAKQHGKVVMAKVDIDDHTDLAIEYEAGSLSPRLECSGTITAH

SEQ ID NO: 28727 - protein, 34 aa, Artificial Sequence
  Synthetic polypeptide
GRARWLMPVIPALWEAETGGSRGGVDPARSWGRG

SEQ ID NO: 28728 - protein, 43 aa, Artificial Sequence
  Synthetic polypeptide
SQHFGRPRQADHEVVWTLQDPGAEVREDGGQAAREGGDGQGGY

SEQ ID NO: 28729 - protein, 100 aa, Artificial Sequence
  Synthetic polypeptide
PGAVAHACNPSTLGGRDRRITRWCGPCKILGPRLEKMVAKQHGKVVMAKVDIDDHTDLAIEYEVSAVPTVLAMKNGDVVDKFVGIKDEDQLEAFLKKLIG

SEQ ID NO: 28730 - protein, 80 aa, Artificial Sequence
  Synthetic polypeptide
PGAVAHACNPSTLGGRDRRITRWCGPCKILGPRLEKMVAKQHGKVVMAKVDIDDHTDLAIEYEAGSLSPRLECSGTITAH

SEQ ID NO: 28731 - protein, 352 aa, Artificial Sequence
  Synthetic polypeptide
PGQHGETPPLQKIQKLARSLRLNSGNAFGKKYPLIRASYESKGSRGLFILGTASHSVDYRKSAGGFIHGFRYTVRAVHRLLEHRHHSVTWPATELPITQLTSSIVRRVNEASGLYQMFGVLADVILLKENSTAFEYLEEFPIQMLAQLETLTGRKAKHGLFVINMEYGRNFSGPDKDVFFDDRSVGHTEDAWQSNFLHPVIYYYRYLPTEQEVRFRPAHWPLPRPTAIHHIVEDFLTDWTAPIGHILPLRRFLENCLDTDLRSFYAESCFLFALTRQKLPPFCQQGYLRMQGLVSTESLWQHRVESRLLRDYAPTGRRLEDSSQQLGDQEPLGSPLAPGPLAQSVDSNKEEL

SEQ ID NO: 28732 - protein, 17 aa, Artificial Sequence
  Synthetic polypeptide
PGPSDLTREMHSARSTR

SEQ ID NO: 28733 - protein, 16 aa, Artificial Sequence
  Synthetic polypeptide
NPTSTKNTKISQVPQT

SEQ ID NO: 28734 - protein, 59 aa, Artificial Sequence
  Synthetic polypeptide
QGLCGAEASMDWVPGDSACRPCPASLLPILGNLLLCGGHHGDSRPGSRLGSAPALSPDV

SEQ ID NO: 28735 - protein, 298 aa, Artificial Sequence
  Synthetic polypeptide
KACVEQKPPWTGCPETQHAGPALPVSSRSWGTCCSVEVTMGTAALGPVWAALLLFLLMCEIPMVELTFDRAVASGCQRCCDSEDPLDPAHVSSASSSGRPHALPEIRPYINITILKGDKGDPGPMGLPGYMGREGPQGEPGPQGSKGDKGEMGSPGAPCQKRFFAFSVGRKTALHSGEDFQTLLFERVFVNLDGCFDMATGQFAAPLRGIYFFSLNVHSWNYKETYVHIMHNQKEAVILYAQPSERSIMQSQSVMLDLAYGDRVWVRLFKRQRENAIYSNDFDTYITFSGHLIKAEDD

SEQ ID NO: 28736 - protein, 56 aa, Artificial Sequence
  Synthetic polypeptide
RPVWSRSLHGLGARRLSMQALPCQSPPDLGELAALWRSPWGQPPWVPSGQRSCSFS

SEQ ID NO: 28737 - protein, 136 aa, Artificial Sequence
  Synthetic polypeptide
KACVEQKPPWTGCPETQHAGPALPVSSRSWGTCCSVEVTMGTAALGPVWAALLLFLLMCEIPMVELTFDRAVASGCQRCCDSEDPLDPAHVSSASSSGRPHALPEIRPYINITILKGRGRTRFPSRLWWLTAVTRP

SEQ ID NO: 28738 - protein, 26 aa, Artificial Sequence
  Synthetic polypeptide
PPGNAAQSPWGQPPWVPSGQRSCSFS

SEQ ID NO: 28739 - protein, 33 aa, Artificial Sequence
  Synthetic polypeptide
LRMPNLLGMQPSHHGDSRPGSRLGSAPALSPDV

SEQ ID NO: 28740 - protein, 271 aa, Artificial Sequence
  Synthetic polypeptide
ECLTSWECSPVTMGTAALGPVWAALLLFLLMCEIPMVELTFDRAVASGCQRCCDSEDPLDPAHVSSASSSGRPHALPEIRPYINITILKGDKGDPGPMGLPGYMGREGPQGEPGPQGSKGDKGEMGSPGAPCQKRFFAFSVGRKTALHSGEDFQTLLFERVFVNLDGCFDMATGQFAAPLRGIYFFSLNVHSWNYKETYVHIMHNQKEAVILYAQPSERSIMQSQSVMLDLAYGDRVWVRLFKRQRENAIYSNDFDTYITFSGHLIKAEDD

SEQ ID NO: 28741 - protein, 109 aa, Artificial Sequence
  Synthetic polypeptide
ECLTSWECSPVTMGTAALGPVWAALLLFLLMCEIPMVELTFDRAVASGCQRCCDSEDPLDPAHVSSASSSGRPHALPEIRPYINITILKGRGRTRFPSRLWWLTAVTRP

SEQ ID NO: 28742 - protein, 31 aa, Artificial Sequence
  Synthetic polypeptide
SPCIGFLTCGHHGDSRPGSRLGSAPALSPDV

SEQ ID NO: 28743 - protein, 263 aa, Artificial Sequence
  Synthetic polypeptide
PVVTMGTAALGPVWAALLLFLLMCEIPMVELTFDRAVASGCQRCCDSEDPLDPAHVSSASSSGRPHALPEIRPYINITILKGDKGDPGPMGLPGYMGREGPQGEPGPQGSKGDKGEMGSPGAPCQKRFFAFSVGRKTALHSGEDFQTLLFERVFVNLDGCFDMATGQFAAPLRGIYFFSLNVHSWNYKETYVHIMHNQKEAVILYAQPSERSIMQSQSVMLDLAYGDRVWVRLFKRQRENAIYSNDFDTYITFSGHLIKAEDD

SEQ ID NO: 28744 - protein, 47 aa, Artificial Sequence
  Synthetic polypeptide
LIEPIKASWKNWSCTLCMKSLYRVPDLWSPWGQPPWVPSGQRSCSFS

SEQ ID NO: 28745 - protein, 101 aa, Artificial Sequence
  Synthetic polypeptide
PVVTMGTAALGPVWAALLLFLLMCEIPMVELTFDRAVASGCQRCCDSEDPLDPAHVSSASSSGRPHALPEIRPYINITILKGRGRTRFPSRLWWLTAVTRP

SEQ ID NO: 28746 - protein, 195 aa, Artificial Sequence
  Synthetic polypeptide
SLHFNKHPHDLQALGAVGKTCLLISYTTNAFPGEYIPTVFDNYSANVMVDSKPVNLGLWDTAGQEDYDRLRPLSYPQTDVFLICFSLVSPASYENVRAKWFPEVRHHCPSTPIILVGTKLDLRDDKDTIEKLKEKKLAPITYPQGLALAKEIDSVKYLECSALTQRGLKTVFDEAIRAVLCPQPTRQQKRACSLL

SEQ ID NO: 28747 - protein, 76 aa, Artificial Sequence
  Synthetic polypeptide
ITGPWRSLWEKRIASSAHTCGSESLGLDPEVSTLTNIHMTCRLSGPWARPAFSSATPPTPFPESTSPPCLTTIQPM

SEQ ID NO: 28748 - protein, 30 aa, Artificial Sequence
  Synthetic polypeptide
LAGSRGRGQDLPSHQLHHQRLSRRVHPHRV

SEQ ID NO: 28749 - protein, 169 aa, Artificial Sequence
  Synthetic polypeptide
SLHFNKHPHDLQALGAVGKTCLLISYTTNAFPGEYIPTVFDNYSANVMVDSKPVNLGLWDTAGQEDYDRLRPLSYPQTDVFLICFSLVSPASYENVRAKWFPEVRHHCPSTPIILVGTKLDLRDDKDTIEKLKEKKLAPITYPQGLALAKEIDSVKYLECSALTQRGLK

SEQ ID NO: 28750 - protein, 89 aa, Artificial Sequence
  Synthetic polypeptide
SLHFNKHPHDLQALGAVGKTCLLISYTTNAFPGEYIPTVPGRPCALLQDAEAGLSSDVEGACWCQTQEGRMTGEAPAPPWPALRGPHHS

SEQ ID NO: 28751 - protein, 100 aa, Artificial Sequence
  Synthetic polypeptide
ITGPWRSLWEKRIASSAHTCGSESLGLDPEVSTLTNIHMTCRLSGPWARPAFSSATPPTPFPESTSPPCLGGPALYCRMRRQGCHRTWRERVGVRLRREG

SEQ ID NO: 28752 - protein, 80 aa, Artificial Sequence
  Synthetic polypeptide
LAGSRGRGQDLPSHQLHHQRLSRRVHPHRAWEALRSIAGCGGRAVIGRGGSVLVSDSGGKDDWGGTSPSLASPQGSPSLL

SEQ ID NO: 28753 - protein, 47 aa, Artificial Sequence
  Synthetic polypeptide
KTQSNLQRQKADRSLWPWARPAFSSATPPTPFPESTSPPCLTTIQPM

SEQ ID NO: 28754 - protein, 43 aa, Artificial Sequence
  Synthetic polypeptide
NPRKRKVIYRGKKQIGACGRGQDLPSHQLHHQRLSRRVHPHRV

SEQ ID NO: 28755 - protein, 191 aa, Artificial Sequence
  Synthetic polypeptide
STEAKSRSELVAVGKTCLLISYTTNAFPGEYIPTVFDNYSANVMVDSKPVNLGLWDTAGQEDYDRLRPLSYPQTDVFLICFSLVSPASYENVRAKWFPEVRHHCPSTPIILVGTKLDLRDDKDTIEKLKEKKLAPITYPQGLALAKEIDSVKYLECSALTQRGLKTVFDEAIRAVLCPQPTRQQKRACSLL

SEQ ID NO: 28756 - protein, 165 aa, Artificial Sequence
  Synthetic polypeptide
STEAKSRSELVAVGKTCLLISYTTNAFPGEYIPTVFDNYSANVMVDSKPVNLGLWDTAGQEDYDRLRPLSYPQTDVFLICFSLVSPASYENVRAKWFPEVRHHCPSTPIILVGTKLDLRDDKDTIEKLKEKKLAPITYPQGLALAKEIDSVKYLECSALTQRGLK

SEQ ID NO: 28757 - protein, 71 aa, Artificial Sequence
  Synthetic polypeptide
KTQSNLQRQKADRSLWPWARPAFSSATPPTPFPESTSPPCLGGPALYCRMRRQGCHRTWRERVGVRLRREG

SEQ ID NO: 28758 - protein, 93 aa, Artificial Sequence
  Synthetic polypeptide
NPRKRKVIYRGKKQIGACGRGQDLPSHQLHHQRLSRRVHPHRAWEALRSIAGCGGRAVIGRGGSVLVSDSGGKDDWGGTSPSLASPQGSPSLL

SEQ ID NO: 28759 - protein, 85 aa, Artificial Sequence
  Synthetic polypeptide
STEAKSRSELVAVGKTCLLISYTTNAFPGEYIPTVPGRPCALLQDAEAGLSSDVEGACWCQTQEGRMTGEAPAPPWPALRGPHHS

SEQ ID NO: 28760 - protein, 45 aa, Artificial Sequence
  Synthetic polypeptide
ISRKAQDSSTTKNSLALSVSGVEISLPPLSALSRYTLVSPAGCPM

SEQ ID NO: 28761 - protein, 27 aa, Artificial Sequence
  Synthetic polypeptide
VLVVLRFRSLHCLLYPDTPWCPQLGAR

SEQ ID NO: 28762 - protein, 92 aa, Artificial Sequence
  Synthetic polypeptide
ISRKAQDSSTTKNSLALSVSGVEISLPPLSALSRYTLVSPAGCPMNPELLGKGWAETSGCALAPKVALWVPGKCLVIGSPWQGLRVVGKPRI

SEQ ID NO: 28763 - protein, 92 aa, Artificial Sequence
  Synthetic polypeptide
ISAWHLPILVHHSASFLSSGKGTDDNACLVRHLSSPTAQTKASRRDWGPTLWSPTAPRNTATQLCPARWLLSSTPSWPVGLGGSAMWTMTTM

SEQ ID NO: 28764 - protein, 242 aa, Artificial Sequence
  Synthetic polypeptide
QRLPRETFVFTDSPDKGLQERLGSHLVVTNCSAEHSHPALSCKMAAEFDTFLASGLRWFCHVDDDNYVNPRALLQLLRAFPLARDVYVGRPSLNRPIHASEPQPHNRTRLVQFWFATGGAGFCINRKLALKMAPWASGSRFMDTSALIRLPDDCTMGYIIECKLGGRLQPSPLFHSHLETLQLLRTAQLPEQVTLSYGVFEGKLNVIKLQGPFSPEEDPSRFRSLHCLLYPDTPWCPQLGAR

SEQ ID NO: 28765 - protein, 71 aa, Artificial Sequence
  Synthetic polypeptide
ISAWHLPILVHHSASFLSSGKGTDDNACLVRHLSSPTAQTKASRRDWGPTLWSPTAPRNTATQLCPARWLL

SEQ ID NO: 28766 - protein, 46 aa, Artificial Sequence
  Synthetic polypeptide
QRLPRETFVFTDSPDKGLQERLGSHLVVTNCSAEHSHPALSCKMAA

SEQ ID NO: 28767 - protein, 63 aa, Artificial Sequence
  Synthetic polypeptide
ISAWHLPILVHHSASFLSSGKGTDDNACLVRHLSSPTAQTKASRRDWGPLTPPHFSRVPPCGH

SEQ ID NO: 28768 - protein, 39 aa, Artificial Sequence
  Synthetic polypeptide
QRLPRETFVFTDSPDKGLQERLGSPDSSSLLQGPTLWSP

SEQ ID NO: 28769 - protein, 31 aa, Artificial Sequence
  Synthetic polypeptide
ALESCCLGLHSPPGCWPTRSSPHRSGRRSRP

SEQ ID NO: 28770 - protein, 45 aa, Artificial Sequence
  Synthetic polypeptide
LWSRAAWASTRHPAAGPQDPVPTGVGGDPGLDGEKGRGHHPSPAM

SEQ ID NO: 28771 - protein, 53 aa, Artificial Sequence
  Synthetic polypeptide
FGVVLLGPPLATRLLAHKIQSPQEWEAIQALTVRRGEATIRPPPCDDTKGGQD

SEQ ID NO: 28772 - protein, 117 aa, Artificial Sequence
  Synthetic polypeptide
LWSRAAWASTRHPAAGPQDPVPTGVGGDPGLDGAGNMHEELRQAVPRRSGQVPLSQRAHQGRVSQVSGLSDIGEGEEQDLGAPLQLDSGPARGGENRRGLPDAKEAGDCKVRPQASR

SEQ ID NO: 28773 - protein, 603 aa, Artificial Sequence
  Synthetic polypeptide
FGVVLLGPPLATRLLAHKIQSPQEWEAIQALTVLETCMKSCGKRFHDEVGKFRFLNELIKVVSPKYLGSRTSEKVKNKILELLYSWTVGLPEEVKIAEAYQMLKKQGIVKSDPKLPDDTTFPLPPPRPKNVIFEDEEKSKMLARLLKSSHPEDLRAANKLIKEMVQEDQKRMEKISKRVNAIEEVNNNVKLLTEMVMSHSQGGAAAGSSEDLMKELYQRCERMRPTLFRLASDTEDNDEALAEILQANDNLTQVINLYKQLVRGEEVNGDATAGSIPGSTSALLDLSGLDLPPAGTTYPAMPTRPGEQASPEQPSASVSLLDDELMSLGLSDPTPPSGPSLDGTGWNSFQSSDATEPPAPALAQAPSMESRPPAQTSLPASSGLDDLDLLGKTLLQQSLPPESQQVRWEKQQPTPRLTLRDLQNKSSSCSSPSSSATSLLHTVSPEPPRPPQQPVPTELSLASITVPLESIKPSNILPVTVYDQHGFRILFHFARDPLPGRSDVLVVVVSMLSTAPQPIRNIVFQSAVPKVMKVKLQPPSGTELPAFNPIVHPSAITQVLLLANPQKEKVRLRYKLTFTMGDQTYNEMGDVDQFPPPETWGSL

SEQ ID NO: 28774 - protein, 620 aa, Artificial Sequence
  Synthetic polypeptide
FGVVLLGPPLATRLLAHKIQSPQEWEAIQALTVRRGEATIRPPPCDDTKVLETCMKSCGKRFHDEVGKFRFLNELIKVVSPKYLGSRTSEKVKNKILELLYSWTVGLPEEVKIAEAYQMLKKQGIVKSDPKLPDDTTFPLPPPRPKNVIFEDEEKSKMLARLLKSSHPEDLRAANKLIKEMVQEDQKRMEKISKRVNAIEEVNNNVKLLTEMVMSHSQGGAAAGSSEDLMKELYQRCERMRPTLFRLASDTEDNDEALAEILQANDNLTQVINLYKQLVRGEEVNGDATAGSIPGSTSALLDLSGLDLPPAGTTYPAMPTRPGEQASPEQPSASVSLLDDELMSLGLSDPTPPSGPSLDGTGWNSFQSSDATEPPAPALAQAPSMESRPPAQTSLPASSGLDDLDLLGKTLLQQSLPPESQQVRWEKQQPTPRLTLRDLQNKSSSCSSPSSSATSLLHTVSPEPPRPPQQPVPTELSLASITVPLESIKPSNILPVTVYDQHGFRILFHFARDPLPGRSDVLVVVVSMLSTAPQPIRNIVFQSAVPKVMKVKLQPPSGTELPAFNPIVHPSAITQVLLLANPQKEKVRLRYKLTFTMGDQTYNEMGDVDQFPPPETWGSL

SEQ ID NO: 28775 - protein, 70 aa, Artificial Sequence
  Synthetic polypeptide
LWSRAAWASTRHPAAGPQDPVPTGVGGDPGLDGAGNMHEELRQAVPRRSGQVPLSQRAHQGRVSQGDSAV

SEQ ID NO: 28776 - protein, 69 aa, Artificial Sequence
  Synthetic polypeptide
FGVVLLGPPLATRLLAHKIQSPQEWEAIQALTVLETCMKSCGKRFHDEVGKFRFLNELIKVVSPKGTLL

SEQ ID NO: 28777 - protein, 516 aa, Artificial Sequence
  Synthetic polypeptide
FGVVLLGPPLATRLLAHKIQSPQEWEAIQALTVLETCMKSCGKRFHDEVGKFRFLNELIKVVSPKYLGSRTSEKVKNKILELLYSWTVGLPEEVKIAEAYQMLKKQGIVKSDPKLPDDTTFPLPPPRPKNVIFEDEEKSKMLARLLKSSHPEDLRAANKLIKEMVQEDQKRMEKISKRVNAIEEVNNNVKLLTEMVMSHSQGGAAAGSSEDLMKELYQRCERMRPTLFRLASDTEDNDEALGLSDPTPPSGPSLDGTGWNSFQSSDATEPPAPALAQAPSMESRPPAQTSLPASSGLDDLDLLGKTLLQQSLPPESQQVRWEKQQPTPRLTLRDLQNKSSSCSSPSSSATSLLHTVSPEPPRPPQQPVPTELSLASITVPLESIKPSNILPVTVYDQHGFRILFHFARDPLPGRSDVLVVVVSMLSTAPQPIRNIVFQSAVPKVMKVKLQPPSGTELPAFNPIVHPSAITQVLLLANPQKEKVRLRYKLTFTMGDQTYNEMGDVDQFPPPETWGSL

SEQ ID NO: 28778 - protein, 84 aa, Artificial Sequence
  Synthetic polypeptide
LWSRAAWASTRHPAAGPQDPVPTGVGGDPGLDVSGLSDIGEGEEQDLGAPLQLDSGPARGGENRRGLPDAKEAGDCKVRPQASR

SEQ ID NO: 28779 - protein, 570 aa, Artificial Sequence
  Synthetic polypeptide
FGVVLLGPPLATRLLAHKIQSPQEWEAIQALTYLGSRTSEKVKNKILELLYSWTVGLPEEVKIAEAYQMLKKQGIVKSDPKLPDDTTFPLPPPRPKNVIFEDEEKSKMLARLLKSSHPEDLRAANKLIKEMVQEDQKRMEKISKRVNAIEEVNNNVKLLTEMVMSHSQGGAAAGSSEDLMKELYQRCERMRPTLFRLASDTEDNDEALAEILQANDNLTQVINLYKQLVRGEEVNGDATAGSIPGSTSALLDLSGLDLPPAGTTYPAMPTRPGEQASPEQPSASVSLLDDELMSLGLSDPTPPSGPSLDGTGWNSFQSSDATEPPAPALAQAPSMESRPPAQTSLPASSGLDDLDLLGKTLLQQSLPPESQQVRWEKQQPTPRLTLRDLQNKSSSCSSPSSSATSLLHTVSPEPPRPPQQPVPTELSLASITVPLESIKPSNILPVTVYDQHGFRILFHFARDPLPGRSDVLVVVVSMLSTAPQPIRNIVFQSAVPKVMKVKLQPPSGTELPAFNPIVHPSAITQVLLLANPQKEKVRLRYKLTFTMGDQTYNEMGDVDQFPPPETWGSL

SEQ ID NO: 28780 - protein, 218 aa, Artificial Sequence
  Synthetic polypeptide
FGVVLLGPPLATRLLAHKIQSPQEWEAIQALTVLETCMKSCGKRFHDEVGKFRFLNELIKVVSPKYLGSRTSEKVKNKILELLYSWTVGLPEEVKIAEAYQMLKKQGIVKSDPKLPDDTTFPLPPPRPKNVIFEDEEKSKMLARLLKSSHPEDLRAANKLIKEMVQEDQKRMEKISKRVNAIEEVNNNVKLLTEMVMSHSQGGAAAGSSEDLMKELYQ

SEQ ID NO: 28781 - protein, 573 aa, Artificial Sequence
  Synthetic polypeptide
VVVLETCMKSCGKRFHDEVGKFRFLNELIKVVSPKYLGSRTSEKVKNKILELLYSWTVGLPEEVKIAEAYQMLKKQGIVKSDPKLPDDTTFPLPPPRPKNVIFEDEEKSKMLARLLKSSHPEDLRAANKLIKEMVQEDQKRMEKISKRVNAIEEVNNNVKLLTEMVMSHSQGGAAAGSSEDLMKELYQRCERMRPTLFRLASDTEDNDEALAEILQANDNLTQVINLYKQLVRGEEVNGDATAGSIPGSTSALLDLSGLDLPPAGTTYPAMPTRPGEQASPEQPSASVSLLDDELMSLGLSDPTPPSGPSLDGTGWNSFQSSDATEPPAPALAQAPSMESRPPAQTSLPASSGLDDLDLLGKTLLQQSLPPESQQVRWEKQQPTPRLTLRDLQNKSSSCSSPSSSATSLLHTVSPEPPRPPQQPVPTELSLASITVPLESIKPSNILPVTVYDQHGFRILFHFARDPLPGRSDVLVVVVSMLSTAPQPIRNIVFQSAVPKVMKVKLQPPSGTELPAFNPIVHPSAITQVLLLANPQKEKVRLRYKLTFTMGDQTYNEMGDVDQFPPPETWGSL

SEQ ID NO: 28782 - protein, 11 aa, Artificial Sequence
  Synthetic polypeptide
ADFKWWCWKHA

SEQ ID NO: 28783 - protein, 90 aa, Artificial Sequence
  Synthetic polypeptide
MILSGGAGNMHEELRQAVPRRSGQVPLSQRAHQGRVSQVSGLSDIGEGEEQDLGAPLQLDSGPARGGENRRGLPDAKEAGDCKVRPQASR

SEQ ID NO: 28784 - protein, 39 aa, Artificial Sequence
  Synthetic polypeptide
VVVLETCMKSCGKRFHDEVGKFRFLNELIKVVSPKGTLL

SEQ ID NO: 28785 - protein, 43 aa, Artificial Sequence
  Synthetic polypeptide
MILSGGAGNMHEELRQAVPRRSGQVPLSQRAHQGRVSQGDSAV

SEQ ID NO: 28786 - protein, 486 aa, Artificial Sequence
  Synthetic polypeptide
VVVLETCMKSCGKRFHDEVGKFRFLNELIKVVSPKYLGSRTSEKVKNKILELLYSWTVGLPEEVKIAEAYQMLKKQGIVKSDPKLPDDTTFPLPPPRPKNVIFEDEEKSKMLARLLKSSHPEDLRAANKLIKEMVQEDQKRMEKISKRVNAIEEVNNNVKLLTEMVMSHSQGGAAAGSSEDLMKELYQRCERMRPTLFRLASDTEDNDEALGLSDPTPPSGPSLDGTGWNSFQSSDATEPPAPALAQAPSMESRPPAQTSLPASSGLDDLDLLGKTLLQQSLPPESQQVRWEKQQPTPRLTLRDLQNKSSSCSSPSSSATSLLHTVSPEPPRPPQQPVPTELSLASITVPLESIKPSNILPVTVYDQHGFRILFHFARDPLPGRSDVLVVVVSMLSTAPQPIRNIVFQSAVPKVMKVKLQPPSGTELPAFNPIVHPSAITQVLLLANPQKEKVRLRYKLTFTMGDQTYNEMGDVDQFPPPETWGSL

SEQ ID NO: 28787 - protein, 188 aa, Artificial Sequence
  Synthetic polypeptide
VVVLETCMKSCGKRFHDEVGKFRFLNELIKVVSPKYLGSRTSEKVKNKILELLYSWTVGLPEEVKIAEAYQMLKKQGIVKSDPKLPDDTTFPLPPPRPKNVIFEDEEKSKMLARLLKSSHPEDLRAANKLIKEMVQEDQKRMEKISKRVNAIEEVNNNVKLLTEMVMSHSQGGAAAGSSEDLMKELYQ

SEQ ID NO: 28788 - protein, 190 aa, Artificial Sequence
  Synthetic polypeptide
YPPHREYLTGFHKRKVERKKAAIEEIKQRLKEEQRKLREERHQEYLKMLAEREEALEEADELDRLVTAKTESVQYDHPNHTVTVTTISDLDLSGARLLGLTPPEGGAGDRSEEEASSTEKPTKALPRKSRDPLLSQRISSLTASLHAHSRKKVKRKHPRRAQDSKKPPRAPRTSKAQRRRLTGKARHSGE

SEQ ID NO: 28789 - protein, 18 aa, Artificial Sequence
  Synthetic polypeptide
LNVPICKMEIDTHRTGST

SEQ ID NO: 28790 - protein, 38 aa, Artificial Sequence
  Synthetic polypeptide
PRLCDSTFPSVKWRLIPTAQGVPDRLPQAEGRAKEGSH

SEQ ID NO: 28791 - protein, 15 aa, Artificial Sequence
  Synthetic polypeptide
ALVFSSVKWDELSKL

SEQ ID NO: 28792 - protein, 13 aa, Artificial Sequence
  Synthetic polypeptide
VSSEETEGLGQCQ

SEQ ID NO: 28793 - protein, 45 aa, Artificial Sequence
  Synthetic polypeptide
KYKISREWWRMPVIPATREAEAGESLEPGRRRLRSEETEGLGQCQ

SEQ ID NO: 28794 - protein, 211 aa, Artificial Sequence
  Synthetic polypeptide
FQLLGRLRQESRLNPGGGGCALKRLRDSANANDVETVQQLLEDGADPCAADDKGRTALHFASCNGNDQIVQLLLDHGADPNQRDGLGNTPLHLAACTNHVPVITTLLRGGARVDALDRAGRTPLHLAKSKLNILQEGHAQCLEAVRLEVKQIIHMLREYLERLGQHEQRERLDDLCTRLQMTSTKEQVDEVTDLLASFTSLSLQMQSMEKR

SEQ ID NO: 28795 - protein, 8 aa, Artificial Sequence
  Synthetic polypeptide
TREAEVAL

SEQ ID NO: 28796 - protein, 196 aa, Artificial Sequence
  Synthetic polypeptide
FQLLGRLRQESRLNPGGGGCALKRLRDSANANDVETVQQLLEDGADPCAADDKGRTALHFASCNGNDQIVQLLLDHGADPNQRDGLGNTPLHLECSPQLVPAGARVDALDRAGRTPLHLAKSKLNILQEGHAQCLEAVRLEVKQIIHMLREYLERLGQHEQRERLDDLCTRLQMTSTKEQVDEVTDLLASFTSLSL

SEQ ID NO: 28797 - protein, 76 aa, Artificial Sequence
  Synthetic polypeptide
FQLLGRLRQESRLNPGGGGCALKRLRDSANANDVETVQQLLEDGADPCAADDKGRTALHFASCNGNDQIAAPGPWC

SEQ ID NO: 28798 - protein, 127 aa, Artificial Sequence
  Synthetic polypeptide
FQLLGRLRQESRLNPGGGGCALKRLRDSANANDVETVQQLLEDGADPCAADDKGRTALHFASCNGNDQIVQLLLDHGADPNQRDGLGNTPLHLAACTNHVPVITTLLRGAGTCRGPCRCPGPSWSHT

SEQ ID NO: 28799 - protein, 16 aa, Artificial Sequence
  Synthetic polypeptide
SHSLLSFAPPHCTRGL

SEQ ID NO: 28800 - protein, 566 aa, Artificial Sequence
  Synthetic polypeptide
PTASCPLLHLIAPAAYDPYAYPSDYDMHTGDPKQDLAYERQYEQQTYQVIPEVIKNFIQYFHKTVSDLIDQKVYELQASRVSSDVIDQKVYEIQDIYENSWTKLTERFFKNTPWPEAEAIAPQVGNDAVFLILYKELYYRHIYAKVSGGPSLEQRFESYYNYCNLFNYILNADGPAPLELPNQWLWDIIDEFIYQFQSFSQYRCKTAKKSEEEIDFLRSNPKIWNVHSVLNVLHSLVDKSNINRQLEVYTSGGDPESVAGEYGRHSLYKMLGYFSLVGLLRLHSLLGDYYQAIKVLENIELNKKSMYSRVPECQVTTYYYVGFAYLMMRRYQDAIRVFANILLYIQRTKSMFQRTTYKYEMINKQNEQMHALLAIALTMYPMRIDESIHLQLREKYGDKMLRMQKGDPQVYEELFSYSCPKFLSPVVPNYDNVHPNYHKEPFLQQLKVFSDEVQQQAQLSTIRSFLKLYTTMPVAKLAGFLDLTEQEFRIQLLVFKHKMKNLVWTSGISALDGEFQSASEVDFYIDKDMIHIADTKVARRYGDFFIRQIHKFEELNRTLKKMGQRP

SEQ ID NO: 28801 - protein, 48 aa, Artificial Sequence
  Synthetic polypeptide
PQPLVLCSTSLHPRLMTPTLIPATMICTQEIQSRTLLMNVSMNSKPIR

SEQ ID NO: 28802 - protein, 116 aa, Artificial Sequence
  Synthetic polypeptide
PTASCPLLHLIAPAAYDPYAYPSDYDMHTGDPKQDLAYERQYEQQTYQVIPEVIKNFIQYFHKTVSDLIDQKVYELQASRVSSDVIDQKVYEIQDIYENRYGLLAERASFWVGLAW

SEQ ID NO: 28803 - protein, 518 aa, Artificial Sequence
  Synthetic polypeptide
PTASCPLLHLIAPAAYDPYAYPSDYDMHTGDPKQDLAYERQYEQQTYQVIPEVIKNFIQYFHKTVSDLIDQKVYELQASRVSSDVIDQKVYEIQDIYENSWTKLTERFFKNTPWPEAEAIAPQVGNDAVFLILYKELYYRHIYAKVSFQSFSQYRCKTAKKSEEEIDFLRSNPKIWNVHSVLNVLHSLVDKSNINRQLEVYTSGGDPESVAGEYGRHSLYKMLGYFSLVGLLRLHSLLGDYYQAIKVLENIELNKKSMYSRVPECQVTTYYYVGFAYLMMRRYQDAIRVFANILLYIQRTKSMFQRTTYKYEMINKQNEQMHALLAIALTMYPMRIDESIHLQLREKYGDKMLRMQKGDPQVYEELFSYSCPKFLSPVVPNYDNVHPNYHKEPFLQQLKVFSDEVQQQAQLSTIRSFLKLYTTMPVAKLAGFLDLTEQEFRIQLLVFKHKMKNLVWTSGISALDGEFQSASEVDFYIDKDMIHIADTKVARRYGDFFIRQIHKFEELNRTLKKMGQRP

SEQ ID NO: 28804 - protein, 185 aa, Artificial Sequence
  Synthetic polypeptide
PTASCPLLHLIAPAAYDPYAYPSDYDMHTETRFRRVVQAGLELLTSGDPKQDLAYERQYEQQTYQVIPEVIKNFIQYFHKTVSDLIDQKVYELQASRVSSDVIDQKVYEIQDIYENSWTKLTERFFKNTPWPEAEAIAPQVGNDAVFLILYKELYYRHIYAKVSGGPSLEQRFESYYNYCNLFNY

SEQ ID NO: 28805 - protein, 43 aa, Artificial Sequence
  Synthetic polypeptide
PQPLVLCSTSLHPRLMTPTLIPATMICTQRRGFAVLSRLVLNS

SEQ ID NO: 28806 - protein, 11 aa, Artificial Sequence
  Synthetic polypeptide
PPTRRRRLREE

SEQ ID NO: 28807 - protein, 11 aa, Artificial Sequence
  Synthetic polypeptide
PPQGGGGSERS

SEQ ID NO: 28808 - protein, 11 aa, Artificial Sequence
  Synthetic polypeptide
PHKEAAAQRGV

SEQ ID NO: 28809 - protein, 9 aa, Artificial Sequence
  Synthetic polypeptide
VRRRRLREE

SEQ ID NO: 28810 - protein, 9 aa, Artificial Sequence
  Synthetic polypeptide
SGGGGSERS

SEQ ID NO: 28811 - protein, 9 aa, Artificial Sequence
  Synthetic polypeptide
QEAAAQRGV

SEQ ID NO: 28812 - protein, 25 aa, Artificial Sequence
  Synthetic polypeptide
SQLFGRLRQEDHLRPGGRDQPGQHR

SEQ ID NO: 28813 - protein, 19 aa, Artificial Sequence
  Synthetic polypeptide
GQEVETSLGNIGDADRDTV

SEQ ID NO: 28814 - protein, 54 aa, Artificial Sequence
  Synthetic polypeptide
VAVGLFPHLFPLQTAGLLRDRAWGQVSSAFLMPGGVPRSPWVHDSSSWSWRLTP

SEQ ID NO: 28815 - protein, 20 aa, Artificial Sequence
  Synthetic polypeptide
CLVVCHALRGCTTLPAGVGG

SEQ ID NO: 28816 - protein, 841 aa, Artificial Sequence
  Synthetic polypeptide
MYSLHRPCPRHGLFALASPSAKNAPSQLLGWTHGSCSVGLSCSHSEPQHPPCGQDTAPLALGCRGSVSTSVSPPDCRAPEGQGLGPSLLCVPDAWWCATLSVGARLFQLELEADALVNFHQYSSQLLPFYESSPQVLHTEVLQHLTDLIRNHPSWSVAHLAVELGIRECFHHSRIISCANCAENEEGCTPLHLACRKGDGEILVELVQYCHTQMDVTDYKGETVFHYAVQGDNSQVLQLLGRNAVAGLNQVNNQGLTPLHLACQLGKQEMVRVLLLCNARCNIMGPNGYPIHSAMKFSQKGCAEMIISMDSSQIHSKDPRYGASPLHWAKNAEMARMLLKRGCNVNSTSSAGNTALHVAVMRNRFDCAIVLLTHGANADARGEHGNTPLHLAMSKDNVEMIKALIVFGAEVDTPNDFGETPTFLASKIGRLVTRKAILTLLRTVGAEYCFPPIHGVPAEQGSAAPHHPFSLERAQPPPISLNNLELQDLMHISRARKPAFILGSMRDEKRTHDHLLCLDGGGVKGLIIIQLLIAIEKASGVATKDLFDWVAGTSTGGILALAILHSKSMAYMRGMYFRMKDEVFRGSRPYESGPLEEFLKREFGEHTKMTDVRKPKVMLTGTLSDRQPAELHLFRNYDAPETVREPRFNQNVNLRPPAQPSDQLVWRAARSSGAAPTYFRPNGRFLDGGLLANNPTLDAMTEIHEYNQDLIRKGQANKVKKLSIVVSLGTGRSPQVPVTCVDVFRPSNPWELAKTVFGAKELGKMVVDCCTDPDGRAVDRARAWCEMVGIQYFRLNPQLGTDIMLDEVSDTVLVNALWETEVYIYEHREEFQKLIQLLLSP

SEQ ID NO: 28817 - protein, 787 aa, Artificial Sequence
  Synthetic polypeptide
MYSLHRPCPRHGLFALASPSAKNAPSQLLGWTHGSCSVGLSCSHSEPQHPPCGQDTAPLALGCRGSVSTSVSPPDCRAPEGQGLGPSLLCVPDAWWCATLSVGARLFQLELEADALVNFHQYSSQLLPFYESSPQVLHTEVLQHLTDLIRNHPSWSVAHLAVELGIRECFHHSRIISCANCAENEEGCTPLHLACRKGDGEILVELVQYCHTQMDVTDYKGETVFHYAVQGDNSQVLQLLGRNAVAGLNQVNNQGLTPLHLACQLGKQEMVRVLLLCNARCNIMGPNGYPIHSAMKFSQKGCAEMIISMDSSQIHSKDPRYGASPLHWAKNAEMARMLLKRGCNVNSTSSAGNTALHVAVMRNRFDCAIVLLTHGANADARGEHGNTPLHLAMSKDNVEMIKALIVFGAEVDTPNDFGETPTFLASKIGRQLQDLMHISRARKPAFILGSMRDEKRTHDHLLCLDGGGVKGLIIIQLLIAIEKASGVATKDLFDWVAGTSTGGILALAILHSKSMAYMRGMYFRMKDEVFRGSRPYESGPLEEFLKREFGEHTKMTDVRKPKVMLTGTLSDRQPAELHLFRNYDAPETVREPRFNQNVNLRPPAQPSDQLVWRAARSSGAAPTYFRPNGRFLDGGLLANNPTLDAMTEIHEYNQDLIRKGQANKVKKLSIVVSLGTGRSPQVPVTCVDVFRPSNPWELAKTVFGAKELGKMVVDCCTDPDGRAVDRARAWCEMVGIQYFRLNPQLGTDIMLDEVSDTVLVNALWETEVYIYEHREEFQKLIQLLLSP

SEQ ID NO: 28818 - protein, 186 aa, Artificial Sequence
  Synthetic polypeptide
MYSLHRPCPRHGLFALASPSAKNAPSQLLGWTHGSCSVGLSCSHSEPQHPPCGQDTAPLALGCRGSVSTSVSPPDCRAPEGQGLGPSLLCVPDAWWCATLSVGARLFQLELEADALVNFHQYSSQLLPFYESSPQVLHTEVLQHLTDLIRNHPSWSVAHLAVELGIRECFHHSRIISSLEGTQWLA

SEQ ID NO: 28819 - protein, 53 aa, Artificial Sequence
  Synthetic polypeptide
VAVGLFPHLFPLQTAGLLRDRAWGQVSSAFLMPGGVPRSPWVHDSSSWSWRLT

SEQ ID NO: 28820 - protein, 114 aa, Artificial Sequence
  Synthetic polypeptide
MYSLHRPCPRHGLFALASPSAKNAPSQLLGWTHGSCSVGLSCSHSEPQHPPCGQDTAPLALGCRGSVSTSVSPPDCRAPEGQGLGPSLLCVPDAWWCATLSVGARLFQLELEAD

SEQ ID NO: 28821 - protein, 33 aa, Artificial Sequence
  Synthetic polypeptide
PAGWIRSFCWASHGTRPCTGDPAFLTLPAGVGG

SEQ ID NO: 28822 - protein, 30 aa, Artificial Sequence
  Synthetic polypeptide
EFLLGIPWHPSLHWGSCFPDSSSWSWRLTP

SEQ ID NO: 28823 - protein, 29 aa, Artificial Sequence
  Synthetic polypeptide
EFLLGIPWHPSLHWGSCFPDSSSWSWRLT

SEQ ID NO: 28824 - protein, 40 aa, Artificial Sequence
  Synthetic polypeptide
GQVRWLTPVTPALWEAKTDRLLESRSSKPTWATWCQHRLW

SEQ ID NO: 28825 - protein, 415 aa, Artificial Sequence
  Synthetic polypeptide
RQHFGKPRQTDCWSPGVRNQLGQHGANIASGEEVAIKLECVKTKHPQLHIESKFYKMMQGGVGIPSIKWCGAEGDYNVMVMELLGPSLEDLFNFCSRKFSLKTVLLLADQMISRIEYIHSKNFIHRDVKPDNFLMGLGKKGNLVYIIDFGLAKKYRDARTHQHIPYRENKNLTGTARYASINTHLGIEQSRRDDLESLGYVLMYFNLGSLPWQGLKAATKRQKYERISEKKMSTPIEVLCKGYPSEFSTYLNFCRSLRFDDKPDYSYLRQLFRNLFHRQGFSYDYVFDWNMLKFGAARNPEDVDRERREHEREERMGQLRGSATRALPPGPPTGATANRLRSAAEPVASTPASRIQPAGNTSPRAISRVDRERKVSMRLHRGAPANVSSSDLTGRQEVSRIPASQTSVPFDHLGK

SEQ ID NO: 28826 - protein, 49 aa, Artificial Sequence
  Synthetic polypeptide
PGAVAHTCNASTLGSQDRQIAGVQEFETNLGNMVPTSPLVRKSPSSWSV

SEQ ID NO: 28827 - protein, 335 aa, Artificial Sequence
  Synthetic polypeptide
RQHFGKPRQTDCWSPGVRNQLGQHGANIASGEEVAIKLECVKTKHPQLHIESKFYKMMQGGVGIPSIKWCGAEGDYNVMVMELLGPSLEDLFNFCSRKFSLKTVLLLADQMISRIEYIHSKNFIHRDVKPDNFLMGLGKKGNLVYIIDFGLAKKYRDARTHQHIPYRENKNLTGTARYASINTHLGIEQSRRDDLESLGYVLMYFNLGSLPWQGLKAATKRQKYERISEKKMSTPIEVLCKGYPSEFSTYLNFCRSLRFDDKPDYSYLRQLFRNLFHRQGFSYDYVFDWNMLKFARSTSPPTAAGLTAFLEVPLEAGPGVRSWAEAPTALSFANL

SEQ ID NO: 28828 - protein, 310 aa, Artificial Sequence
  Synthetic polypeptide
RQHFGKPRQTDCWSPGVRNQLGQHGANIASGEEVAIKLECVKTKHPQLHIESKFYKMMQGGVGIPSIKWCGAEGDYNVMVMELLGPSLEDLFNFCSRKFSLKTVLLLADQMISRIEYIHSKNFIHRDVKPDNFLMGLGKKGNLVYIIDFGLAKKYRDARTHQHIPYRENKNLTGTARYASINTHLGIEQSRRDDLESLGYVLMYFNLGSLPWQGLKAATKRQKYERISEKKMSTPIEVLCKGYPSEFSTYLNFCRSLRFDDKPDYSYLRQLFRNLFHRQGFSYDYVFDWNMLKFTDTVQDGSHWPHATHF

SEQ ID NO: 28829 - protein, 224 aa, Artificial Sequence
  Synthetic polypeptide
RQHFGKPRQTDCWSPGVRNQLGQHGANIASGEEVAIKLECVKTKHPQLHIESKFYKMMQGGVGIPSIKWCGAEGDYNVMVMELLGPSLEDLFNFCSRKFSLKTVLLLADQMISRIEYIHSKNFIHRDVKPDNFLMGLGKKGNLVYIIDFGLAKKYRDARTHQHIPYRENKNLTGTARYASINTHLGIEQSRRDDLESLGYVLMYFNLGSLPWQGLKAATKRQKY

SEQ ID NO: 28830 - protein, 24 aa, Artificial Sequence
  Synthetic polypeptide
NGSNTTYMRLAVRMVDPTNGRNNG

SEQ ID NO: 28831 - protein, 328 aa, Artificial Sequence
  Synthetic polypeptide
GWLIQLMEEIMAEKENKTIIFVETKRRCDDLTRRMRRDGWPAMCIHGDKSQPERDWVLNEFRSGKAPILIATDVASRGLDVEDVKFVINYDYPNSSEDYVHRIGRTARSTNKGTAYTFFTPGNLKQARELIKVLEEANQAINPKLMQLVDHRGGGGGGGKGGRSRYRTTSSANNPNLMYQDECDRRLRGVKDGGRRDSASYRDRSETDRAGYANGSGYGSPNSAFGAQAGQYTYGQGTYGAAAYGTSSYTAQEYGAGTYGASSTTSTGRSSQSSSQQFSGIGRSGQQPQPLMSQQFAQPPGATNMIGYMGQTAYQYPPPPPPPPPSRK

SEQ ID NO: 28832 - protein, 11 aa, Artificial Sequence
  Synthetic polypeptide
YHLHETCCEDG

SEQ ID NO: 28833 - protein, 328 aa, Artificial Sequence
  Synthetic polypeptide
GWLIQLMEEIMAEKENKTIIFVETKRRCDDLTRRMRRDGWPAMCIHGDKSQPERDWVLNEFRSGKAPILIATDVASRGLGFDVEDVKFVINYDYPNSSEDYVHRIGRTARSTNKGTAYTFFTPGNLKQARELIKVLEEANQAINPKLMQLVDHRGGGGGGGGRSRYRTTSSANNPNLMYQDECDRRLRGVKDGGRRDSASYRDRSETDRAGYANGSGYGSPNSAFGAQAGQYTYGQGTYGAAAYGTSSYTAQEYGAGTYGASSTTSTGRSSQSSSQQFSGIGRSGQQPQPLMSQQFAQPPGATNMIGYMGQTAYQYPPPPPPPPPSRK

SEQ ID NO: 28834 - protein, 326 aa, Artificial Sequence
  Synthetic polypeptide
GWLIQLMEEIMAEKENKTIIFVETKRRCDDLTRRMRRDGWPAMCIHGDKSQPERDWVLNEFRSGKAPILIATDVASRGLDVEDVKFVINYDYPNSSEDYVHRIGRTARSTNKGTAYTFFTPGNLKQARELIKVLEEANQAINPKLMQLVDHRGGGGGGGGRSRYRTTSSANNPNLMYQDECDRRLRGVKDGGRRDSASYRDRSETDRAGYANGSGYGSPNSAFGAQAGQYTYGQGTYGAAAYGTSSYTAQEYGAGTYGASSTTSTGRSSQSSSQQFSGIGRSGQQPQPLMSQQFAQPPGATNMIGYMGQTAYQYPPPPPPPPPSRK

SEQ ID NO: 28835 - protein, 38 aa, Artificial Sequence
  Synthetic polypeptide
DRAWCLRPVIPAIWEAEAGGSPEIWSKRWWWPSPEEIW

SEQ ID NO: 28836 - protein, 649 aa, Artificial Sequence
  Synthetic polypeptide
SQRFGRPRRADHRRFGARGGGGLPPKKFGNPGERLRKKKWDLSELPKFEKNFYVEHPEVARLTPYEVDELRRKKEITVRGGDVCPKPVFAFHHANFPQYVMDVLMDQHFTEPTPIQCQGFPLALSGRDMVGIAQTGSGKTLAYLLPAIVHINHQPYLERGDGPICLVLAPTRELAQQVQQVADDYGKCSRLKSTCIYGGAPKGPQIRDLERGVEICIATPGRLIDFLESGKTNLRRCTYLVLDEADRMLDMGFEPQIRKIVDQIRPDRQTLMWSATWPKEVRQLAEDFLRDYTQINVGNLELSANHNILQIVDVCMESEKDHKLIQLMEEIMAEKENKTIIFVETKRRCDDLTRRMRRDGWPAMCIHGDKSQPERDWVLNEFRSGKAPILIATDVASRGLDVEDVKFVINYDYPNSSEDYVHRIGRTARSTNKGTAYTFFTPGNLKQARELIKVLEEANQAINPKLMQLVDHRGGGGGGGKGGRSRYRTTSSANNPNLMYQDECDRRLRGVKDGGRRDSASYRDRSETDRAGYANGSGYGSPNSAFGAQAGQYTYGQGTYGAAAYGTSSYTAQEYGAGTYGASSTTSTGRSSQSSSQQFSGIGRSGQQPQPLMSQQFAQPPGATNMIGYMGQTAYQYPPPPPPPPPSRK

SEQ ID NO: 28837 - protein, 50 aa, Artificial Sequence
  Synthetic polypeptide
PGVVPQACNPSDLGGRGGRITGDLEQEVVVAFPRRNLVILGSVCVKKSGI

SEQ ID NO: 28838 - protein, 649 aa, Artificial Sequence
  Synthetic polypeptide
SQRFGRPRRADHRRFGARGGGGLPPKKFGNPGERLRKKKWDLSELPKFEKNFYVEHPEVARLTPYEVDELRRKKEITVRGGDVCPKPVFAFHHANFPQYVMDVLMDQHFTEPTPIQCQGFPLALSGRDMVGIAQTGSGKTLAYLLPAIVHINHQPYLERGDGPICLVLAPTRELAQQVQQVADDYGKCSRLKSTCIYGGAPKGPQIRDLERGVEICIATPGRLIDFLESGKTNLRRCTYLVLDEADRMLDMGFEPQIRKIVDQIRPDRQTLMWSATWPKEVRQLAEDFLRDYTQINVGNLELSANHNILQIVDVCMESEKDHKLIQLMEEIMAEKENKTIIFVETKRRCDDLTRRMRRDGWPAMCIHGDKSQPERDWVLNEFRSGKAPILIATDVASRGLGFDVEDVKFVINYDYPNSSEDYVHRIGRTARSTNKGTAYTFFTPGNLKQARELIKVLEEANQAINPKLMQLVDHRGGGGGGGGRSRYRTTSSANNPNLMYQDECDRRLRGVKDGGRRDSASYRDRSETDRAGYANGSGYGSPNSAFGAQAGQYTYGQGTYGAAAYGTSSYTAQEYGAGTYGASSTTSTGRSSQSSSQQFSGIGRSGQQPQPLMSQQFAQPPGATNMIGYMGQTAYQYPPPPPPPPPSRK

SEQ ID NO: 28839 - protein, 647 aa, Artificial Sequence
  Synthetic polypeptide
SQRFGRPRRADHRRFGARGGGGLPPKKFGNPGERLRKKKWDLSELPKFEKNFYVEHPEVARLTPYEVDELRRKKEITVRGGDVCPKPVFAFHHANFPQYVMDVLMDQHFTEPTPIQCQGFPLALSGRDMVGIAQTGSGKTLAYLLPAIVHINHQPYLERGDGPICLVLAPTRELAQQVQQVADDYGKCSRLKSTCIYGGAPKGPQIRDLERGVEICIATPGRLIDFLESGKTNLRRCTYLVLDEADRMLDMGFEPQIRKIVDQIRPDRQTLMWSATWPKEVRQLAEDFLRDYTQINVGNLELSANHNILQIVDVCMESEKDHKLIQLMEEIMAEKENKTIIFVETKRRCDDLTRRMRRDGWPAMCIHGDKSQPERDWVLNEFRSGKAPILIATDVASRGLDVEDVKFVINYDYPNSSEDYVHRIGRTARSTNKGTAYTFFTPGNLKQARELIKVLEEANQAINPKLMQLVDHRGGGGGGGGRSRYRTTSSANNPNLMYQDECDRRLRGVKDGGRRDSASYRDRSETDRAGYANGSGYGSPNSAFGAQAGQYTYGQGTYGAAAYGTSSYTAQEYGAGTYGASSTTSTGRSSQSSSQQFSGIGRSGQQPQPLMSQQFAQPPGATNMIGYMGQTAYQYPPPPPPPPPSRK

SEQ ID NO: 28840 - protein, 410 aa, Artificial Sequence
  Synthetic polypeptide
MGPGYSLWNLLAHHFCSGRELEKFLSSSSPRAIWLDSFWWIFHERYQPNKELQNNLFDRIAQHYALLLFRVPKSHSEEALLKRLPSLLSKAVYTSFCCCFPQSWFDTHEFKSDICNTMSLWISGTYPSPQSYDSWDYSELDPERFRREELMLYRRRLTKGREFSLFAGKRAFSQKPAQSRKFYHPQSSSANSPSEKTSSAKQNSEKSLRMQNTAKEHHCQTLVLKKPTQEVKRISEARECENMFPKKSCAACKSPELTSNLFNIYGKSPLIVYFLQNYASLQQHGKNVLIVRREKTTSTPDCTPTYTDVISETLCSMKKRKDNLNQLYQHHWTEWNYFDKHLKELQDNFSREMKNIDPKAADTKKANHMFIPPSAVNEESPDKKTKEGKGGEGKRRETEVEHFFPLTSKP

SEQ ID NO: 28841 - protein, 20 aa, Artificial Sequence
  Synthetic polypeptide
WAQATRFGTSWPIISVQVEN

SEQ ID NO: 28842 - protein, 17 aa, Artificial Sequence
  Synthetic polypeptide
GPRLLALEPPGPSFLFR

SEQ ID NO: 28843 - protein, 492 aa, Artificial Sequence
  Synthetic polypeptide
MGPGYSLWNLLAHHFCSGRELEKFLSSSSPRAIWLDSFWWIFHERYQPNKELQNNLFDRIAQHYALLLFRVPKSHSEEALLKRLPSLLSKAVYTSFCCCFPQSWFDTHEFKSDICNTMSLWISGGTYPSPQSYDSWDYSELDPERFRREELMLYRRRLTKGREFSLFAGKRAFSQKPAQSRKFYHPQSSSANSPSEKTSSAKQNSEKSLRMQNTAKEHHCQTLVLKKPTQEVKRISEARECENMFPKKSCAACKSPELTSNLFNIYGKSPLIVYFLQNYASLQQHGKNVLIVRREKTTSTPDCTPTYTDVISETLCSMKKRKDNLNQLYQHHWTEWNYFDKHLKELQDNFSREMKNIDPKAADTKKANHMFIPPSAVNEESPDKKTKGSLQREIEFKGCSNKNHGKGRSVNMRGKEEREREEKQKLNISFHSLPSPEELHNLEPGSAYRIRDISATRTPLRRPSSWEPSLIYQEQVLLKTHTLSMEEDKFRC

SEQ ID NO: 28844 - protein, 492 aa, Artificial Sequence
  Synthetic polypeptide
MGPGYSLWNLLAHHFCSGRELEKFLSSSSPRAIWLDSFWWIFHERYQPNKELQNNLFDRIAQHYALLLFRVPKSHSEEALLKRLPSLLSKAVYTSFCCCFPQSWFDTHEFKSDICNTMSLWISVGTYPSPQSYDSWDYSELDPERFRREELMLYRRRLTKGREFSLFAGKRAFSQKPAQSRKFYHPQSSSANSPSEKTSSAKQNSEKSLRMQNTAKEHHCQTLVLKKPTQEVKRISEARECENMFPKKSCAACKSPELTSNLFNIYGKSPLIVYFLQNYASLQQHGKNVLIVRREKTTSTPDCTPTYTDVISETLCSMKKRKDNLNQLYQHHWTEWNYFDKHLKELQDNFSREMKNIDPKAADTKKANHMFIPPSAVNEESPDKKTKGSLQREIEFKGCSNKNHGKGRSVNMRGKEEREREEKQKLNISFHSLPSPEELHNLEPGSAYRIRDISATRTPLRRPSSWEPSLIYQEQVLLKTHTLSMEEDKFRC

SEQ ID NO: 28845 - protein, 67 aa, Artificial Sequence
  Synthetic polypeptide
RRSVAESQHGPATDWLSDAGLAAQPPCLSFSICKMGVQHVGARRAHLGPPPRHGLRGEGGERPSIGV

SEQ ID NO: 28846 - protein, 252 aa, Artificial Sequence
  Synthetic polypeptide
EPEGGVWPRANTGRPLTGSVTLGWLPNLRVSVSPSVKWGYSTWEPEEHILDPRLVMAYEEKEERDRASGYRKRGPKPKRLLLQRLYSMDLRSSHKAKGKEKLCFSLTCPLGSGSPEGVVKAGAPELVDKGPLVPTLPFPLRKPRKAHKYLRLSRKKFPPRGPNLESHSHRRELFLQEPPAPDVLQAAGEWEPAAQPPEEEADADLAEGPPPWTPALPSSEVTVTDITANSITVTFREAQAAEGFFRDRSGKF

SEQ ID NO: 28847 - protein, 69 aa, Artificial Sequence
  Synthetic polypeptide
NGGTARGSQKSTSWTPASSWPTRRRRRETEHRGIGREVRNPSGFCCSGCTAWTCGAPTRPRARRSSASP

SEQ ID NO: 28848 - protein, 159 aa, Artificial Sequence
  Synthetic polypeptide
EPEGGVWPRANTGRPLTGSVTLGWLPNLRVSVSPSVKWGYSTWEPEEHILDPRLVMAYEEKEERDRASGYRKRGPKPKRLLLQEPPAPDVLQAAGEWEPAAQPPEEEADADLAEGPPPWTPALPSSEVTVTDITANSITVTFREAQAAEGFFRDRSGKF

SEQ ID NO: 28849 - protein, 91 aa, Artificial Sequence
  Synthetic polypeptide
NGGTARGSQKSTSWTPASSWPTRRRRRETEHRGIGREVRNPSGFCCRSHRPQTSCRRLASGSLLRSPLKRRQMPTWPRGPLPGHLRSPQVR

SEQ ID NO: 28850 - protein, 229 aa, Artificial Sequence
  Synthetic polypeptide
ETPHGGLEQGDPIPEELYEMLSDHSIRSFDDLQRLLHGDPGEEDGAELDLNMTRSHSGGELESLARGRRSLGSLTIAEPAMIAECKTRTEVFEISRRLIDRTNANFLVWPPCVEVQRCSGCCNNRNVQCRPTQVQLRPVQVRKIEIVRKKPIFKKATVTLEDHLACKCETVAAARPVTRSPGGSQEQRAKTPQTRVTIRTVRVRRPPKGKHRKFKHTHDKTALKETLGA

SEQ ID NO: 28851 - protein, 20 aa, Artificial Sequence
  Synthetic polypeptide
RRPMVGWNRGTPFPRSFMRC

SEQ ID NO: 28852 - protein, 17 aa, Artificial Sequence
  Synthetic polypeptide
DAPWWAGTGGPHSRGAL

SEQ ID NO: 28853 - protein, 31 aa, Artificial Sequence
  Synthetic polypeptide
TGNRLTESSPLPDMGPSASCLGSAAAGIVGR

SEQ ID NO: 28854 - protein, 73 aa, Artificial Sequence
  Synthetic polypeptide
NTVSTKNTKKKKKKISQAWWRIPVIPATREAEAGELLELGTVSQKVLRSQTWVPRLPASEAQQQASWEGEELP

SEQ ID NO: 28855 - protein, 419 aa, Artificial Sequence
  Synthetic polypeptide
SQLLGRLRQENCLNWEPSHRKFSAPRHGSLGFLPRKRSSRHRGKVKSFPKDDPSKPVHLTAFLGYKAGMTHIVREVDRPGSKVNKKEVVEAVTIVETPPMVVVGIVGYVETPRGLRTFKTVFAEHISDECKRRFYKNWHKSKKKAFTKYCKKWQDEDGKKQLEKDFSSMKKYCQVIRVIAHTQMRLLPLRQKKAHLMEIQVNGGTVAEKLDWARERLEQQVPVNQVFGQDEMIDVIGVTKGKGYKGVTSRWHTKKLPRKTHRGLRKVACIGAWHPARVAFSVARAGQKGYHHRTEINKKIYKIGQGYLIKDGKLIKNNASTDYDLSDKSINPLGGFVHYGEVTNDFVMLKGCVVGTKKRVLTLRKSLLVQTKRRALEKIDLKFIDTTSKFGHGRFQTMEEKKAFMGPLKKDRIAKEEGA

SEQ ID NO: 28856 - protein, 294 aa, Artificial Sequence
  Synthetic polypeptide
SQLLGRLRQENCLNWEPSHRKFSAPRHGSLGFLPRKRSSRHRGKVKSFPKDDPSKPVHLTAFLGYKAGMTHIVREVDRPGSKVNKKEVVEAVTIVETPPMVVVGIVGYVETPRGLRTFKTVFAEHISDECKRRFYKNWHKSKKKAFTKYCKKWQDEDGKKQLEKDFSSMKKYCQVIRVIAHTQMRLLPLRQKKAHLMEIQVNGGTVAEKLDWARERLEQQVPVNQVFGQDEMIDVIGVTKGKGYKGVTSRWHTKKLPRKTHRGLRKVACIGAWHPARVAFSVARAGQKGYHHRT

SEQ ID NO: 28857 - protein, 245 aa, Artificial Sequence
  Synthetic polypeptide
SQLLGRLRQENCLNWEPSHRKFSAPRHGSLGFLPRKRSSRHRGKVKSFPKDDPSKPVHLTAFLGYKAGMTHIVREVDRPGSKVNKKEVVEAVTIVETPPMVVVGIVGYVETPRGLRTFKTVFAEHISDECKRRFYKNWHKSKKKAFTKYCKKWQDEDGKKQLEKDFSSMKKYCQVIRVIAHTQMRLLPLRQKKAHLMEIQVNGGTVAEKLDWARERLEQQVPVNQVFGQDEMIDVIGVTKGKGYK

SEQ ID NO: 28858 - protein, 196 aa, Artificial Sequence
  Synthetic polypeptide
SQLLGRLRQENCLNWEPSHRKFSAPRHGSLGFLPRKRSSRHRGKVKSFPKDDPSKPVHLTAFLGYKAGMTHIVREVDRPGSKVNKKEVVEAVTIVETPPMVVVGIVGYVETPRGLRTFKTVFAEHISDECKRRFYKNCSARLCPMSSIQAPLAGGKGSLEAGNELHPHAVPVCLPLTPRRGDEGLHLVPSPTLLCS

SEQ ID NO: 28859 - protein, 24 aa, Artificial Sequence
  Synthetic polypeptide
ELRWSSTPWTFRTSTCQPSAPCAS

SEQ ID NO: 28860 - protein, 78 aa, Artificial Sequence
  Synthetic polypeptide
KNSDGRVLPGPSEHQPVSHPHRARPEAPQSHQPRAQYADPGEPAPGHTAHAGECPAALLLCLLHLWHHRCAALGGPAA

SEQ ID NO: 28861 - protein, 1823 aa, Artificial Sequence
  Synthetic polypeptide
RTQMVEYSLDLQNINLSAIRTVRVLRPLKAINRVPSMRILVNLLLDTLPMLGNVLLLCFFVFFIFGIIGVQLWAGLLRNRCFLEENFTIQGDVALPPYYQPEEDDEMPFICSLSGDNGIMGCHEIPPLKEQGRECCLSKDDVYDFGAGRQDLNASGLCVNWNRYYNVCRTGSANPHKGAINFDNIGYAWIVIFQVITLEGWVEIMYYVMDAHSFYNFIYFILLIIVGSFFMINLCLVVIATQFSETKQREHRLMLEQRQRYLSSSTVASYAEPGDCYEEIFQYVCHILRKAKRRALGLYQALQSRRQALGPEAPAPAKPGPHAKEPRHYQLCPQHSPLDATPHTLVQPIPATLASDPASCPCCQHEDGRRPSGLGSTDSGQEGSGSGSSAGGEDEADGDGARSSEDGASSELGKEEEEEEQADGAVWLCGDVWRETRAKLRGIVDSKYFNRGIMMAILVNTVSMGIEHHEQPEELTNILEICNVVFTSMFALEMILKLAAFGLFDYLRNPYNIFDSIIVIISIWEIVGQADGGLSVLRTFRLLRVLKLVRFMPALRRQLVVLMKTMDNVATFCMLLMLFIFIFSILGMHIFGCKFSLRTDTGDTVPDRKNFDSLLWAIVTVFQILTQEDWNVVLYNGMASTSPWASLYFVALMTFGNYVLFNLLVAILVEGFQAEGDANRSYSDEDQSSSNIEEFDKLQEGLDSSGDPKLCPIPMTPNGHLDPSLPLGGHLGPAGAAGPAPRLSLQPDPMLVALGSRKSSVMSLGRMSYDQRSLSSSRSSYYGPWGRSAAWASRRSSWNSLKHKPPSAEHESLLSAERGGGARVCEVAADEGPPRAAPLHTPHAHHIHHGPHLAHRHRHHRRTLSLDNRDSVDLAELVPAVGAHPRAAWRAAGPAPGHEDCNGRMPSIAKDVFTKMGDRGDRGEDEEEIDYTLCFRVRKMIDVYKPDWCEVREDWSVYLFSPENRFRVLCQTIIAHKLFDYVVLAFIFLNCITIALERPQIEAGSTERIFLTVSNYIFTAIFVGEMTLKVVSLGLYFGEQAYLRSSWNVLDGFLVFVSIIDIVVSLASAGGAKILGVLRVLRLLRTLRPLRVISRAPGLKLVVETLISSLKPIGNIVLICCAFFIIFGILGVQLFKGKFYHCLGVDTRNITNRSDCMAANYRWVHHKYNFDNLGQALMSLFVLASKDGWVNIMYNGLDAVAVDQQPVTNHNPWMLLYFISFLLIVSFFVLNMFVGVVVENFHKCRQHQEAEEARRREEKRLRRLEKKRRKAQRLPYYATYCHTRLLIHSMCTSHYLDIFITFIICLNVVTMSLEHYNQPTSLETALKYCNYMFTTVFVLEAVLKLVAFGLRRFFKDRWNQLDLAIVLLSVMGITLEEIEINAALPINPTIIRIMRVLRIARVLKLLKMATGMRALLDTVVQALPQVGNLGLLFMLLFFIYAALGVELFGKLVCNDENPCEGMSRHATFENFGMAFLTLFQVSTGDNWNGIMKDTLRDCTHDERSCLSSLQFVSPLYFVSFVLTAQFVLINVVVAVLMKHLDDSNKEAQEDAEMDAELELEMAHGLGPGPRLPTGSPGAPGRGPGGAGGGGDTEGGLCRRCYSPAQENLWLDSVSLIIKDSLEGELTIIDNLSGSIFHHYSSPAGCKKCHHDKQEVQLAETEAFSLNSDRSSSILLGDDLSLEDPTACPPGRKDSKGELDPPEPMRVGDLGECFFPLSSTAVSPDPENFLCEMEEIPFNPVRSWLKHDSSQAPPSPFSPDASSPLLPMPAEFFHPAVSASQKGPEKGTGTGTLPKIALQGSWASLRSPRVNCTLLRQVPTPPRP

SEQ ID NO: 28862 - protein, 1858 aa, Artificial Sequence
  Synthetic polypeptide
RTQMVEYSLDLQNINLSAIRTVRVLRPLKAINRVPSMRILVNLLLDTLPMLGNVLLLCFFVFFIFGIIGVQLWAGLLRNRCFLEENFTIQGDVALPPYYQPEEDDEMPFICSLSGDNGIMGCHEIPPLKEQGRECCLSKDDVYDFGAGRQDLNASGLCVNWNRYYNVCRTGSANPHKGAINFDNIGYAWIVIFQVITLEGWVEIMYYVMDAHSFYNFIYFILLIIVGSFFMINLCLVVIATQFSETKQREHRLMLEQRQRYLSSSTVASYAEPGDCYEEIFQYVCHILRKAKRRALGLYQALQSRRQALGPEAPAPAKPGPHAKEPRHYHGKTKGQGDEGRHLGSRHCQTLHGPASPGNDHSGRELCPQHSPLDATPHTLVQPIPATLASDPASCPCCQHEDGRRPSGLGSTDSGQEGSGSGSSAGGEDEADGDGARSSEDGASSELGKEEEEEEQADGAVWLCGDVWRETRAKLRGIVDSKYFNRGIMMAILVNTVSMGIEHHEQPEELTNILEICNVVFTSMFALEMILKLAAFGLFDYLRNPYNIFDSIIVIISIWEIVGQADGGLSVLRTFRLLRVLKLVRFMPALRRQLVVLMKTMDNVATFCMLLMLFIFIFSILGMHIFGCKFSLRTDTGDTVPDRKNFDSLLWAIVTVFQILTQEDWNVVLYNGMASTSPWASLYFVALMTFGNYVLFNLLVAILVEGFQAEGDANRSYSDEDQSSSNIEEFDKLQEGLDSSGDPKLCPIPMTPNGHLDPSLPLGGHLGPAGAAGPAPRLSLQPDPMLVALGSRKSSVMSLGRMSYDQRSLSSSRSSYYGPWGRSAAWASRRSSWNSLKHKPPSAEHESLLSAERGGGARVCEVAADEGPPRAAPLHTPHAHHIHHGPHLAHRHRHHRRTLSLDNRDSVDLAELVPAVGAHPRAAWRAAGPAPGHEDCNGRMPSIAKDVFTKMGDRGDRGEDEEEIDYTLCFRVRKMIDVYKPDWCEVREDWSVYLFSPENRFRVLCQTIIAHKLFDYVVLAFIFLNCITIALERPQIEAGSTERIFLTVSNYIFTAIFVGEMTLKVVSLGLYFGEQAYLRSSWNVLDGFLVFVSIIDIVVSLASAGGAKILGVLRVLRLLRTLRPLRVISRAPGLKLVVETLISSLKPIGNIVLICCAFFIIFGILGVQLFKGKFYHCLGVDTRNITNRSDCMAANYRWVHHKYNFDNLGQALMSLFVLASKDGWVNIMYNGLDAVAVDQQPVTNHNPWMLLYFISFLLIVSFFVLNMFVGVVVENFHKCRQHQEAEEARRREEKRLRRLEKKRRKAQRLPYYATYCHTRLLIHSMCTSHYLDIFITFIICLNVVTMSLEHYNQPTSLETALKYCNYMFTTVFVLEAVLKLVAFGLRRFFKDRWNQLDLAIVLLSVMGITLEEIEINAALPINPTIIRIMRVLRIARVLKLLKMATGMRALLDTVVQALPQVGNLGLLFMLLFFIYAALGVELFGKLVCNDENPCEGMSRHATFENFGMAFLTLFQVSTGDNWNGIMKDTLRDCTHDERSCLSSLQFVSPLYFVSFVLTAQFVLINVVVAVLMKHLDDSNKEAQEDAEMDAELELEMAHGLGPGPRLPTGSPGAPGRGPGGAGGGGDTEGGLCRRCYSPAQENLWLDSVSLIIKDSLEGELTIIDNLSGSIFHHYSSPAGCKKCHHDKQEVQLAETEAFSLNSDRSSSILLGDDLSLEDPTACPPGRKDSKGELDPPEPMRVGDLGECFFPLSSTAVSPDPENFLCEMEEIPFNPVRSWLKHDSSQAPPSPFSPDASSPLLPMPAEFFHPAVSASQKGPEKGTGTGTLPKIALQGSWASLRSPRVNCTLLRQVPTPPRP

SEQ ID NO: 28863 - protein, 2071 aa, Artificial Sequence
  Synthetic polypeptide
RTQMVEYSLDLQNINLSAIRTVRVLRPLKAINRVPSMRILVNLLLDTLPMLGNVLLLCFFVFFIFGIIGVQLWAGLLRNRCFLEENFTIQGDVALPPYYQPEEDDEMPFICSLSGDNGIMGCHEIPPLKEQGRECCLSKDDVYDFGAGRQDLNASGLCVNWNRYYNVCRTGSANPHKGAINFDNIGYAWIVIFQVITLEGWVEIMYYVMDAHSFYNFIYFILLIIVGSFFMINLCLVVIATQFSETKQREHRLMLEQRQRYLSSSTVASYAEPGDCYEEIFQYVCHILRKAKRRALGLYQALQSRRQALGPEAPAPAKPGPHAKEPRHYHGKTKGQGDEGRHLGSRHCQTLHGPASPGNDHSGRGKPGPRELCPQHSPLDATPHTLVQPIPATLASDPASCPCCQHEDGRRPSGLGSTDSGQEGSGSGSSAGGEDEADGDGARSSEDGASSELGKEEEEEEQADGAVWLCGDVWRETRAKLRGIVDSKYFNRGIMMAILVNTVSMGIEHHEQANELTNILEICNVVFTSMFALEMILKLAAFGLFDYLRNPYNIFDSIIVIISIWEIVGQADGGLSVLRTFRLLRVLKLVRFMPALRRQLVVLMKTMDNVATFCMLLMLFIFIFSILGMHIFGCKFSLRTDTGDTVPDRKNFDSLLWAIVTVFQILTQEDWNVVLYNGMASTSPWASLYFVALMTFGNYVLFNLLVAILVEGFQAEGDANRSYSDEDQSSSNIEEFDKLQEGLDSSGDPKLCPIPMTPNGHLDPSLPLGGHLGPAGAAGPAPRLSLQPDPMLVALGSRKSSVMSLGRMSYDQRSLSSSRSSYYGPWGRSAAWASRRSSWNSLKHKPPSAEHESLLSAERGGGARVCEVAADEGPPRAAPLHTPHAHHIHHGPHLAHRHRHHRRTLSLDNRDSVDLAELVPAVGAHPRAAWRAAGPAPGHEDCNGRMPSIAKDVFTKMGDRGDRGEDEEEIDYTLCFRVRKMIDVYKPDWCEVREDWSVYLFSPENRFRVLCQTIIAHKLFDYVVLAFIFLNCITIALERPQIEAGSTERIFLTVSNYIFTAIFVGEMTLKVVSLGLYFGEQAYLRSSWNVLDGFLVFVSIIDIVVSLASAGGAKILGVLRVLRLLRTLRPLRVISRAPGLKLVVETLISSLKPIGNIVLICCAFFIIFGILGVQLFKGKFYHCLGVDTRNITNRSDCMAANYRWVHHKYNFDNLGQALMSLFVLASKDGWVNIMYNGLDAVAVDQQPVTNHNPWMLLYFISFLLIVSFFVLNMFVGVVVENFHKCRQHQEAEEARRREEKRLRRLEKKRRKAQRLPYYATYCHTRLLIHSMCTSHYLDIFITFIICLNVVTMSLEHYNQPTSLETALKYCNYMFTTVFVLEAVLKLVAFGLRRFFKDRWNQLDLAIVLLSVMGITLEEIEINAALPINPTIIRIMRVLRIARVLKLLKMATGMRALLDTVVQALPQVGNLGLLFMLLFFIYAALGVELFGKLVCNDENPCEGMSRHATFENFGMAFLTLFQVSTGDNWNGIMKDTLRDCTHDERSCLSSLQFVSPLYFVSFVLTAQFVLINVVVAVLMKHLDDSNKEAQEDAEMDAELELEMAHGLGPGPRLPTGSPGAPGRGPGGAGGGGDTEGGLCRRCYSPAQENLWLDSVSLIIKDSLEGELTIIDNLSGSIFHHYSSPAGCKKCHHDKQEVQLAETEAFSLNSDRSSSILLGDDLSLEDPTACPPGRKDSKGELDPPEPMRVGDLGECFFPLSSTAVSPDPENFLCEMEEIPFNPVRSWLKHDSSQAPPSPFSPDASSPLLPMPAEFFHPAVSASQKGPEKGTGTGTLPKIALQGSWASLRSPRVNCTLLRQATGSDTSLDASPSSSAGSLQTTLEDSLTLSDSPRRALGPPAPAPGPRAGLSPAARRRLSLRGRGLFSLRGLRAHQRSHSSGGSTSPGCTHHDSMDPSDEEGRGGAGGGGAGSEHSETLSSLSLTSLFCPPPPPPAPGLTPARKFSSTSSLAAPGRPHAAALAHGLARSPSWAADRSKDPPGRAPLPMGLGPLAPPPQPLPGELEPGDAASKRKR

SEQ ID NO: 28864 - protein, 2030 aa, Artificial Sequence
  Synthetic polypeptide
RTQMVEYSLDLQNINLSAIRTVRVLRPLKAINRVPSMRILVNLLLDTLPMLGNVLLLCFFVFFIFGIIGVQLWAGLLRNRCFLEENFTIQGDVALPPYYQPEEDDEMPFICSLSGDNGIMGCHEIPPLKEQGRECCLSKDDVYDFGAGRQDLNASGLCVNWNRYYNVCRTGSANPHKGAINFDNIGYAWIVIFQVITLEGWVEIMYYVMDAHSFYNFIYFILLIIVGSFFMINLCLVVIATQFSETKQREHRLMLEQRQRYLSSSTVASYAEPGDCYEEIFQYVCHILRKAKRRALGLYQALQSRRQALGPEAPAPAKPGPHAKEPRHYQLCPQHSPLDATPHTLVQPIPATLASDPASCPCCQHEDGRRPSGLGSTDSGQEGSGSGSSAGGEDEADGDGARSSEDGASSELGKEEEEEEQADGAVWLCGDVWRETRAKLRGIVDSKYFNRGIMMAILVNTVSMGIEHHEQATELTNILEICNVVFTSMFALEMILKLAAFGLFDYLRNPYNIFDSIIVIISIWEIVGQADGGLSVLRTFRLLRVLKLVRFMPALRRQLVVLMKTMDNVATFCMLLMLFIFIFSILGMHIFGCKFSLRTDTGDTVPDRKNFDSLLWAIVTVFQILTQEDWNVVLYNGMASTSPWASLYFVALMTFGNYVLFNLLVAILVEGFQAEGDANRSYSDEDQSSSNIEEFDKLQEGLDSSGDPKLCPIPMTPNGHLDPSLPLGGHLGPAGAAGPAPRLSLQPDPMLVALGSRKSSVMSLGRMSYDQRSLSSSRSSYYGPWGRSAAWASRRSSWNSLKHKPPSAEHESLLSAERGGGARVCEVAADEGPPRAAPLHTPHAHHIHHGPHLAHRHRHHRRTLSLDNRDSVDLAELVPAVGAHPRAAWRAAGPAPGHEDCNGRMPSIAKDVFTKMGDRGDRGEDEEEIDYTLCFRVRKMIDVYKPDWCEVREDWSVYLFSPENRFRVLCQTIIAHKLFDYVVLAFIFLNCITIALERPQIEAGSTERIFLTVSNYIFTAIFVGEMTLKVVSLGLYFGEQAYLRSSWNVLDGFLVFVSIIDIVVSLASAGGAKILGVLRVLRLLRTLRPLRVISRAPGLKLVVETLISSLKPIGNIVLICCAFFIIFGILGVQLFKGKFYHCLGVDTRNITNRSDCMAANYRWVHHKYNFDNLGQALMSLFVLASKDGWVNIMYNGLDAVAVDQQPVTNHNPWMLLYFISFLLIVSFFVLNMFVGVVVENFHKCRQHQEAEEARRREEKRLRRLEKKRRKAQRLPYYATYCHTRLLIHSMCTSHYLDIFITFIICLNVVTMSLEHYNQPTSLETALKYCNYMFTTVFVLEAVLKLVAFGLRRFFKDRWNQLDLAIVLLSVMGITLEEIEINAALPINPTIIRIMRVLRIARVLKLLKMATGMRALLDTVVQALPQVGNLGLLFMLLFFIYAALGVELFGKLVCNDENPCEGMSRHATFENFGMAFLTLFQVSTGDNWNGIMKDTLRDCTHDERSCLSSLQFVSPLYFVSFVLTAQFVLINVVVAVLMKHLDDSNKEAQEDAEMDAELELEMAHGLGPGPRLPTGSPGAPGRGPGGAGGGGDTEGGLCRRCYSPAQENLWLDSVSLIIKDSLEGELTIIDNLSGSIFHHYSSPAGCKKCHHDKQEVQLAETEAFSLNSDRSSSILLGDDLSLEDPTACPPGRKDSKGELDPPEPMRVGDLGECFFPLSSTAVSPDPENFLCEMEEIPFNPVRSWLKHDSSQAPPSPFSPDASSPLLPMPAEFFHPAVSASQKGPEKGTGTGTLPKIALQGSWASLRSPRVNCTLLRQATGSDTSLDASPSSSAGSLQTTLEDSLTLSDSPRRALGPPAPAPGPRAGLSPAARRRLSLRGRGLFSLRGLRAHQRSHSSGGSTSPGCTHHDSMDPSDEEGRGGAGGGGAGSEHSETLSSLSLTSLFCPPPPPPAPGLTPARKFSSTSSLAAPGRPHAAALAHGLARSPSWAADRSKDPPGRAPLPMGLGPLAPPPQPLPGELEPGDAASKRKR

SEQ ID NO: 28865 - protein, 2030 aa, Artificial Sequence
  Synthetic polypeptide
RTQMVEYSLDLQNINLSAIRTVRVLRPLKAINRVPSMRILVNLLLDTLPMLGNVLLLCFFVFFIFGIIGVQLWAGLLRNRCFLEENFTIQGDVALPPYYQPEEDDEMPFICSLSGDNGIMGCHEIPPLKEQGRECCLSKDDVYDFGAGRQDLNASGLCVNWNRYYNVCRTGSANPHKGAINFDNIGYAWIVIFQVITLEGWVEIMYYVMDAHSFYNFIYFILLIIVGSFFMINLCLVVIATQFSETKQREHRLMLEQRQRYLSSSTVASYAEPGDCYEEIFQYVCHILRKAKRRALGLYQALQSRRQALGPEAPAPAKPGPHAKEPRHYQLCPQHSPLDATPHTLVQPIPATLASDPASCPCCQHEDGRRPSGLGSTDSGQEGSGSGSSAGGEDEADGDGARSSEDGASSELGKEEEEEEQADGAVWLCGDVWRETRAKLRGIVDSKYFNRGIMMAILVNTVSMGIEHHEQPEELTNILEICNVVFTSMFALEMILKLAAFGLFDYLRNPYNIFDSIIVIISIWEIVGQADGGLSVLRTFRLLRVLKLVRFMPALRRQLVVLMKTMDNVATFCMLLMLFIFIFSILGMHIFGCKFSLRTDTGDTVPDRKNFDSLLWAIVTVFQILTQEDWNVVLYNGMASTSPWASLYFVALMTFGNYVLFNLLVAILVEGFQAEGDANRSYSDEDQSSSNIEEFDKLQEGLDSSGDPKLCPIPMTPNGHLDPSLPLGGHLGPAGAAGPAPRLSLQPDPMLVALGSRKSSVMSLGRMSYDQRSLSSSRSSYYGPWGRSAAWASRRSSWNSLKHKPPSAEHESLLSAERGGGARVCEVAADEGPPRAAPLHTPHAHHIHHGPHLAHRHRHHRRTLSLDNRDSVDLAELVPAVGAHPRAAWRAAGPAPGHEDCNGRMPSIAKDVFTKMGDRGDRGEDEEEIDYTLCFRVRKMIDVYKPDWCEVREDWSVYLFSPENRFRVLCQTIIAHKLFDYVVLAFIFLNCITIALERPQIEAGSTERIFLTVSNYIFTAIFVGEMTLKVVSLGLYFGEQAYLRSSWNVLDGFLVFVSIIDIVVSLASAGGAKILGVLRVLRLLRTLRPLRVISRAPGLKLVVETLISSLKPIGNIVLICCAFFIIFGILGVQLFKGKFYHCLGVDTRNITNRSDCMAANYRWVHHKYNFDNLGQALMSLFVLASKDGWVNIMYNGLDAVAVDQQPVTNHNPWMLLYFISFLLIVSFFVLNMFVGVVVENFHKCRQHQEAEEARRREEKRLRRLEKKRRKAQRLPYYATYCHTRLLIHSMCTSHYLDIFITFIICLNVVTMSLEHYNQPTSLETALKYCNYMFTTVFVLEAVLKLVAFGLRRFFKDRWNQLDLAIVLLSVMGITLEEIEINAALPINPTIIRIMRVLRIARVLKLLKMATGMRALLDTVVQALPQVGNLGLLFMLLFFIYAALGVELFGKLVCNDENPCEGMSRHATFENFGMAFLTLFQVSTGDNWNGIMKDTLRDCTHDERSCLSSLQFVSPLYFVSFVLTAQFVLINVVVAVLMKHLDDSNKEAQEDAEMDAELELEMAHGLGPGPRLPTGSPGAPGRGPGGAGGGGDTEGGLCRRCYSPAQENLWLDSVSLIIKDSLEGELTIIDNLSGSIFHHYSSPAGCKKCHHDKQEVQLAETEAFSLNSDRSSSILLGDDLSLEDPTACPPGRKDSKGELDPPEPMRVGDLGECFFPLSSTAVSPDPENFLCEMEEIPFNPVRSWLKHDSSQAPPSPFSPDASSPLLPMPAEFFHPAVSASQKGPEKGTGTGTLPKIALQGSWASLRSPRVNCTLLRQATGSDTSLDASPSSSAGSLQTTLEDSLTLSDSPRRALGPPAPAPGPRAGLSPAARRRLSLRGRGLFSLRGLRAHQRSHSSGGSTSPGCTHHDSMDPSDEEGRGGAGGGGAGSEHSETLSSLSLTSLFCPPPPPPAPGLTPARKFSSTSSLAAPGRPHAAALAHGLARSPSWAADRSKDPPGRAPLPMGLGPLAPPPQPLPGELEPGDAASKRKR

SEQ ID NO: 28866 - protein, 2065 aa, Artificial Sequence
  Synthetic polypeptide
RTQMVEYSLDLQNINLSAIRTVRVLRPLKAINRVPSMRILVNLLLDTLPMLGNVLLLCFFVFFIFGIIGVQLWAGLLRNRCFLEENFTIQGDVALPPYYQPEEDDEMPFICSLSGDNGIMGCHEIPPLKEQGRECCLSKDDVYDFGAGRQDLNASGLCVNWNRYYNVCRTGSANPHKGAINFDNIGYAWIVIFQVITLEGWVEIMYYVMDAHSFYNFIYFILLIIVGSFFMINLCLVVIATQFSETKQREHRLMLEQRQRYLSSSTVASYAEPGDCYEEIFQYVCHILRKAKRRALGLYQALQSRRQALGPEAPAPAKPGPHAKEPRHYHGKTKGQGDEGRHLGSRHCQTLHGPASPGNDHSGRELCPQHSPLDATPHTLVQPIPATLASDPASCPCCQHEDGRRPSGLGSTDSGQEGSGSGSSAGGEDEADGDGARSSEDGASSELGKEEEEEEQADGAVWLCGDVWRETRAKLRGIVDSKYFNRGIMMAILVNTVSMGIEHHEQPEELTNILEICNVVFTSMFALEMILKLAAFGLFDYLRNPYNIFDSIIVIISIWEIVGQADGGLSVLRTFRLLRVLKLVRFMPALRRQLVVLMKTMDNVATFCMLLMLFIFIFSILGMHIFGCKFSLRTDTGDTVPDRKNFDSLLWAIVTVFQILTQEDWNVVLYNGMASTSPWASLYFVALMTFGNYVLFNLLVAILVEGFQAEGDANRSYSDEDQSSSNIEEFDKLQEGLDSSGDPKLCPIPMTPNGHLDPSLPLGGHLGPAGAAGPAPRLSLQPDPMLVALGSRKSSVMSLGRMSYDQRSLSSSRSSYYGPWGRSAAWASRRSSWNSLKHKPPSAEHESLLSAERGGGARVCEVAADEGPPRAAPLHTPHAHHIHHGPHLAHRHRHHRRTLSLDNRDSVDLAELVPAVGAHPRAAWRAAGPAPGHEDCNGRMPSIAKDVFTKMGDRGDRGEDEEEIDYTLCFRVRKMIDVYKPDWCEVREDWSVYLFSPENRFRVLCQTIIAHKLFDYVVLAFIFLNCITIALERPQIEAGSTERIFLTVSNYIFTAIFVGEMTLKVVSLGLYFGEQAYLRSSWNVLDGFLVFVSIIDIVVSLASAGGAKILGVLRVLRLLRTLRPLRVISRAPGLKLVVETLISSLKPIGNIVLICCAFFIIFGILGVQLFKGKFYHCLGVDTRNITNRSDCMAANYRWVHHKYNFDNLGQALMSLFVLASKDGWVNIMYNGLDAVAVDQQPVTNHNPWMLLYFISFLLIVSFFVLNMFVGVVVENFHKCRQHQEAEEARRREEKRLRRLEKKRRKAQRLPYYATYCHTRLLIHSMCTSHYLDIFITFIICLNVVTMSLEHYNQPTSLETALKYCNYMFTTVFVLEAVLKLVAFGLRRFFKDRWNQLDLAIVLLSVMGITLEEIEINAALPINPTIIRIMRVLRIARVLKLLKMATGMRALLDTVVQALPQVGNLGLLFMLLFFIYAALGVELFGKLVCNDENPCEGMSRHATFENFGMAFLTLFQVSTGDNWNGIMKDTLRDCTHDERSCLSSLQFVSPLYFVSFVLTAQFVLINVVVAVLMKHLDDSNKEAQEDAEMDAELELEMAHGLGPGPRLPTGSPGAPGRGPGGAGGGGDTEGGLCRRCYSPAQENLWLDSVSLIIKDSLEGELTIIDNLSGSIFHHYSSPAGCKKCHHDKQEVQLAETEAFSLNSDRSSSILLGDDLSLEDPTACPPGRKDSKGELDPPEPMRVGDLGECFFPLSSTAVSPDPENFLCEMEEIPFNPVRSWLKHDSSQAPPSPFSPDASSPLLPMPAEFFHPAVSASQKGPEKGTGTGTLPKIALQGSWASLRSPRVNCTLLRQATGSDTSLDASPSSSAGSLQTTLEDSLTLSDSPRRALGPPAPAPGPRAGLSPAARRRLSLRGRGLFSLRGLRAHQRSHSSGGSTSPGCTHHDSMDPSDEEGRGGAGGGGAGSEHSETLSSLSLTSLFCPPPPPPAPGLTPARKFSSTSSLAAPGRPHAAALAHGLARSPSWAADRSKDPPGRAPLPMGLGPLAPPPQPLPGELEPGDAASKRKR

SEQ ID NO: 28867 - protein, 393 aa, Artificial Sequence
  Synthetic polypeptide
LSRRWGLARHQICQHLDLLTSQTDLMTFLDDDPELPLLATPPSIVSPITCLSEAEEVCNLSGADAVPTLSENSPSGQRDVSLDKRSDGIFTNTVTENLLETPLEKQSAAEGLKTLTILPACWSSKEEFISPDLRVSKSDSTFHNQASVETLCLSPSFKIFDRVKEIVINKAYQKPAQSSIQMDDKILKTTTRVSTASEGASSFSPLSMSSPDLASPEKSAHLLSPILAGPSFWTLSHQQLSSTSFKDEDKTAKLHHSFASRGPVSSDVEENDSLNLLGILPNNSDSAKKNISHISSSHWGEFSTQNVDQFIPLSCSGFQSTKDFPQEPEAKNSISVLLREVKRAIARLHEDLSTVIQELNVINNILMSMSLNSSQISQSSQVPQSSEGSSDQI

SEQ ID NO: 28868 - protein, 5 aa, Artificial Sequence
  Synthetic polypeptide
PPKLT

SEQ ID NO: 28869 - protein, 374 aa, Artificial Sequence
  Synthetic polypeptide
PCGTDLMTFLDDDPELPLLATPPSIVSPITCLSEAEEVCNLSGADAVPTLSENSPSGQRDVSLDKRSDGIFTNTVTENLLETPLEKQSAAEGLKTLTILPACWSSKEEFISPDLRVSKSDSTFHNQASVETLCLSPSFKIFDRVKEIVINKAYQKPAQSSIQMDDKILKTTTRVSTASEGASSFSPLSMSSPDLASPEKSAHLLSPILAGPSFWTLSHQQLSSTSFKDEDKTAKLHHSFASRGPVSSDVEENDSLNLLGILPNNSDSAKKNISHISSSHWGEFSTQNVDQFIPLSCSGFQSTKDFPQEPEAKNSISVLLREVKRAIARLHEDLSTVIQELNVINNILMSMSLNSSQISQSSQVPQSSEGSSDQI

SEQ ID NO: 28870 - protein, 9 aa, Artificial Sequence
  Synthetic polypeptide
GLPSHVELT

SEQ ID NO: 28871 - protein, 4 aa, Artificial Sequence
  Synthetic polypeptide
ECYS

SEQ ID NO: 28872 - protein, 80 aa, Artificial Sequence
  Synthetic polypeptide
EVRSPSARQPPRLRMLQLKLQQRRTREELVSQGIMPPLKSPAAFHEQRRSLERARTEDYLKRKIRSRPERSELVRMHILE

SEQ ID NO: 28873 - protein, 58 aa, Artificial Sequence
  Synthetic polypeptide
EVRRPSAWQPPRLRSEEPLRPAAAPSENATVETPAAPDPGRTGEPRDHAAFEKSSRIS

SEQ ID NO: 28874 - protein, 80 aa, Artificial Sequence
  Synthetic polypeptide
GASLPGRPSSEMWGAPLPRRPIWDVRSASARPRPRLGGEERLCPAAPSENATVETPAAPDPGRTGEPRDHAAFEKSSRIS

SEQ ID NO: 28875 - protein, 90 aa, Artificial Sequence
  Synthetic polypeptide
GAPLPGRDPVWEVRSVSARPPRLRMLQLKLQQRRTREELVSQGIMPPLKSPAAFHEQRRSLERARTEDYLKRKIRSRPERSELVRMHILE

SEQ ID NO: 28876 - protein, 4 aa, Artificial Sequence
  Synthetic polypeptide
ECYS

SEQ ID NO: 28877 - protein, 103 aa, Artificial Sequence
  Synthetic polypeptide
GASLPGRPSSEMWGAPLPRRPIWDVRSASARPRPRLGVLQLKLQQRRTREELVSQGIMPPLKSPAAFHEQRRSLERARTEDYLKRKIRSRPERSELVRMHILE

SEQ ID NO: 28878 - protein, 15 aa, Artificial Sequence
  Synthetic polypeptide
GAPLPGRDPVWECYS

SEQ ID NO: 28879 - protein, 57 aa, Artificial Sequence
  Synthetic polypeptide
DVGSASAPPPHLGCEERLCPAETPSGSATVETPAAPDPGRTGEPRDHAAFEKSSRIS

SEQ ID NO: 28880 - protein, 37 aa, Artificial Sequence
  Synthetic polypeptide
PAAPSGSATVETPAAPDPGRTGEPRDHAAFEKSSRIS

SEQ ID NO: 28881 - protein, 72 aa, Artificial Sequence
  Synthetic polypeptide
QPPRPGVLQLKLQQRRTREELVSQGIMPPLKSPAAFHEQRRSLERARTEDYLKRKIRSRPERSELVRMHILE

SEQ ID NO: 28882 - protein, 9 aa, Artificial Sequence
  Synthetic polypeptide
SRPVRECYS

SEQ ID NO: 28883 - protein, 8 aa, Artificial Sequence
  Synthetic polypeptide
SQHFGRPR

SEQ ID NO: 28884 - protein, 281 aa, Artificial Sequence
  Synthetic polypeptide
GQTGWLTPVIPALWEAEITEEMMDQANDKKVAAIEALNDGELQKAIDLFTDAIKLNPRLAILYAKRASVFVKLQKPNAAIRDCDRAIEINPDSAQPYKWRGKAHRLLGHWEEAAHDLALACKLDYDEDASAMLKEVQPRAQKIAEHRRKYERKREEREIKERIERVKKAREEHERAQREEEARRQSGAQYGSFPGGFPGGMPGNFPGGMPGMGGGMPGMAGMPGLNEILSDPEVLAAMQDPEVMVAFQDVAQNPANMSKYQSNPKVMNLISKLSAKFGGQA

SEQ ID NO: 28885 - protein, 26 aa, Artificial Sequence
  Synthetic polypeptide
PDRVAHACNPSTLGGRDNGGDDGSGK

SEQ ID NO: 28886 - protein, 145 aa, Artificial Sequence
  Synthetic polypeptide
GQTGWLTPVIPALWEAEITEEMMDQANDKKVAAIEALNDGELQKAIDLFTDAIKLNPRLAILYAKRASVFVKLQKPNAAIRDCDRAIEINPDSAQPYKWRGKAHRLLGHWEEAAHDLALACKLDYDEDASAMLKEVQPRVCTTTL

SEQ ID NO: 28887 - protein, 111 aa, Artificial Sequence
  Synthetic polypeptide
GQTGWLTPVIPALWEAEITEEMMDQANDKKVAAIEALNDGELQKAIDLFTDAIKLNPRLAILYAKRASVFVKLQKPNAAIRDCDRAIEINPDSAQPYKWRGKAHRLLGHWE

SEQ ID NO: 28888 - protein, 9 aa, Artificial Sequence
  Synthetic polypeptide
NQPRPHSFH

SEQ ID NO: 28889 - protein, 14 aa, Artificial Sequence
  Synthetic polypeptide
AQEFETNLGLIAFI

SEQ ID NO: 28890 - protein, 15 aa, Artificial Sequence
  Synthetic polypeptide
NQPRPHSFHRNHVHQ

SEQ ID NO: 28891 - protein, 254 aa, Artificial Sequence
  Synthetic polypeptide
AQEFETNLGLIAFIETMFTSKAPVEEAFLYAKFEFECRARGADILAYPPVVAGGNRSNTLHYVKNNQLIKDGEMVLLDGGCESSCYVSDITRTWPVNGRFTAPQAELYEAVLEIQRDCLALCFPGTSLENIYSMMLTLIGQKLKDLGIMKNIKENNAFKAARKYCPHHVGHYLGMDVHDTPDMPRSLPLQPGMVITIEPGIYIPEDDKDAPEKFRGLGVRIEDDVVVTQDSPLILSADCPKEMNDIEQICSQAS

SEQ ID NO: 28892 - protein, 84 aa, Artificial Sequence
  Synthetic polypeptide
QAQWLPSVIPALWEAEATGSLEPGSSRPAWATFVKPHLYKKYKVSRVWWCVPVVPATWEDEAQQRPGILLLRPPQSAADAVQGL

SEQ ID NO: 28893 - protein, 49 aa, Artificial Sequence
  Synthetic polypeptide
NPISTKNTKLAGCGGVYLWSQLLGRMRPNSALESCSFARHSLLQTLYKV

SEQ ID NO: 28894 - protein, 98 aa, Artificial Sequence
  Synthetic polypeptide
PAKPWALVMTRTRRRRRKEKRKKRKQKKRRRKMRKRRKKRRRRRKKSLSSEGRERSQPRPHGRFWTLTLGSQLPCCPPHLLQTSPPSWLFPLQRSCCA

SEQ ID NO: 28895 - protein, 236 aa, Artificial Sequence
  Synthetic polypeptide
CQALGSSDDEDEEEEEEGEEEEEEAEEEEEEDEEEEEEEEEEEEEEPQQRGQGEKSATPSRKILDPNTGEPAPVLSSPPPADVSTFLAFPSPEKLLRLGPKSSVLIAQQTDTSDPEKVVSAFLKVSSVFKDEATVRMAVQDAVDALMQKAFNSSSFNSNTFLTRLLVHMGLLKSEDKVKAIANLYGPLMALNHMVQQDYFPKALAPLLLAFVTKPNSALESCSFARHSLLQTLYKV

SEQ ID NO: 28896 - protein, 87 aa, Artificial Sequence
  Synthetic polypeptide
RCTRHSRLTVLDANPRAGTQPRDLGRHVPSPSLLTHPKMSQNSCRAFLERSSGPWRRSTCHRMGSTTLASLPWPRLSLSTPCCGSST

SEQ ID NO: 28897 - protein, 49 aa, Artificial Sequence
  Synthetic polypeptide
ARIPVVHFWKGHRDPGGGPHATEWDQPPWHHCPGPGFRCQPPAAGHQPE

SEQ ID NO: 28898 - protein, 418 aa, Artificial Sequence
  Synthetic polypeptide
SQGWHSTKRPGASRALSKPVNPSENEPEFLSCISGKVIGTLEEVHMPQNGINHPGITALAQAFAVNPLLRVINLNDNTFTEKGAVAMAETLKTLRQVEVINFGDCLVRSKGAVAIADAIRGGLPKLKELNLSFCEIKRDAALAVAEAMADKAELEKLDLNGNTLGEEGCEQLQEVLEGFNMAKVLASLSDDEDEEEEEEGEEEEEEAEEEEEEDEEEEEEEEEEEEEEPQQRGQGEKSATPSRKILDPNTGEPAPVLSSPPPADVSTFLAFPSPEKLLRLGPKSSVLIAQQTDTSDPEKVVSAFLKVSSVFKDEATVRMAVQDAVDALMQKAFNSSSFNSNTFLTRLLVHMGLLKSEDKVKAIANLYGPLMALNHMVQQDYFPKALAPLLLAFVTKPNSALESCSFARHSLLQTLYKV

SEQ ID NO: 28899 - protein, 188 aa, Artificial Sequence
  Synthetic polypeptide
SQGWHSTKRPGASRALSKPVNPSENEPEFLSCISGKVIGTLEEVHMPQNGINHPGITALAQAFAVNPLLRVINLNDNTFTEKGAVAMAETLKTLRQVEVINFGDCLVRSKGAVAIADAIRGGLPKLKELNLSFCEIKRDAALAVAEAMADKAELEKLDLNGNTLGEEGCEQLQEVLEGFNMAKVLASL

SEQ ID NO: 28900 - protein, 526 aa, Artificial Sequence
  Synthetic polypeptide
VQMPPLTRSLPGPLQAYASPTLQLLGALCRVSSLKNTEMISLGEGLITAGAQLVELDLSDNAFGPDGVQGFEALLKSSACFTLQELKLNNCGMGIGGGKILAAALTECHRKSSAQGKPLALKVFVAGRNRLENDGATALAEAFRVIGTLEEVHMPQNGINHPGITALAQAFAVNPLLRVINLNDNTFTEKGAVAMAETLKTLRQVEVINFGDCLVRSKGAVAIADAIRGGLPKLKELNLSFCEIKRDAALAVAEAMADKAELEKLDLNGNTLGEEGCEQLQEVLEGFNMAKVLASLSDDEDEEEEEEGEEEEEEAEEEEEEDEEEEEEEEEEEEEEPQQRGQGEKSATPSRKILDPNTGEPAPVLSSPPPADVSTFLAFPSPEKLLRLGPKSSVLIAQQTDTSDPEKVVSAFLKVSSVFKDEATVRMAVQDAVDALMQKAFNSSSFNSNTFLTRLLVHMGLLKSEDKVKAIANLYGPLMALNHMVQQDYFPKALAPLLLAFVTKPNSALESCSFARHSLLQTLYKV

SEQ ID NO: 28901 - protein, 95 aa, Artificial Sequence
  Synthetic polypeptide
NDLTRGRTHHSWGSAGGAGLKRQRIRARRCARLRGPAQELSLLHPAGTQAQQLWHGHWRRQDPGCSSDRMSPEIQCPRQASGPEGLCGWQKPSGE

SEQ ID NO: 28902 - protein, 481 aa, Artificial Sequence
  Synthetic polypeptide
VQMPPLTRSLPGPLQAYASPTLQLLGALCRVSSLKNTEMISLGEGLITAGAQLVELDLSDNAFGPDGVQGFEALLKSSACFTLQELKLNNCGMGIGGGKVIGTLEEVHMPQNGINHPGITALAQAFAVNPLLRVINLNDNTFTEKGAVAMAETLKTLRQVEVINFGDCLVRSKGAVAIADAIRGGLPKLKELNLSFCEIKRDAALAVAEAMADKAELEKLDLNGNTLGEEGCEQLQEVLEGFNMAKVLASLSDDEDEEEEEEGEEEEEEAEEEEEEDEEEEEEEEEEEEEEPQQRGQGEKSATPSRKILDPNTGEPAPVLSSPPPADVSTFLAFPSPEKLLRLGPKSSVLIAQQTDTSDPEKVVSAFLKVSSVFKDEATVRMAVQDAVDALMQKAFNSSSFNSNTFLTRLLVHMGLLKSEDKVKAIANLYGPLMALNHMVQQDYFPKALAPLLLAFVTKPNSALESCSFARHSLLQTLYKV

SEQ ID NO: 28903 - protein, 100 aa, Artificial Sequence
  Synthetic polypeptide
NDLTRGRTHHSWGSAGGAGLKRQRIRARRCARLRGPAQELSLLHPAGTQAQQLWHGHWRRQGHRDPGGGPHATEWDQPPWHHCPGPGFRCQPPAAGHQPE

SEQ ID NO: 28904 - protein, 251 aa, Artificial Sequence
  Synthetic polypeptide
VQMPPLTRSLPGPLQAYASPTLQLLGALCRVSSLKNTEMISLGEGLITAGAQLVELDLSDNAFGPDGVQGFEALLKSSACFTLQELKLNNCGMGIGGGKVIGTLEEVHMPQNGINHPGITALAQAFAVNPLLRVINLNDNTFTEKGAVAMAETLKTLRQVEVINFGDCLVRSKGAVAIADAIRGGLPKLKELNLSFCEIKRDAALAVAEAMADKAELEKLDLNGNTLGEEGCEQLQEVLEGFNMAKVLASL

SEQ ID NO: 28905 - protein, 72 aa, Artificial Sequence
  Synthetic polypeptide
VQMPPLTRSLPGPLQAYASPTLQLLGALCRVSSLKNTEMISLGEGLITAGAQLVELDLSDNAFGPDGVQGFE

SEQ ID NO: 28906 - protein, 34 aa, Artificial Sequence
  Synthetic polypeptide
NDLTRGRTHHSWGSAGGAGLKRQRIRARRCARLR

SEQ ID NO: 28907 - protein, 23 aa, Artificial Sequence
  Synthetic polypeptide
SQLLGRLRQENRLNLGGRGFGNF

SEQ ID NO: 28908 - protein, 790 aa, Artificial Sequence
  Synthetic polypeptide
TWEAEVSGTSNGLGSIDDIETDCYVDPRGSPALLPSTPTMPLFPHVLDLLAPLDSSRTLPSTDSLDDFSDGDVFGPELDTLLDSLSLVQGGLSGSGVPSELPQLIPVFPGGTPLLPPVVGGSIPVSSPLPPASFGLVMDPSKKLAASVLDALDPPGPTLDPLDLLPYSETRLDALDSFGSTRGSLDKPDSFMEETNSQDHRPPSGAQKPAPSPEPCMPNTALLIKNPLAATHEFKQACQLCYPKTGPRAGDYTYREGLEHKCKRDILLGRLRSSEDQTWKRIRPRPTKTSFVGSYYLCKDMINKQDCKYGDNCTFAYHQEEIDVWTEERKGTLNRDLLFDPLGGVKRGSLTIAKLLKEHQGIFTFLCEICFDSKPRIISKGTKDSPSVCSNLAAKHSFYNNKCLVHIVRSTSLKYSKIRQFQEHFQFDVCRHEVRYGCLREDSCHFAHSFIELKVWLLQQYSGMTHEDIVQESKKYWQQMEAHAGKASSSMGAPRTHGPSTFDLQMKFVCGQCWRNGQVVEPDKDLKYCSAKARHCWTKERRVLLVMSKAKRKWVSVRPLPSIRNFPQQYDLCIHAQNGRKCQYVGNCSFAHSPEERDMWTFMKENKILDMQQTYDMWLKKHNPGKPGEGTPISSREGEKQIQMPTDYADIMMGYHCWLCGKNSNSKKQWQQHIQSEKHKEKVFTSDSDASGWAFRFPMGEFRLCDRLQKGKACPDGDKCRCAHGQEELNEWLDRREVLKQKLAKARKDMLLCPRDDDFGKYNFLLQEDGDLAGATPEAPAAAATATTGE

SEQ ID NO: 28909 - protein, 52 aa, Artificial Sequence
  Synthetic polypeptide
PTWRNPISTKNTKISQAWWRMPVIPATWEAEAGESLEPGRQRFRELLMDWGP

SEQ ID NO: 28910 - protein, 120 aa, Artificial Sequence
  Synthetic polypeptide
LTPVISALWKAEGGTLLGPPDSVVDVGSTEVTEEIFLEYLSSLGESLFRGEAYNLFEHNCNTFSNEVAQFLTGRKIPSYITDLPSEVLSTPFGQALRPLLDSIQIQPPGGSSVGRPNGQS

SEQ ID NO: 28911 - protein, 66 aa, Artificial Sequence
  Synthetic polypeptide
SQHFGRPREGHCLGLQTLWLMWGVQKSQKKSFWSTSPPWGSPCSEVRPTTSLNTIVTPSATKWHSS

SEQ ID NO: 28912 - protein, 28 aa, Artificial Sequence
  Synthetic polypeptide
MGAVAHTCDLSTLEGRGRDIAWASRLCG

SEQ ID NO: 28913 - protein, 30 aa, Artificial Sequence
  Synthetic polypeptide
WAPVVPTTWETEIMKVLEAKGPRWSIQKRS

SEQ ID NO: 28914 - protein, 8 aa, Artificial Sequence
  Synthetic polypeptide
SQLPGRLR

SEQ ID NO: 28915 - protein, 178 aa, Artificial Sequence
  Synthetic polypeptide
TPEVEATVPLQKRAVPSMRCETVFKLTPEFFSPGKSRGLDSQQCAQRQRWGYRRSLQESWAQNLLSPQHPCPGPPSGVHTHSEPIFCTTSISNTCLLPQNSSWKAWQVPWCLHDGQTRPALDMCQEMEQLLLHSQERLVSLEPVISVRSRPTSMTLTTSLPNLLSAERLQFCPQRAPA

SEQ ID NO: 28916 - protein, 26 aa, Artificial Sequence
  Synthetic polypeptide
EAEAGESLEPRRWRLQCHCRSGQCPP

SEQ ID NO: 28917 - protein, 41 aa, Artificial Sequence
  Synthetic polypeptide
PQLLRRLKQENRLNPGGGGYSATAEAGSALHEVRNCLQADS

SEQ ID NO: 28918 - protein, 26 aa, Artificial Sequence
  Synthetic polypeptide
GWSECNETLGADHPPSFDGSFPLNST

SEQ ID NO: 28919 - protein, 720 aa, Artificial Sequence
  Synthetic polypeptide
AGLSAMRHLEQTTHPALMEVFLSILHNLFVIVPHMKEKFSKKLASSSFIRLTLELKARFCSGLSHSALNQVCSNFLYYMCLNLLSAPEKTGPPSKEELSAVSELLQHGLPQISSRSPESLAFLSDRQYMEGAARQRQYCILLLFYLAYIHEDRFVSEAELFEAVQSFLLSLQDQGERPPLVVFKASIYLLAICQDKDNTLRETMVSAIRKFLEGIPDLQLVYTHHPLLLRFFLLYPELMSRYGHRVLELWFFWEESSYEELDDVTSAGQPALPASLVVLFQLLRSIPSILLILLDLIYSSPVDTAHKVLISLRTFLRRNEDIQVGGLIRGHFLLILQRLLVEHGASPSGASGNLPLLLSLLSLMQLRNVSEQELDSVAMKLLHQVSKLCGKCSPTDVDILQPSFNFLYWSLHQTTPSSQKRAAAVLLSSTGLMELLEKMLALTLAKADSPRTALLCSAWLLTASFSAQQHKGSLQVHQTLSVEMDQVLKALSFPKKKAALLSAAILCFLRTALRQSFSSALVALVPSGAQPLPATKDTVLAPLRMSQVRSLVIGLQNLLVQKDPLLSQACVGCLEALLDYLDARSPDIALHVASQPWNRFLLFTLLDAGENSFLRPEILRLMTLFMRYRSSSVLSHEEVGDVLQGVALADLSTLSNTTLQALHGFFQQLQSMGHLADHSMAQTLQASLEGLPPSTSSGQPPLQDMLCLGGVAVSLSHIRN

SEQ ID NO: 28920 - protein, 212 aa, Artificial Sequence
  Synthetic polypeptide
AGLSAMRHLEQTTHPALMEVFLSILHNLFVIVPHMKEKFSKKLASSSFIRLTLELKARFCSGLSHSALNQVCSNFLYYMCLNLLSAPEKTGPPSKEELSAVSELLQHGLPQISSRSPESLAFLSDRQYMEGAARQRQYCILLLFYLAYIHEDRFVSEAELFEAVQSFLLSLQDQGERPPLVVFKASIYLLAICQDKDNTLREQLHCSLISIS

SEQ ID NO: 28921 - protein, 41 aa, Artificial Sequence
  Synthetic polypeptide
GRARWLTPVIPALWEAEMGRSRGQEIETIMANKVCLRGRVI

SEQ ID NO: 28922 - protein, 591 aa, Artificial Sequence
  Synthetic polypeptide
SQLFGRPRWADHEVRRSRPSWLTRFVSEAELFEAVQSFLLSLQDQGERPPLVVFKASIYLLAICQDKDNTLRETMVSAIRKFLEGIPDLQLVYTHHPLLLRFFLLYPELMSRYGHRVLELWFFWEESSYEELDDVTSAGQPALPASLVVLFQLLRSIPSILLILLDLIYSSPVDTAHKVLISLRTFLRRNEDIQVGGLIRGHFLLILQRLLVEHGASPSGASGNLPLLLSLLSLMQLRNVSEQELDSVAMKLLHQVSKLCGKCSPTDVDILQPSFNFLYWSLHQTTPSSQKRAAAVLLSSTGLMELLEKMLALTLAKADSPRTALLCSAWLLTASFSAQQHKGSLQVHQTLSVEMDQVLKALSFPKKKAALLSAAILCFLRTALRQSFSSALVALVPSGAQPLPATKDTVLAPLRMSQVRSLVIGLQNLLVQKDPLLSQACVGCLEALLDYLDARSPDIALHVASQPWNRFLLFTLLDAGENSFLRPEILRLMTLFMRYRSSSVLSHEEVGDVLQGVALADLSTLSNTTLQALHGFFQQLQSMGHLADHSMAQTLQASLEGLPPSTSSGQPPLQDMLCLGGVAVSLSHIRN

SEQ ID NO: 28923 - protein, 60 aa, Artificial Sequence
  Synthetic polypeptide
QGLSQRQSYLRLCKASSCRCRTRASAPHWWSSKPPSICLQSARTKTIHYVRLWSVQSENS

SEQ ID NO: 28924 - protein, 83 aa, Artificial Sequence
  Synthetic polypeptide
SQLFGRPRWADHEVRRSRPSWLTRFVSEAELFEAVQSFLLSLQDQGERPPLVVFKASIYLLAICQDKDNTLREQLHCSLISIS

SEQ ID NO: 28925 - protein, 56 aa, Artificial Sequence
  Synthetic polypeptide
QGLSQRQSYLRLCKASSCRCRTRASAPHWWSSKPPSICLQSARTKTIHYVSNFIAV

SEQ ID NO: 28926 - protein, 556 aa, Artificial Sequence
  Synthetic polypeptide
SQLFGRPRWADHEVRRSRPSWLTRFVSEAELFEAVQSFLLSLQDQGERPPLVVFKASIYLLAICQDKDNTLRETMVSAIRKFLEGIPDLQLVYTHHPLLLRFFLLYPELMSRYGHRVLELWFFWEESSYEELDDVTSAGQPALPASLVVLFQLLRSIPSILLILLDLIYSSPVDTAHKVLISLRTFLRRNEDIQVGGLIRGHFLLILQRLLVEHGASPSGVSKLCGKCSPTDVDILQPSFNFLYWSLHQTTPSSQKRAAAVLLSSTGLMELLEKMLALTLAKADSPRTALLCSAWLLTASFSAQQHKGSLQVHQTLSVEMDQVLKALSFPKKKAALLSAAILCFLRTALRQSFSSALVALVPSGAQPLPATKDTVLAPLRMSQVRSLVIGLQNLLVQKDPLLSQACVGCLEALLDYLDARSPDIALHVASQPWNRFLLFTLLDAGENSFLRPEILRLMTLFMRYRSSSVLSHEEVGDVLQGVALADLSTLSNTTLQALHGFFQQLQSMGHLADHSMAQTLQASLEGLPPSTSSGQPPLQDMLCLGGVAVSLSHIRN

SEQ ID NO: 28927 - protein, 268 aa, Artificial Sequence
  Synthetic polypeptide
SQLFGRPRWADHEVRRSRPSWLTRFVSEAELFEAVQSFLLSLQDQGERPPLVVFKASIYLLAICQDKDNTLRETMVSAIRKFLEGIPDLQLVYTHHPLLLRFFLLYPELMSRYGHRVLELWFFWEESSYEELDDVTSAGQPALPASLVVLFQLLRSIPSILLILLDLIYSSPVDTAHKVLISLRTFLRRNEDIQVGGLIRGHFLLILQRLLVEHGASPSGVLLVLHSLGEPTIAAEPPLPDAAQECVRARTGQRGHEAPSPRCPGCLG

SEQ ID NO: 28928 - protein, 1116 aa, Artificial Sequence
  Synthetic polypeptide
VFCKEMLQFVSNQVGEFPDLFSEQLCSSFPGSGGSGSSSGSSGSSSSSSNGRGSSSGAVDPSVQRSFTQVTLPSFSPSAASPQAPTLQVKVSPTSVPTTPRATPILQPRPQPQPQPQTQLQQQTVMITPTFSTTPQTRIIQQPLIYQNAATSFQVLQPQVQSLVTSSQVQPVTIQQQVQTVQAQRVLTQTANGTLQTLAPATVQTVAAPQVQQVPVLVQPQIIKTDSLVLTTLKTDGSPVMAAVQNPALTALTTPIQTAALQVPTLVGSSGTILTTMPVMMGQEKVPIKQVPGGVKQLEPPKEGERRTTHNIIEKRYRSSINDKIIELKDLVMGTDAKMHKSGVLRKAIDYIKYLQQVNHKLRQENMVLKLANQKNKLLKGIDLGSLVDNEVDLKIEDFNQNVLLMSPPASDSGSQAGFSPYSIDSEPGSPLLDDAKVKDEPDSPPVALGMVDRSRILLCVLTFLCLSFNPLTSLLQWGGAHDSDQHPHSGSGRSVLSFESGSGGWFDWMMPTLLLWLVNGVIVLSVFVKLLVHGEPVIRPHSRSSVTFWRHRKQADLDLARGDFAAAAGNLQTCLAVLGRALPTSRLDLACSLSWNVIRYSLQKLRLVRWLLKKVFQCRRATPATEAGFEDEAKTSARDAALAYHRLHQLHITGKLPAGSACSDVHMALCAVNLAECAEEKIPPSTLVEIHLTAAMGLKTRCGGKLGFLASYFLSRAQSLCGPEHSAVPDSLRWLCHPLGQKFFMERSWSVKSAAKESLYCAQRNPADPIAQVHQAFCKNLLERAIESLVKPQAKKKAGDQEEESCEFSSALEYLKLLHSFVDSVGVMSPPLSRSSVLKSALGPDIICRWWTSAITVAISWLQGDDAAVRSHFTKVERIPKALEVTESPLVKAIFHACRAMHASLPGKADGQQSSFCHCERASGHLWSSLNVSGATSDPALNHVVQLLTCDLLLSLRTALWQKQASASQAVGETYHASGAELAGFQRDLGSLRRLAHSFRPAYRKVFLHEATVRLMAGASPTRTHQLLEHSLRRRTTQSTKHGEVDAWPGQRERATAILLACRHLPLSFLSSPGQRAVLLAEAARTLEKVGDRRSCNDCQQMIVKLGGGTAIAAS

SEQ ID NO: 28929 - protein, 133 aa, Artificial Sequence
  Synthetic polypeptide
TLQYLALTRCSVKRCCNLSVIKWESSLTCFQNSCVAPFLAVVVVVAAAAAVAAAAAAAMAGAAAAELWTLQCNGHSPRSHYLPSLPRRPPHRLQLCKSRFLPPQFPPHPGQLLFFSPAPSPSLNLKLSCNNRR

SEQ ID NO: 28930 - protein, 659 aa, Artificial Sequence
  Synthetic polypeptide
VFCKEMLQFVSNQVGEFPDLFSEQLCSSFPGSGGSGSSSGSSGSSSSSSNGRGSSSGAVDPSVQRSFTQVTLPSFSPSAASPQAPTLQVKVSPTSVPTTPRATPILQPRPQPQPQPQTQLQQQTVMITPTFSTTPQTRIIQQPLIYQNAATSFQVLQPQVQSLVTSSQVQPVTIQQQVQTVQAQRVLTQTANGTLQTLAPATVQTVAAPQVQQVPVLVQPQIIKTDSLVLTTLKTDGSPVMAAVQNPALTALTTPIQTAALQVPTLVGSSGTILTTMPVMMGQEKVPIKQVPGGVKQLEPPKEGERRTTHNIIEKRYRSSINDKIIELKDLVMGTDAKMHKSGVLRKAIDYIKYLQQVNHKLRQENMVLKLANQKNKLLKGIDLGSLVDNEVDLKIEDFNQNVLLMSPPASDSGSQAGFSPYSIDSEPGSPLLDDAKVKDEPDSPPVALGMVDRSRILLCVLTFLCLSFNPLTSLLQWGGAHDSDQHPHSGSGRSVLSFESGSGGWFDWMMPTLLLWLVNGVIVLSVFVKLLVHGEPVIRPHSRSSVTFWRHRKQADLDLARGVYGKKSGATHSIEEELNIHISRGTRTRTLLSSRRFCSCCRQPTNLPGSFGPGTAHLPPGPGLQPLLERDPLQPAEATPGALAAQESLPVPAGHASH

SEQ ID NO: 28931 - protein, 140 aa, Artificial Sequence
  Synthetic polypeptide
FIFGRVSCMQYLALNRHSVKRCCNLSVIKWESSLTCFQNSCVAPFLAVVVVVAAAAAVAAAAAAAMAGAAAAELWTLQCNGHSPRSHYLPSLPRRPPHRLQLCKSRFLPPQFPPHPGQLLFFSPAPSPSLNLKLSCNNRR

SEQ ID NO: 28932 - protein, 1116 aa, Artificial Sequence
  Synthetic polypeptide
ALCKEMLQFVSNQVGEFPDLFSEQLCSSFPGSGGSGSSSGSSGSSSSSSNGRGSSSGAVDPSVQRSFTQVTLPSFSPSAASPQAPTLQVKVSPTSVPTTPRATPILQPRPQPQPQPQTQLQQQTVMITPTFSTTPQTRIIQQPLIYQNAATSFQVLQPQVQSLVTSSQVQPVTIQQQVQTVQAQRVLTQTANGTLQTLAPATVQTVAAPQVQQVPVLVQPQIIKTDSLVLTTLKTDGSPVMAAVQNPALTALTTPIQTAALQVPTLVGSSGTILTTMPVMMGQEKVPIKQVPGGVKQLEPPKEGERRTTHNIIEKRYRSSINDKIIELKDLVMGTDAKMHKSGVLRKAIDYIKYLQQVNHKLRQENMVLKLANQKNKLLKGIDLGSLVDNEVDLKIEDFNQNVLLMSPPASDSGSQAGFSPYSIDSEPGSPLLDDAKVKDEPDSPPVALGMVDRSRILLCVLTFLCLSFNPLTSLLQWGGAHDSDQHPHSGSGRSVLSFESGSGGWFDWMMPTLLLWLVNGVIVLSVFVKLLVHGEPVIRPHSRSSVTFWRHRKQADLDLARGDFAAAAGNLQTCLAVLGRALPTSRLDLACSLSWNVIRYSLQKLRLVRWLLKKVFQCRRATPATEAGFEDEAKTSARDAALAYHRLHQLHITGKLPAGSACSDVHMALCAVNLAECAEEKIPPSTLVEIHLTAAMGLKTRCGGKLGFLASYFLSRAQSLCGPEHSAVPDSLRWLCHPLGQKFFMERSWSVKSAAKESLYCAQRNPADPIAQVHQAFCKNLLERAIESLVKPQAKKKAGDQEEESCEFSSALEYLKLLHSFVDSVGVMSPPLSRSSVLKSALGPDIICRWWTSAITVAISWLQGDDAAVRSHFTKVERIPKALEVTESPLVKAIFHACRAMHASLPGKADGQQSSFCHCERASGHLWSSLNVSGATSDPALNHVVQLLTCDLLLSLRTALWQKQASASQAVGETYHASGAELAGFQRDLGSLRRLAHSFRPAYRKVFLHEATVRLMAGASPTRTHQLLEHSLRRRTTQSTKHGEVDAWPGQRERATAILLACRHLPLSFLSSPGQRAVLLAEAARTLEKVGDRRSCNDCQQMIVKLGGGTAIAAS

SEQ ID NO: 28933 - protein, 659 aa, Artificial Sequence
  Synthetic polypeptide
ALCKEMLQFVSNQVGEFPDLFSEQLCSSFPGSGGSGSSSGSSGSSSSSSNGRGSSSGAVDPSVQRSFTQVTLPSFSPSAASPQAPTLQVKVSPTSVPTTPRATPILQPRPQPQPQPQTQLQQQTVMITPTFSTTPQTRIIQQPLIYQNAATSFQVLQPQVQSLVTSSQVQPVTIQQQVQTVQAQRVLTQTANGTLQTLAPATVQTVAAPQVQQVPVLVQPQIIKTDSLVLTTLKTDGSPVMAAVQNPALTALTTPIQTAALQVPTLVGSSGTILTTMPVMMGQEKVPIKQVPGGVKQLEPPKEGERRTTHNIIEKRYRSSINDKIIELKDLVMGTDAKMHKSGVLRKAIDYIKYLQQVNHKLRQENMVLKLANQKNKLLKGIDLGSLVDNEVDLKIEDFNQNVLLMSPPASDSGSQAGFSPYSIDSEPGSPLLDDAKVKDEPDSPPVALGMVDRSRILLCVLTFLCLSFNPLTSLLQWGGAHDSDQHPHSGSGRSVLSFESGSGGWFDWMMPTLLLWLVNGVIVLSVFVKLLVHGEPVIRPHSRSSVTFWRHRKQADLDLARGVYGKKSGATHSIEEELNIHISRGTRTRTLLSSRRFCSCCRQPTNLPGSFGPGTAHLPPGPGLQPLLERDPLQPAEATPGALAAQESLPVPAGHASH

SEQ ID NO: 28934 - protein, 15 aa, Artificial Sequence
  Synthetic polypeptide
VHIFKCSCWDMWPRC

SEQ ID NO: 28935 - protein, 39 aa, Artificial Sequence
  Synthetic polypeptide
STFLSALAGTCGPGADAGQWAPADTTHGLAGLGTLPLQH

SEQ ID NO: 28936 - protein, 77 aa, Artificial Sequence
  Synthetic polypeptide
GRVRWLTPVVPALREAKAGRSPEVRSSRPAWPTWRTVSDPHRPAHHGLPGQHSYLLQLQDHLSIHSPIQGFHSQLLS

SEQ ID NO: 28937 - protein, 254 aa, Artificial Sequence
  Synthetic polypeptide
SQHFGRPRRADHLRSGVRDQPGQHGGQSVTHTGLPIMASLANTAISFSCRITYPYTPQFKVFTVSYFHEDLQGQRSPKKPTNCHPGLGTENQSHTLDCQVTLVLPGASATGTYYCSVHWPHSTVRGSGTFILVRDAGYREPPQSPQKLLLFGFTGLLSVLSVVGTALLLWNKKRMRGPGKDPTRKCPDPRSASSPKQHPSESVYTALQRRETEVYACIENEDGSSPTAKQSPLSQERPHRFEDDGELNLVYENL

SEQ ID NO: 28938 - protein, 15 aa, Artificial Sequence
  Synthetic polypeptide
GQEFETSLANMEDSQ

SEQ ID NO: 28939 - protein, 148 aa, Artificial Sequence
  Synthetic polypeptide
SQHFGRPRRADHLRSGVRDQPGQHGGQSVTHTGLPIMASLANTAISFSCRITYPYTPQFKVFTVSYFHEDLQGQRSPKKPTNCHPGLGTENQSHTLDCQVTLVLPGASATGTYYCSVHWPHSTVRGSGTFILVRETRFRHVGQAGLES

SEQ ID NO: 28940 - protein, 82 aa, Artificial Sequence
  Synthetic polypeptide
EPIPFSSPLLLVHPPSALTWAVIGPPTRLPSFSSCPCFCSPPTCQNVLLRTFRFDHVCRAHDRRHTYCIPSSGFISYSNQVL

SEQ ID NO: 28941 - protein, 282 aa, Artificial Sequence
  Synthetic polypeptide
GHLDSIMSAAPTIGATPTAFPPVALSAIPIKFSEKQQASHYLYVRAHGVRQGTKSTWPQKRTLFVLNVPPYCTEESLSRLLSTCGLVQSVELQEKPDLAESPKESRSKFFHPKPVPGFQVAYVVFQKPSGVSAALALKGPLLVSTESHPVKSGIHKWISDYADSVPDPEALRVEVDTFMEAYDQKIAEEEAKAKEEEGVPDEEGWVKVTRRGRRPVLPRTEAASLRVLERERRKRSRKELLNFYAWQHRESKMEHLAQLRKKFEEDKQRIELLRAQRKFRPY

SEQ ID NO: 28942 - protein, 30 aa, Artificial Sequence
  Synthetic polypeptide
APHLLHSLQWLYQLFQSSSLKSNRLLTTSM

SEQ ID NO: 28943 - protein, 282 aa, Artificial Sequence; identical to SEQ ID NO: 28941
  Synthetic polypeptide

SEQ ID NO: 28944 - protein, 30 aa, Artificial Sequence; identical to SEQ ID NO: 28942
  Synthetic polypeptide

SEQ ID NO: 28945 - protein, 79 aa, Artificial Sequence
  Synthetic polypeptide
PFSSPLLLVHPPSALTWAVIGPPTRLPSFSSCPCFCSPPTCQNVLLRTFRFDHVCRAHDRRHTYCIPSSGFISYSNQVL

SEQ ID NO: 28946 - protein, 20 aa, Artificial Sequence
  Synthetic polypeptide
LGAWWRVPVVPDAGEAEGSR

SEQ ID NO: 28947 - protein, 33 aa, Artificial Sequence
  Synthetic polypeptide
SQMLGRLRAADEVQPSHEWECYHLRPAHPAAAE

SEQ ID NO: 28948 - protein, 81 aa, Artificial Sequence
  Synthetic polypeptide
SGHSLMPDRELEVSDLELGSSKAFSASQHAQPPSSRDLMPGRRLASQMPGSNWESRMPGRSFCRKMPDFESKGKCRMPERC

SEQ ID NO: 28949 - protein, 17 aa, Artificial Sequence
  Synthetic polypeptide
IIEPLQTCFSHCKVGIA

SEQ ID NO: 28950 - protein, 19 aa, Artificial Sequence
  Synthetic polypeptide
ATPVFLCLRHARSGTTSGL

SEQ ID NO: 28951 - protein, 37 aa, Artificial Sequence
  Synthetic polypeptide
PHLSFCASDMPGRELQADCEADRRWPPPVQRPHELPA

SEQ ID NO: 28952 - protein, 477 aa, Artificial Sequence
  Synthetic polypeptide
HTCLSVPQTCQVGNYKRTVKRIDDGHRLCSDLMNCLHERARIEKAYAQQLTEWARRWRQLVEKGPQYGTVEKAWMAFMSEAERVSELHLEVKASLMNDDFEKIKNWQKEAFHKQMMGGFKETKEAEDGFRKAQKPWAKKLKEVEAAKKAHHAACKEEKLAISREANSKADPSLNPEQLKKLQDKIEKCKQDVLKTKEKYEKSLKELDQGTPQYMENMEQVFEQCQQFEEKRLRFFREVLLEVQKHLDLSNVAGYKAIYHDLEQSIRAADAVEDLRWFRANHGPGMAMNWPQFEEWSADLNRTLSRREKKKATDGVTLTGINQTGDQSLPSKPSSTLNVPSNPAQSAQSQSSYNPFEDEDDTGSTVSEKDDTKAKNVSSYEKTQSYPTDWSDDESNNPFSSTDANGDSNPFDDDATSGTEVRVRALYDYEGQEHDELSFKAGDELTKMEDEDEQGWCKGRLDNGQVGLYPANYVEAIQ

SEQ ID NO: 28953 - protein, 436 aa, Artificial Sequence
  Synthetic polypeptide
HTCLSVPQTCQVGNYKRTVKRIDDGHRLCSDLMNCLHERARIEKAYAQQLTEWARRWRQLVEKGPQYGTVEKAWMAFMSEAERVSELHLEVKASLMNDDFEKIKNWQKEAFHKQMMGGFKETKEAEDGFRKAQKPWAKKLKEVEAAKKAHHAACKEEKLAISREANSKADPSLNPEQLKKLQDKIEKCKQDVLKTKEKYEKSLKELDQGTPQYMENMEQVFEQCQQFEEKRLRFFREVLLEVQKHLDLSNVAGYKAIYHDLEQSIRAADAVEDLRWFRANHGPGMAMNWPQFEEWSADLNRTLSRREKKKATDGVTLTGINQTGDQSLPSKPSSVSSYEKTQSYPTDWSDDESNNPFSSTDANGDSNPFDDDATSGTEVRVRALYDYEGQEHDELSFKAGDELTKMEDEDEQGWCKGRLDNGQVGLYPANYVEAIQ

SEQ ID NO: 28954 - protein, 146 aa, Artificial Sequence
  Synthetic polypeptide
HTCLSVPQTCQVGNYKRTVKRIDDGHRLCSDLMNCLHERARIEKAYAQQLTEWARRWRQLVEKGPQYGTVEKAWMAFMSEAERVSELHLEVKASLMNDDFEKIKNWQKEAFHKQMMGGFKETKEAEDGFRKAQKPWAKKLKEVHLS

SEQ ID NO: 28955 - protein, 143 aa, Artificial Sequence
  Synthetic polypeptide
HTCLSVPQTCQVGNYKRTVKRIDDGHRLCSDLMNCLHERARIEKAYAQQLTEWARRWRQLVEKGPQYGTVEKAWMAFMSEAERVSELHLEVKASLMNDDFEKIKNWQKEAFHKQMMGGFKETKEAEDGFRKAQKPWAKKLKEV

SEQ ID NO: 28956 - protein, 24 aa, Artificial Sequence
  Synthetic polypeptide
PHLSFCASDMPGRELQADCEADRR

SEQ ID NO: 28957 - protein, 24 aa, Artificial Sequence
  Synthetic polypeptide
HTCLSVPQTCQVGNYKRTVKRIDD

SEQ ID NO: 28958 - protein, 370 aa, Artificial Sequence
  Synthetic polypeptide
EGAILKPSCHSGHRMSVQTIRNVFSVEAGYRLSDDQIVNHFPNHYELTRKDLMVKNIKRYRKELEKEGSPLAEKDENGKYLYLDFVPVTYMLPADYNLFVEEFRKSPSSTWIMKPCGKAQGKGIFLINKLSQIKKWSRDSKTSSFVSQSNKEAYVISLYINNPLLIGGRKFDLRLYVLVSTYRPLRCYMYKLGFCRFCTVKYTPSTSELDNMFVHLTNVAIQKHGEDYNHIHGGKWTVSNLRLYLESTRGKEVTSKLFDEIHWIIVQSLKAVAVNASPSLTSSTANDRILKYNLINDTLNIAVPNGEIPDCKWNKSPPKEVLGNYEILYDEELAQGDGADRELRSRQGQSLGPRAGRSRDSGRAVLTTWK

SEQ ID NO: 28959 - protein, 9 aa, Artificial Sequence
  Synthetic polypeptide
SPRATAATG

SEQ ID NO: 28960 - protein, 55 aa, Artificial Sequence
  Synthetic polypeptide
PVEYSKNHTCLGPGQFLCWKHVGALSCPVRRCHPEALVPQRPQDECANHPKCVQR

SEQ ID NO: 28961 - protein, 399 aa, Artificial Sequence
  Synthetic polypeptide
EGAILKPSCHSGHRMSVQTIRNVFSVEAGYRLSDDQIVNHFPNHYELTRKDLMVKNIKRYRKELEKEGSPLAEKDENGKYLYLDFVPVTYMLPADYNLFVEEFRKSPSSTWIMKPCGKAQGKGIFLINKLSQIKKWSRDSKTSSFVSQSNKEAYVISLYINNPLLIGGRKFDLRLYVLVSTYRPLRCYMYKLGFCRFCTVKYTPSTSELDNMFVHLTNVAIQKHGEDYNHIHGGKWTVSNLRLYLESTRGKEVTSKLFDEIHWIIVQSLKAVAPVMNNDKHCFECYGYDIIIDDKLKPWLIEVNASPSLTSSTANDRILKYNLINDTLNIAVPNGEIPDCKWNKSPPKEVLGNYEILYDEELAQGDGADRELRSRQGQSLGPRAGRSRDSGRAVLTTWK

SEQ ID NO: 28962 - protein, 11 aa, Artificial Sequence
  Synthetic polypeptide
LTVQEYSSHNW

SEQ ID NO: 28963 - protein, 76 aa, Artificial Sequence
  Synthetic polypeptide
RDHLEQRVVRRLNLVTDSQCRSTHPITGDMASRYARRCPVVAVGDLTGVHSSADVSAPRLQVPNASEQPTGLPMHT

SEQ ID NO: 28964 - protein, 44 aa, Artificial Sequence
  Synthetic polypeptide
KKPDPKEDTQYGFISMNFQDRQNQQMAREIAAVHRQGRASKGRL

SEQ ID NO: 28965 - protein, 161 aa, Artificial Sequence
  Synthetic polypeptide
TSRTGKTNRWQEKSQLCTDKDEPPKDVFDELFKLAPEKVNAVKEAIVNFVNQKLDRLGLSVQNLDTQFADGVILLLLIGQLEGFFLHLKEFYLTPNSPAEMLHNVTLALELLKDEGLLSCPVSPEDIVNKDAKSTLRVLYGLFCKHTQKAHRDRTPHGAPN

SEQ ID NO: 28966 - protein, 62 aa, Artificial Sequence
  Synthetic polypeptide
KNNKNGVKEARPKRGHAVWFHFHELPGQAKPTDGKRNRSCAQTRTSLQRTSLMNYLSWLRRK

SEQ ID NO: 28967 - protein, 243 aa, Artificial Sequence
  Synthetic polypeptide
AVAAAAAARGPSIHNGVIAVFQRKGLPDQELFSLNEGVRQLLKTELGSFFTEYLQNQLLTKGMVILRDKIRFYEGQKLLDSLAETWDFFFSDVLPMLQAIFYPVQGKEPSVRQLALLHFRNAITLSVKLEDALARAHARVPPAIVQMLLVLQGVHESRGVTEDYLRLETLVQKVVSPYLGTYGLHSSEGPFTHSCILEKRLLRRSRSGDVLAKNPVVRSKSYNTPLLNPVQEHEAEGAAAGGT

SEQ ID NO: 28968 - protein, 16 aa, Artificial Sequence
  Synthetic polypeptide
RWQRRRRRGDRASTTG

SEQ ID NO: 28969 - protein, 72 aa, Artificial Sequence
  Synthetic polypeptide
GGSGGGGAGTEHPQRGDRRLPAQGAARPGALQPQRGRPAAVEDRAGVLLHGVPAEPAADKRHGDPSGQDSLL

SEQ ID NO: 28970 - protein, 355 aa, Artificial Sequence
  Synthetic polypeptide
AVAAAAAARGPSIHNGVIAVFQRKGLPDQELFSLNEGVRQLLKTELGSFFTEYLQNQLLTKGMVILRDKIRFYEGQKLLDSLAETWDFFFSDVLPMLQAIFYPVQGKEPSVRQLALLHFRNAITLSVKLEDALARAHARVPPAIVQMLLVLQGVHESRGVTEDYLRLETLVQKVVSPYLGTYGLHSSEGPFTHSCILEKRLLRRSRSGDVLAKNPVVRSKSYNTPLLNPVQEHEAEGAAAGGTSIRRHSVSEMTSCPEPQGFSDPPGQGPTGTFRSSPAPHSGPCPSRLYPTTQPPEQGLDPTRSSLPRSSPENLVDQILESVDSDSEGIFIDFGRGRGSGMSDLEGSGGRQSVV

SEQ ID NO: 28971 - protein, 144 aa, Artificial Sequence
  Synthetic polypeptide
AVAAAAAARGPSIHNGVIAVFQRKGLPDQELFSLNEGVRQLLKTELGSFFTEYLQNQLLTKGMVILRDKIRFYEGICPRQSGPVVMAPMPTGQKLLDSLAETWDFFFSDVLPMLQAIFYPVQGKEPSVRQLALLHFRNAITLSV

SEQ ID NO: 28972 - protein, 202 aa, Artificial Sequence
  Synthetic polypeptide
AVAAAAAARGPSIHNGVIAVFQRKGLPDQELFSLNEGVRQLLKTELGSFFTEYLQNQLLTKGMVILRDKIRFYEGQKLLDSLAETWDFFFSDVLPMLQAIFYPVQGKEPSVRQLALLHFRNAITLSVKLEDALARAHARVPPAIVQMLLVLQGVHESRGVTEDYLRLETLVQKVVSPYLGTYGLHSSEGPFTHSCILEKRLL

SEQ ID NO: 28973 - protein, 89 aa, Artificial Sequence
  Synthetic polypeptide
AVAAAAAARGPSIHNGVIAVFQRKGLPDQELFSLNEGVRQLLKTELGSFFTEYLQNQLLTKGMVILRDKIRFYEEAAGLTGRDLGLLLQ

SEQ ID NO: 28974 - protein, 531 aa, Artificial Sequence
  Synthetic polypeptide
AVAAAAAARGPSIHNGVIAVFQRKGLPDQELFSLNEGVRQLLKTELGSFFTEYLQNQLLTKGMVILRDKIRFYEELQRDKAAAAAVLGAVRKRPSVVPMAGQDPALSTSHPFYDVARHGILQVAGDDRFGRRVVTFSCCRMPPSHELDHQRLLEYLKYTLDQYVENDYTIVYFHYGLNSRNKPSLGWLQSAYKEFDRKYKKNLKALYVVHPTSFIKVLWNILKPLISHKFGKKVIYFNYLSELHEHLKYDQLVIPPEVLRYDEKLQSLHEGRTPPPTKTPPPRPPLPTQQFGVSLQYLKDKNQGELIPPVLRFTVTYLREKGLRTEGLFRRSASVQTVREIQRLYNQGKPVNFDDYGDIHIPAVILKTFLRELPQPLLTFQAYEQILGITCVESSLRVTGCRQILRSLPEHNYVVLRYLMGFLHAVSRESIFNKMNSSNLACVFGLNLIWPSQGVSSLSALVPLNMFTELLIEYYEKIFSTPEAPGEHGLAPWEQGSRAAPLQEAVPRTQATGLTKPTLPPSPLMAARRRL

SEQ ID NO: 28975 - protein, 610 aa, Artificial Sequence
  Synthetic polypeptide
AVAAAAAARGPSIHNGVIAVFQRKGLPDQELFSLNEGVRQLLKTELGSFFTEYLQNQLLTKGMVILRDKIRFYEGQKLLDSLAETWDFFFSDVLPMLQAIFYPVQGKEPSVRQLALLHFRNAITLSVKLEDALARAHARVPPAIVQMLLVLQGVHESRGVTEDYLRLETLVQKVVSPYLGTYGLHSSEGPFTHSCILELQRDKAAAAAVLGAVRKRPSVVPMAGQDPALSTSHPFYDVARHGILQVAGDDRFGRRVVTFSCCRMPPSHELDHQRLLEYKKNLKALYVVHPTSFIKVLWNILKPLISHKFGKKVIYFNYLSELHEHLKYDQLVIPPEVLRYDEKLQSLHEGRTPPPTKTPPPRPPLPTQQFGVSLQYLKDKNQGELIPPVLRFTVTYLREKGLRTEGLFRRSASVQTVREIQRLYNQGKPVNFDDYGDIHIPAVILKTFLRELPQPLLTFQAYEQILGITCVESSLRVTGCRQILRSLPEHNYVVLRYLMGFLHAVSRESIFNKMNSSNLACVFGLNLIWPSQGVSSLSALVPLNMFTELLIEYYEKIFSTPEAPGEHGLAPWEQGSRAAPLQEAVPRTQATGLTKPTLPPSPLMAARRRL

SEQ ID NO: 28976 - protein, 39 aa, Artificial Sequence
  Synthetic polypeptide
GLGQGLQHWPRPALPICTMQPTCGLGPCRAQDGPWSGPG

SEQ ID NO: 28977 - protein, 80 aa, Artificial Sequence
  Synthetic polypeptide
AWVRDSSTGLDLLFRSAQCNQPAVSVPVGHRTVPGRVLAEAEQSRWKLPSLCTLNLRHVAAASDFNRHPGSSAEAHPDDL

SEQ ID NO: 28978 - protein, 79 aa, Artificial Sequence
  Synthetic polypeptide
PGSGTPALASTCSSDLHNATNLRSRSLSGTGRSLVGSWLKLNRADGNFLLYAHLTYVTLPLHRILTDILEVRQKPILMT

SEQ ID NO: 28979 - protein, 41 aa, Artificial Sequence
  Synthetic polypeptide
SLHFGRPRQLSLRWRWRCTGGTPRSCQAWETLTSTGRRASA

SEQ ID NO: 28980 - protein, 349 aa, Artificial Sequence
  Synthetic polypeptide
GRVQWLMPVIPALWEAEAAEPEVEVEVYRRDSKKLPGLGDPDIDWEESVCLNLILQKLDYMVTCAVCTRADGGDIHIHKKKSQQVFASPSKHPMDSKGEESKISYPNIFFMIDSFEEVFSDMTVGEGEMVCVELVASDKTNTFQGVIFQGSIRYEALKKVYDNRVSVAARMAQKMSFGFYKYSNMEFVRMKGPQGKGHAEMAVSRVSTGDTSPCGTEEDSSPASPMHERVTSFSTPPTPERNNRPAFFSPSLKRKVPRNRIAEMKKSHSANDSEEFFREDDGGADLHNATNLRSRSLSGTGRSLVGSWLKLNRADGNFLLYAHLTYVTLPLHRILTDILEVRQKPILMT

SEQ ID NO: 28981 - protein, 18 aa, Artificial Sequence
  Synthetic polypeptide
PGAVAHACNPCTLGGRGS

SEQ ID NO: 28982 - protein, 115 aa, Artificial Sequence
  Synthetic polypeptide
GRVQWLMPVIPALWEAEAAEPEVEVEVYRRDSKKLPGLGDPDIDWEESVCLNLILQKLDYMVTCAVCTRADGGDIHIHKKKSQQVFASPSKHPMDSKGEESKISYPNIFFMIDSF

SEQ ID NO: 28983 - protein, 1038 aa, Artificial Sequence
  Synthetic polypeptide
SCHCIPAWAERYQSLLEELKMNKIQLQLFQLYHNEKKIHLLNTKLEHVNRDLSVKRESLSHHENIVKARKKEHGMLTRQLQQTEKELKSVETLLNQKRPQYIKAKENTSHHLKKLDVAKKSIKDSEKQCSKQEDDIKALETELADLDAAWRSFEKQIEEEILHKKRDIELEASQLDRYKELKEQVRKKVATMTQQLEKLQWEQKTDEERLAFEKRRHGEVQGNLKQIKEQIEDHKKRIEKLEEYTKTCMDCLKEKKQQEETLVDEIEKTKSRMSEFNEELNLIRSELQNAGIDTHEGKRQQKRAEVLEHLKRLYPDSVFGRLFDLCHPIHKKYQLAVTKVFGRFITAIVVASEKVAKDCIRFLKEERAEPETFLALDYLDIKPINERLRELKGCKMVIDVIKTQFPQLKKVIQFVCGNGLVCETMEEARHIALSGPERQKTVALDGTLFLKSGVISGGSSDLKYKARCWDEKELKNLRDRRSQKIQELKGLMKTLRKETDLKQIQTLIQGTQTRLKYSQNELEMIKKKHLVAFYQEQSQLQSELLNIESQCIMLSEGIKERQRRIKEFQEKIDKVEDDIFQHFCEEIGVENIREFENKHVKRQQEIDQKRLEFEKQKTRLNVQLEYSRSHLKKKLNKINTLKETIQKGSEDIDHLKKAEENCLQTVNELMAKQQQLKDIRVTQNSSAEKVQTQIEEERKKFLAVDREVGKLQKEVVSIQTSLEQKRLEKHNLLLDCKVQDIEIILLSGSLDDIIEVEMGTEAESTQATIDIYEKEEAFEIDYSSLKEDLKALQSDQEIEAHLRLLLQQVASQEDILLKTAAPNLRALENLKTVRDKFQESTDAFEASRKEARLCRQEFEQVKKRRYDLFTQCFEHVSISIDQIYKKLCRNNSAQAFLSPENPEEPYLEGISYNCVAPGKRFMPMDNLSGGEKCVAALALLFAVHSFRPAPFFVLDEVDAALDNTNIGKVSSYIKEQTQDQFQMIVISLKEEFYSRADALIGIYPEYDDCMFSRVLTLDLSQYPDTEGQESSKRHGESR

SEQ ID NO: 28984 - protein, 35 aa, Artificial Sequence
  Synthetic polypeptide
HRRISWAQEVEATVSCDRAIAFQPGQNVTRVSLKN

SEQ ID NO: 28985 - protein, 18 aa, Artificial Sequence
  Synthetic polypeptide
AVIVPLHSSLGRTLPESP

SEQ ID NO: 28986 - protein, 964 aa, Artificial Sequence
  Synthetic polypeptide
SCHCIPAWAERYQSLLEELKMNKIQLQLFQLYHNEKKIHLLNTKLEHVNRDLSVKRESLSHHENIVKARKKEHGMLTRQLQQTEKELKSVETLLNQKRPQYIKAKENTSHHLKKLDVAKKSIKDSEKQCSKQEDDIKALETELADLDAAWRSFEKQIEEEILHKKRDIELEASQLDRYKELKEQVRKKVATMTQQLEKLQWEQKTDEERLAFEKRRHGEVQGNLKQIKEQIEDHKKRIEKLEEYTKTCMDCLKEKKQQEETLVDEIEKTKSRMSEFNEELNLIRSELQNAGIDTHEGKRQQKRAEVLEHLKRLYPDSVFGRLFDLCHPIHKKYQLAVTKVFGRFITAIVVASEKVAKDCIRFLKEERAEPETFLALDYLDIKPINERLRELKGCKMVIDVIKTQFPQLKKVIQFVCGNGLVCETMEEARHIALSGPERQKTVALDGTLFLKSGVISGGSSDLKYKARCWDEKELKNLRDRRSQKIQELKGLMKTLRKETDLKQIQTLIQGTQTRLKYSQNELEMIKKKHLVAFYQEQSQLQSELLNIESQCIMLSEGIKERQRRIKEFQEKIDKVEDDIFQHFCEEIGVENIREFENKHVKRQQEIDQKRLEFEKQKTRLNVQLEYSRSHLKKKLNKINTLKETIQKGSEDIDHLKKAEENCLQTVNELMAKQQQLKDIRVTQNSSAEKVQTQIEEERKKFLAVDREVGKLQKEVVSIQTSLEQKRLEKHNLLLDCKVQDIEIILLSGSLDDIIEVEMGTEAESTQATIDIYEKEEAFEIDYSSLKEDLKALQSDQEIEAHLRLLLQQVASQEDILLKTAAPNLRALENLKTVRDKFQESTDAFEASRKEARLCRQEFEQVKKRRYDLFTQCFEHVSISIDQIYKKLCRNNSAQVSSYIKEQTQDQFQMIVISLKEEFYSRADALIGIYPEYDDCMFSRVLTLDLSQYPDTEGQESSKRHGESR

SEQ ID NO: 28987 - protein, 22 aa, Artificial Sequence
  Synthetic polypeptide
QEQCLVHKKQHPGLSSKEFWIS

SEQ ID NO: 28988 - protein, 34 aa, Artificial Sequence
  Synthetic polypeptide
YMRSDKNSVWCIRNSTQDYLPKSSGYPKEIFSCC

SEQ ID NO: 28989 - protein, 391 aa, Artificial Sequence
  Synthetic polypeptide
PWTGDLVFLSISFVLCKTRNLDTIGVAVDLILLFRELRVEQESLLTAFRCGLQFLGNIASRNEDSQSIVWVHAFPELFLSCLNHPDKKIVAYSSMILFTSLNHERMKELEENLNIAIDVIDAYQKHPESEWPFLIITDLFLKSPELVQAMFPKLNNQERVTLLDLMIAKITSDEPLTKDDIPVFLRHAELIASTFVDQCKTVLKLASEEPPDDEEALATIRLLDVLCEMTVNTELLGYLQVFPGLLERVIDLLRVIHVAGKETTNIFSNCGCVRAEGDISNVANGFKSHLIRLIGNLCYKNKDNQDKVNELDGIPLILDNCNISDSNPFLTQWVIYAIRNLTEDNSQNQDLIAKMEEQGLADASLLKKVGFEVEKKGEKLILKSTRDTPKP

SEQ ID NO: 28990 - protein, 20 aa, Artificial Sequence
  Synthetic polypeptide
VSVLSSVKLGTWIRLVLLLI

SEQ ID NO: 28991 - protein, 40 aa, Artificial Sequence
  Synthetic polypeptide
MVPSIGNIQNGQIHGNRKQTEHCHPWWPWEPTSSATRFLA

SEQ ID NO: 28992 - protein, 93 aa, Artificial Sequence
  Synthetic polypeptide
ETSRMGKSMGTESRLSTVIRGGPGSQHHLQQDSWPSPAAACHLPESARCHHCDWGGGADGHQRVPVPVPLRTLELLCPRREDRLRARAPSREP

SEQ ID NO: 28993 - protein, 26 aa, Artificial Sequence
  Synthetic polypeptide
KKPDAKEHCHPWWPWEPTSSATRFLA

SEQ ID NO: 28994 - protein, 99 aa, Artificial Sequence
  Synthetic polypeptide
PVTTWMTLENTTLSERSQTPKSTVIRGGPGSQHHLQQDSWPSPAAACHLPESARCHHCDWGGGADGHQRVPVPVPLRTLELLCPRREDRLRARAPSREP

SEQ ID NO: 28995 - protein, 333 aa, Artificial Sequence
  Synthetic polypeptide
VKEARRQRALSSVVALGANIICNKIPGLAPRQRAICQSRPDAIIVIGEGAQMGINECQYQFRFGRWNCSALGEKTVFGQELRVGSREAAFTYAITAAGVAHAVTAACSQGNLSNCGCDREKQGYYNQAEGWKWGGCSADVRYGIDFSRRFVDAREIKKNARRLMNLHNNEAGRKVLEDRMQLECKCHGVSGSCTTKTCWTTLPKFREVGHLLKEKYNAAVQVEVVRASRLRQPTFLRIKQLRSYQKPMETDLVYIEKSPNYCEEDAATGSVGTQGRLCNRTSPGADGCDTMCCGRGYNTHQYTKVWQCNCKFHWCCFVKCNTCSERTEVFTCK

SEQ ID NO: 28996 - protein, 189 aa, Artificial Sequence
  Synthetic polypeptide
VKEARRQRALSSVVALGANIICNKIPGLAPRQRAICQSRPDAIIVIGEGAQMGINECQYQFRFGRWNCSALGEKTVFGQELRVGSREAAFTYAITAAGVAHAVTAACSQGNLSNCGCDREKQGYYNQAEGWKWGGCSADVRYGIDFSRRFVDAREIKKNARRLMNLHNNEAGRKGLLGQPRVTSSPLFP

SEQ ID NO: 28997 - protein, 767 aa, Artificial Sequence
  Synthetic polypeptide
EPPTFMPSPANVFSTFRRYPESIYRLSISIHMLLSGSQPRCLTGFYFPLANMCIYILLLADEKFDFDLSLSSSSANEDDEVFFGPFGHKERCIAASLELNNPVPEQPPLPTSESPFAWSPLAGEKFVEVYKEAHLLALHIESSSRNQAAQAAKPEDPRSQGVERFIQESKLKINLFEKEKEMKKSPTSLKRETYYLSDSPLLGPPVGEPRLLASSPALPSSGAQARLTRAPGPPHSAHALPRESCTAHAASQAATQRKPGTKLLLPRAASVRGRSIPGAAEKPKKEIPASPSRTKIPAEKESHRDVLPDKPAPGAVNVPAAGSHLGQGKRAIPVPNKLGLKKTLLKAPGSTSNLARKSSSGPVWSGASSACTSPAVGKAKSSEFASIPANSSRPLSNISKSGRMGPAMLRPALPAGPVGASSWQAKRVDVSELAAEQLTAPPSASPTQPQTPEGGGQWLNSSCAWSESSQLNKTRSIRRRDSCLNSKTKVMPTPTNQFKIPKFSIGDSPDSSTPKLSRAQRPQSCTSVGRVTVHSTPVRRSSGPAPQSLLSAWRVSALPTPASRRCSGLPPMTPKTMPRAVGSPLCVPARRRSSEPRKNSAMRTEPTRESNRKTDSRLVDVSPDRGSPPSRVPQALNFSPEESDSTFSKSTATEVAREEAKPGGDAAPSEALLVDIKLEPLAVTPDAASQPLIDLPLIDFCDTPEAHVAVGSESRPLIDLMTNTPDMNKNVAKPSPVVGQLIDLSSPLIQLSPEADKENVDSPLLKF

SEQ ID NO: 28998 - protein, 156 aa, Artificial Sequence
  Synthetic polypeptide
AQPLLRALGLYIHLPIWRLHMHVSSQTWHTPSASAYPVLFVFLITHFISPFHPAVQAENLLHSCHHQLTSSPPSEDILNPSTDSPSPSTCCCLGLSHAVSPASTSRWLICAFTFFFWPMKNLTSIFHCLLRVQMKMMKSSSDPLDIKKDVLLPAWN

SEQ ID NO: 28999 - protein, 10 aa, Artificial Sequence
  Synthetic polypeptide
YVHLHSSFGR

SEQ ID NO: 29000 - protein, 22 aa, Artificial Sequence
  Synthetic polypeptide
LEGLDDIVHTDEYVLSTYEVTR

SEQ ID NO: 29001 - protein, 27 aa, Artificial Sequence
  Synthetic polypeptide
YILMSTCSAHTRLPGDRGVYEELGLTG

SEQ ID NO: 29002 - protein, 79 aa, Artificial Sequence
  Synthetic polypeptide
VRAQHIRGYQVTGVFMKNWDSLDEHGVCTADKDCEDAYRVCQILDIPFHQVSYVKEYWNDVFRGRCHCHRSLCKNFPGR

SEQ ID NO: 29003 - protein, 146 aa, Artificial Sequence
  Synthetic polypeptide
VRAQHIRGYQVTGVFMKNWDSLDEHGVCTADKDCEDAYRVCQILDIPFHQVSYVKEYWNDVFSDFLNEYEKGRTPNPDIVCNKHIKFSCFFHYAVDNLGADAIATGHYARTSLEDEEVFEQKHVKKPEGLFRNRFEVRNARFPRMP

SEQ ID NO: 29004 - protein, 401 aa, Artificial Sequence
  Synthetic polypeptide
VRAQHIRGYQVTGVFMKNWDSLDEHGVCTADKDCEDAYRVCQILDIPFHQVSYVKEYWNDVFSDFLNEYEKGRTPNPDIVCNKHIKFSCFFHYAVDNLGADAIATGHYARTSLEDEEVFEQKHVKKPEGLFRNRFEVRNAVKLLQAADSFKDQTFFLSQVSQDALRRTIFPLGGLTKEFVKKIAAENRLHHVLQKKESMGMCFIGKRNFEHFLLQYLQPRPGHFISIEDNKVLGTHKGWFLYTLGQRANIGGLREPWYVVEKDSVKGDVFVAPRTDHPALYRDLLRTSRVHWIAEEPPAALVRDKMMECHFRFRHQMALVPCVLTLNQDGTVWVTAVQAVRALATGQFAVFYKGDECLGSGKILRLGPSAYTLQKGQRRAGMATESPSDSPEDGPGLSPLL

SEQ ID NO: 29005 - protein, 356 aa, Artificial Sequence
  Synthetic polypeptide
VRAQHIRGYQVTGVFMKNWDSLDEHGVCTADKDCEDAYRVCQILDIPFHQVSYVKEYWNDVFSDFLNEYEKGRTPNPDIVCNKHIKFSCFFHYAVDNLGADAIATGHYARTSLEDEEVFEQKHVKKPEGLFRNRFEVRNAVKLLQAADSFKDQTFFLSQVSQDALRRTIFPLGGLTKEFVKKIAAENRLHHVLQKKESMGMCFIGKRNFEHFLLQYLQPRPGHFISIEDNKVLGTHKGWFLYTLGQRANIGGLREPWYVVEKDSVKGDVFVAPRTDHPALYRDLLRTSRVHWIAEEPPAALVRDKMMECHFRFRHQMALVCCVLQGGRVPGQREDPAAGAVCLHAPEGPAQSWDGH

SEQ ID NO: 29006 - protein, 1529 aa, Artificial Sequence
  Synthetic polypeptide
GQARWLTPVIPAVWEAKAGRSRGETTTTVAPKVPSGVSDGRWHSVQVQYYNKPNIGHLGLPHGPSGEKMAVVTVDDCDTTMAVRFGKDIGNYSCAAQGTQTGSKKSLDLTGPLLLGGVPNLPEDFPVHNRQFVGCMRNLSVDGKNVDMAGFIANNGTREGCAARRNFCDGRRCQNGGTCVNRWNMYLCECPLRFGGKNCEQAMPHPQLFSGESVVSWSDLNIIISVPWYLGLMFRTRKEDSVLMEATSGGPTSFRLQILNNYLQFEVSHGPSDVESVMLSGLRVTDGEWHHLLIELKNVKEDSEMKHLVTMTLDYGMDQNKADIGGMLPGLTVRSVVVGGASEDKVSVRRGFRGCMQGVRMGGTPTNVATLNMNNALKVRVKDGCDVDDPCTSSPCPPNSRCHDAWEDYSCVCDKGYLGINCVDACHLNPCENMGACVRSPGSPQGYVCECGPSHYGPYCENKLDLPCPRGWWGNPVCGPCHCAVSKGFDPDCNKTNGQCQCKENYYKLLAQDTCLPCDCFPHGSHSRTCDMATGQCACKPGVIGRQCNRCDNPFAEVTTLGCEVIYNGCPKAFEAGIWWPQTKFGQPAAVPCPKGSVGNAVRHCSGEKGWLPPELFNCTTISFVDLRAMNEKLSRNETQVDGARALQLVRALRSATQHTGTLFGNDVRTAYQLLGHVLQHESWQQGFDLAATQDADFHEDVIHSGSALLAPATRAAWEQIQRSEGGTAQLLRRLEGYFSNVARNVRRTYLRPFVIVTANMILAVDIFDKFNFTGARVPRFDTIHEEFPRELESSVSFPADFFRPPEEKEGPLLRPAGRRTTPQTTRPGPGTEREAPISRRRRHPDDAGQFAVALVIIYRTLGQLLPERYDPDRRSLRLPHRPIINTPMVSTLVYSEGAPLPRPLERPVLVEFALLEVEERTKPVCVFWNHSLAVGGTGGWSARGCELLSRNRTHVACQCSHTASFAVLMDISRRENGEVLPLKIVTYAAVSLSLAALLVAFVLLSLVRMLRSNLHSIHKHLAVALFLSQLVFVIGINQTENPFLCTVVAILLHYIYMSTFAWTLVESLHVYRMLTEVRNIDTGPMRFYYVVGWGIPAIVTGLAVGLDPQGYGNPDFCWLSLQDTLIWSFAGPIGAVIIINTVTSVLSAKVSCQRKHHYYGKKGIVSLLRTAFLLLLLISATWLLGLLAVNRDALSFHYLFAIFSGLQGPFVLLFHCVLNQEVRKHLKGVLGGRKLHLEDSATTRATLLTRSLNCNTTFGDGPDMLRTDLGESTASLDSIVRDEGIQKLGVSSGLVRGSHGEPDASLMPRSCKDPPGHDSDSDSELSLDEQSSSYASSHSSDSEDDGVGAEEKWDPARGAVHSTPKGDAVANHVPAGWPDQSLAESDSEDPSGKPRLKVETKVSVELHREEQGSHRGEYPPDQESGGAARLASSQPPEQRKGILKNKVTYPPPLTLTEQTLKGRLREKLADCEQSPTSSRTSSLGSGGPDCAITVKSPGREPGRDHLNGVAMNVRTGSAQADGSDSEKP

SEQ ID NO: 29007 - protein, 36 aa, Artificial Sequence
  Synthetic polypeptide
ARRGGSRPLSQQFGRPRQADHEARQQRPWHRRFPVV

SEQ ID NO: 29008 - protein, 37 aa, Artificial Sequence
  Synthetic polypeptide
PGAVAHARYPSSLGGQGRQITRRDNNDRGTEGSQWCE

SEQ ID NO: 29009 - protein, 1866 aa, Artificial Sequence
  Synthetic polypeptide
SGTQMGLLFPLGDVAMSGDVSVVTVWRAVLLASDGIHSVTAFCTLRVTIITDDMLTNSITVRLENMSQEKFLSPLLALFVEGVAAVLSTTKDDVFVFNVQNDTDVSSNILNVTFSALLPGGVRGQFFPSEDLQEQIYLNRTLLTTISTQRVLPFDDNICLREPCENYMKCVSVLRFDSSAPFLSSTTVLFRPIHPINGLRCRCPPGFTGDYCETEIDLCYSDPCGANGRCRSREGGYTCECFEDFTGEHCEVDARSGRCANGVCKNGGTCVNLLIGGFHCVCPPGEYERPYCEVTTRSFPPQSFVTFRGLRQRFHFTISLTFATQERNGLLLYNGRFNEKHDFIALEIVDEQVQLTFSAGETTTTVAPKVPSGVSDGRWHSVQVQYYNKPNIGHLGLPHGPSGEKMAVVTVDDCDTTMAVRFGKDIGNYSCAAQGTQTGSKKSLDLTGPLLLGGVPNLPEDFPVHNRQFVGCMRNLSVDGKNVDMAGFIANNGTREGCAARRNFCDGRRCQNGGTCVNRWNMYLCECPLRFGGKNCEQAMPHPQLFSGESVVSWSDLNIIISVPWYLGLMFRTRKEDSVLMEATSGGPTSFRLQILNNYLQFEVSHGPSDVESVMLSGLRVTDGEWHHLLIELKNVKEDSEMKHLVTMTLDYGMDQNKADIGGMLPGLTVRSVVVGGASEDKVSVRRGFRGCMQGVRMGGTPTNVATLNMNNALKVRVKDGCDVDDPCTSSPCPPNSRCHDAWEDYSCVCDKGYLGINCVDACHLNPCENMGACVRSPGSPQGYVCECGPSHYGPYCENKLDLPCPRGWWGNPVCGPCHCAVSKGFDPDCNKTNGQCQCKENYYKLLAQDTCLPCDCFPHGSHSRTCDMATGQCACKPGVIGRQCNRCDNPFAEVTTLGCEVIYNGCPKAFEAGIWWPQTKFGQPAAVPCPKGSVGNAVRHCSGEKGWLPPELFNCTTISFVDLRAMNEKLSRNETQVDGARALQLVRALRSATQHTGTLFGNDVRTAYQLLGHVLQHESWQQGFDLAATQDADFHEDVIHSGSALLAPATRAAWEQIQRSEGGTAQLLRRLEGYFSNVARNVRRTYLRPFVIVTANMILAVDIFDKFNFTGARVPRFDTIHEEFPRELESSVSFPADFFRPPEEKEGPLLRPAGRRTTPQTTRPGPGTEREAPISRRRRHPDDAGQFAVALVIIYRTLGQLLPERYDPDRRSLRLPHRPIINTPMVSTLVYSEGAPLPRPLERPVLVEFALLEVEERTKPVCVFWNHSLAVGGTGGWSARGCELLSRNRTHVACQCSHTASFAVLMDISRRENGEVLPLKIVTYAAVSLSLAALLVAFVLLSLVRMLRSNLHSIHKHLAVALFLSQLVFVIGINQTENPFLCTVVAILLHYIYMSTFAWTLVESLHVYRMLTEVRNIDTGPMRFYYVVGWGIPAIVTGLAVGLDPQGYGNPDFCWLSLQDTLIWSFAGPIGAVIIINTVTSVLSAKVSCQRKHHYYGKKGIVSLLRTAFLLLLLISATWLLGLLAVNRDALSFHYLFAIFSGLQGPFVLLFHCVLNQEVRKHLKGVLGGRKLHLEDSATTRATLLTRSLNCNTTFGDGPDMLRTDLGESTASLDSIVRDEGIQKLGVSSGLVRGSHGEPDASLMPRSCKDPPGHDSDSDSELSLDEQSSSYASSHSSDSEDDGVGAEEKWDPARGAVHSTPKGDAVANHVPAGWPDQSLAESDSEDPSGKPRLKVETKVSVELHREEQGSHRGEYPPDQESGGAARLASSQPPEQRKGILKNKVTYPPPLTLTEQTLKGRLREKLADCEQSPTSSRTSSLGSGGPDCAITVKSPGREPGRDHLNGVAMNVRTGSAQADGSDSEKP

SEQ ID NO: 29010 - protein, 43 aa, Artificial Sequence
  Synthetic polypeptide
ETWPCLEMFRLSQYGGRCYWHLMASTASRPSAPCVSPSSRTTC

SEQ ID NO: 29011 - protein, 249 aa, Artificial Sequence
  Synthetic polypeptide
SGTQMGLLFPLGDVAMSGDVSVVTVWRAVLLASDGIHSVTAFCTLRVTIITDDMLTNSITVRLENMSQEKFLSPLLALFVEGVAAVLSTTKDDVFVFNVQNDTDVSSNILNVTFSALLPGGVRGQFFPSEDLQEQIYLNRTLLTTISTQRVLPFDDNICLREPCENYMKCVSVLRFDSSAPFLSSTTVLFRPIHPINGLRCRCPPGFTGDYCETEIDLCYSDPCGANGRCRSREGGYTCECFEDFTAVS

SEQ ID NO: 29012 - protein, 249 aa, Artificial Sequence
  Synthetic polypeptide
SGTQMGLLFPLGDVAMSGDVSVVTVWRAVLLASDGIHSVTAFCTLRVTIITDDMLTNSITVRLENMSQEKFLSPLLALFVEGVAAVLSTTKDDVFVFNVQNDTDVSSNILNVTFSALLPGGVRGQFFPSEDLQEQIYLNRTLLTTISTQRVLPFDDNICLREPCENYMKCVSVLRFDSSAPFLSSTTVLFRPIHPINGLRCRCPPGFTGDYCETEIDLCYSDPCGANGRCRSREGGYTCECFEDFTEIS

SEQ ID NO: 29013 - protein, 18 aa, Artificial Sequence
  Synthetic polypeptide
PSSWTPRGITEVELVRNP

SEQ ID NO: 29014 - protein, 329 aa, Artificial Sequence
  Synthetic polypeptide
RFLKQFNIELPCEELPCDPAVGLLEELRRLSWSGIPKPVRPMTWKLLSGYLPANVDRRPATLQRKQKEYFAFIEHYYDSRNDEVHQDTYRQIHIDIPRMSPEALILQPKVTEIFERILFIWAIRHPASGYVQGINDLVTPFFVVFICEYIEAEEVDTVDVSGVPAEVLCNIEADTYWCMSKLLDGIQDNYTFAQPGIQMKVKMLEELVSRIDEQVHRHLDQHEVRYLQFAFRWMNNLLMREVPLRCTIRLWDTYQSEPDGFSHFHLYVCAAFLVRWRKEILEEKDFQELLLFLQNLPTAHWDDEDISLLLAEAYRLKFAFADAPNHYKK

SEQ ID NO: 29015 - protein, 183 aa, Artificial Sequence
  Synthetic polypeptide
RFLKQFNIELPCEELPCDPAVGLLEELRRLSWSGIPKPVRPMTWKLLSGYLPANVDRRPATLQRKQKEYFAFIEHYYDSRNDEVHQDTYRQIHIDIPRMSPEALILQPKVTEIFERILFIWAIRHPASGYVQGINDLVTPFFVVFICEYIAFPGCGRPQIPILAVIWRDEPYPRTDEQIILRR

SEQ ID NO: 29016 - protein, 485 aa, Artificial Sequence
  Synthetic polypeptide
SHLHEADGRKVLRSSIREFLCSEAMFHLGVPTTRAGACVTSESTVVRDVFYDGNPKYEQCTVVLRVASTFIRFGSFEIFKSADEHTGRAGPSVGRNDIRVQLLDYVISSFYPEIQAAHASDSVQRNAAFFREVTRRTARMVAEWQCVGFCHGVLNTDNMSILGLTIDYGPFGFLDRYDPDHVCNASDNTGRYAYSKQPEVCRWNLRKLAEALQPELPLELGEAILAEEFDAEFQRHYLQKMRRKLGLVQVELEEDGALVSKLLETMHLTGADFTNTFYLLSSFPVELESPGLAEFLARLMEQCASLEELRLAFRPQMDPRQLSMMLMLAQSNPQLFALMGTRAGIARELERVEQQSRLEQLSAAELQSRNQGHWADWLQAYRARLDKDLEGAGDAAAWQAEHVRVMHANNPKYVLRNYIAQNAIEAAERGDFSEVRRVLKLLETPYHCEAGAATDAEATEADGADGRQRSYSSKPPLWAAELCVT

SEQ ID NO: 29017 - protein, 77 aa, Artificial Sequence
  Synthetic polypeptide
NKLVTERQILGDPTYMRPTVARSYGQASGSFYAAKPCSTWESPPHGPAPASRPSPRWCATCSMMVIPNMNNARLCCV

SEQ ID NO: 29018 - protein, 27 aa, Artificial Sequence
  Synthetic polypeptide
VPHACNPRTLGAEVPKTDPGPAPNWPP

SEQ ID NO: 29019 - protein, 214 aa, Artificial Sequence
  Synthetic polypeptide
CLMPVIPELWEPRYLKQIQDLPPTGLPEMNLLEMYSLKDEMGNLRKLLESTPSPVVFCHNDIQEGNILLLSEPENADSLMLVDFEYSSYNYRGFDIGNHFCEWVYDYTHEEWPFYKARPTDYPTQEQQLHFIRHYLAEAKKGETLSQEEQRKLEEDLLVEVSRYALASHFFWGLWSILQASMSTIEFGYLDYAQSRFQFYFQQKGQLTSVHSSS

SEQ ID NO: 29020 - protein, 9 aa, Artificial Sequence
  Synthetic polypeptide
SQNFGSRGT

SEQ ID NO: 29021 - protein, 295 aa, Artificial Sequence
  Synthetic polypeptide
AQEFETSLDNIGVDSLVLESVMFAILAERSLGPQLYGVFPEGRLEQYIPSRPLKTQELREPVLSAAIATKMAQFHGMEMPFTKEPHWLFGTMERYLKQIQDLPPTGLPEMNLLEMYSLKDEMGNLRKLLESTPSPVVFCHNDIQEGNILLLSEPENADSLMLVDFEYSSYNYRGFDIGNHFCEWVYDYTHEEWPFYKARPTDYPTQEQQLHFIRHYLAEAKKGETLSQEEQRKLEEDLLVEVSRYALASHFFWGLWSILQASMSTIEFGYLDYAQSRFQFYFQQKGQLTSVHSSS

SEQ ID NO: 29022 - protein, 123 aa, Artificial Sequence
  Synthetic polypeptide
MYSQSFGRLRREDHLSTGVRDQPGQHRRGLPGARKRDVRHTCGAVAGAPAVRSLPRGPAGTVHPKSAIENSRASRASVVSSHCHEDGAISWHGDAFHQGAPLAVWDHGAVPKTDPGPAPNWPP

SEQ ID NO: 29023 - protein, 366 aa, Artificial Sequence
  Synthetic polypeptide
STKNREPLMPSPQFIKSYFSSFTDDIISQPMLKGEKSDEDKDKEGEALEVKENSGYLKAKQYMEEENYDKIISECSKEIDAEGKYMAEALLLRATFYLLIGNANAAKPDLDKVISLKEANVKLRANALIKRGSMYMQQQQPLLSTQDFNMAADIDPQNADVYHHRGQLKILLDQVEEAVADFDECIRLRPESALAQAQKCFALYRQAYTGNNSSQIQAAMKGFEEVIKKFPRCAEGYALYAQALTDQQQFGKADEMYDKCIDLEPDNATTYVHKGLLQLQWKQDLDRGLELISKAIEIDNKCDFAYETMGTIEVQRGNMEKAIDMFNKAINLAKSEMEMAHLYSLCDAAHAQTEVAKKYGLKPPTL

SEQ ID NO: 29024 - protein, 22 aa, Artificial Sequence
  Synthetic polypeptide
VKQLQQVSSLLDFNNLLRIVNL

SEQ ID NO: 29025 - protein, 5 aa, Artificial Sequence
  Synthetic polypeptide
REHVM

SEQ ID NO: 29026 - protein, 1755 aa, Artificial Sequence
  Synthetic polypeptide
MKEARCEENMSCKRPNLKVHINTTSDSILLKFLRPSPNVKLEGLLLGYGSNVSPNQYFPLPAEGKFTEAIVDAEPKYLIVVRPAPPPSQKKSCSGKTRSRKPLQLVVGTLTPSSVFLSWGFLINPHHDWTLPSHCPNDRFYTIRYREKDKEKKWIFQICPATETIVENLKPNTVYEFGVKDNVEGGIWSKIFNHKTVVGSKKVNGKIQSTYDQDHTVPAYVPRKLIPITIIKQVIQNVTHKDSAKSPEKAPLGGVILVHLIIPGLNETTVKLPASLMFEISDALKTQLAKNETLALPAESKTPEVEKISARPTTVTPETVPRSTKPTTSSALDVSETTLVLSKRTPETLQTILIPQFELPLSTLAPKSLPEFPEAKTPFPFEKPRGTLASSEKPWIVPTAKISEDSKVLQPQTATYDVFSSPTTSDEPEISDSYTATSDRILDSIPPKTSRTLEQPRATLAPSETPFVPQKLEIFTSPEMQPTTPAPQQTTSIPSTPKRRPRPKPPRTKPERTTSAGTITPKISKSPEPTWTTPAPGKTQFISLKPKIPLSPEVTHTKPAPEPQTLLPSQSTIGPETPGTKPSTTLAPRKTKRPGRRPRPRPRPKTTPSPEVPKSKPALEPATIQPEPLVPTTASKPSERPKTTHRPDAPQIQPGSKPPKQLLPKPQTTAEPDMPPTKSVSEPVPFETEAPSMTIVPTTDIEPVTVRTEATVTTLAPKTSQRTRTRRPRPKHKTTPRPETLQTKLDFGPITPGTSSAPTTTTKRTRRPHPKPKTTPHPEVPQTKLVPATILEPVLRTEASGTTAAPKVPQRTHRPHPKPKTTLSPEELQTELVPATIFEPVSPIKEAPGTTFVPVTDLEPVTFRTEIPATTLATKTSKRTRPPRPRPKTTPSPQAPETKPVPATVLEPVTLRPEASTTLASKTSQRTRRPRLRTKTTPRPEAPESKPVPTAELKPVTLRTETWVTTQAPKTSQRTRRPRPKTKTTPSPEVPQTKLVPSTDLEPGTLRTEAPKTMVVTTVLEPDTFRTKFPETTLAPKTQRTRRPRPRPKTTSSPEVPQNKSVSVTGFEPVVHSTDAPGTTFALTELQTLILKPVTSPSLEMTESQPVSDVLESVTLSTESPKETIAPAKTDYVYPTAKAPLWPEEPKTEVVESITYVSEPPETTLETSPLPSQSITLPSPDEPQTEPAPKQTPRAPPKPKTSPRPRIPQTQPVPKVPQRVTAKPKTSPSPEVSYTTPAPKDVLLPHKPYPEVSQSEPAPLETRGIPFIPMISPSPSQEELQTTLEETDQSTQEPFTTKIPRTTELAKTTQAPHRFYTTVRPRTSDKPHIRPVLNRTTTRPTRPKPSGMPSGNGVGTGVKQAPRPSGADRNVSVDSTHPTKKPGTRRPPLPPRPTHPRRKPLPPNNVTGKPGSAGIISSGPITTPPLRSTPRPTGTPLERIETDIKQPTVPASGEELENITDFSSSPTRETDPLGKPRFKGPHVRYIQKPDNSPCSITDSVKRFPKEEATEGNATSPPQNPPTNLTVVTVEGCPSFVILDWEKPLNDTVTEYEVISRENGSFSGKNKSIQMTNQTFSTVENLKPNTSYEFQVKPKNPLGEGPVSNTVAFSTESADPRVSEPVSAGRDAIWTERPFNSDSYSECKGKQYVKRTWYKKFVGVQLCNSLRYKIYLSDSLTGKFYNIGDQRGHGEDHCQFVDSFLDGRTGQQLTSDQLPIKEGYFRAVRQEPVQFGEIGGHTQINYVQWYECGTTIPGKW

SEQ ID NO: 29027 - protein, 28 aa, Artificial Sequence
  Synthetic polypeptide
KKPGVKRTCHVKGQTSKSTSIPQVTPSS

SEQ ID NO: 29028 - protein, 1053 aa, Artificial Sequence
  Synthetic polypeptide
MKEARCEENMSCKRPNLKVHINTTSDSILLKFLRPSPNVKLEGLLLGYGSNVSPNQYFPLPAEGKFTEAIVDAEPKYLIVVRPAPPPSQKKSCSGKTRSRKPLQLVVGTLTPSSVFLSWGFLINPHHDWTLPSHCPNDRFYTIRYREKDKEKKWIFQICPATETIVENLKPNTVYEFGVKDNVEGGIWSKIFNHKTVVGSKKVNGKIQSTYDQDHTVPAYVPRKLIPITIIKQVIQNVTHKDSAKSPEKAPLGGVILVHLIIPGLNETTVKLPASLMFEISDALKTQLAKNETLALPAESKTPEVEKISARPTTVTPETVPRSTKPTTSSALDVSETTLASSEKPWIVPTAKISEDSKVLQPQTATYDVFSSPTTSDEPEISDSYTATSDRILDSIPPKTSRTLEQPRATLAPSETPFVPQKLEIFTSPEMQPTTPAPQQTTSIPSTPKRRPRPKPPRTKPERTTSAGTITPKISKSPEPTWTTPAPGKTQFISLKPKIPLSPEVTHTKPAPKQTPRAPPKPKTSPRPRIPQTQPVPKVPQRVTAKPKTSPSPEVSYTTPAPKDVLLPHKPYPEVSQSEPAPLETRGIPFIPMISPSPSQEELQTTLEETDQSTQEPFTTKIPRTTELAKTTQAPHRFYTTVRPRTSDKPHIRPGVKQAPRPSGADRNVSVDSTHPTKKPGTRRPPLPPRPTHPRRKPLPPNNVTGKPGSAGIISSGPITTPPLRSTPRPTGTPLERIETDIKQPTVPASGEELENITDFSSSPTRETDPLGKPRFKGPHVRYIQKPDNSPCSITDSVKRFPKEEATEGNATSPPQNPPTNLTVVTVEGCPSFVILDWEKPLNDTVTEYEVISRENGSFSGKNKSIQMTNQTFSTVENLKPNTSYEFQVKPKNPLGEGPVSNTVAFSTESADPRVSEPVSAGRDAIWTERPFNSDSYSECKGKQYVKRTWYKKFVGVQLCNSLRYKIYLSDSLTGKFYNIGDQRGHGEDHCQFVDSFLDGRTGQQLTSDQLPIKEGYFRAVRQEPVQFGEIGGHTQINYVQWYECGTTIPGKW

SEQ ID NO: 29029 - protein, 983 aa, Artificial Sequence
  Synthetic polypeptide
MKEARCEENMSCKRPNLKVHINTTSDSILLKFLRPSPNVKLEGLLLGYGSNVSPNQYFPLPAEGKFTEAIVDAEPKYLIVVRPAPPPSQKKSCSGKTRSRKPLQLVVGTLTPSSVFLSWGFLINPHHDWTLPSHCPNDRFYTIRYREKDKEKKWIFQICPATETIVENLKPNTVYEFGVKDNVEGGIWSKIFNHKTVVGSKKVNGKIQSTYDQDHTVPAYVPRKLIPITIIKQVIQNVTHKDSAKSPEKAPLGGVILVHLIIPGLNETTVKLPASLMFEISDALKTQLAKNETLALPAESKTPEVEKISARPTTVTPETVPRSTKPTTSSALDVSETTLVLSKRTPETLQTILIPQFELPLSTLAPKSLPEFPEAKTPFPFEKPRGTLASSEKPWIVPTAKISEDSKVLQPQTATYDVFSSPTTSDEPEISDSYTATSDRILDSIPPKTSRTLEQPRATLAPSETPFVPQKLEIFTSPEMQPTTPAPQQTTSIPSTPKRRPRPKPPRTKPERTTSAGTITPKISKSPEPTWTTPAPGKTQFISLKPKIPLSPEVTHTKPAPEPQTLLPSQSTIGPETPGTKPSTTLAPRKTKRPGRRPRPRPRPKTTPSPEVPKSKPALEPATIQPEPLVPTTASKPSERPKTTHRPDAPQIQPGSKPPKQLLPKPQTTAEPDMPPTKSVSEPVPFETEAPSMTIVPTTDIEPVTVRTEATVTTLAPKTSQRTRTRRPRPKHKTTPRPETLQTKLDFGPITPGTSSAPTTTTKRTRRPHPKPKTTPHPEVPQTKLATKTSKRTRPPRPRPKTTPSPQAPETKPVPATVLEPVTLRPEASTTLASKTSQRTRRPRLRTKTTPRPEAPESKPVPTAELKPVTLRTETWVTTQAPKTSQRTRRPRPKTKTTPSPEVPQTKLVPSTDLEPGTLRTEAPKTMVVTTVLEPDTFRTKFPETTLAPKTQRTRRPRPRPKTTSSPEVPQNKSGKCMNPWLK

SEQ ID NO: 29030 - protein, 16 aa, Artificial Sequence
  Synthetic polypeptide
QNVKKVSLKLEIFAST

SEQ ID NO: 29031 - protein, 14 aa, Artificial Sequence
  Synthetic polypeptide
AKITPLHSILGDRM

SEQ ID NO: 29032 - protein, 305 aa, Artificial Sequence
  Synthetic polypeptide
TLEVGGCSEPRSHHCTPSWVTECEKSFFEARDLRQHMNKHLGVKPFQCQFCDKCYSWKKDWYSHVKSHSVTEPYRCNICGKEFYEKALFRRHVKKATHGKKGRAKQNLERVCEKCGRKFTQLREYRRHMNNHEGVKPFECLTCGVAWADARSLKRHVRTHTGERPYVCPVCSEAYIDARTLRKHMTKFHRDYVPCKIMLEKDTLQFHNQGTQVAHAVSILTAGMQEQESSGPQELETVVVTGETMEALEAVAATEEYPSVSTLSDQSIMQVVNYVLAQQQGQKLSEVAEAIQTVKVEVAHISGGE

SEQ ID NO: 29033 - protein, 15 aa, Artificial Sequence
  Synthetic polypeptide
DPISTKNFEKLVLGP

SEQ ID NO: 29034 - protein, 25 aa, Artificial Sequence
  Synthetic polypeptide
KISTWTMRLFQPLSSTAVDSLFPPR

SEQ ID NO: 29035 - protein, 24 aa, Artificial Sequence
  Synthetic polypeptide
KISTWTMRLFQPLSSTAVDSLFPP

SEQ ID NO: 29036 - protein, 37 aa, Artificial Sequence
  Synthetic polypeptide
QNQPLFFPFFLSLLSRKTMRMKTFMMIHCHLMNSDKR

SEQ ID NO: 29037 - protein, 9 aa, Artificial Sequence
  Synthetic polypeptide
IVTKGETLT

SEQ ID NO: 29038 - protein, 39 aa, Artificial Sequence
  Synthetic polypeptide
IVTKGETLRTVPCCCWEVALHNTGHMGKAPAAFSSFLSP

SEQ ID NO: 29039 - protein, 127 aa, Artificial Sequence
  Synthetic polypeptide
DREAKSRLRGHACSCRKMYGNRQLSRPGHLWLFRDAGTHDGLLVNQTELFVPSLNVDGQPIFANITLPVYTLKERCLQVVRSLVKPENYRRLDIVRSLYEDLEDHPNVQKDLERLTQERIAHQRMGD

SEQ ID NO: 29040 - protein, 99 aa, Artificial Sequence
  Synthetic polypeptide
LPNFTLIQCAPVKQWALIGTFLSLRCTKIGKLKADSGDMPAAAERCTGTDNSPAQVTFGSSEMQGHTMGFWLTKLNYLCHLSMLTDSLFLPISHCQCIL

SEQ ID NO: 29041 - protein, 39 aa, Artificial Sequence
  Synthetic polypeptide
KQTQGTCLQLQKDVREQTTLPPRSPLALQRCRDTRWASG

SEQ ID NO: 29042 - protein, 89 aa, Artificial Sequence
  Synthetic polypeptide
AEIMTLHSSRGNKMLPPQCLTCAGLLCCKTVSQLHLPLHGKWFPTGQTAGSGWLGPPPLAPACQHLLRAALCRRVPAWSGDHPQQRQEL

SEQ ID NO: 29043 - protein, 371 aa, Artificial Sequence
  Synthetic polypeptide
HYTPAGATKCCHPNVLPVLGFCAARQFHSFIYPYMANGSLQDRLQGQGGSDPLPWPQRVSICSGLLCAVEYLHGLEIIHSNVKSSNVLLDQNLTPKLAHPMAHLCPVNKRSKYTMMKTHLLRTSAAYLPEDFIRVGQLTKRVDIFSCGIVLAEVLTGIPAMDNNRSPVYLKDLLLSDIPSSTASLCSRKTGVENVMAKEICQKYLEKGAGRLPEDCAEALATAACLCLRRRNTSLQEVCGSVAAVEERLRGRETLLPWSGLSEGTGSSSNTPEETDDVDNSSLDASSSMSVAPWAGAATPLLPTENGEGRLRVIVGREADSSSEACVGLEPPQDVTETSWQIEINEAKRKLMENILLYKEEKVDSIELFGP

SEQ ID NO: 29044 - protein, 127 aa, Artificial Sequence
  Synthetic polypeptide
AQEAEVAVSRDHDTTLQPGQQNAATPMSYLCWASVLQDSFTASSTPTWQMVPYRTDCRVRVARTPSPGPSVSASAQGCSVPSSTCMVWRSSTATSRALMSCWTKISPPNLLTQWLICVLSTKGQNTP

SEQ ID NO: 29045 - protein, 17 aa, Artificial Sequence
  Synthetic polypeptide
RQPGGVKFCGLSIRRCQ

SEQ ID NO: 29046 - protein, 12 aa, Artificial Sequence
  Synthetic polypeptide
SFVDSALEGVSN

SEQ ID NO: 29047 - protein, 322 aa, Artificial Sequence
  Synthetic polypeptide
KVSVINTVDTSHEDMIHDAQMDYYGTRLATCSSDRSVKIFDVRNGGQILIADLRGHEGPVWQVAWAHPMYGNILASCSYDRKVIIWREENGTWEKSHEHAGHDSSVNSVCWAPHDYGLILACGSSDGAISLLTYTGEGQWEVKKINNAHTIGCNAVSWAPAVVPGSLIDHPSGQKPNYIKRFASGGCDNLIKLWKEEEDGQWKEEQKLEAHSDWVRDVAWAPSIGLPTSTIASCSQDGRVFIWTCDDASSNTWSPKLLHKFNDVVWHVSWSITANILAVSGGDNKVTLWKESVDGQWVCISDVNKGQGSVSASVTEGQQNEQ

SEQ ID NO: 29048 - protein, 83 aa, Artificial Sequence
  Synthetic polypeptide
KVSVINTVDTSHEDMIHDAQMDYYGTRLATCSSDRSVKIFDVRNGGQILIADLRGHEGPVWQVAWAHPMYGNILASCSYDRKV

SEQ ID NO: 29049 - protein, 10 aa, Artificial Sequence
  Synthetic polypeptide
KVSVINTVDT

SEQ ID NO: 29050 - protein, 9 aa, Artificial Sequence
  Synthetic polypeptide
KVSVINTVD

SEQ ID NO: 29051 - protein, 347 aa, Artificial Sequence
  Synthetic polypeptide
RQPGGVKFCGLSIRRACAGKDEMGKMVSVINTVDTSHEDMIHDAQMDYYGTRLATCSSDRSVKIFDVRNGGQILIADLRGHEGPVWQVAWAHPMYGNILASCSYDRKVIIWREENGTWEKSHEHAGHDSSVNSVCWAPHDYGLILACGSSDGAISLLTYTGEGQWEVKKINNAHTIGCNAVSWAPAVVPGSLIDHPSGQKPNYIKRFASGGCDNLIKLWKEEEDGQWKEEQKLEAHSDWVRDVAWAPSIGLPTSTIASCSQDGRVFIWTCDDASSNTWSPKLLHKFNDVVWHVSWSITANILAVSGGDNKVTLWKESVDGQWVCISDVNKGQGSVSASVTEGQQNEQ

SEQ ID NO: 29052 - protein, 22 aa, Artificial Sequence
  Synthetic polypeptide
SFVDSALEGLVLEKMKWGKWCQ

SEQ ID NO: 29053 - protein, 7 aa, Artificial Sequence
  Synthetic polypeptide
KGLCWKR

SEQ ID NO: 29054 - protein, 35 aa, Artificial Sequence
  Synthetic polypeptide
RQPGGVKFCGLSIRRACAGKDEMGKMVSVINTVDT

SEQ ID NO: 29055 - protein, 34 aa, Artificial Sequence
  Synthetic polypeptide
RQPGGVKFCGLSIRRACAGKDEMGKMVSVINTVD

SEQ ID NO: 29056 - protein, 617 aa, Artificial Sequence
  Synthetic polypeptide
EAGLACGSHSDRQSSVWRFIVNHCSKNYSRNIPGKQRESTDPLKELYHCCRLHEMLKNCLGWYTVNSAYGDTIIIPCRLDVPQNLMFGKWKYEKPDGSPVFIAFRSSTKKSVQYDDVPEYKDRLNLSENYTLSISNARISDEKRFVCMLVTEDNVFEAPTIVKVFKQPSKPEIVSKALFLETEQLKKLGDCISEDSYPDGNITWYRNGKVLHPLEGAVVIIFKKEMDPVTQLYTMTSTLEYKTTKADIQMPFTCSVTYYGPSGQKTIHSEQAVFDIYYPTEQVTIQVLPPKNAIKEGDNITLKCLGNGNPPPEEFLFYLPGQPEGIRSSNTYTLTDVRRNATGDYKCSLIDKKSMIASTAITVHYLDLSLNPSGEVTRQIGDALPVSCTISASRNATVVWMKDNIRLRSSPSFSSLHYQDAGNYVCETALQEVEGLKKRESLTLIVEGKPQIKMTKKTDPSGLSKTIICHVEGFPKPAIQWTITGSGSVINQTEESPYINGRYYSKIIISPEENVTLTCTAENQLERTVNSLNVSAISIPEHDEADEISDENREKVNDQAKLIVGIVVGLLLAALVAGVVYWLYMKKSKTASKHVNKDLGNMEENKKLEENNHKTEA

SEQ ID NO: 29057 - protein, 8 aa, Artificial Sequence
  Synthetic polypeptide
KTALDGIL

SEQ ID NO: 29058 - protein, 25 aa, Artificial Sequence
  Synthetic polypeptide
DAEKLPWMVYCKFSIWRYHYHTLPT

SEQ ID NO: 29059 - protein, 604 aa, Artificial Sequence
  Synthetic polypeptide
EAGLACGSHSDRQSSVWRFIVNHCSKNYSRNIPGKQRESTDPLKELYHCCRLHEMLKNCLGWYTVNSAYGDTIIIPCRLDVPQNLMFGKWKYEKPDGSPVFIAFRSSTKKSVQYDDVPEYKDRLNLSENYTLSISNARISDEKRFVCMLVTEDNVFEAPTIVKVFKQPSKPEIVSKALFLETEQLKKLGDCISEDSYPDGNITWYRNGKVLHPLEGAVVIIFKKEMDPVTQLYTMTSTLEYKTTKADIQMPFTCSVTYYGPSGQKTIHSEQAVFDIYYPTEQVTIQVLPPKNAIKEGDNITLKCLGNGNPPPEEFLFYLPGQPEGIRSSNTYTLTDVRRNATGDYKCSLIDKKSMIASTAITVHYLDLSLNPSGEVTRQIGDALPVSCTISASRNATVVWMKDNIRLRSSPSFSSLHYQDAGNYVCETALQEVEGLKKRESLTLIVEGKPQIKMTKKTDPSGLSKTIICHVEGFPKPAIQWTITGSGSVINQTEESPYINGRYYSKIIISPEENVTLTCTAENQLERTVNSLNVSANENREKVNDQAKLIVGIVVGLLLAALVAGVVYWLYMKKSKTASKHVNKDLGNMEENKKLEENNHKTEA

SEQ ID NO: 29060 - protein, 47 aa, Artificial Sequence
  Synthetic polypeptide
SLRKGKQLSECLDFSLVRLETEKPAAPTGLLTYRTDQLSYYLIKQNL

SEQ ID NO: 29061 - protein, 10 aa, Artificial Sequence
  Synthetic polypeptide
PTELISSATI

SEQ ID NO: 29062 - protein, 14 aa, Artificial Sequence
  Synthetic polypeptide
FLHFQLRKMLCPSW

SEQ ID NO: 29063 - protein, 60 aa, Artificial Sequence
  Synthetic polypeptide
GRSQDGRIGTAPVYSSQRERRRRRVISAFPTEKDVVSLLVSAVPVHPIMAKKMCLFQEKY

SEQ ID NO: 29064 - protein, 54 aa, Artificial Sequence
  Synthetic polypeptide
GRSQDGRIGTAPVYSSQRERRRRRVISAFPTEKDVVSLLVSAVPVHPIMAKKMW

SEQ ID NO: 29065 - protein, 23 aa, Artificial Sequence
  Synthetic polypeptide
YSKEVLTEAFWVFGLGMPNQTHV

SEQ ID NO: 29066 - protein, 19 aa, Artificial Sequence
  Synthetic polypeptide
GCPTRPTFDYSFGFCFNVR

SEQ ID NO: 29067 - protein, 412 aa, Artificial Sequence
  Synthetic polypeptide
SILGFWIRDAQPDPRLITPLAFALTSDNREQVQSGLRILLEAAPLPDFPALVLGESIAANNAYRQQETEHIPRKMPWQSSNHSFPTSIKCLTPHLKDGVPGLNIEELIEKLQSGMVVKDQICDVRISDIMDVYEMKLSTLASKESRLQDLLETKALALAQADRLIAQHRCQRTQAETEARTLASMLREVERKNEELSVLLKAQQVESERAQSDIEHLFQHNRKLESVAEEHEILTKSYMELLQRNESTEKKNKDLQITCDSLNKQIETVKKLNESLKEQNEKSIAQLIEKEEQRKEVQNQLVDREHKLANLHQKTKVQEEKIKTLQKEREDKEETIDILRKELSRTEQIRKELSIKASSLEVQKAQLEGRLEEKESLVKLQQEELNKHSHMIAMIHSLSGGKINPETVNLSI

SEQ ID NO: 29068 - protein, 64 aa, Artificial Sequence
  Synthetic polypeptide
PLNNTGLNCEGPLTDFLPSLPPLRQQNQPLLFLLLLSLLKREDILMRMKTFMMIHFYLKNRWIC

SEQ ID NO: 29069 - protein, 130 aa, Artificial Sequence
  Synthetic polypeptide
RIDGFVDFLEFIAAVNLIMQEKMEQKLKWYFKLYDADGNGSIDKNELLDMFMAVQALNGQQTLSPEEFINLVFHKIDINNDGNGATLYWITFPTKGIDFRRIYQWHGKRSGSPGDCLQELRLLQCAESNL

SEQ ID NO: 29070 - protein, 143 aa, Artificial Sequence
  Synthetic polypeptide
RIDGFVDFLEFIAAVNLIMQEKMEQKLKWYFKLYDADGNGSIDKNELLDMFMAVQALNGQQTLSPEEFINLVFHKIDINNDGELTLEEFINGMAKDQDLLEIVYKSFDFSNVLRVICNGKQPDMETDSSKSPDKAGLGKVKMK

SEQ ID NO: 29071 - protein, 95 aa, Artificial Sequence
  Synthetic polypeptide
RIDGFVDFLEFIAAVNLIMQEKMEQKLKWYFKLYDADGNGSIDKNELLDMFMAVQALNGQQTLSPEEFINLVFHKIDINNDGNGATLYWITFPTK

SEQ ID NO: 29072 - protein, 44 aa, Artificial Sequence
  Synthetic polypeptide
YHPHKFVYLCVFRVPHQLELQDIQDPACTHWHMHHSQFPFWSTG

SEQ ID NO: 29073 - protein, 1002 aa, Artificial Sequence
  Synthetic polypeptide
HSVKICNIILISLFTCVFSVYPTSLSSRTSKTLPVHIGTCTTHSFLFGALAELLDNARDAGAERLDVFSVDNEKLQGGFMLCFLDDGCGMSPEEASDIIYFGRSKKRLSTLKFIGQYGNGLKSGSMRIGKDFILFTKKEETMTCVFFSQTFCEEESLSEVVVPMPSWLIRTRESVTDDPQKFAMELSIIYKYSPFKTEAELMQQFDVIYGKCGTLLVIYNLKLLLNGEPELDVKTDKEDILMAGALEDFPARWSFRAYTSVLYFNPWMRIFIQAKRVKTKHLCYCLYRPRKYLYVTSSFKGAFKDEVKKAEEAVKIAESILKEAQIKVNQCDRTSLSSAKDVLQRALEDVEAKQKNLKEKQRELKTARTLSLFYGVNVENRSQAGMFIYSNNRLIKMHEKVGSQLKLKSLLGAGVVGIVNIPLEVMEPSHNKQEFLNVQEYNHLLKVMGQYLVQYCKDTGINNRNLTLFCNEFGYQNDIDVEKPLNSFQYQRRQAMGIPFIIQCDLCLKWRVLPSSTNYQEKEFFDIWICANNPNRLENSCHQVECLPSIPLGTMSTISPSKNEKEKQLRESVIKYQNRLAEQQPQPQFIPVDEITVTSTCLTSAHKENTKTQKIRLLGDDLKHESLSSFELSASRRGQKRNIEETDSDVEYISETKIMKKSMEEKMNSQQQRIPVALPENVKLAERSQRSQIANITTVWRAQPTEGCLKNAQAASWEMKRKQSLNFVEECKVLTEDENTSDSDIILVSDKSNTDVSLKQEKKEIPLLNQEKQELCNDVLAMKRSSSLPSWKSLLNVPMEDVNLSSGHIARVSVSGSCKVASSPASSQSTPVKETVRKLKSKLREILLYFFPEHQLPSELEEPALSCELEQCPEQMNKKLKMCFNQIQNTYMVQYEKKIKRKLQSIIYDSNTRGIHNEISLGQCENKRKISEDKLKNLRIKLALLLQKLQLGGPEGDLEQTDTYLEALLKEDNLLFQNNLNKVTIDARHRLPLEKNEKTSEN

SEQ ID NO: 29074 - protein, 64 aa, Artificial Sequence
  Synthetic polypeptide
APGHPRPCLYTLAHAPLTVSFLEHWLNCWTMQEMQGLKDLMSFQWIMKNCRGDSCCVSWMMDVA

SEQ ID NO: 29075 - protein, 981 aa, Artificial Sequence
  Synthetic polypeptide
HSVKICNIILISLFTCVFSVYPTSLSSRTSKTLPVHIGTCTTHSFLFGALAELLDNARDAGAERLDVFSVDNEKLQGGFMLCFLDDGCGMSPEEASDIIYFGRSKKRLSTLKFIGQYGNGLKSGSMRIGKDFILFTKKEETMTCVFFSQTFCEEESLSEVVVPMPSWLIRTRESVTDDPQKFAMELSIIYKYSPFKTEAELMQQFDVIYGKCGTLLVIYNLKLLLNGEPELDVKTDKEDILMAGALEDFPARWSFRAYTSVLYFNPWMRIFIQAKRVKTKHLCYCLYRPRKYLYVTSSFKGAFKDEVKKAEEAVKIAESILKEAQIKVNQCDRTSLSSAKDVLQRALEDVEAKQKNLKEKQRELKTARTLSLFYGVNVENRSQAGMFIYSNNRLIKMHEKVGSQLKLKSLLGAGVVGIVNIPLEVMEPSHNKQEFLNVQEYNHLLKVMGQYLVQYCKDTGINNRNLTLFCNEFGYQNDIDVEKPLNSFQYQRRQAMGIPFIIQCDLCLKWRVLPSSTNYQEKEFFDIWICANNPNRLENSCHQVECLPSIPLGTMSTISPSKNEKEKQLRESVIKYQNRLAEQQPQENTKTQKIRLLGDDLKHESLSSFELSASRRGQKRNIEETDSDVEYISETKIMKKSMEEKMNSQQQRIPVALPENVKLAERSQRSQIANITTVWRAQPTEGCLKNAQAASWEMKRKQSLNFVEECKVLTEDENTSDSDIILVSDKSNTDVSLKQEKKEIPLLNQEKQELCNDVLAMKRSSSLPSWKSLLNVPMEDVNLSSGHIARVSVSGSCKVASSPASSQSTPVKETVRKLKSKLREILLYFFPEHQLPSELEEPALSCELEQCPEQMNKKLKMCFNQIQNTYMVQYEKKIKRKLQSIIYDSNTRGIHNEISLGQCENKRKISEDKLKNLRIKLALLLQKLQLGGPEGDLEQTDTYLEALLKEDNLLFQNNLNKVTIDARHRLPLEKNEKTSEN

SEQ ID NO: 29076 - protein, 27 aa, Artificial Sequence
  Synthetic polypeptide
GRRPHDKEMMPPTNSQHHSQFPFWSTG

SEQ ID NO: 29077 - protein, 969 aa, Artificial Sequence
  Synthetic polypeptide
CLPLIASTTHSFLFGALAELLDNARDAGAERLDVFSVDNEKLQGGFMLCFLDDGCGMSPEEASDIIYFGRSKKRLSTLKFIGQYGNGLKSGSMRIGKDFILFTKKEETMTCVFFSQTFCEEESLSEVVVPMPSWLIRTRESVTDDPQKFAMELSIIYKYSPFKTEAELMQQFDVIYGKCGTLLVIYNLKLLLNGEPELDVKTDKEDILMAGALEDFPARWSFRAYTSVLYFNPWMRIFIQAKRVKTKHLCYCLYRPRKYLYVTSSFKGAFKDEVKKAEEAVKIAESILKEAQIKVNQCDRTSLSSAKDVLQRALEDVEAKQKNLKEKQRELKTARTLSLFYGVNVENRSQAGMFIYSNNRLIKMHEKVGSQLKLKSLLGAGVVGIVNIPLEVMEPSHNKQEFLNVQEYNHLLKVMGQYLVQYCKDTGINNRNLTLFCNEFGYQNDIDVEKPLNSFQYQRRQAMGIPFIIQCDLCLKWRVLPSSTNYQEKEFFDIWICANNPNRLENSCHQVECLPSIPLGTMSTISPSKNEKEKQLRESVIKYQNRLAEQQPQPQFIPVDEITVTSTCLTSAHKENTKTQKIRLLGDDLKHESLSSFELSASRRGQKRNIEETDSDVEYISETKIMKKSMEEKMNSQQQRIPVALPENVKLAERSQRSQIANITTVWRAQPTEGCLKNAQAASWEMKRKQSLNFVEECKVLTEDENTSDSDIILVSDKSNTDVSLKQEKKEIPLLNQEKQELCNDVLAMKRSSSLPSWKSLLNVPMEDVNLSSGHIARVSVSGSCKVASSPASSQSTPVKETVRKLKSKLREILLYFFPEHQLPSELEEPALSCELEQCPEQMNKKLKMCFNQIQNTYMVQYEKKIKRKLQSIIYDSNTRGIHNEISLGQCENKRKISEDKLKNLRIKLALLLQKLQLGGPEGDLEQTDTYLEALLKEDNLLFQNNLNKVTIDARHRLPLEKNEKTSEN

SEQ ID NO: 29078 - protein, 51 aa, Artificial Sequence
  Synthetic polypeptide
PAPLTVSFLEHWLNCWTMQEMQGLKDLMSFQWIMKNCRGDSCCVSWMMDVA

SEQ ID NO: 29079 - protein, 948 aa, Artificial Sequence
  Synthetic polypeptide
CLPLIASTTHSFLFGALAELLDNARDAGAERLDVFSVDNEKLQGGFMLCFLDDGCGMSPEEASDIIYFGRSKKRLSTLKFIGQYGNGLKSGSMRIGKDFILFTKKEETMTCVFFSQTFCEEESLSEVVVPMPSWLIRTRESVTDDPQKFAMELSIIYKYSPFKTEAELMQQFDVIYGKCGTLLVIYNLKLLLNGEPELDVKTDKEDILMAGALEDFPARWSFRAYTSVLYFNPWMRIFIQAKRVKTKHLCYCLYRPRKYLYVTSSFKGAFKDEVKKAEEAVKIAESILKEAQIKVNQCDRTSLSSAKDVLQRALEDVEAKQKNLKEKQRELKTARTLSLFYGVNVENRSQAGMFIYSNNRLIKMHEKVGSQLKLKSLLGAGVVGIVNIPLEVMEPSHNKQEFLNVQEYNHLLKVMGQYLVQYCKDTGINNRNLTLFCNEFGYQNDIDVEKPLNSFQYQRRQAMGIPFIIQCDLCLKWRVLPSSTNYQEKEFFDIWICANNPNRLENSCHQVECLPSIPLGTMSTISPSKNEKEKQLRESVIKYQNRLAEQQPQENTKTQKIRLLGDDLKHESLSSFELSASRRGQKRNIEETDSDVEYISETKIMKKSMEEKMNSQQQRIPVALPENVKLAERSQRSQIANITTVWRAQPTEGCLKNAQAASWEMKRKQSLNFVEECKVLTEDENTSDSDIILVSDKSNTDVSLKQEKKEIPLLNQEKQELCNDVLAMKRSSSLPSWKSLLNVPMEDVNLSSGHIARVSVSGSCKVASSPASSQSTPVKETVRKLKSKLREILLYFFPEHQLPSELEEPALSCELEQCPEQMNKKLKMCFNQIQNTYMVQYEKKIKRKLQSIIYDSNTRGIHNEISLGQCENKRKISEDKLKNLRIKLALLLQKLQLGGPEGDLEQTDTYLEALLKEDNLLFQNNLNKVTIDARHRLPLEKNEKTSEN

SEQ ID NO: 29080 - protein, 50 aa, Artificial Sequence
  Synthetic polypeptide
QPYGMFLSLRFLSHYSVKSLFSYHSILNGHLSPATPQIPLSFIFLYGIKV

SEQ ID NO: 29081 - protein, 309 aa, Artificial Sequence
  Synthetic polypeptide
MAISPQPPHRFLSASFFFMESKFKETGVITPEEFVAAGDHLVHHCPTWQWATGEELKVKAYLPTGKQFLVTKNVPCYKRCKQMEYSDELEAIIEEDDGDGGWVDTYHNTGITGITEAVKEITLENKDNIRLQDCSALCEEEEDEDEGEAADMEEYEESGLLETDEATLDTRKIVEACKAKTDAGGEDAILQTRTYDLYITYDKYYQTPRLWLFGYDEQRQPLTVEHMYEDISQDHVKKTVTIENHPHLPPPPMCSVHPCRHAEVMKKIIETVAEGGGELGVHMYLLIFLKFVQAVIPTIEYDYTRHFTM

SEQ ID NO: 29082 - protein, 83 aa, Artificial Sequence
  Synthetic polypeptide
SLYYSVKHTLGLGFCMCSSLYLKRASHLTALWHVPFLKVFKSLFSEVFVLLPFYFKWPSLPSHPTDSSQLHFSLWNQSLRKQV

SEQ ID NO: 29083 - protein, 306 aa, Artificial Sequence
  Synthetic polypeptide
MAISPQPPHRFLSASFFFMESKFKETGVITPEEFVAAGDHLVHHCPTWQWATGEELKVKAYLPTGKQFLVTKNVPCYKRCKQMEYSDELEAIIEEDDGDGGWVDTYHNTGITGITEAVKEITLENKDNIRLQDCSALCEEEEDEDEGEAADMEEYEESGLLETDEATLDTRKIVEACKAKTDAGGEDAILQTRTYDLYITYDKYYQTPRLWLFGYDEQRQPLTVEHMYEDISQDHVKKTVTIENHPHLPPPPMCSVHPCRHAEVMKKIIETVAEGGGELGVHMYPSLYVRLVAKWLLTIFFLRNLV

SEQ ID NO: 29084 - protein, 69 aa, Artificial Sequence
  Synthetic polypeptide
MAISPQPPHRFLSASFFFMESKFKETGVITPEEFVAAGDHLVHHCPTWQWATGEELKVKAYLPTDGIFR

SEQ ID NO: 29085 - protein, 20 aa, Artificial Sequence
  Synthetic polypeptide
GRTITQTQEAELEENIFISG

SEQ ID NO: 29086 - protein, 130 aa, Artificial Sequence
  Synthetic polypeptide
KYKKKKISQAWWHMPVIPTPQETEAGQSLKPRRQSLKRTFLLVDSVVGIQKTDNIAIEMCEEFALPYVIVLTKIDKSSKGHLLKQVLQIQKFVNMKTQGCFPQLFPVSAVTFSGIHLLRCFIASVTGSLD

SEQ ID NO: 29087 - protein, 19 aa, Artificial Sequence
  Synthetic polypeptide
SQLLRRLRQDNHSNPGGRA

SEQ ID NO: 29088 - protein, 44 aa, Artificial Sequence
  Synthetic polypeptide
KYKKKKISQAWWHMPVIPTPQETEAGQSLKPRRQSLKRTFLLVD

SEQ ID NO: 29089 - protein, 543 aa, Artificial Sequence
  Synthetic polypeptide
CRESIWNTAWHDLCIAAVIKECHLVILSLKSQTLDAETDVLCAVLYSNHNRMGRHKPHLALKQVEQCLKRLKNMNLEGSIQDLFELFSSNENQPLTTKVCVVPSQPVVELVLMKVLGACKLLLRLLDCCCKTFLLTVKHLGLQEFIILNLVMVGLVSRLWVLYKGVLKRLILLYEPLFGLLQEVARIQPMPYFKDFTFPSDITEFLGQPYFEAFKKKMPIAFAAKGINKLLNKLFLINEQSPRASEETLLGISKKAKQMKINVQNNVDLGQPVKNKRVFKEESSEFDVRAFCNQLKHKATQETSFDFKCSQSRLKTTKYSSQKVIGTPHAKSFVQRFREAESFTQLSEEIQMAVVWCRSKKLKAQAIFLGNKLLKSNRLKHLEAQGTSLPKKLECIKTSICNHLLRGSGIKTSKHHLRQRRSQNKFLRRQRKPQRKLQSTLLREIQQFSQGTRKSATDTSAKWRLSHCTVHRTDLYPNSKQLLNSGVSMPVIQTKEKMIHENLRGIHENETDSWTVMQINKNSTSGTIKETDDIDDIFALMGV

SEQ ID NO: 29090 - protein, 33 aa, Artificial Sequence
  Synthetic polypeptide
KHLPHRAVWGDERVDNVEKAFGTLPGMTFALQL

SEQ ID NO: 29091 - protein, 473 aa, Artificial Sequence
  Synthetic polypeptide
CRESIWNTAWHDLCIAAVIKECHLVILSLKSQTLDAETDVLCAVLYSNHNRMGRHKPHLALKQVEQCLKRLKNMNLEGSIQDLFELFSSKVLYKGVLKRLILLYEPLFGLLQEVARIQPMPYFKDFTFPSDITEFLGQPYFEAFKKKMPIAFAAKGINKLLNKLFLINEQSPRASEETLLGISKKAKQMKINVQNNVDLGQPVKNKRVFKEESSEFDVRAFCNQLKHKATQETSFDFKCSQSRLKTTKYSSQKVIGTPHAKSFVQRFREAESFTQLSEEIQMAVVWCRSKKLKAQAIFLGNKLLKSNRLKHLEAQGTSLPKKLECIKTSICNHLLRGSGIKTSKHHLRQRRSQNKFLRRQRKPQRKLQSTLLREIQQFSQGTRKSATDTSAKWRLSHCTVHRTDLYPNSKQLLNSGVSMPVIQTKEKMIHENLRGIHENETDSWTVMQINKNSTSGTIKETDDIDDIFALMGV

SEQ ID NO: 29092 - protein, 214 aa, Artificial Sequence
  Synthetic polypeptide
CRESIWNTAWHDLCIAAVIKECHLVILSLKSQTLDAETDVLCAVLYSNHNRMGRHKPHLALKQVEQCLKRLKNMNLEGSIQDLFELFSSKVLYKGVLKRLILLYEPLFGLLQEVARIQPMPYFKDFTFPSDITEFLGQPYFEAFKKKMPIAFAAKGINKLLNKLFLINEQSPRASEETLLGISKKAKQMKINVQNNVDLGQPVKNKRVFKGDQF

SEQ ID NO: 29093 - protein, 90 aa, Artificial Sequence
  Synthetic polypeptide
CRESIWNTAWHDLCIAAVIKECHLVILSLKSQTLDAETDVLCAVLYSNHNRMGRHKPHLALKQVEQCLKRLKNMNLEGSIQDLFELFSSK

SEQ ID NO: 29094 - protein, 1249 aa, Artificial Sequence
  Synthetic polypeptide
HLCRTSAITIYIYLPDLLNDKLPLEPESTLLIICENGYILEAPLPTIKQEEDDHDVVSYEIKDMCIKCFHFSSVKSKILRLIEIEKRERQRELKEKIREERRNKLAAEMGEDGEKEFQEEEEEKEEEEEEEEPLPEIFIPSTPSPILCGFYSEPGKFWVSLGGYDSGFLYHCEFPPCDESSDFKEQKDEPIDVRYLADTEDNPIQTITFNINKVMMFCGMKNGAIRVYVLNQNDPSLTSLVDYWHFNMHDNNYGCIKSIANSFDDRFLVTAGADGNIFVFNIFSEFMLRKDMKAKVPSPRFGIETEPIPEDIEDPKAYSIENARRKREHDKLMKEVGEIKARKREQIKALRSEFCNLLEMNEKLPKHMQFKRTDFDVDSQIRAEMHRKTAFKIQQVEKELAWEKEKHELGLMKLKNRFRDPLESDTIVVHAILSDHKISSYRLVQPSKYSKFKRASQSERKPSKLDRFEKEGPGRKDSQRDAGGSVTIQEESIIEKGKKFRPKTLSEIIVENQIEKTRKLILKAERAQLKIQQRKKEWEELYKSKPGDDYEDPKDLQAIKEAQVYMGDFNLKTAPDYKIPEHMRINAAKKEEELGHLDSLVHGNKRHMNKCILSLRDLKVAVVEEIQCLVQELKNIQSTLHISKHIPIPKIPQIHPEEVPEKRFQYDEETLLNFKQQQMKSKDEKSPGVEQTGSGGPVGGFLKLSSRKDGDLTTRDSISRSSKASTFSLDIPKCLEFEKAEPTDVELEIMKRDEIKHVYMQQYLVNRIKELVVTFDAELRLLRHQKLKLDTQMKLSDLHHVTLFQEILLLKNFEKQENILQERVNSLDKEEQYMQWKINETLKEMEEKKNEITKLQEQEKALYAGFQAAIGENNKFANFLMKVLKKKIKRVKKKEVEGDADEDEESEESSEEESSLESDEDESESEDEVFDDSICPTNCDVALFELALHLREKRLDIEEALVEEKKIVDNLKKEYDTLSKKVKIVATNLNAAEEALEAYQREKQQRLNELLVVIPLKLHQIEYVVFGEIPSDLSGTLVFSNHALRRLQERIHELQEENSKQQKLNKEWRERRKQLIREKREMTKTIHKMEETVRQLMISKFGRVVNLEALQTLSVNTTLEELKIRKLRKELANAKEMKMWEEKIAQMRWELMMKTKEHTRKLYQMNDLCIEKKKLDSRLNTLQNQQGNAFQGPREADVVAREEVTELIQLQAERISALKEEIALLRRKGSLILPPIQSPREKEIQPADL

SEQ ID NO: 29095 - protein, 12 aa, Artificial Sequence
  Synthetic polypeptide
MTSFHWSLKVLY

SEQ ID NO: 29096 - protein, 6 aa, Artificial Sequence
  Synthetic polypeptide
QASIGA

SEQ ID NO: 29097 - protein, 377 aa, Artificial Sequence
  Synthetic polypeptide
HLCRTSAITIYIYLPDLLNDKLPLEPESTLLIICENGYILEAPLPTIKQEEDDHDVVSYEIKDMCIKCFHFSSVKSKILRLIEIEKRERQRELKEKIREERRNKLAAEMGEDGEKEFQEEEEEKEEEEEEEEPLPEIFIPSTPSPILCGFYSEPGKFWVSLGGYDSGFLYHCEFPPCDESSDFKEQKDEPIDVRYLADTEDNPIQTITFNINKVMMFCGMKNGAIRVYVLNQNDPSLTSLVDYWHFNMHDNNYGCIKSIANSFDDRFLVTAGADGNIFVFNIFSEFMLRKDMKAKVPSPRFGIETEPIPEDIEDPKAYSIENARRKREHDKLMKEVGEIKARKREQIKALRSEFCNLLEMNEKLPKHMQFKRTVSLI

SEQ ID NO: 29098 - protein, 26 aa, Artificial Sequence
  Synthetic polypeptide
SLEALEIWWHLIPLLPAHPKGAIMGQ

SEQ ID NO: 29099 - protein, 38 aa, Artificial Sequence
  Synthetic polypeptide
SQHFERPRQADHLRLWKYGGISSHCCQHTRREQLWDNR

SEQ ID NO: 29100 - protein, 38 aa, Artificial Sequence
  Synthetic polypeptide
SLEVGSSRPAWPTWLWKYGGISSHCCQHTRREQLWDNR

SEQ ID NO: 29101 - protein, 503 aa, Artificial Sequence
  Synthetic polypeptide
SQHFERPRQADHLRWGVQDQPGQHGSGNMVASHPIAASTPEGSNYGTIDESSSSPGRQMSSSDGGPPGQSDTDSSVEESDFDTMPDIESDKNIIRTKMFLYLSDLSRKDRRIVSKKYKIYFWNIITIAVFYALPVIQLVITYQTVVNVTGNQDICYYNFLCAHPLGVLSAFNNILSNLGHVLLGFLFLLIVLRRDILHRRALEAKDIFAVEYGIPKHFGLFYAMGIALMMEGVLSACYHVCPNYSNFQFDTSFMYMIAGLCMLKLYQTRHPDINASAYSAYASFAVVIMVTVLGVVFGKNDVWFWVIFSAIHVLASLALSTQIYYMGRFKIDLGIFRRAAMVFYTDCIQQCSRPLYMDRMVLLVVGNLVNWSFALFGLIYRPRDFASYMLGIFICNLLLYLAFYIIMKLRSSEKVLPVPLFCIVATAVMWAAALYFFFQNLSSWEGTPAESREKNRECILLDFFDDHDIWHFLSATALFFSFLVLLTLDDDLDVVRRDQIPVF

SEQ ID NO: 29102 - protein, 34 aa, Artificial Sequence
  Synthetic polypeptide
GGEFKTSLANMALEIWWHLIPLLPAHPKGAIMGQ

SEQ ID NO: 29103 - protein, 508 aa, Artificial Sequence
  Synthetic polypeptide
SQHFERPRQADHLRWGVQDQPGQHGSGNMVASHPIAASTPEGSNYGTIDESSSSPGRQMSSSDGGPPGQSDTDSSVEESDFDTMPDIESDKNIIRTKMFLYLSDLSRKDRRIVSKKYKIYFWNIITIAVFYALPVIQLVITYQTVVNVTGNQDICYYNFLCAHPLGVLSAFNNILSNLGHVLLGFLFLLIVLRRDILHRRALEAKDIFAVEYGIPKHFGLFYAMGIALMMEGVLSACYHVCPNYSNFQFDTSFMYMIAGLCMLKLYQTRHPDINASAYSAYASFAVVIMVTVLGVVFGKNDVWFWVIFSAIHVLASLALSTQIYYMGRFKIAITPTDLGIFRRAAMVFYTDCIQQCSRPLYMDRMVLLVVGNLVNWSFALFGLIYRPRDFASYMLGIFICNLLLYLAFYIIMKLRSSEKVLPVPLFCIVATAVMWAAALYFFFQNLSSWEGTPAESREKNRECILLDFFDDHDIWHFLSATALFFSFLVLLTLDDDLDVVRRDQIPVF

SEQ ID NO: 29104 - protein, 13 aa, Artificial Sequence
  Synthetic polypeptide
YAQHRVAGSSWEM

SEQ ID NO: 29105 - protein, 203 aa, Artificial Sequence
  Synthetic polypeptide
NCKQLLFNKRINLQYIHIMEYHSALTRNELLICTTPGSRIELGDVTPHNIKQLKRLNQVIFPVSYNDKFYKDVLEVGELAKLAYFNDIAVGAVCCRVDHSQNQKRLYIMTLGCLAPYRRLGIGTKMLNHVLNICEKDGTFDNIYLHVQISNESAIDFYRKFGFEIIETKKNYYKRIEPADAHVLQKNLKVPSGQNADVQKTDN

SEQ ID NO: 29106 - protein, 163 aa, Artificial Sequence
  Synthetic polypeptide
NCKQLLFNKRINLQYIHIMEYHSALTRNELLICTTPGSRIELGDVTPHNIKQLKRLNQVIFPVSYNDKFYKDVLEVGELAKLGTKMLNHVLNICEKDGTFDNIYLHVQISNESAIDFYRKFGFEIIETKKNYYKRIEPADAHVLQKNLKVPSGQNADVQKTDN

SEQ ID NO: 29107 - protein, 82 aa, Artificial Sequence
  Synthetic polypeptide
NCKQLLFNKRINLQYIHIMEYHSALTRNELLICTTPGSRIELGDVTPHNIKQLKRLNQVIFPVSYNDKFYKDVLEPISMILL

SEQ ID NO: 29108 - protein, 153 aa, Artificial Sequence
  Synthetic polypeptide
WLPGAGGGEKGQLLFNGCFRLARWKSSRDLFHSNASLAETDKITLEVAKLIKDDFLQQNGYTPYDRFCPFYKTVGMLSNMIAFYDMARRAVETTAQSDNKITWSIIREHMGDILYKLSSMKFKDPLKDGEAKIKSDYAQLLEDMQNAFRSLED

SEQ ID NO: 29109 - protein, 48 aa, Artificial Sequence
  Synthetic polypeptide
NSGYQGLGEERKDSYCLMDVSDLQDGKALEICFTVMLLWQKQIKSLWR

SEQ ID NO: 29110 - protein, 666 aa, Artificial Sequence
  Synthetic polypeptide
VTEEKKRQEENSQNSSEKVMFQSTHILPDEEKMVKERKRKLKEVLIQTFKENQQCQKRYFAAWHKLILDHRIKLGKAGTLSDWKIQLKVLRAWRDYTRFQKLERETQALENDLREENRKQQLATEYNRKQVLRHCFTEWQHWHGAELLKRELALTKEETRKKMDALLQAASLGKLSANGLSGISLPEEATAMVGPPVKNGQETAVPPLWEKPPLGSSGCMLSPPLGRTTTGNLQGSLQNVSLSAPGNKQHKTLGAEPSQQPGSNETLRTTSQKAEPLCLGHFHNRHVFQQQLIEKQKKKLQEQQKTILELKKNLQLAEAQWAAEHALAVTEAQSHLLSKPREEEPRTCQMLVNSPVASPGTEGRSDSRNSLSGLRRKPKQLMTPHPILKAMEERAIQRAECRRILAEKKKKQEEEKLAQLKAQEEERQKREAEEKEAQLERKREEKRLKKMKELEKQKRIKRNQQLEAIAKEHYERVLLRKKGLEPWKRLRMQSKQNIQVAEEHYSLFLQRKYMLTWFQRSQESLARKMAQADQFYSQILLKRVIQSWLQYVIDLQEEVRKFCVHFLQKKIFRAWFNMVREVKIDSQGKHEIAAEHSDRRILWITLRTWKKFVKFMKEERVKEERRQQLRRKVVEILPDFQVPGRYHELYQQSDTWSLSKTSLVNE

SEQ ID NO: 29111 - protein, 32 aa, Artificial Sequence
  Synthetic polypeptide
QKRRKGKKRILKIVQKKSCFKVLTFFQMRKKW

SEQ ID NO: 29112 - protein, 24 aa, Artificial Sequence
  Synthetic polypeptide
AEIMPLHSSLSDRREEKARREFSK

SEQ ID NO: 29113 - protein, 413 aa, Artificial Sequence
  Synthetic polypeptide
VTEEKKRQEENSQNSSEKVMFQSTHILPDEEKMVKERKRKLKEVLIQTFKENQQCQKRYFAAWHKLILDHRIKLGKAGTLSDWKIQLKVLRAWRDYTRFQKLERETQALENDLREENRKQQLATEYNRKQVLRHCFTEWQHWHGAELLKRELALTKEETRKKMDALLQAASLGKLSANGLSGISLPEEATAMVGPPVKNGQETAVPPLWEKPPLGSSGCMLSPPLGRTTTGNLQGSLQNVSLSAPGNKQHKTLGAEPSQQPGSNETLRTTSQKAEPLCLGHFHNRHVFQQQLIEKQKKKLQEQQKTILELKKNLQLAEAQWAAEHALAVTEAQSHLLSKPREEEPRTCQMLVNSPVASPGTEGRSDSRNSLSGLRRKPKQLMTPHPILKGRAVSVVALVVVIFSPRVECVHWD

SEQ ID NO: 29114 - protein, 352 aa, Artificial Sequence
  Synthetic polypeptide
VTEEKKRQEENSQNSSEKVMFQSTHILPDEEKMVKERKRKLKEVLIQTFKENQQCQKRYFAAWHKLILDHRIKLGKAGTLSDWKIQLKVLRAWRDYTRFQKLERETQALENDLREENRKQQLATEYNRKQVLRHCFTEWQHWHGAELLKRELALTKEETRKKMDALLQAASLGKLSANGLSGISLPEEATAMVGPPVKNGQETAVPPLWEKPPLGSSGCMLSPPLGRTTTGNLQGSLQNVSLSAPGNKQHKTLGAEPSQQPGSNETLRTTSQKAEPLCLGHFHNRHVFQQQLIEKQKKKLQEQQKTILELKKNLQLAEAQWAAEHALAVTEAQSHLLSKPREEEPRTCQMLV

SEQ ID NO: 29115 - protein, 86 aa, Artificial Sequence
  Synthetic polypeptide
TSSCQKTGARYQEDFNPLVRGCSCYCCKNHTRAYIHHLLVTNELLAGVLLMMHNFEHYFGFFHYIREALKSDKLAQLKELIHRQAS

SEQ ID NO: 29116 - protein, 21 aa, Artificial Sequence
  Synthetic polypeptide
ICRLRLVRRLEPGTRRTLTRW

SEQ ID NO: 29117 - protein, 32 aa, Artificial Sequence
  Synthetic polypeptide
SQIRFQKNSLFSSDEFVDFVLSEDWSQVPGGL

SEQ ID NO: 29118 - protein, 241 aa, Artificial Sequence
  Synthetic polypeptide
GGKKLEQNARGFNMSIPMPGHPVNFSSVTLEQARRDVEQLEQLIESHDVVFLLMDTRESRWLPAVIAASKRKLVINAALGFDTFVVMRHGLKKPKQQGAGDLCPNHPVASADLLGSSLFANIPGYKLGCYFCNDVVAPGDSTRDRTLDQQCTVSRPGLAVIAGALAVELMVSVLQHPEGGYAIASSSDDRMNEPPTSLGLVPHQIRGFLSRFDNVLPVSLAFDKCTACSSKIWDMSDDETI

SEQ ID NO: 29119 - protein, 65 aa, Artificial Sequence
  Synthetic polypeptide
LYKNLKLLLLKRCLSKKGKTSQTEKTCAVLLSRTRKMNNSYHSRHTKQLVFKGEKSLNRMPEDST

SEQ ID NO: 29120 - protein, 41 aa, Artificial Sequence
  Synthetic polypeptide
TECQRIQHEHTYAWASSELLQCHSGASPQRCGATGAAHRKP

SEQ ID NO: 29121 - protein, 255 aa, Artificial Sequence
  Synthetic polypeptide
GGKKLEQNARGFNMSIPMPGHPVNFSSVTLEQARRDVEQLEQLIESHDVVFLLMDTRESRWLPAVIAASKRKLVINAALGFDTFVVMRHGLKKPKQQGAGDLCPNHPVASADLLGSSLFANIPGYKLGCYFCNDVVAPGDSTRDRTLDQQCTVSRPGLAVIAGALAVELMVSVLQHPEGGYAIASSSDDRMNEPPTSLGLVPHQVLDQYEREGFNFLAKVFNSSHSFLEDLTGLTLLHQETQAAEIWDMSDDETI

SEQ ID NO: 29122 - protein, 282 aa, Artificial Sequence
  Synthetic polypeptide
GGKKLEQNARGFNMSIPMPGHPVNFSSVTLEQARRDVEQLEQLIESHDVVFLLMDTRESRWLPAVIAASKRKLVINAALGFDTFVVMRHGLKKPKQQGAGDLCPNHPVASADLLGSSLFANIPGYKLGCYFCNDVVAPGDSTRDRTLDQQCTVSRPGLAVIAGALAVELMVSVLQHPEGGYAIASSSDDRMNEPPTSLGLVPHQIRGFLSRFDNVLPVSLAFDKCTACSSKVLDQYEREGFNFLAKVFNSSHSFLEDLTGLTLLHQETQAAEIWDMSDDETI

SEQ ID NO: 29123 - protein, 43 aa, Artificial Sequence
  Synthetic polypeptide
GLSSHVEWLKKMMTTKRLNKMVSNQKIKLIRPQPKFRLASVDT

SEQ ID NO: 29124 - protein, 42 aa, Artificial Sequence
  Synthetic polypeptide
VFGRYPFTALSLLLSCEEGALFPFTFHHDCKFPEASPAMWNG

SEQ ID NO: 29125 - protein, 273 aa, Artificial Sequence
  Synthetic polypeptide
WFYKCLEDTPSRHSPSCCLVKKVPCSPSPSTMIVSFLRPLQPCGMVEKNDDDQKIEQDGIKPEDKAHKAATKIQASFRGHITRKKLKGEKKDDVQAAEAEANKKDEAPVADGVEKKGEGTTTAEAAPATGSKPDEPGKAGETPSEEKKGEGDAATEQAAPQAPASSEEKAGSAETESATKASTDNSPSSKAEDAPAKEEPKQADVPAAVTAAAATTPAAEDAAAKATAQPPTETGESSQAEENIEAVDETKPKESARQDEGKEEEPEADQEHA

SEQ ID NO: 29126 - protein, 18 aa, Artificial Sequence
  Synthetic polypeptide
FYIMVTFGWWLEKIKQKC

SEQ ID NO: 29127 - protein, 15 aa, Artificial Sequence
  Synthetic polypeptide
LQENNLRTPTDSTLW

SEQ ID NO: 29128 - protein, 196 aa, Artificial Sequence
  Synthetic polypeptide
TAYMRNLGCRLFMRIKCLICHCLPSPPEGLSSCRKIISGLPLILHYGDFRMVVGEDKTKVLNIVKPNIAHFRELYGSILQENPQVVYKSQQGWLEIDKSPEGQFTQLMTLPKTLQQQINHIMDPPGKNRDVEETLFQVAHDPDCGDVVRLGLSAIVRPSSIRQSTKGIFTAGLKKSVIYSSLKLHKMWKGWLRKTS

SEQ ID NO: 29129 - protein, 175 aa, Artificial Sequence
  Synthetic polypeptide
TAYMRNLGCRLFMRIKCLICHCLPSPPEGLSSCRKIISGLPLILHYGDFRMVVGEDKTKVLNIVKPNIAHFRELYGSILQENPQVVYKSQQGWLEIDKSPEGQFTQLMTLPKTLQQQINHIMDPPGKNRDVEETLFQVAHDPDCGDVVRLGLKKSVIYSSLKLHKMWKGWLRKTS

SEQ ID NO: 29130 - protein, 101 aa, Artificial Sequence
  Synthetic polypeptide
TAYMRNLGCRLFMRIKCLICHCLPSPPEGLSSCRKIISGLPLILHYGDFRMVVGEDKTKVLNIVKPNIAHFRELYGSILQENPQVVYKSQQGWLEVTVCGK

SEQ ID NO: 29131 - protein, 311 aa, Artificial Sequence
  Synthetic polypeptide
TAYMRNLGCRLFMRIKCLICHCLPSPPEGLSSCRKIISGLPLILHYGDFRMVVGEDKTKVLNIVKPNIAHFRELYGSILQENPQVVYKSQQGWLEIDKSPEGQFTQLMTLPKTLQQQINHIMDPPGKNRDVEETLFQVAHDPDCGDVVRLGLSAIVRPSSIRQSTKGIFTAGKSFGNPCVTYLLTEWLPHSWLQCKALYLLGACEMLSFDGHKLGYCSKVQTGITAAEPGGRTMSDHWQCCWKLYCPSEFSETLPVCRVFPSYCFIYQSYRCIGLQKQQHLCSPSSSPSLRQLLPSVLVGYFCCYCHFSKW

SEQ ID NO: 29132 - protein, 82 aa, Artificial Sequence
  Synthetic polypeptide
LMPVIPALWEAEADRSLEAKSSRTAWTTWQNPISTKNTIINWALRHAPVIPATREAEAGESLELGRQRPLWQCPKSSLAFHS

SEQ ID NO: 29133 - protein, 33 aa, Artificial Sequence
  Synthetic polypeptide
SQLLGRLRQENRWNLGGRGLSGSVPRVHWLFTL

SEQ ID NO: 29134 - protein, 25 aa, Artificial Sequence
  Synthetic polypeptide
GRRIAGTWEAEASLAVSQEFTGFSL

SEQ ID NO: 29135 - protein, 308 aa, Artificial Sequence
  Synthetic polypeptide
HFGRPRWADHLRFGVYVPLCCFHQDSRAHLLLTDYNYVVQHEAVEESASTVGGLAKSKDFLSLLLESLKEQFNNATPIPTHSCPLSPDLIRNEVECLKADFNHRIKEVLFNSLFSAYYVAFLPLCFVKSTQYYDMRWSCEHLIMVWINAFVMLTTQLLPSKYCDLLHKSAAHLGKWQKLEHGSYSNAPQHIWSENTIWPQGVLVRHSRCLYRAMGPYNVAVPSDVSHARFYFLFHRPLRLLNLLILIEGSVVFYQLYSLLRSEKWNHTLSMALILFCNYYVLFKLLRDRIVLGRAYSYPLNSYELKAN

SEQ ID NO: 29136 - protein, 35 aa, Artificial Sequence
  Synthetic polypeptide
RARWLKPVILALWEAEVGRSPEVWCLCSSLLFSSR

SEQ ID NO: 29137 - protein, 139 aa, Artificial Sequence
  Synthetic polypeptide
HFGRPRWADHLRFGVYVPLCCFHQDSRAHLLLTDYNYVVQHEAVEESASTVGGLAKSKDFLSLLLESLKEQFNNATPIPTHSCPLSPDLIRNEVECLKADFNHRIKEVLFNSLFSAYYVAFLPLCFVKSTQYYDMRWSC

SEQ ID NO: 29138 - protein, 150 aa, Artificial Sequence
  Synthetic polypeptide
SLNEDTLGKPAAKDVHLVDHCKYKYLFNFRGVAASFRFKHLFLCGSLVFHVGDEWLEFFYPQLKPWVHYIPVKTDLSNVQELLQFVKANDDVAQEIAERGSQFIRNHLQMDDITCYWENLLSEYSKFLSYNVTRRKGYDQIIPKMLKTEL

SEQ ID NO: 29139 - protein, 4 aa, Artificial Sequence
  Synthetic polypeptide
MRIP

SEQ ID NO: 29140 - protein, 53 aa, Artificial Sequence
  Synthetic polypeptide
PWGSQFIRNHLQMDDITCYWENLLSEYSKFLSYNVTRRKGYDQIIPKMLKTEL

SEQ ID NO: 29141 - protein, 45 aa, Artificial Sequence
  Synthetic polypeptide
SQHSGRPRWADHLRSEVQDQPSHGEASLLGTICRWMTSPVTGRTS

SEQ ID NO: 29142 - protein, 15 aa, Artificial Sequence
  Synthetic polypeptide
GQKFKTSLAMGKPVY

SEQ ID NO: 29143 - protein, 17 aa, Artificial Sequence
  Synthetic polypeptide
QCRTYHRERRRTLWTSN

SEQ ID NO: 29144 - protein, 38 aa, Artificial Sequence
  Synthetic polypeptide
VSWSLPSNAELIIEKGEEHCGHLIEAHKECMRALGFKI

SEQ ID NO: 29145 - protein, 57 aa, Artificial Sequence
  Synthetic polypeptide
SDGFISGISPVGTHSVLPSCKEGPCFSFAFHHDCKSPGASLAMQNLSSRKEKNTVDI

SEQ ID NO: 29146 - protein, 41 aa, Artificial Sequence
  Synthetic polypeptide
VAFPLLALTPSYHLVKKVPASHLPSTMIYHRERRRTLWTSN

SEQ ID NO: 29147 - protein, 45 aa, Artificial Sequence
  Synthetic polypeptide
SDGFISGISPVGTHSVLPSCKEGPCFSFAFHHDLSSRKEKNTVDI

SEQ ID NO: 29148 - protein, 54 aa, Artificial Sequence
  Synthetic polypeptide
KTESFPIRIRKKTRYPLSRLLFNTGGFSQCNKDCEDVQSQSEHCDLTGQLSHLQ

SEQ ID NO: 29149 - protein, 784 aa, Artificial Sequence
  Synthetic polypeptide
CASIKKPIPNIIFNGKRPNPFPLGSERRQDIHSHDFYSTLEVLASAIRIVKMSSPNLNIVTLLGSCLTYSSAYLFGIQDVLVGSSMETLIQTRLSMLCIGTSLVFGPILGKSWRLYKVFTQRVPDKRVIIKDLQLLGLVAALLMADVILLMTWVLTDPIQCLQILSVSMTVTGKDVSCTSTSTHFCASRYSDVWIALIWGCKGLLLLYGAYLAGLTGHVSSPPVNQSLTIMVGVNLLVLAAGLLFVVTRYLHSWPNLVFGLTSGGIFVCTTTINCFIFIPQLKQWKAFEEENQTIRRMAKYFSTPNKSFHTQYGEEENCHPRGEKSSMERLLTEKNAVIESLQEQVNNAKEKIVRLMSAECTYDLPEGAAPPASSPNKDVQAVASVHTLAAAQGPSGHLSDFQNDPGMAARDSQCTSGPSSYAQSLEGPGKDSSFSPGKEEKISDSKDFSDHLDSGCSQKPWTEQSLGPERGDQVPMNPSQSLLPERGGSDPQRQRHLENSEEPPERRSRVSSVIREKLQEVLQDLGLGPEASLSTAPSCHQQTWKNSAAFSPQKMPLSKELGFSPYMVRRRRAAQRARSHFPGSAPSSVGHRANRTVPGAHSRLHVQNGDSPSLAPQTTDSRVRRPSSRKPSLPSDPQDRPGTLEGSKQSQTEPEGARGSKAAFLRQPSGSGRAPSPAAPCLSKASPDLPEQWQLWPPVPSGCASLSSQHSYFDTESSSSDEFFCRCHRPYCEICFQSSSDSSDSGTSDTDPEPTGGLASWEKLWARSKPIVNFKDDLKPTLV

SEQ ID NO: 29150 - protein, 780 aa, Artificial Sequence
  Synthetic polypeptide
CASIKKPIPNIIFNGKRPNPFPLGSERRQDIHSHDFYSTLEVLASAIRIVKMSSPNLNIVTLLGSCLTYSSAYLFGIQDVLVGSSMETLIQTRLSMLCIGTSLVFGPILGKSWRLYKVFTQRVPDKRVIIKDLQLLGLVAALLMADVILLMTWVLTDPIQCLQILSVTGKDVSCTSTSTHFCASRYSDVWIALIWGCKGLLLLYGAYLAGLTGHVSSPPVNQSLTIMVGVNLLVLAAGLLFVVTRYLHSWPNLVFGLTSGGIFVCTTTINCFIFIPQLKQWKAFEEENQTIRRMAKYFSTPNKSFHTQYGEEENCHPRGEKSSMERLLTEKNAVIESLQEQVNNAKEKIVRLMSAECTYDLPEGAAPPASSPNKDVQAVASVHTLAAAQGPSGHLSDFQNDPGMAARDSQCTSGPSSYAQSLEGPGKDSSFSPGKEEKISDSKDFSDHLDSGCSQKPWTEQSLGPERGDQVPMNPSQSLLPERGGSDPQRQRHLENSEEPPERRSRVSSVIREKLQEVLQDLGLGPEASLSTAPSCHQQTWKNSAAFSPQKMPLSKELGFSPYMVRRRRAAQRARSHFPGSAPSSVGHRANRTVPGAHSRLHVQNGDSPSLAPQTTDSRVRRPSSRKPSLPSDPQDRPGTLEGSKQSQTEPEGARGSKAAFLRQPSGSGRAPSPAAPCLSKASPDLPEQWQLWPPVPSGCASLSSQHSYFDTESSSSDEFFCRCHRPYCEICFQSSSDSSDSGTSDTDPEPTGGLASWEKLWARSKPIVNFKDDLKPTLV

SEQ ID NO: 29151 - protein, 13 aa, Artificial Sequence
  Synthetic polypeptide
EMMSTKVPPTRKS

SEQ ID NO: 29152 - protein, 42 aa, Artificial Sequence
  Synthetic polypeptide
CLQRCLPQGRAKEQIQDLCQCVLWSRPGMCSHRERGTHLSLH

SEQ ID NO: 29153 - protein, 297 aa, Artificial Sequence
  Synthetic polypeptide
DDVYKGASHKEELRSKSKICANVFCGAGRECAVTEKGEPTCLCIEQCKPHKRPVCGSNGKTYLNHCELHRDACLTGSKIQVDYDGHCKEKKSVSPSASPVVCYQSNRDELRRRIIQWLEAEIIPDGWFSKGSNYSEILDKYFKNFDNGDSRLDSSEFLKFVEQNETAINITTYPDQENNKLLRGLCVDALIELSDENADWKLSFQEFLKCLNPSFNPPEKKCALEDETYADGAETEVDCNRCVCACGNWVCTAMTCDGKNQKGAQTQTEEEMTRYVQELQKHQETAEKTKRVSTKEI

SEQ ID NO: 29154 - protein, 128 aa, Artificial Sequence
  Synthetic polypeptide
DDVYKGASHKEELRSKSKICANVFCGAGRECAVTEKGEPTCLCIEQCKPHKRPVCGSNGKTYLNHCELHRDACLTGSKIQVDYDGHCKEKKSVSPSASPVVCYQSNRDELRRRIIQWLEAEIIPDGWF

SEQ ID NO: 29155 - protein, 32 aa, Artificial Sequence
  Synthetic polypeptide
ASPEAEAAMFPVQPAELLDGNHLRFQKHLRRK

SEQ ID NO: 29156 - protein, 21 aa, Artificial Sequence
  Synthetic polypeptide
KLSEPLQKQKLLCFLCSLQNS

SEQ ID NO: 29157 - protein, 384 aa, Artificial Sequence
  Synthetic polypeptide
DAPIISLPSAMIENFLSLSRSRSCYVSCAACRTLRWKPFEIPKASQKKVDFVSGLHTLCGAGDIKSNNGLAIHIFLCNTSMENRCFYNSDGDFLIVPQKGNLLIYTEFGKMLVQPNEICVIQRGMRFSIDVFEETRGYILEVYGVHFELPDLGPIGANGLANPRDFLIPIAWYEDRQVPGGYTVINKYQGKLFAAKQDVSPFNVVAWHGNYTPYKYNLKNFMVINSVAFDHADPSIFTVLTAKSVRPGVAIADFVIFPPRWGVADKTFRPPYYHRNCMSEFMGLIRGHYEAKQGGFLPGGGSLHSTMTPHGPDADCFEKASKVKLAPERIADGTMAFMFESSLSLAVTKWGLKASRCLDENYHKCWEPLKSHFTPNSRNPAEPN

SEQ ID NO: 29158 - protein, 122 aa, Artificial Sequence
  Synthetic polypeptide
DAPIISLPSAMIENFLSLSRSRSCYVSCAACRTLRWKPFEIPKASQKKVDFVSGLHTLCGAGDIKSNNGLAIHIFLCNTSMENRCFYNSDGDFLIVPQKGNLLIYTEFGKMLVQPNEICVIQ

SEQ ID NO: 29159 - protein, 355 aa, Artificial Sequence
  Synthetic polypeptide
PRGTLRWKPFEIPKASQKKVDFVSGLHTLCGAGDIKSNNGLAIHIFLCNTSMENRCFYNSDGDFLIVPQKGNLLIYTEFGKMLVQPNEICVIQRGMRFSIDVFEETRGYILEVYGVHFELPDLGPIGANGLANPRDFLIPIAWYEDRQVPGGYTVINKYQGKLFAAKQDVSPFNVVAWHGNYTPYKYNLKNFMVINSVAFDHADPSIFTVLTAKSVRPGVAIADFVIFPPRWGVADKTFRPPYYHRNCMSEFMGLIRGHYEAKQGGFLPGGGSLHSTMTPHGPDADCFEKASKVKLAPERIADGTMAFMFESSLSLAVTKWGLKASRCLDENYHKCWEPLKSHFTPNSRNPAEPN

SEQ ID NO: 29160 - protein, 23 aa, Artificial Sequence
  Synthetic polypeptide
GFPSHVELLDGNHLRFQKHLRRK

SEQ ID NO: 29161 - protein, 49 aa, Artificial Sequence
  Synthetic polypeptide
IPTCYGRDLVGGSLSAQALSLPAATQMRCDFLLLAFCYHCEAFLATWNS

SEQ ID NO: 29162 - protein, 93 aa, Artificial Sequence
  Synthetic polypeptide
PRGTLRWKPFEIPKASQKKVDFVSGLHTLCGAGDIKSNNGLAIHIFLCNTSMENRCFYNSDGDFLIVPQKGNLLIYTEFGKMLVQPNEICVIQ

SEQ ID NO: 29163 - protein, 227 aa, Artificial Sequence
  Synthetic polypeptide
FLHFQRGVGKSSLVHLLCQNQVLGNPSWTVGCSVDVRVHDYKEGTPEEKTYYIELWDVGGSVGSASSVKSTRAVFYNSVNGIIFVHDLTNKKSSQNLRRWSLEALNRDLVPTGVLVTNGDYDQEQFADNQIPLLVIGTKLDQIHETKRHEVLTRTAFLAEDFNPEEINLDCTNPRYLAAGSSNAVKLSRFFDKVIEKRYFLREGNQIPGFPDRKRFGAGTLKSLHYD

SEQ ID NO: 29164 - protein, 19 aa, Artificial Sequence
  Synthetic polypeptide
ATQKTGDFCISNEVLGNLR

SEQ ID NO: 29165 - protein, 64 aa, Artificial Sequence
  Synthetic polypeptide
EWFQDDQLGTAPVYSSQRERRRRQVISAFPTRCWEIFVSPSPMPKSSAGKSIMDCGLLSGCQSS

SEQ ID NO: 29166 - protein, 120 aa, Artificial Sequence
  Synthetic polypeptide
FLHFQRGVGKSSLVHLLCQNQVLGNPSWTVGCSVDVRVHDYKEGTPEEKTYYIELWDVGGSVGSASSVKSTRAVFYNSVNGIIFVHDLTNKKSSQNLRRWSLEALNRDLVPTGVLVTNGD

SEQ ID NO: 29167 - protein, 44 aa, Artificial Sequence
  Synthetic polypeptide
FLHFQRGVGKSSLVHLLCQNQVLGNPSWTVGCSVDVRVLFSYTT

SEQ ID NO: 29168 - protein, 70 aa, Artificial Sequence
  Synthetic polypeptide
EWFQDDQLGTAPVYSSQRERRRRQVISAFPTRCWEIFVSPSPMPKSSAGKSIMDCGLLSGCQSIIFVHDL

SEQ ID NO: 29169 - protein, 126 aa, Artificial Sequence
  Synthetic polypeptide
FLHFQRGVGKSSLVHLLCQNQVLGNPSWTVGCSVDVRVHDYKEGTPEEKTYYIELWDVGGSVGSASSVKSTRAVFYNSVNGIIFVHDLTNKKSSQNLRRWSLEALNRDLVPTGVLVTNGTAQIHGT

SEQ ID NO: 29170 - protein, 203 aa, Artificial Sequence
  Synthetic polypeptide
FLHFQRGVGKSSLVHLLCQNQVLGNPSWTVGCSVDVRVHDYKEGTPEEKTYYIELWDVGGSVGSASSVKSTRAVFYNSVNGIIFVHDLTNKKSSQNLRRWSLEALNRDLVPTGVLVTNGDYDQEQFADNQIPLLVIGTKLDQIHETKRHEVLTRTAFLAEDFNPEEINLVIEKRYFLREGNQIPGFPDRKRFGAGTLKSLHYD

SEQ ID NO: 29171 - protein, 48 aa, Artificial Sequence
  Synthetic polypeptide
EQLQSTAPSVSDAEDRCWEIFVSPSPMPKSSAGKSIMDCGLLSGCQSS

SEQ ID NO: 29172 - protein, 226 aa, Artificial Sequence
  Synthetic polypeptide
ATQKTGVGKSSLVHLLCQNQVLGNPSWTVGCSVDVRVHDYKEGTPEEKTYYIELWDVGGSVGSASSVKSTRAVFYNSVNGIIFVHDLTNKKSSQNLRRWSLEALNRDLVPTGVLVTNGDYDQEQFADNQIPLLVIGTKLDQIHETKRHEVLTRTAFLAEDFNPEEINLDCTNPRYLAAGSSNAVKLSRFFDKVIEKRYFLREGNQIPGFPDRKRFGAGTLKSLHYD

SEQ ID NO: 29173 - protein, 30 aa, Artificial Sequence
  Synthetic polypeptide
EWFQDDQLGTAPVYSSQRERRRRQVLGNLR

SEQ ID NO: 29174 - protein, 119 aa, Artificial Sequence
  Synthetic polypeptide
ATQKTGVGKSSLVHLLCQNQVLGNPSWTVGCSVDVRVHDYKEGTPEEKTYYIELWDVGGSVGSASSVKSTRAVFYNSVNGIIFVHDLTNKKSSQNLRRWSLEALNRDLVPTGVLVTNGD

SEQ ID NO: 29175 - protein, 54 aa, Artificial Sequence
  Synthetic polypeptide
EQLQSTAPSVSDAEDRCWEIFVSPSPMPKSSAGKSIMDCGLLSGCQSIIFVHDL

SEQ ID NO: 29176 - protein, 43 aa, Artificial Sequence
  Synthetic polypeptide
ATQKTGVGKSSLVHLLCQNQVLGNPSWTVGCSVDVRVLFSYTT

SEQ ID NO: 29177 - protein, 125 aa, Artificial Sequence
  Synthetic polypeptide
ATQKTGVGKSSLVHLLCQNQVLGNPSWTVGCSVDVRVHDYKEGTPEEKTYYIELWDVGGSVGSASSVKSTRAVFYNSVNGIIFVHDLTNKKSSQNLRRWSLEALNRDLVPTGVLVTNGTAQIHGT

SEQ ID NO: 29178 - protein, 202 aa, Artificial Sequence
  Synthetic polypeptide
ATQKTGVGKSSLVHLLCQNQVLGNPSWTVGCSVDVRVHDYKEGTPEEKTYYIELWDVGGSVGSASSVKSTRAVFYNSVNGIIFVHDLTNKKSSQNLRRWSLEALNRDLVPTGVLVTNGDYDQEQFADNQIPLLVIGTKLDQIHETKRHEVLTRTAFLAEDFNPEEINLVIEKRYFLREGNQIPGFPDRKRFGAGTLKSLHYD

SEQ ID NO: 29179 - protein, 50 aa, Artificial Sequence
  Synthetic polypeptide
VHTQKKGNLCTEKISACTPMFIAALFTIARIWKHPQCPSADEWIKKMYRD

SEQ ID NO: 29180 - protein, 173 aa, Artificial Sequence
  Synthetic polypeptide
RKCTGINQFMTETVKNCKRDGFVQTILGRRRYLPGIKDNNPYRKAHAERQAINTIVQGSAADIVKIATVNIQKQLETFHSTFKSHGHREGMLQSDQTGLSRKRKLQGMFCPIRGGFFILQLHDELLYEVAEEDVVQVAQIVKNEMESAVKLSVKLKVKVKIGASWGELKDFDV

SEQ ID NO: 29181 - protein, 12 aa, Artificial Sequence
  Synthetic polypeptide
MDKENVQGLINS

SEQ ID NO: 29182 - protein, 45 aa, Artificial Sequence
  Synthetic polypeptide
AEAGGPLEVRSSRPAWSSWLHLCLRIGLLLIGIDFSVYGRSCQLQ

SEQ ID NO: 29183 - protein, 29 aa, Artificial Sequence
  Synthetic polypeptide
SQHFGRLRRVDHLRSGVQDQPGHHGYTYV

SEQ ID NO: 29184 - protein, 1948 aa, Artificial Sequence
  Synthetic polypeptide
GQEFKTSLVIMVTPMFEDWTTIDWYRFFCLWEKLPTSMKRVAELVGVEEGFLARCVKGKVVARTERQHRQMAIHKRFFTSLVLLDLISEVPLREINQKYGCNRGQIQSLQQSAAVYAGMITVFSNRLGWHNMELLLSQFQKRLTFGIQRELCDLVRVSLLNAQRARVLYASGFHTVADLARANIVEVEVILKNAVPFKSARKAVDEEEEAVEERRNMRTIWVTGRKGLTEREAAALIVEEARMILQQDLVEMGVQWNPCALLHSSTCSLTHSESEVKEHTFISQTKSSYKKLTSKNKSNTIFSDSYIKHSPNIVQDLNKSREHTSSFNCNFQNGNQEHQTCSIFRARKRASLDINKEKPGASQNEGKTSDKKVVQTFSQKTKKAPLNFNSEKMSRSFRSWKRRKHLKRSRDSSPLKDSGACRIHLQGQTLSNPSLCEDPFTLDEKKTEFRNSGPFAKNVSLSGKEKDNKTSFPLQIKQNCSWNITLTNDNFVEHIVTGSQSKNVTCQATSVVSEKGRGVAVEAEKINEVLIQNGSKNQNVYMKHHDIHPINQYLRKQSHEQTSTITKQKNIIERQMPCEAVSSYINRDSNVTINCERIKLNTEENKPSHFQALGDDISRTVIPSEVLPSAGAFSKSEGQHENFLNISRLQEKTGTYTTNKTKNNHVSDLGLVLCDFEDSFYLDTQSEKIIQQMATENAKLGAKDTNLAAGIMQKSLVQQNSMNSFQKECHIPFPAEQHPLGATKIDHLDLKTVGTMKQSSDSHGVDILTPESPIFHSPILLEENGLFLKKNEVSVTDSQLNSFLQGYQTQETVKPVILLIPQKRTPTGVEGECLPVPETSLNMSDSLLFDSFSDDYLVKEQLPDMQMKEPLPSEVTSNHFSDSLCLQEDLIKKSNVNENQDTHQQLTCSNDESIIFSEMDSVQMVEALDNVDIFPVQEKNHTVVSPRALELSDPVLDEHHQGDQDGGDQDERAEKSKLTGTRQNHSFIWSGASFDLSPGLQRILDKVSSPLENEKLKSMTINFSSLNRKNTELNEEQEVISNLETKQVQGISFSSNNEVKSKIEMLENNANHDETSSLLPRKESNIVDDNGLIPPTPIPTSASKLTFPGILETPVNPWKTNNVLQPGESYLFGSPSDIKNHDLSPGSRNGFKDNSPISDTSFSLQLSQDGLQLTPASSSSESLSIIDVASDQNLFQTFIKEWRCKKRFSISLACEKIRSLTSSKTATIGSRFKQASSPQEIPIRDDGFPIKGCDDTLVVGLAVCWGGRDAYYFSLQKEQKHSEISASLVPPSLDPSLTLKDRMWYLQSCLRKESDKECSVVIYDFIQSYKILLLSCGISLEQSYEDPKVACWLLDPDSQEPTLHSIVTSFLPHELPLLEGMETSQGIQSLGLNAGSEHSGRYRASVESILIFNSMNQLNSLLQKENLQDVFRKVEMPSQYCLALLELNGIGFSTAECESQKHIMQAKLDAIETQAYQLAGHSFSFTSSDDIAEVLFLELKLPPNREMKNQGSKKTLGSTRRGIDNGRKLRLGRQFSTSKDVLNKLKALHPLPGLILEWRRITNAITKVVFPLQREKCLNPFLGMERIYPVSQSHTATGRITFTEPNIQNVPRDFEIKMPTLVGESPPSQAVGKGLLPMGRGKYKKGFSVNPRCQAQMEERAADRGMPFSISMRHAFVPFPGGSILAADYSQLELRILAHLSHDRRLIQVLNTGADVFRSIAAEWKMIEPESVGDDLRQQAKQICYGIIYGMGAKSLGEQMGIKENDAACYIDSFKSRYTGINQFMTETVKNCKRDGFVQTILGRRRYLPGIKDNNPYRKAHAERQAINTIVQGSAADIVKIATVNIQKQLETFHSTFKSHGHREGMLQSDQTGLSRKRKLQGMFCPIRGGFFILQLHDELLYEVAEEDVVQVAQIVKNEMESAVKLSVKLKVKVKIGASWGELKDFDV

SEQ ID NO: 29185 - protein, 12 aa, Artificial Sequence
  Synthetic polypeptide
VPDQPGQHIRQI

SEQ ID NO: 29186 - protein, 41 aa, Artificial Sequence
  Synthetic polypeptide
QAWWLTPVIPALWKADVGGSLEPEFQTSLGNTSGRSSQFSV

SEQ ID NO: 29187 - protein, 2367 aa, Artificial Sequence
  Synthetic polypeptide
SQHFGRLMWEDHLSLSSRPAWATHQADLASSLSNAVQIVGMSATLPNLELVASWLNAELYHTDFRPVPLLESVKVGNSIYDSSMKLVREFEPMLQVKGDEDHVVSLCYETICDNHSVLLFCPSKKWCEKLADIIAREFYNLHHQAEGLVKPSECPPVILEQKELLEVMDQLRRLPSGLDSVLQKTVPWGVAFHHAGLTFEERDIIEGAFRQGLIRVLAATSTLSSGVNLPARRVIIRTPIFGGRPLDILTYKQMVGRAGRKGVDTVGESILICKNSEKSKGIALLQGSLKPVRSCLQRREGEEVTGSMIRAILEIIVGGVASTSQDMHTYAACTFLAASMKEGKQGIQRNQESVQLGAIEACVMWLLENEFIQSTEASDGTEGKVYHPTHLGSATLSSSLSPADTLDIFADLQRAMKGFVLENDLHILYLVTPMFEDWTTIDWYRFFCLWEKLPTSMKRVAELVGVEEGFLARCVKGKVVARTERQHRQMAIHKRFFTSLVLLDLISEVPLREINQKYGCNRGQIQSLQQSAAVYAGMITVFSNRLGWHNMELLLSQFQKRLTFGIQRELCDLVRVSLLNAQRARVLYASGFHTVADLARANIVEVEVILKNAVPFKSARKAVDEEEEAVEERRNMRTIWVTGRKGLTEREAAALIVEEARMILQQDLVEMGVQWNPCALLHSSTCSLTHSESEVKEHTFISQTKSSYKKLTSKNKSNTIFSDSYIKHSPNIVQDLNKSREHTSSFNCNFQNGNQEHQTCSIFRARKRASLDINKEKPGASQNEGKTSDKKVVQTFSQKTKKAPLNFNSEKMSRSFRSWKRRKHLKRSRDSSPLKDSGACRIHLQGQTLSNPSLCEDPFTLDEKKTEFRNSGPFAKNVSLSGKEKDNKTSFPLQIKQNCSWNITLTNDNFVEHIVTGSQSKNVTCQATSVVSEKGRGVAVEAEKINEVLIQNGSKNQNVYMKHHDIHPINQYLRKQSHEQTSTITKQKNIIERQMPCEAVSSYINRDSNVTINCERIKLNTEENKPSHFQALGDDISRTVIPSEVLPSAGAFSKSEGQHENFLNISRLQEKTGTYTTNKTKNNHVSDLGLVLCDFEDSFYLDTQSEKIIQQMATENAKLGAKDTNLAAGIMQKSLVQQNSMNSFQKECHIPFPAEQHPLGATKIDHLDLKTVGTMKQSSDSHGVDILTPESPIFHSPILLEENGLFLKKNEVSVTDSQLNSFLQGYQTQETVKPVILLIPQKRTPTGVEGECLPVPETSLNMSDSLLFDSFSDDYLVKEQLPDMQMKEPLPSEVTSNHFSDSLCLQEDLIKKSNVNENQDTHQQLTCSNDESIIFSEMDSVQMVEALDNVDIFPVQEKNHTVVSPRALELSDPVLDEHHQGDQDGGDQDERAEKSKLTGTRQNHSFIWSGASFDLSPGLQRILDKVSSPLENEKLKSMTINFSSLNRKNTELNEEQEVISNLETKQVQGISFSSNNEVKSKIEMLENNANHDETSSLLPRKESNIVDDNGLIPPTPIPTSASKLTFPGILETPVNPWKTNNVLQPGESYLFGSPSDIKNHDLSPGSRNGFKDNSPISDTSFSLQLSQDGLQLTPASSSSESLSIIDVASDQNLFQTFIKEWRCKKRFSISLACEKIRSLTSSKTATIGSRFKQASSPQEIPIRDDGFPIKGCDDTLVVGLAVCWGGRDAYYFSLQKEQKHSEISASLVPPSLDPSLTLKDRMWYLQSCLRKESDKECSVVIYDFIQSYKILLLSCGISLEQSYEDPKVACWLLDPDSQEPTLHSIVTSFLPHELPLLEGMETSQGIQSLGLNAGSEHSGRYRASVESILIFNSMNQLNSLLQKENLQDVFRKVEMPSQYCLALLELNGIGFSTAECESQKHIMQAKLDAIETQAYQLAGHSFSFTSSDDIAEVLFLELKLPPNREMKNQGSKKTLGSTRRGIDNGRKLRLGRQFSTSKDVLNKLKALHPLPGLILEWRRITNAITKVVFPLQREKCLNPFLGMERIYPVSQSHTATGRITFTEPNIQNVPRDFEIKMPTLVGESPPSQAVGKGLLPMGRGKYKKGFSVNPRCQAQMEERAADRGMPFSISMRHAFVPFPGGSILAADYSQLELRILAHLSHDRRLIQVLNTGADVFRSIAAEWKMIEPESVGDDLRQQAKQICYGIIYGMGAKSLGEQMGIKENDAACYIDSFKSRYTGINQFMTETVKNCKRDGFVQTILGRRRYLPGIKDNNPYRKAHAERQAINTIVQGSAADIVKIATVNIQKQLETFHSTFKSHGHREGMLQSDQTGLSRKRKLQGMFCPIRGGFFILQLHDELLYEVAEEDVVQVAQIVKNEMESAVKLSVKLKVKVKIGASWGELKDFDV

SEQ ID NO: 29188 - protein, 2420 aa, Artificial Sequence
  Synthetic polypeptide
RSHKKNEIMSFVAKPHGCSWSHYPKPINAGTENQVPHVLTRMVVVDELHMLGDSHRGYLLELLLTKICYITRKSASCQADLASSLSNAVQIVGMSATLPNLELVASWLNAELYHTDFRPVPLLESVKVGNSIYDSSMKLVREFEPMLQVKGDEDHVVSLCYETICDNHSVLLFCPSKKWCEKLADIIAREFYNLHHQAEGLVKPSECPPVILEQKELLEVMDQLRRLPSGLDSVLQKTVPWGVAFHHAGLTFEERDIIEGAFRQGLIRVLAATSTLSSGVNLPARRVIIRTPIFGGRPLDILTYKQMVGRAGRKGVDTVGESILICKNSEKSKGIALLQGSLKPVRSCLQRREGEEVTGSMIRAILEIIVGGVASTSQDMHTYAACTFLAASMKEGKQGIQRNQESVQLGAIEACVMWLLENEFIQSTEASDGTEGKVYHPTHLGSATLSSSLSPADTLDIFADLQRAMKGFVLENDLHILYLVTPMFEDWTTIDWYRFFCLWEKLPTSMKRVAELVGVEEGFLARCVKGKVVARTERQHRQMAIHKRFFTSLVLLDLISEVPLREINQKYGCNRGQIQSLQQSAAVYAGMITVFSNRLGWHNMELLLSQFQKRLTFGIQRELCDLVRVSLLNAQRARVLYASGFHTVADLARANIVEVEVILKNAVPFKSARKAVDEEEEAVEERRNMRTIWVTGRKGLTEREAAALIVEEARMILQQDLVEMGVQWNPCALLHSSTCSLTHSESEVKEHTFISQTKSSYKKLTSKNKSNTIFSDSYIKHSPNIVQDLNKSREHTSSFNCNFQNGNQEHQTCSIFRARKRASLDINKEKPGASQNEGKTSDKKVVQTFSQKTKKAPLNFNSEKMSRSFRSWKRRKHLKRSRDSSPLKDSGACRIHLQGQTLSNPSLCEDPFTLDEKKTEFRNSGPFAKNVSLSGKEKDNKTSFPLQIKQNCSWNITLTNDNFVEHIVTGSQSKNVTCQATSVVSEKGRGVAVEAEKINEVLIQNGSKNQNVYMKHHDIHPINQYLRKQSHEQTSTITKQKNIIERQMPCEAVSSYINRDSNVTINCERIKLNTEENKPSHFQALGDDISRTVIPSEVLPSAGAFSKSEGQHENFLNISRLQEKTGTYTTNKTKNNHVSDLGLVLCDFEDSFYLDTQSEKIIQQMATENAKLGAKDTNLAAGIMQKSLVQQNSMNSFQKECHIPFPAEQHPLGATKIDHLDLKTVGTMKQSSDSHGVDILTPESPIFHSPILLEENGLFLKKNEVSVTDSQLNSFLQGYQTQETVKPVILLIPQKRTPTGVEGECLPVPETSLNMSDSLLFDSFSDDYLVKEQLPDMQMKEPLPSEVTSNHFSDSLCLQEDLIKKSNVNENQDTHQQLTCSNDESIIFSEMDSVQMVEALDNVDIFPVQEKNHTVVSPRALELSDPVLDEHHQGDQDGGDQDERAEKSKLTGTRQNHSFIWSGASFDLSPGLQRILDKVSSPLENEKLKSMTINFSSLNRKNTELNEEQEVISNLETKQVQGISFSSNNEVKSKIEMLENNANHDETSSLLPRKESNIVDDNGLIPPTPIPTSASKLTFPGILETPVNPWKTNNVLQPGESYLFGSPSDIKNHDLSPGSRNGFKDNSPISDTSFSLQLSQDGLQLTPASSSSESLSIIDVASDQNLFQTFIKEWRCKKRFSISLACEKIRSLTSSKTATIGSRFKQASSPQEIPIRDDGFPIKGCDDTLVVGLAVCWGGRDAYYFSLQKEQKHSEISASLVPPSLDPSLTLKDRMWYLQSCLRKESDKECSVVIYDFIQSYKILLLSCGISLEQSYEDPKVACWLLDPDSQEPTLHSIVTSFLPHELPLLEGMETSQGIQSLGLNAGSEHSGRYRASVESILIFNSMNQLNSLLQKENLQDVFRKVEMPSQYCLALLELNGIGFSTAECESQKHIMQAKLDAIETQAYQLAGHSFSFTSSDDIAEVLFLELKLPPNREMKNQGSKKTLGSTRRGIDNGRKLRLGRQFSTSKDVLNKLKALHPLPGLILEWRRITNAITKVVFPLQREKCLNPFLGMERIYPVSQSHTATGRITFTEPNIQNVPRDFEIKMPTLVGESPPSQAVGKGLLPMGRGKYKKGFSVNPRCQAQMEERAADRGMPFSISMRHAFVPFPGGSILAADYSQLELRILAHLSHDRRLIQVLNTGADVFRSIAAEWKMIEPESVGDDLRQQAKQICYGIIYGMGAKSLGEQMGIKENDAACYIDSFKSRYTGINQFMTETVKNCKRDGFVQTILGRRRYLPGIKDNNPYRKAHAERQAINTIVQGSAADIVKIATVNIQKQLETFHSTFKSHGHREGMLQSDQTGLSRKRKLQGMFCPIRGGFFILQLHDELLYEVAEEDVVQVAQIVKNEMESAVKLSVKLKVKVKIGASWGELKDFDV

SEQ ID NO: 29189 - protein, 51 aa, Artificial Sequence
  Synthetic polypeptide
QSHMDAAGAIILSQLMQEQKTKYHMFSLEWWLWMNYICWETLTEGICWNFC

SEQ ID NO: 29190 - protein, 18 aa, Artificial Sequence
  Synthetic polypeptide
CRNRKPSTTCSHSNGGCG

SEQ ID NO: 29191 - protein, 18 aa, Artificial Sequence
  Synthetic polypeptide
LQENTLRASTDSTLCTTK

SEQ ID NO: 29192 - protein, 464 aa, Artificial Sequence
  Synthetic polypeptide
FVTVSHHSQMRLFSCRKTRSGLLLILHYVLQSDHFLHLLQADNVQIGSAVMMMLQNILQINSGDLLRIGRKALYSILDEVIFKLFSTPSPVIRSTATKLLLLMAESHQEILILLRQSTCYKGLRRLLSKQETGTEFSQELRQLVGLLSPMVYQEVEEQKLHQAACLIQAYWKGFQTRKRLKKLPSAVIALQRSFRSKRSKMLLEINRQKEEEDLKLQLQLQRQRAMRLSRELQLSMLEIVHPGQVEKHYREMEEKSALIIQKHWRGYRERKNFHQQRQSLIEYKAAVTLQRAALKFLAKCRKKKKLFAPWRGLQELTDARRVELKKRVDDYVRRHLGSPMSDVVSRELHAQAQERLQHYFMGRALEERAQQHREALIAQISTNVEQLMKAPSLKEAEGKEPELFLSRSRPVAAKAKQAHLTTLKHIQAPWWKKLGEESGDEIDVPKDELSIELENLFIGGTKPP

SEQ ID NO: 29193 - protein, 21 aa, Artificial Sequence
  Synthetic polypeptide
FYIMYYKVIISYIYCKLTMSK

SEQ ID NO: 29194 - protein, 331 aa, Artificial Sequence
  Synthetic polypeptide
FVTVSHHSQMRLFSCRKTRSGLLLILHYVLQSDHFLHLLQADNVQIGSAVMMMLQNILQINRSKRSKMLLEINRQKEEEDLKLQLQLQRQRAMRLSRELQLSMLEIVHPGQVEKHYREMEEKSALIIQKHWRGYRERKNFHQQRQSLIEYKAAVTLQRAALKFLAKCRKKKKLFAPWRGLQELTDARRVELKKRVDDYVRRHLGSPMSDVVSRELHAQAQERLQHYFMGRALEERAQQHREALIAQISTNVEQLMKAPSLKEAEGKEPELFLSRSRPVAAKAKQAHLTTLKHIQAPWWKKLGEESGDEIDVPKDELSIELENLFIGGTKPP

SEQ ID NO: 29195 - protein, 169 aa, Artificial Sequence
  Synthetic polypeptide
FVTVSHHSQMRLFSCRKTRSGLLLILHYVLQSDHFLHLLQADNVQIGSAVMMMLQNILQINSGDLLRIGRKALYSILDEVIFKLFSTPSPVIRSTATKLLLLMAESHQEILILLRQSTCYKGLRRLLSKQETGTEFSQELRQLVGLLSPMVYQEVEEQIQTIKDVAGDK

SEQ ID NO: 29196 - protein, 6 aa, Artificial Sequence
  Synthetic polypeptide
QSCYKR

SEQ ID NO: 29197 - protein, 38 aa, Artificial Sequence
  Synthetic polypeptide
RVVIRDDFKPASIDTSSEGYLEVGEGEQVTITLPNIES

SEQ ID NO: 29198 - protein, 24 aa, Artificial Sequence
  Synthetic polypeptide
EMTSNLLLLTLLLKDTLRLVKVNR

SEQ ID NO: 29199 - protein, 230 aa, Artificial Sequence
  Synthetic polypeptide
RVVIRDDFKPASIDTSSEGYLEVGEGEQVTITLPNIEGSTPPVTVFKGSKKPYLKECILIINHDTGECRLEKLSSNITVKKTRVEGSSKIQYRKEQQQQQMWNSARTPNLVKHSPSEDKMSPASPIDDIERELKAEASLMDQMSSCDSSSDSKSSSSSSSEDSSSDSEDEDCKSSTSDTGNCVSGHPTMTQYRIPDIDASHNRFRDNSGLLMNTLRNDLQLSESGSDSDD

SEQ ID NO: 29200 - protein, 233 aa, Artificial Sequence
  Synthetic polypeptide
RVVIRDDFKPASIDTSSEGYLEVGEGEQVTITLPNIEGSTPPVTVFKGSKKPYLKECILIINHDTGECRLEKLSSNITVKKTRVEGSSKIQYRKEQQQQQMWNSARTPNLVKHSPSEDKMSPASPIDDIERELKAEASLMDQMSSCDSSSDSKSSSSSSSEDSSSDSEDEDCKSSTSDTGNCVSGHPTMTQYRIPDIDASHNRFRDNSGLLMNTLNNLSSHSFSSLYDPLLSH

SEQ ID NO: 29201 - protein, 38 aa, Artificial Sequence
  Synthetic polypeptide
GRSQDGRIGTAPVYSSQRERRRRRVISAFPSEGACPCL

SEQ ID NO: 29202 - protein, 32 aa, Artificial Sequence
  Synthetic polypeptide
FLHFHPRVPVLACDGPAHRTLCHPVCLYHPQM

SEQ ID NO: 29203 - protein, 496 aa, Artificial Sequence
  Synthetic polypeptide
ATQKTGDFCISIRGCLSLLVTVQHTERYVTLFASIILKCDYTTSAQLQDVVVTWRFKSFCKDPIFDYYSASYQAALSLGQDPSNDCNDNQREVRIVAQRRGQNEPVLGVDYRQRKITIQNRADLVINEVMWWDHGVYYCTIEAPGDTSGDPDKEVKLIVLHWLTVIFIILGALLLLLLIGVCWCQCCPQYCCCYIRCPCCPAHCCCPEEDLSLPSSLPQMPMTQTTNQPPIANGVLEYLEKELRNLNLAQPLPPDLKGRFGHPCSMLSSLGSEVVERRIIHLPPLIRDLSSSRRTSDSLHQQWLTPIPSRPWDLREGRSHHHYPDFHQELQDRGPKSWALERRELDPSWSGRHRSSRLNGSPIHWSDRDSLSDVPSSSEARWRPSHPPFRSRCQERPRRPSPRESTQRHGRRRRHRSYSPPLPSGLSSWSSEEDKERQPQSWRAHRRGSHSPHWPEEKPPSYRSLDITPGKNSRKKGSVERRSEKDSSHSGRSVVI

SEQ ID NO: 29204 - protein, 540 aa, Artificial Sequence
  Synthetic polypeptide
ATQKTGDFCISIRGCLSLLVTVQHTERYVTLFASIILKCDYTTSAQLQDVVVTWRFKSFCKDPIFDYYSASYQAALSLGQDPSNDCNDNQREVRIVAQRRGQNEPVLGVDYRQRKITIQNRADLVINEVMWWDHGVYYCTIEAPGDTSGDPDKEVKLIVLHWLTVIFIILGALLLLLLIGVCWCQCCPQYCCCYIRCPCCPAHCCCPEEALARHRYMKQAQALGPQMMGKPLYWGADRSSQVSSYPMHPLLQRDLSLPSSLPQMPMTQTTNQPPIANGVLEYLEKELRNLNLAQPLPPDLKGRFGHPCSMLSSLGSEVVERRIIHLPPLIRDLSSSRRTSDSLHQQWLTPIPSRPWDLREGRSHHHYPDFHQELQDRGPKSWALERRELDPSWSGRHRSSRLNGSPIHWSDRDSLSDVPSSSEARWRPSHPPFRSRCQERPRRPSPRESTQRHGRRRRHRSYSPPLPSGLSSWSSEEDKERQPQSWRAHRRGSHSPHWPEEKPPSYRSLDITPGKNSRKKGSVERRSEKDSSHSGRSVVI

SEQ ID NO: 29205 - protein, 451 aa, Artificial Sequence
  Synthetic polypeptide
ATQKTGDFCISIRGCLSLLVTVQHTERYVTLFASIILKCDYTTSAQLQDVVVTWRFKSFCKDPIFDYYSASYQAALSLGQDPSNDCNDNQREVRIVAQRRGQNEPVLGVDYRQRKITIQNPLARHRYMKQAQALGPQMMGKPLYWGADRSSQVSSYPMHPLLQRDLSLPSSLPQMPMTQTTNQPPIANGVLEYLEKELRNLNLAQPLPPDLKGRFGHPCSMLSSLGSEVVERRIIHLPPLIRDLSSSRRTSDSLHQQWLTPIPSRPWDLREGRSHHHYPDFHQELQDRGPKSWALERRELDPSWSGRHRSSRLNGSPIHWSDRDSLSDVPSSSEARWRPSHPPFRSRCQERPRRPSPRESTQRHGRRRRHRSYSPPLPSGLSSWSSEEDKERQPQSWRAHRRGSHSPHWPEEKPPSYRSLDITPGKNSRKKGSVERRSEKDSSHSGRSVVI

SEQ ID NO: 29206 - protein, 30 aa, Artificial Sequence
  Synthetic polypeptide
KSLIKYCWFCGLGASRNLPTCDVTPGDSGA

SEQ ID NO: 29207 - protein, 257 aa, Artificial Sequence
  Synthetic polypeptide
NIAGFVAWEHHGTCRHVMSPPETQVHNDYKVVSPALRAVGNIVTGDDIQTQVILNCSALQSLLHLLSSPKESIKKEACWTISNITAGNRAQIQTVIDANIFPALISILQTAEFRTRKEAAWAITNATSGGSAEQIKYLVELGCIKPLCDLLTVMDSKIVQVALNGLENILRLGEQEAKRNGTGINPYCALIEEAYGLDKIEFLQSHENQEIYQKAFDLIEHYFGTEDEDSSIAPQVDLNQQQYIFQQCEAPMEGFQL

SEQ ID NO: 29208 - protein, 34 aa, Artificial Sequence
  Synthetic polypeptide
CHPRRLRCIMIIKWFLLLCELWETLSQGMIFRHR

SEQ ID NO: 29209 - protein, 47 aa, Artificial Sequence
  Synthetic polypeptide
NIAGFVAWEHHGTCRHVMSPPETQVHNDYKVVSPALRAVGNIVTGDD

SEQ ID NO: 29210 - protein, 30 aa, Artificial Sequence
  Synthetic polypeptide
CHPRRLRCIMIIKWFLLLCELWETLSQGMI

SEQ ID NO: 29211 - protein, 55 aa, Artificial Sequence
  Synthetic polypeptide
KSLIKYCWFCGLGASRNLPTCDVTPGDSGIMIIKWFLLLCELWETLSQGMIFRHR

SEQ ID NO: 29212 - protein, 25 aa, Artificial Sequence
  Synthetic polypeptide
NIAGFVAWEHHGTCRHVMSPPETQA

SEQ ID NO: 29213 - protein, 239 aa, Artificial Sequence
  Synthetic polypeptide
CHPRRLRHNDYKVVSPALRAVGNIVTGDDIQTQVILNCSALQSLLHLLSSPKESIKKEACWTISNITAGNRAQIQTVIDANIFPALISILQTAEFRTRKEAAWAITNATSGGSAEQIKYLVELGCIKPLCDLLTVMDSKIVQVALNGLENILRLGEQEAKRNGTGINPYCALIEEAYGLDKIEFLQSHENQEIYQKAFDLIEHYFGTEDEDSSIAPQVDLNQQQYIFQQCEAPMEGFQL

SEQ ID NO: 29214 - protein, 51 aa, Artificial Sequence
  Synthetic polypeptide
KSLIKYCWFCGLGASRNLPTCDVTPGDSGIMIIKWFLLLCELWETLSQGMI

SEQ ID NO: 29215 - protein, 29 aa, Artificial Sequence
  Synthetic polypeptide
CHPRRLRHNDYKVVSPALRAVGNIVTGDD

SEQ ID NO: 29216 - protein, 62 aa, Artificial Sequence
  Synthetic polypeptide
GQVLWFLPVIPALGRLKWAACLSPGARDQPGQHGETQSLQKIKQSGLLATLLEIVPCAGTMS

SEQ ID NO: 29217 - protein, 392 aa, Artificial Sequence
  Synthetic polypeptide
PGAVVPACNSSTWEAEVGSLLEPRSSRPARATWRNPVSTENKAVWALGNIAGDSTMCRDYVLDCNILPPLLQLFSKQNRLTMTRNAVWALSNLCRGKSPPPEFAKVSPCLNVLSWLLFVSDTDVLADACWALSYLSDGPNDKIQAVIDAGVCRRLVELLMHNDYKVVSPALRAVGNIVTGDDIQTQVILNCSALQSLLHLLSSPKESIKKEACWTISNITAGNRAQIQTVIDANIFPALISILQTAEFRTRKEAAWAITNATSGGSAEQIKYLVELGCIKPLCDLLTVMDSKIVQVALNGLENILRLGEQEAKRNGTGINPYCALIEEAYGLDKIEFLQSHENQEIYQKAFDLIEHYFGTEDEDSSIAPQVDLNQQQYIFQQCEAPMEGFQL

SEQ ID NO: 29218 - protein, 182 aa, Artificial Sequence
  Synthetic polypeptide
PGAVVPACNSSTWEAEVGSLLEPRSSRPARATWRNPVSTENKAVWALGNIAGDSTMCRDYVLDCNILPPLLQLFSKQNRLTMTRNAVWALSNLCRGKSPPPEFAKVSPCLNVLSWLLFVSDTDVLADACWALSYLSDGPNDKIQAVIDAGVCRRLVELLMHNDYKVVSPALRAVGNIVTGDD

SEQ ID NO: 29219 - protein, 68 aa, Artificial Sequence
  Synthetic polypeptide
PGAVVPACNSSTWEAEVGSLLEPRSSRPARATWRNPVSTENKAVWALGNIAGDSTMCRDYVLDCNILP

SEQ ID NO: 29220 - protein, 67 aa, Artificial Sequence
  Synthetic polypeptide
PGAVVPACNSSTWEAEVGSLLEPRSSRPARATWRNPVSTENKAVWALGNIAGDSTMCRDYVLDCNIL

SEQ ID NO: 29221 - protein, 52 aa, Artificial Sequence
  Synthetic polypeptide
AQKFEAAMSYSSGEMLLQQKKKQKKKLCQMEAFMRLRLVTWRWHQVVSSLLT

SEQ ID NO: 29222 - protein, 508 aa, Artificial Sequence
  Synthetic polypeptide
KDCLSPEIRGSNELFKRRNVATAEEETEEEVMSDGGFHEAQISNMEMAPGGVITSDMIEMIFSKSPEQQLSATQKFRKLLSKEPNPPIDEVISTPGVVARFVEFLKRKENCTLQFESAWVLTNIASGNSLQTRIVIQAGAVPIFIELLSSEFEDVQEQAVWALGNIAGDSTMCRDYVLDCNILPPLLQLFSKQNRLTMTRNAVWALSNLCRGKSPPPEFAKVSPCLNVLSWLLFVSDTDVLADACWALSYLSDGPNDKIQAVIDAGVCRRLVELLMHNDYKVVSPALRAVGNIVTGDDIQTQVILNCSALQSLLHLLSSPKESIKKEACWTISNITAGNRAQIQTVIDANIFPALISILQTAEFRTRKEAAWAITNATSGGSAEQIKYLVELGCIKPLCDLLTVMDSKIVQVALNGLENILRLGEQEAKRNGTGINPYCALIEEAYGLDKIEFLQSHENQEIYQKAFDLIEHYFGTEDEDSSIAPQVDLNQQQYIFQQCEAPMEGFQL

SEQ ID NO: 29223 - protein, 152 aa, Artificial Sequence
  Synthetic polypeptide
KDCLSPEIRGSNELFKRRNVATAEEETEEEVMSDGGFHEAQISNMEMAPGGVITSDMIEMIFSKSPEQQLSATQKFRKLLSKEPNPPIDEVISTPGVVARFVEFLKRKENCTLQVSLAFARNQSGTGKVASNRVLIQMEKGNQAYLNLEWET

SEQ ID NO: 29224 - protein, 298 aa, Artificial Sequence
  Synthetic polypeptide
KDCLSPEIRGSNELFKRRNVATAEEETEEEVMSDGGFHEAQISNMEMAPGGVITSDMIEMIFSKSPEQQLSATQKFRKLLSKEPNPPIDEVISTPGVVARFVEFLKRKENCTLQFESAWVLTNIASGNSLQTRIVIQAGAVPIFIELLSSEFEDVQEQAVWALGNIAGDSTMCRDYVLDCNILPPLLQLFSKQNRLTMTRNAVWALSNLCRGKSPPPEFAKVSPCLNVLSWLLFVSDTDVLADACWALSYLSDGPNDKIQAVIDAGVCRRLVELLMHNDYKVVSPALRAVGNIVTGDD

SEQ ID NO: 29225 - protein, 184 aa, Artificial Sequence
  Synthetic polypeptide
KDCLSPEIRGSNELFKRRNVATAEEETEEEVMSDGGFHEAQISNMEMAPGGVITSDMIEMIFSKSPEQQLSATQKFRKLLSKEPNPPIDEVISTPGVVARFVEFLKRKENCTLQFESAWVLTNIASGNSLQTRIVIQAGAVPIFIELLSSEFEDVQEQAVWALGNIAGDSTMCRDYVLDCNILP

SEQ ID NO: 29226 - protein, 139 aa, Artificial Sequence
  Synthetic polypeptide
KDCLSPEIRGSNELFKRRNVATAEEETEEEVMSDGGFHEAQISNMEMAPGGVITSDMIEMIFSKSPEQQLSATQKFRKLLSKEPNPPIDEVISTPGVVARFVEFLKRKENCTLQAVWALGNIAGDSTMCRDYVLDCNIL

SEQ ID NO: 29227 - protein, 144 aa, Artificial Sequence
  Synthetic polypeptide
KDCLSPEIRGSNELFKRRNVATAEEETEEEVMSDGGFHEAQISNMEMAPGGVITSDMIEMIFSKSPEQQLSATQKFRKLLSKEPNPPIDEVISTPGVVARFVEFLKRKENCTLQFESAWVLTNIASGNSLQTRIVIQAGAVPIF

SEQ ID NO: 29228 - protein, 130 aa, Artificial Sequence
  Synthetic polypeptide
IERCYPKYGAGIYFTKNLKNLAEKAKKISAADKLIYVFEAEVLTGFFCQGHPLNIVPPPLSPGAIDGHDSVVDNVSSPETFVIFSGMQAIPQYLWTCTQEYVQSQDYSSGPMRPFAQHPWRGFASGSPVD

SEQ ID NO: 29229 - protein, 47 aa, Artificial Sequence
  Synthetic polypeptide
LHAAIEHLKCGRSKLKDAIQNTELAYTSPRTSKTWQRRPRKSLLQIS

SEQ ID NO: 29230 - protein, 30 aa, Artificial Sequence
  Synthetic polypeptide
KMLSKIRSWHILHQEPQKPGREGQENLCCR

SEQ ID NO: 29231 - protein, 159 aa, Artificial Sequence
  Synthetic polypeptide
STAAQIERIQNAFLWQSYQVKKRQMDIKNDHKNNERLLFHGTDADSVPYVNQHGFNRSCAGKNAVSYGKGTYFAVDASYSAKDTYSKPDSNGRKHMYVVRVLTGVFTKGRAGLVTPPPKNPHNPTDLFDSVTNNTRSPKLFVVFFDNQAYPEYLITFTA

SEQ ID NO: 29232 - protein, 19 aa, Artificial Sequence
  Synthetic polypeptide
QQLPRLRGYRMHFSGRATR

SEQ ID NO: 29233 - protein, 5 aa, Artificial Sequence
  Synthetic polypeptide
NSCPD

SEQ ID NO: 29234 - protein, 182 aa, Artificial Sequence
  Synthetic polypeptide
VMIRACSPSYWEAEVEGLHEPRSLTPVWIERIQNPDLWNSYQAKKKTMDAKNGQTMNEKQLFHGTDAGSVPHVNRNGFNRSYAGKNAVAYGKGTYFAVNANYSANDTYSRPDANGRKHVYYVRVLTGIYTHGNHSLIVPPSKNPQNPTDLYDTVTDNVHHPSLFVAFYDYQAYPEYLITFRK

SEQ ID NO: 29235 - protein, 31 aa, Artificial Sequence
  Synthetic polypeptide
RQSGLRGSRIQISGIATRQRKKLWMPRMARQ

SEQ ID NO: 29236 - protein, 9 aa, Artificial Sequence
  Synthetic polypeptide
AQEFDASLD

SEQ ID NO: 29237 - protein, 281 aa, Artificial Sequence
  Synthetic polypeptide
GRAWWPTPVIPAFWETEAGEWLEHHLSSGVRDQPGQHEFGVVCLIFSATLAYFPPRPPLPPSVAAASQRLSYRRSVCRLLSNFRFLMIALAYAIPLGVFAGWSGVLDLILTPAHVSQVDAGWIGFWSIVGGCVVGIAMARFADFIRGMLKLILLLLFSGATLSSTWFTLTCLNSITHLPLTTVTLYASCILLGVFLNSSVPIFFELFVETVYPVPEGITCGVVTFLSNMFMGVLLFFLTFYHTELSWFNWCLPGSCLLSLLLILCFRESYDRLYLDVVVSV

SEQ ID NO: 29238 - protein, 17 aa, Artificial Sequence
  Synthetic polypeptide
AQEFETSLDNMNLELSA

SEQ ID NO: 29239 - protein, 517 aa, Artificial Sequence
  Synthetic polypeptide
SQRFGRPREVDHLRPGVQDQPGQHSRNAKNQPGVVTQKSASSIFMLSFYLTCSLLLTLVVFVSVIYSCVKLFPSPLQTLSRKIVRSKMNSTLVGVFTITLVFLAAFVNMFTCNSRDLLGCLAQEHNISASQVNACHVAESAVNYSLGDEQGFCGSPWPNCNFPEYFTYSVLLSLLACSVFLQISCIGKLVLMLAIELIYVLIVEVPGVTLFDNADLLVTANAIDFFNNGTSQCPEHATKVALKVVTPIIISVFVLALYLHAQQVESTARLDFLWKLQATEEKEEMEELQAYNRRLLHNILPKDVAAHFLARERRNDELYYQSCECVAVMFASIANFSEFYVELEANNEGVECLRLLNEIIADFDEIISEDRFRQLEKIKTIGSTYMAASGLNDSTYDKVGKTHIKALADFAMKLMDQMKYINEHSFNNFQMKIGLNIGPVVAGVIGARKPQYDIWGNTVNVASRMDSTGVPDRIQVTTDMYQVLAANTYQLECRGVVKVKGKGEMMTYFLNGGPPLS

SEQ ID NO: 29240 - protein, 14 aa, Artificial Sequence
  Synthetic polypeptide
RKNQLAPYSCSAST

SEQ ID NO: 29241 - protein, 542 aa, Artificial Sequence
  Synthetic polypeptide
SQRFGRPREVDHLRPGVQDQPGQHSRNAKNQPGVVTQKSASSIFMLSFYLTCSLLLTLVVFVSVIYSCVKLFPSPLQTLSRKIVRSKMNSTLVGVFTITLVFLAAFVNMFTCNSRDLLGCLAQEHNISASQVNACHVAESAVNYSLGDEQGFCGSPWPNCNFPEYFTYSVLLSLLACSVFLQISCIGKLVLMLAIELIYVLIVEVPGVTLFDNADLLVTANAIDFFNNGTSQWSLCENLRHRRMEAGTYFPSGVKEQSPEHATKVALKVVTPIIISVFVLALYLHAQQVESTARLDFLWKLQATEEKEEMEELQAYNRRLLHNILPKDVAAHFLARERRNDELYYQSCECVAVMFASIANFSEFYVELEANNEGVECLRLLNEIIADFDEIISEDRFRQLEKIKTIGSTYMAASGLNDSTYDKVGKTHIKALADFAMKLMDQMKYINEHSFNNFQMKIGLNIGPVVAGVIGARKPQYDIWGNTVNVASRMDSTGVPDRIQVTTDMYQVLAANTYQLECRGVVKVKGKGEMMTYFLNGGPPLS

SEQ ID NO: 29242 - protein, 189 aa, Artificial Sequence
  Synthetic polypeptide
SQRFGRPREVDHLRPGVQDQPGQHSRNAKNQPGVVTQKSASSIFMLSFYLTCSLLLTLVVFVSVIYSCVKLFPSPLQTLSRKIVRSKMNSTLVGVFTITLVFLAAFVNMFTCNSRDLLGCLAQEHNISASQVNACHVAESAVNYSLGDEQGFCGSPWPNCNFPEYFTYSVLLSLLACSVFLQISCIGKL

SEQ ID NO: 29243 - protein, 353 aa, Artificial Sequence
  Synthetic polypeptide
LCVVVHACSPSYSRGRSGRSPGGGSCGEPLSCHCIPTWATETLQTSMAKLLSDLSVDSARCKPGNNLTKSLLNIHDKQLQHDPAPAHTSIMSYLNKLETNYSFTHSEPLSTIKNEETIEPDKTYENVLSSRGPQNSNTRGMEEASAPGIISALSKQDSDEGSETMALIEDEHNLDNTIYIPFARSTPEKKSPLSKRLSPQPQIRAATTQLVSNSGLAVSGKENKLCTPVICSSSTKEAEDAPEKLSRASDMKDTQLLKKIKEAIGKIPAATKEPEEQTACHGPSGCLSNSLQVKGNTVCDGSVFTSDLMSDWSISSFSTFTSRDEQDFRNGLAALDANIARLQKSLRTGLLEK

SEQ ID NO: 29244 - protein, 114 aa, Artificial Sequence
  Synthetic polypeptide
QGLMPVTPALWEAEVGGSPGPRSSRPAWATQQNPVSTKNTKVSCAWSCMPVVPATREAEVGGAQEVEAAVSHYHATAFQRGRQKLYRLAWQSFSPILVWTVLAASLGITLPNHS

SEQ ID NO: 29245 - protein, 17 aa, Artificial Sequence
  Synthetic polypeptide
ATIMPLHSNVGDRNFTD

SEQ ID NO: 29246 - protein, 20 aa, Artificial Sequence
  Synthetic polypeptide
GQVWWFMPVIPAFWKAEELS

SEQ ID NO: 29247 - protein, 9 aa, Artificial Sequence
  Synthetic polypeptide
SQHFGRLRN

SEQ ID NO: 29248 - protein, 56 aa, Artificial Sequence
  Synthetic polypeptide
APDLKASCYSISPLRCILSFLKREWRQVRVRGQPAGPALPELHPQFPGSQALHQHS

SEQ ID NO: 29249 - protein, 1271 aa, Artificial Sequence
  Synthetic polypeptide
RQAAIQFLHSDAYSHSSSENGGKSESVANLQAQPSLNSIHSSPGPKRSTNTLKKWLTSPVRRLNSGKADGNIKKQKKVRDGRKSFDLGSPKPGDETTPQGDSADEKSKKGWGEDEPDEESHTPLPPPMKIFDNDPTQDEMSSSLLAARQASTEVPTAADLVNAIEKLVKNKLSLEGSSYRGSLKDPAGCLNEGMAPPTPPKNPEEEQKAKALRGRMFVLNELVQTEKDYVKDLGIVVEGFMKRIEEKGVPEDMRGKDKIVFGNIHQIYDWHKDFFLAELEKCIQEQDRLAQLFIKHERKLHIYVWYCQNKPRSEYIVAEYDAYFEEVKQEINQRLTLSDFLIKPIQRITKYQLLLKDFLRYSEKAGLECSDIEKAVELMCLVPKRCNDMMNLGRLQGFEGTLTAQGKLLQQDTFYVIELDAGMQSRTKERRVFLFEQIVIFSELLRKGSLTPGYMFKRSIKMNYLVLEENVDNDPCKFALMNRETSERVVLQAANADIQQAWVQDINQVLETQRDFLNALQSPIEYQRKERSTAVMRSQPARLPQASPRPYSSVPAGSEKPPKGSSYNPPLPPLKISTSNGSPGFEYHQPGDKFEASKQNDLGGCNGTSSMAVIKDYYALKENEICVSQGEVVQVLAVNQQNMCLVYQPASDHSPAAEGWVPGSILAPLTKATAAESSDGSIKKSCSWHTLRMRKRAEVENTGKNEATGPRKPKDILGNKVSVKETNSSEESECDDLDPNTSMEILNPNFIQEVAPEFLVPLVDVTCLLGDTVILQCKVCGRPKPTITWKGPDQNILDTDNSSATYTVSSCDSGEITLKICNLMPQDSGIYTCIATNDHGTTSTSATVKVQGVPAAPNRPIAQERSCTSVILRWLPPSSTGNCTISGYTVEYREEGSQIWQQSVASTLDTYLVIEDLSPGCPYQFRVSASNPWGISLPSEPSEFVRLPEYDAAADGATISWKENFDSAYTELNEIGRGRFSIVKKCIHKATRKDVAVKFVSKKMKKKEQAAHEAALLQHLQHPQYITLHDTYESPTSYILILELMDDGRLLDYLMNHDELMEEKVAFYIRDIMEALQYLHNCRVAHLDIKPENLLIDLRIPVPRVKLIDLEDAVQISGHFHIHHLLGNPEFAAPEVIQGIPVSLGTDIWSIGVLTYVMLSGVSPFLDESKEETCINVCRVDFSFPHEYFCGVSNAARDFINVILQEDFRRRPTAATCLQHPWLQPHNGSYSKIPLDTSRLACFIERRKHQNDVRPIPNVKSYIVNRVNQGT

SEQ ID NO: 29250 - protein, 124 aa, Artificial Sequence
  Synthetic polypeptide
HADFSLCKTFSTCSLQNTPPSWFYSYLTGYFLVLSSSCFWLSLWTLSLSIPMPLADLTQLHGFQPHLSSDNSAIISSSPALSPLSSRLEGKLLFNFSTQMHTLIPQARMEASPSPWPTCRPSPP

SEQ ID NO: 29251 - protein, 650 aa, Artificial Sequence
  Synthetic polypeptide
RQAAIQFLHSDAYSHSSSENGGKSESVANLQAQPSLNSIHSSPGPKRSTNTLKKWLTSPVRRLNSGKADGNIKKQKKVRDGRKSFDLGSPKPGDETTPQGDSADEKSKKGWGEDEPDEESHTPLPPPMKIFDNDPTQDEMSLEGSSYRGSLKDPAGCLNEGMAPPTPPKNPEEEQKAKALRGRMFVLNELVQTEKDYVKDLGIVVEGFMKRIEEKGVPEDMRGKDKIVFGNIHQIYDWHKDFFLAELEKCIQEQDRLAQLFIKHERKLHIYVWYCQNKPRSEYIVAEYDAYFEEVKQEINQRLTLSDFLIKPIQRITKYQLLLKDFLRYSEKAGLECSDIEKAVELMCLVPKRCNDMMNLGRLQGFEGTLTAQGKLLQQDTFYVIELDAGMQSRTKERRVFLFEQIVIFSELLRKGSLTPGYMFKRSIKMNYLVLEENVDNDPCKFALMNRETSERVVLQAANADIQQAWVQDINQVLETQRDFLNALQSPIEYQRKERSTAVMRSQPARLPQASPRPYSSVPAGSEKPPKGSSYNPPLPPLKISTSNGSPGFEYHQPGDKFEASKNDLGGCNGTSSMAVIKDYYALKENEICVSQGEVVQVLAVNQQNMCLVYQPASDHSPAAEGWVPGSILAPLTKATAAESSDGSIK

SEQ ID NO: 29252 - protein, 176 aa, Artificial Sequence
  Synthetic polypeptide
RQAAIQFLHSDAYSHSSSENGGKSESVANLQAQPSLNSIHSSPGPKRSTNTLKKWLTSPVRRLNSGKADGNIKKQKKVRDGRKSFDLGSPKPGDETTPQGDSADEKSKKGWGEDEPDEESHTPLPPPMKIFDNDPTQDEMSLEGSSYRGSLKDPAGCLNEGMAPPTPPKNPEEEQK

SEQ ID NO: 29253 - protein, 1239 aa, Artificial Sequence
  Synthetic polypeptide
RQAAIQFLHSDAYSHSSSENGGKSESVANLQAQPSLNSIHSSPGPKRSTNTLKKWLTSPVRRLNSGKADGNIKKQKKVRDGRKSFDLGSPKPGDETTPQGDSADEKSKKGWGEDEPDEESHTPLPPPMKIFDNDPTQDEMSLEGSSYRGSLKDPAGCLNEGMAPPTPPKNPEEEQKAKALRGRMFVLNELVQTEKDYVKDLGIVVEGFMKRIEEKGVPEDMRGKDKIVFGNIHQIYDWHKDFFLAELEKCIQEQDRLAQLFIKHERKLHIYVWYCQNKPRSEYIVAEYDAYFEEVKQEINQRLTLSDFLIKPIQRITKYQLLLKDFLRYSEKAGLECSDIEKAVELMCLVPKRCNDMMNLGRLQGFEGTLTAQGKLLQQDTFYVIELDAGMQSRTKERRVFLFEQIVIFSELLRKGSLTPGYMFKRSIKMNYLVLEENVDNDPCKFALMNRETSERVVLQAANADIQQAWVQDINQVLETQRDFLNALQSPIEYQRKERSTAVMRSQPARLPQASPRPYSSVPAGSEKPPKGSSYNPPLPPLKISTSNGSPGFEYHQPGDKFEASKQNDLGGCNGTSSMAVIKDYYALKENEICVSQGEVVQVLAVNQQNMCLVYQPASDHSPAAEGWVPGSILAPLTKATAAESSDGSIKKSCSWHTLRMRKRAEVENTGKNEATGPRKPKDILGNKVSVKETNSSEESECDDLDPNTSMEILNPNFIQEVAPEFLVPLVDVTCLLGDTVILQCKVCGRPKPTITWKGPDQNILDTDNSSATYTVSSCDSGEITLKICNLMPQDSGIYTCIATNDHGTTSTSATVKVQGVPAAPNRPIAQERSCTSVILRWLPPSSTGNCTISGYTVEYREEGSQIWQQSVASTLDTYLVIEDLSPGCPYQFRVSASNPWGISLPSEPSEFVRLPEYDAAADGATISWKENFDSAYTELNEIGRGRFSIVKKCIHKATRKDVAVKFVSKKMKKKEQAAHEAALLQHLQHPQYITLHDTYESPTSYILILELMDDGRLLDYLMNHDELMEEKVAFYIRDIMEALQYLHNCRVAHLDIKPENLLIDLRIPVPRVKLIDLEDAVQISGHFHIHHLLGNPEFAAPEVIQGIPVSLGTDIWSIGVLTYVMLSGVSPFLDESKEETCINVCRVDFSFPHEYFCGVSNAARDFINVILQEDFRRRPTAATCLQHPWLQPHNGSYSKIPLDTSRLACFIERRKHQNDVRPIPNVKSYIVNRVNQGT

SEQ ID NO: 29254 - protein, 399 aa, Artificial Sequence
  Synthetic polypeptide
HFGRLRREDHLSSGVQDQPRQHRTKRLVEGTINPGETCLIIEDVVTSGSSVLETVEVLQKEGLKVTDAIVLLDREQGGKDKLQAHGIRLHSVCTLSKMLEILEQQKKVDAETVGRVKRFIQENVFVAANHNGSPLSIKEAPKELSFGARAELPRIHPVASKLLRLMQKKETNLCLSADVSLARELLQLADALGPSICMLKTHVDILNDFTLDVMKELITLAKCHEFLIFEDRKFADIGNTVKKQYEGGIFKIASWADLVNAHVVPGSGVVKGLQEVGLPLHRGCLLIAEMSSTGSLATGDYTRAAVRMAEEHSEFVVGFISGSRVSMKPEFLHLTPGVQLEAGGDNLGQQYNSPQEVIGKRGSDIIIVGRGIISAADRLEAAEMYRKAAWEAYLSRLGV

SEQ ID NO: 29255 - protein, 16 aa, Artificial Sequence
  Synthetic polypeptide
AQEFKTSLDNIELSVL

SEQ ID NO: 29256 - protein, 28 aa, Artificial Sequence
  Synthetic polypeptide
HFGRLRREDHLSSGVQDQPRQHRTKRLV

SEQ ID NO: 29257 - protein, 261 aa, Artificial Sequence
  Synthetic polypeptide
HFGRLRREDHLSSGVQDQPRQHRTKRLVEGTINPGETCLIIEDVVTSGSSVLETVEVLQKEGLKVTDAIVLLDREQGGKDKLQAHGIRLHSVCTLSKMLEILEQQKKVDAETVGRVKRFIQENVFVAANHNGSPLSIKEAPKELSFGARAELPRIHPVASKLLRLMQKKETNLCLSADVSLARELLQLADALGPSICMLKTHVDILNDFTLDVMKELITLAKCHEFLIFEDRKFADIGNTVKKQYEGKCIIQESARIRNPA

SEQ ID NO: 29258 - protein, 1295 aa, Artificial Sequence
  Synthetic polypeptide
LCFSFAFCHECEASLAMWNDAAWKHWPESNTEAHVENITFYQNQEDFSTVSSKEGVMVQTSGKSHAASDAPENLTLLAETADARGRSGSSSRTNFTILPVGYSLEIATALTSQSGNLASESLHLPSSSSEFDERIAAFQTKSGTASEMGTERAMGLSEEWTVHSQEATTSAWSPSFLPALEMGELTTPSRKRNSSGPDLSWLHFYRTAASSPLLDLSSSSESTEKLNNSTGLQSSSVSQTKTMHVATVFTDGGPRTLRSLTVSLGPVSKTEGFPKDSRIATTSSSVLLSPSAVESRRNSRVTGNPGDEEFIEPSTENEFGLTSLRWQNDSPTFGEHQLASSSEVQNGSPMSQTETVSRSVAPMRGGEITAHWLLTNSTTSADVTGSSASYPEGVNASVLTQFSDSTVQSGGSHTALGDRSYSESSSTSSSESLNSSAPRGERSIAGISYGQVRGTAIEQRTSSDHTDHTYLSSTFTKGERALLSITDNSSSSDIVESSTSYIKISNSSHSEYSSFFHAQTERSNISSYDGEYAQPSTESPVLHTSNLPSYTPTINMPNTSVVLDTDAEFVSDSSSSSSSSSSSSSSGPPLPLPSVSQSHHLFSSILPSTRASVHLLKSTSDASTPWSSSPSPLPVSLTTSTSAPLSVSQTTLPQSSSTPVLPRARETPVTSFQTSTMTSFMTMLHSSQTADLKSQSTPHQEKVITESKSPSLVSLPTESTKAVTTNSPLPPSLTESSTEQTLPATSTNLAQMSPTFTTTILKTSQPLMTTPGTLSSTASLVTGPIAVQTTAGKQLSLTHPEILVPQISTEGGISTERNRVIVDATTGLIPLTSVPTSAKEMTTKLGVTAEYSPASRSLGTSPSPQTTVVSTAEDLAPKSATFAVQSSTQSPTTVSSSASVNSCAVNPCLHNGECVADNTSRGYHCRCPPSWQGDDCSVDVNECLSNPCPSTAMCNNTQGSFICKCPVGYQLEKGICNLVRTFVTEFKLKRTFLNTTVEKHSDLQEVENEITKTLNMCFSALPSYIRSTVHASRESNAVVISLQTTFSLASNVTLFDLADRMQKCVNSCKSSAEVCQLLGSQRRIFRAGSLCKRKSPECDKDTSICTDLDGVALCQCKSGYFQFNKMDHSCRACEDGYRLENETCMSCPFGLGGLNCGNPYQLITVVIAAAGGGLLLILGIALIVTCCRKNKNDISKLIFKSGDFQMSPYAEYPKNPRSQEWGREAIEMHENGSTKNLLQMTDVYYSPTSVRNPELERNGLYPAYTGLPGSRHSCIFPGQYNPSFISDESRRRDYF

SEQ ID NO: 29259 - protein, 19 aa, Artificial Sequence
  Synthetic polypeptide
PCGTMLPGNIGQKVTLRPM

SEQ ID NO: 29260 - protein, 17 aa, Artificial Sequence
  Synthetic polypeptide
GLPSHVERCCLETLARK

SEQ ID NO: 29261 - protein, 371 aa, Artificial Sequence
  Synthetic polypeptide
FVMPPQPCGTKGPNKTPVAAICLTSLVTMAFVFVGQVNVLAPIVTINFMLTYVAVDYSYFSLSMCSCSLTPVPEPVLREGAEGLHCSEHLLLEKAPSYGSEGPAQRVLEGTLLEFTKDMDQLLQLTRKLESSQPRQGEGNRTPESQKRKSKKATKQTLQDSFLLDLKSPPSFPVEISDRLPAASWEGQESCWNKQTSKSEGTQPEGTYGEQLVPELCNQSESSGEDFFLKSRLQEQDVWRRSTSFYTHMCNPWVSLLGAVGSLLIMFVIQWVYTLVNMGVAAIVYFYIGRASPGLHLGSASNFSFFRWMRSLLLPSCRSLRSPQEQIILAPSLAKVDMEMTQLTQENADFATRDRYHHSSLVNREQLMPHY

SEQ ID NO: 29262 - protein, 20 aa, Artificial Sequence
  Synthetic polypeptide
CLLSHVELRGQTKHPWLPSA

SEQ ID NO: 29263 - protein, 279 aa, Artificial Sequence
  Synthetic polypeptide
FVMPPQPCGTKGPNKTPVAAICLTSLVTMAFVFVGQVNVLAPIVTINFMLTYVAVDYSYFSLSMCSCSLTPVPEPVLREGAEGLHCSEHLLLEKAPSYGSEGPAQRVLEGTLLEFTKDMDQLLQLTRKLESSQPRQGEGNRTPESQKRKSKKATKQTLQDSFLLDLKSPPSFPVEISDRLPAASWEGQESCWNKQTSKSEGTQPEGTYGEQLVPELCNQSESSGEGDLRSPQEQIILAPSLAKVDMEMTQLTQENADFATRDRYHHSSLVNREQLMPHY

SEQ ID NO: 29264 - protein, 32 aa, Artificial Sequence
  Synthetic polypeptide
FVMPPQPCGTVVSVHHLRLPPGRHLHSRGPSL

SEQ ID NO: 29265 - protein, 447 aa, Artificial Sequence
  Synthetic polypeptide
CLLSHVELWFLYIIFVFLLGAICTREALRYDFLIAEKVSLMGFLFLLGLYISSLASCMGGLYGAPRILQCIAQEKVIPALACLGQGKGPNKTPVAAICLTSLVTMAFVFVGQVNVLAPIVTINFMLTYVAVDYSYFSLSMCSCSLTPVPEPVLREGAEGLHCSEHLLLEKAPSYGSEGPAQRVLEGTLLEFTKDMDQLLQLTRKLESSQPRQGEGNRTPESQKRKSKKATKQTLQDSFLLDLKSPPSFPVEISDRLPAASWEGQESCWNKQTSKSEGTQPEGTYGEQLVPELCNQSESSGEDFFLKSRLQEQDVWRRSTSFYTHMCNPWVSLLGAVGSLLIMFVIQWVYTLVNMGVAAIVYFYIGRASPGLHLGSASNFSFFRWMRSLLLPSCRSLRSPQEQIILAPSLAKVDMEMTQLTQENADFATRDRYHHSSLVNREQLMPHY

SEQ ID NO: 29266 - protein, 62 aa, Artificial Sequence
  Synthetic polypeptide
IGVPLHKLSLACCHARRDFASPSPSAMICDASSAMWNCGFCTSSSSSSWAPSALERPFAMTS

SEQ ID NO: 29267 - protein, 355 aa, Artificial Sequence
  Synthetic polypeptide
CLLSHVELWFLYIIFVFLLGAICTREALRYDFLIAEKVSLMGFLFLLGLYISSLASCMGGLYGAPRILQCIAQEKVIPALACLGQGKGPNKTPVAAICLTSLVTMAFVFVGQVNVLAPIVTINFMLTYVAVDYSYFSLSMCSCSLTPVPEPVLREGAEGLHCSEHLLLEKAPSYGSEGPAQRVLEGTLLEFTKDMDQLLQLTRKLESSQPRQGEGNRTPESQKRKSKKATKQTLQDSFLLDLKSPPSFPVEISDRLPAASWEGQESCWNKQTSKSEGTQPEGTYGEQLVPELCNQSESSGEGDLRSPQEQIILAPSLAKVDMEMTQLTQENADFATRDRYHHSSLVNREQLMPHY

SEQ ID NO: 29268 - protein, 58 aa, Artificial Sequence
  Synthetic polypeptide
CLLSHVELWFLYIIFVFLLGAICTREALRYDFLIAEKVSLMGFLFLLGLYISSLASCM

SEQ ID NO: 29269 - protein, 523 aa, Artificial Sequence
  Synthetic polypeptide
AFYHLTSSQEEGCIQHEHGFIGYSPELLQNNTLPDYSPGESFFTVFGVFFPAATGVMAGFNMGGDLREPAASIPPGSLAAVGISWFLYIIFVFLLGAICTREALRYDFLIAEKVSLMGFLFLLGLYISSLASCMGGLYGAPRILQCIAQEKVIPALACLGQGKGPNKTPVAAICLTSLVTMAFVFVGQVNVLAPIVTINFMLTYVAVDYSYFSLSMCSCSLTPVPEPVLREGAEGLHCSEHLLLEKAPSYGSEGPAQRVLEGTLLEFTKDMDQLLQLTRKLESSQPRQGEGNRTPESQKRKSKKATKQTLQDSFLLDLKSPPSFPVEISDRLPAASWEGQESCWNKQTSKSEGTQPEGTYGEQLVPELCNQSESSGEDFFLKSRLQEQDVWRRSTSFYTHMCNPWVSLLGAVGSLLIMFVIQWVYTLVNMGVAAIVYFYIGRASPGLHLGSASNFSFFRWMRSLLLPSCRSLRSPQEQIILAPSLAKVDMEMTQLTQENADFATRDRYHHSSLVNREQLMPHY

SEQ ID NO: 29270 - protein, 126 aa, Artificial Sequence
  Synthetic polypeptide
PSAMSRCLHHPPHFSSRRRFIILHHHKKKGAYSMNMVSLDIHPNCYRTTRCPITARGNLFSLSLGFSSQRLQESWPASTWGATSGSLPPAFPRAPWQLLASRGFCTSSSSSSWAPSALERPFAMTS

SEQ ID NO: 29271 - protein, 134 aa, Artificial Sequence
  Synthetic polypeptide
AFYHLTSSQEEGCIQHEHGFIGYSPELLQNNTLPDYSPGESFFTVFGVFFPAATGVMAGFNMGGDLREPAASIPPGSLAAVGISWFLYIIFVFLLGAICTREALRYDFLIAEKVSLMGFLFLLGLYISSLASCM

SEQ ID NO: 29272 - protein, 34 aa, Artificial Sequence
  Synthetic polypeptide
VKMPWPSPSPGGRPSCSCGSLCCLGPGMVCSHPA

SEQ ID NO: 29273 - protein, 717 aa, Artificial Sequence
  Synthetic polypeptide
NEILTHATTWMNLEDIMLSEDALAQPQPWWKTQLFMWEPVLFGTWDGVFTSCMINIFGVVLFLRTGWLVGNTGVLLGMFLVSFVILVALVTVLSGIGVGERSSIGSGGVYSMISSVLGGQTGGTIGLLYVFGQCVAGAMYITGFAESISDLLGLGNIWAVRGISVAVLLALLGINLAGVKWIIRLQLLLLFLLAVSTLDFVVGSFTHLDPEHGFIGYSPELLQNNTLPDYSPGESFFTVFGVFFPAATGVMAGFNMGGDLREPAASIPPGSLAAVGISWFLYIIFVFLLGAICTREALRYDFLIAEKVSLMGFLFLLGLYISSLASCMGGLYGAPRILQCIAQEKVIPALACLGQGKGPNKTPVAAICLTSLVTMAFVFVGQVNVLAPIVTINFMLTYVAVDYSYFSLSMCSCSLTPVPEPVLREGAEGLHCSEHLLLEKAPSYGSEGPAQRVLEGTLLEFTKDMDQLLQLTRKLESSQPRQGEGNRTPESQKRKSKKATKQTLQDSFLLDLKSPPSFPVEISDRLPAASWEGQESCWNKQTSKSEGTQPEGTYGEQLVPELCNQSESSGEDFFLKSRLQEQDVWRRSTSFYTHMCNPWVSLLGAVGSLLIMFVIQWVYTLVNMGVAAIVYFYIGRASPGLHLGSASNFSFFRWMRSLLLPSCRSLRSPQEQIILAPSLAKVDMEMTQLTQENADFATRDRYHHSSLVNREQLMPHY

SEQ ID NO: 29274 - protein, 178 aa, Artificial Sequence
  Synthetic polypeptide
NEILTHATTWMNLEDIMLSEDALAQPQPWWKTQLFMWEPVLFGTWDGVFTSCMINIFGVVLFLRTGWLVGNTGVLLGMFLVSFVILVALVTVLSGIGVGERSSIGSGGVYSMISSVLGGQTGGTIGLLYVFGQVPCISPALLNPSRICWASGISGLCEEFQLRCFWPCWALTSQVSNG

SEQ ID NO: 29275 - protein, 27 aa, Artificial Sequence
  Synthetic polypeptide
QNEDENIEGMHLLLMIFWKMKNIMQIS

SEQ ID NO: 29276 - protein, 33 aa, Artificial Sequence
  Synthetic polypeptide
LSQECKVSLTFENPSNSYFNRMKMKTLKVCIFY

SEQ ID NO: 29277 - protein, 54 aa, Artificial Sequence
  Synthetic polypeptide
QHDRLKEHKPRRSVSSSGLHYFLAMTPWACAVTLAAEERYEDKHAYHHIKEVSA

SEQ ID NO: 29278 - protein, 294 aa, Artificial Sequence
  Synthetic polypeptide
PWLQKRDMKTNMPIITSKRYQHSVEWAAELMRRQGQDESTVRRILKDYTKPLEHPPVKRNEEAQVHDKLNSGMVSNMEGTAGGERPSVVNGDSGKSGGVGDPREPLGCLQEGSGCHPTTESFEKSVREDASPLPHVCCCKQDALILQRGLHHEDGSQHIGLLHPGDRGPDHEYVLVEEAECAMSEREAAPNEELVQRNRLICRRNPYRIFEYLQLSLEEAFFLVYALGCLSIYYEKEPLTIVKLWKAFTVVQPTFRTTYMAYHYFRSKGWVPKVGLKYGTDLLLYRKGPPFYHA

SEQ ID NO: 29279 - protein, 28 aa, Artificial Sequence
  Synthetic polypeptide
IRILIWPSLLPSNDTMGMCGNLGCRREI

SEQ ID NO: 29280 - protein, 355 aa, Artificial Sequence
  Synthetic polypeptide
PWLQKRDMKTNMPIITSKRYQHSVEWAAELMRRQGQDESTVRRILKDYTKPLEHPPVKRNEEAQVHDKLNSGMVSNMEGTAGGERPSVVNGDSGKSGGVGDPREPLGCLQEGSGCHPTTESFEKSVREDASPLPHVCCCKQDALILQRGLHHEDGSQHIGLLHPGDRGPDHEYVLVEEAECAMSEREAAPNEEAFFLVYALGCLSIYYEKEPLTIVKLWKAFTVVQPTFRTTYMAYHYFRSKGWVPKVGLKYGTDLLLYRKGPPFYHASYSVIIELVDDHFEGSLRRPLSWKSLAALSRVSVNVSKELMLCYLIKPSTMTDKEMESPECMKRIKVQEVILSRWVSSRERSDQDDL

SEQ ID NO: 29281 - protein, 364 aa, Artificial Sequence
  Synthetic polypeptide
PWLQKRDMKTNMPIITSKRYQHSVEWAAELMRRQGQDESTVRRILKDYTKPLEHPPVKRNEEAQVHDKLNSGMVSNMEGTAGGERPSVVNGDSGKSGGVGDPREPLGCLQEGSGCHPTTESFEKSVREDASPLPHVCCCKQDALILQRGLHHEDGSQHIGLLHPGDRGPDHEYVLVEEAECAMSEREAAPNEELVQRNRLICRRNPYRIFEYLQLSLEEEPLTIVKLWKAFTVVQPTFRTTYMAYHYFRSKGWVPKVGLKYGTDLLLYRKGPPFYHASYSVIIELVDDHFEGSLRRPLSWKSLAALSRVSVNVSKELMLCYLIKPSTMTDKEMESPECMKRIKVQEVILSRWVSSRERSDQDDL

SEQ ID NO: 29282 - protein, 322 aa, Artificial Sequence
  Synthetic polypeptide
PWLQKRDMKTNMPIITSKRYQHSVEWAAELMRRQGQDESTVRRILKDYTKPLEHPPVKRNEEAQVHDKLNSGMVSNMEGTAGGERPSVRGLHHEDGSQHIGLLHPGDRGPDHEYVLVEEAECAMSEREAAPNEELVQRNRLICRRNPYRIFEYLQLSLEEAFFLVYALGCLSIYYEKEPLTIVKLWKAFTVVQPTFRTTYMAYHYFRSKGWVPKVGLKYGTDLLLYRKGPPFYHASYSVIIELVDDHFEGSLRRPLSWKSLAALSRVSVNVSKELMLCYLIKPSTMTDKEMESPECMKRIKVQEVILSRWVSSRERSDQDDL

SEQ ID NO: 29283 - protein, 381 aa, Artificial Sequence
  Synthetic polypeptide
PWLQKRDMKTNMPIITSKRYQHSVEWAAELMRRQGQDESTVRRILKDYTKPLEHPPVKRNEEAQVHDKLNSGMVSNMEGTAGGERPSVVNGDSGKSGGVGDPREPLGCLQEGSGCHPTTESFEKSVREDASPLPHVCCCKQDALILQRGLHHEDGSQHIGLLHPGDRGPDHEYVLVEEAECAMSEREAAPNEELVQRNRLICRRNPYRIFEYLQLSLEEAFFLVYALGCLSIYYEKEPLTIVKLWKAFTVVQPTFRTTYMAYHYFRSKGWVPKVGLKYGTDLLLYRKGPPFYHASYSVIIELVDDHFEGSLRRPLSWKSLAALSRVSVNVSKELMLCYLIKPSTMTDKEMESPECMKRIKVQEVILSRWVSSRERSDQDDL

SEQ ID NO: 29284 - protein, 318 aa, Artificial Sequence
  Synthetic polypeptide
PWLQKRDMKTNMPIITSKRYQHSVEWAAELMRRQGQDESTVRRILKDYTKPLEHPPVKRNEEAQVHDKLNSGMVSNMEGTAGGERPSVVNGDSGKSGGVGDPREPLGCLQEGSGCHPTTESFEKSVREDASPLPHVCCCKQDALILQRGLHHEDGSQHIGLLHPGDRGPDHEYVLVEEAECAMSEREAAPNEEAFFLVYALGCLSIYYEKEPLTIVKLWKAFTVVQPTFRTTYMAYHYFRSKGWVPKVGLKYGTDLLLYRKGPPFYHASYSVIIELVDDHFEGSLRRPLSWKSLAALSRVSVNVSKVTQHQLCHWSVT

SEQ ID NO: 29285 - protein, 47 aa, Artificial Sequence
  Synthetic polypeptide
GQAQWLTPVIPAFWEAEAGGSPQVSLVCWSMEKSTHFLYPVHMLGQF

SEQ ID NO: 29286 - protein, 16 aa, Artificial Sequence
  Synthetic polypeptide
SQRFGRPKQVDRLRYP

SEQ ID NO: 29287 - protein, 218 aa, Artificial Sequence
  Synthetic polypeptide
PGTVAHACNPSVLGGRSRWIASGILSLLEHGEEYTFSLPCAYARSILTVPWVELGGKVSVNCAKTGYSASITFHTKPFYGGKLHRVTAEVKHNITNTVVCRVQGEWNSVLEFTYSNGETKYVDLTKLAVTKKRVRPLEKQDPFESRRLWKNVTDSLRESEIDKATEHKHTLEERQRTEERHRTETGTPWKTKYFIKEGDGWVYHKPLWKIIPTTQPAE

SEQ ID NO: 29288 - protein, 4 aa, Artificial Sequence
  Synthetic polypeptide
DMLI

SEQ ID NO: 29289 - protein, 298 aa, Artificial Sequence
  Synthetic polypeptide
DRNGRSLGYADMKTNMPIITSKRYQHSVEWAAELMRRQGQDESTVRRILKDYTKPLEHPPVKRNEEAQVHDKLNSGMVSNMEGTAGGERPSVVNGDSGKSGGVGDPREPLGCLQEGSGCHPTTESFEKSVREDASPLPHVCCCKQDALILQRGLHHEDGSQHIGLLHPGDRGPDHEYVLVEEAECAMSEREAAPNEELVQRNRLICRRNPYRIFEYLQLSLEEAFFLVYALGCLSIYYEKEPLTIVKLWKAFTVVQPTFRTTYMAYHYFRSKGWVPKVGLKYGTDLLLYRKGPPFYHA

SEQ ID NO: 29290 - protein, 359 aa, Artificial Sequence
  Synthetic polypeptide
DRNGRSLGYADMKTNMPIITSKRYQHSVEWAAELMRRQGQDESTVRRILKDYTKPLEHPPVKRNEEAQVHDKLNSGMVSNMEGTAGGERPSVVNGDSGKSGGVGDPREPLGCLQEGSGCHPTTESFEKSVREDASPLPHVCCCKQDALILQRGLHHEDGSQHIGLLHPGDRGPDHEYVLVEEAECAMSEREAAPNEEAFFLVYALGCLSIYYEKEPLTIVKLWKAFTVVQPTFRTTYMAYHYFRSKGWVPKVGLKYGTDLLLYRKGPPFYHASYSVIIELVDDHFEGSLRRPLSWKSLAALSRVSVNVSKELMLCYLIKPSTMTDKEMESPECMKRIKVQEVILSRWVSSRERSDQDDL

SEQ ID NO: 29291 - protein, 368 aa, Artificial Sequence
  Synthetic polypeptide
DRNGRSLGYADMKTNMPIITSKRYQHSVEWAAELMRRQGQDESTVRRILKDYTKPLEHPPVKRNEEAQVHDKLNSGMVSNMEGTAGGERPSVVNGDSGKSGGVGDPREPLGCLQEGSGCHPTTESFEKSVREDASPLPHVCCCKQDALILQRGLHHEDGSQHIGLLHPGDRGPDHEYVLVEEAECAMSEREAAPNEELVQRNRLICRRNPYRIFEYLQLSLEEEPLTIVKLWKAFTVVQPTFRTTYMAYHYFRSKGWVPKVGLKYGTDLLLYRKGPPFYHASYSVIIELVDDHFEGSLRRPLSWKSLAALSRVSVNVSKELMLCYLIKPSTMTDKEMESPECMKRIKVQEVILSRWVSSRERSDQDDL

SEQ ID NO: 29292 - protein, 326 aa, Artificial Sequence
  Synthetic polypeptide
DRNGRSLGYADMKTNMPIITSKRYQHSVEWAAELMRRQGQDESTVRRILKDYTKPLEHPPVKRNEEAQVHDKLNSGMVSNMEGTAGGERPSVRGLHHEDGSQHIGLLHPGDRGPDHEYVLVEEAECAMSEREAAPNEELVQRNRLICRRNPYRIFEYLQLSLEEAFFLVYALGCLSIYYEKEPLTIVKLWKAFTVVQPTFRTTYMAYHYFRSKGWVPKVGLKYGTDLLLYRKGPPFYHASYSVIIELVDDHFEGSLRRPLSWKSLAALSRVSVNVSKELMLCYLIKPSTMTDKEMESPECMKRIKVQEVILSRWVSSRERSDQDDL

SEQ ID NO: 29293 - protein, 385 aa, Artificial Sequence
  Synthetic polypeptide
DRNGRSLGYADMKTNMPIITSKRYQHSVEWAAELMRRQGQDESTVRRILKDYTKPLEHPPVKRNEEAQVHDKLNSGMVSNMEGTAGGERPSVVNGDSGKSGGVGDPREPLGCLQEGSGCHPTTESFEKSVREDASPLPHVCCCKQDALILQRGLHHEDGSQHIGLLHPGDRGPDHEYVLVEEAECAMSEREAAPNEELVQRNRLICRRNPYRIFEYLQLSLEEAFFLVYALGCLSIYYEKEPLTIVKLWKAFTVVQPTFRTTYMAYHYFRSKGWVPKVGLKYGTDLLLYRKGPPFYHASYSVIIELVDDHFEGSLRRPLSWKSLAALSRVSVNVSKELMLCYLIKPSTMTDKEMESPECMKRIKVQEVILSRWVSSRERSDQDDL

SEQ ID NO: 29294 - protein, 322 aa, Artificial Sequence
  Synthetic polypeptide
DRNGRSLGYADMKTNMPIITSKRYQHSVEWAAELMRRQGQDESTVRRILKDYTKPLEHPPVKRNEEAQVHDKLNSGMVSNMEGTAGGERPSVVNGDSGKSGGVGDPREPLGCLQEGSGCHPTTESFEKSVREDASPLPHVCCCKQDALILQRGLHHEDGSQHIGLLHPGDRGPDHEYVLVEEAECAMSEREAAPNEEAFFLVYALGCLSIYYEKEPLTIVKLWKAFTVVQPTFRTTYMAYHYFRSKGWVPKVGLKYGTDLLLYRKGPPFYHASYSVIIELVDDHFEGSLRRPLSWKSLAALSRVSVNVSKVTQHQLCHWSVT

SEQ ID NO: 29295 - protein, 104 aa, Artificial Sequence
  Synthetic polypeptide
IPPPSWKVSASTGMTHPQPKPPSFWTAQLWPTLDKLMTPRSSTESSAATWPSSRCRPLSWGSWLLWLRCCWAWCLERKWMSPRWSCCVPAVSSLPSLQPLPWGC

SEQ ID NO: 29296 - protein, 21 aa, Artificial Sequence
  Synthetic polypeptide
LIHNPSLRVFGQLSSGQHWTN

SEQ ID NO: 29297 - protein, 397 aa, Artificial Sequence
  Synthetic polypeptide
SVVFSILNPTTILEGFSIHRDDSSTTQASEFLDSSALANTGQIDDPQEQHRVISSNLALIQVQATVVGLLAAVAALLLGVVSREEVDVAKVELLCASSVLTAFLAAFALGVLMVCIVIGARKLGVNPDNIATPIAASLGDLITLSILALVSSFFYRHKDSRYLTPLVCLSFAALTPVWVLIAKQSPPIVKILKFGWFPIILAMVISSFGGLILSKTVSKQQYKGMAIFTPVICGVGGNLVAIQTSRISTYLHMWSAPGVLPLQMKKFWPNPCSTFCTSEINSMSARVLLLLVVPGHLIFFYIIYLVEGQSVINSQTFVVLYLLAGLIQVTILLYLAEVMVRLTWHQALDPDNHCIPYLTGLGDLLGTGLLALCFFTDWLLKSKAELGGISELASGPP

SEQ ID NO: 29298 - protein, 417 aa, Artificial Sequence
  Synthetic polypeptide
SVVFSILNPTTILEGFSIHRDDSSTTQASEFLDSSALANTGQIDDPQEQHRVISSNLALIQVQATVVGLLAAVAALLLGVVSREEVDVAKVELLCASSVLTAFLAAFALGVLMVCIVIGARKLGVNPDNIATPIAASLGDLITLSILALVSSFFYRHKDSRYLTPLVCLSFAALTPVWVLIAKQSPPIVKILKFGWFPIILAMVISSFGGLILSKTVSKQQYKGMAIFTPVICGVGGNLVAIQTSRISTYLHMWSAPGVLPLQMKKFWPNPCSTFCTSEINSMSARVLLLLVVPGHLIFFYIIYLVEGQSVINSQTFVVLYLLAGLIQVTILLYLAEVMVRLTWHQALDPDNHCIPYLTGLGDLLGSSSVGHTAAVPRRCTASPGWGLIQPFICTQHLIVSLLSFYFPFCLLAKTSI

SEQ ID NO: 29299 - protein, 85 aa, Artificial Sequence
  Synthetic polypeptide
IPPPSWKVSASTGMTHPQPKPPSFWTAQLWPTLDKLMTPRSSTESSAATWPSSRCRPLSWGSWLLWLRCCWAWCLERKWMSPRGA

SEQ ID NO: 29300 - protein, 92 aa, Artificial Sequence
  Synthetic polypeptide
SVVFSILNPTTILEGFSIHRDDSSTTQASEFLDSSALANTGQIDDPQEQHRVISSNLALIQVQATVVGLLAAVAALLLGVVSREEVDVAKGC

SEQ ID NO: 29301 - protein, 189 aa, Artificial Sequence
  Synthetic polypeptide
SVVFSILNPTTILEGFSIHRDDSSTTQASEFLDSSALANTGQIDDPQEQHRVISSNLALIQVQATVVGLLAAVAALLLGVVSREEVDVAKVELLCASSVLTAFLAAFALGVLMVCIVIGARKLGVNPDNIATPIAASLGDLITLSILALVSSFFYRHKDSRYLTPLVCLSFAALTPVWVLIAKQSPPIV

SEQ ID NO: 29302 - protein, 146 aa, Artificial Sequence
  Synthetic polypeptide
SVVFSILNPTTILEGFSIHRDDSSTTQASEFLDSSALANTGQIDDPQEQHRVISSNLALIQVQATVVGLLAAVAALLLGVVSREEVDVAKVELLCASSVLTAFLAAFALGVLMVCIVIGARKLGVNPDNIATPIAASLGDLITLSI

SEQ ID NO: 29303 - protein, 104 aa, Artificial Sequence
  Synthetic polypeptide
IPPPSWKVSASTGMTHPQPKPPSFWTAQLWPTLDKLMTPRSSTESSAATWPSSRCRPLSWGSWLLWLRCCWAWCLERKWMSPRWSCCVPAVSSLPSLQPLPWVS

SEQ ID NO: 29304 - protein, 111 aa, Artificial Sequence
  Synthetic polypeptide
SVVFSILNPTTILEGFSIHRDDSSTTQASEFLDSSALANTGQIDDPQEQHRVISSNLALIQVQATVVGLLAAVAALLLGVVSREEVDVAKVELLCASSVLTAFLAAFALGE

SEQ ID NO: 29305 - protein, 76 aa, Artificial Sequence
  Synthetic polypeptide
IPPPSWKVSASTGMTHPQPKPPSFWTAQLWPTLDKLMTPRSSTESSAATWPSSRCRPLSWGSWLLWLRCCWAWCLE

SEQ ID NO: 29306 - protein, 83 aa, Artificial Sequence
  Synthetic polypeptide
SVVFSILNPTTILEGFSIHRDDSSTTQASEFLDSSALANTGQIDDPQEQHRVISSNLALIQVQATVVGLLAAVAALLLGVVSR

SEQ ID NO: 29307 - protein, 54 aa, Artificial Sequence
  Synthetic polypeptide
IPPPSWKVSASTGMTHPQPKPPSFWTAQLWPTLDKLMTPRSSTESSAATWPSSR

SEQ ID NO: 29308 - protein, 62 aa, Artificial Sequence
  Synthetic polypeptide
SVVFSILNPTTILEGFSIHRDDSSTTQASEFLDSSALANTGQIDDPQEQHRVISSNLALIQV

SEQ ID NO: 29309 - protein, 41 aa, Artificial Sequence
  Synthetic polypeptide
IPPPSWKVSASTGMTHPQPKPPSFWTAQLWPTLDKLMTPRS

SEQ ID NO: 29310 - protein, 48 aa, Artificial Sequence
  Synthetic polypeptide
SVVFSILNPTTILEGFSIHRDDSSTTQASEFLDSSALANTGQIDDPQE

SEQ ID NO: 29311 - protein, 21 aa, Artificial Sequence
  Synthetic polypeptide
FYTMVFYAWCVSGRKSVPILT

SEQ ID NO: 29312 - protein, 476 aa, Artificial Sequence
  Synthetic polypeptide
APPPVRSAAALDSNRSTNPIVSCACEGSTLCASYENLMPDELSLSPMTPRWDHLVAEKQAQCSTDSTLWYFMHGVCREGSQCLFSHDLANSKPSTICKYYQKGYCAYGTRCRYDHTRPSAAAGGAVGTMAHSVPSPAFHSPHPPSEVTASIVKTNSHEPGKREKRTLVLRDRNLSGMAERKTQPSMVSNPGSCSDPQPSPEMKPHSYLDAIRSGLDDVEASSSYSNEQQLCPYAAAGECRFGDACVYLHGEVCEICRLQVLHPFDPEQRKAHEKICMLTFEHEMEKAFAFQASQDKVCSICMEVILEKASASERRFGILSNCNHTYCLSCIRQWRCAKQFENPIIKSCPECRVISEFVIPSVYWVEDQNKKNELIEAFKQGMGKKACKYFEQGKGTCPFGSKCLYRHAYPDGRLAEPEKPRKQLSSQGTVRFFNSVRLWDFIENRESRHVPNNEDVDMTELGDLFMHLSGVESSEP

SEQ ID NO: 29313 - protein, 97 aa, Artificial Sequence
  Synthetic polypeptide
LQKNKLSVPLILHYGILCMVCVGKEVSAYSHMTWQTANRPPSASTTRRATVPMELGADMTTRGPLLQLEVLWAPWPTVCPPQLSTVLTLLPRSLHPL

SEQ ID NO: 29314 - protein, 474 aa, Artificial Sequence
  Synthetic polypeptide
APPPVRSAAALDSNRSTNPIVSCACEGSTLCASYENLMPDELSLSPMTPRWDHLVAEKQAQCSTDSTLWYFMHGVCREGSQCLFSHDLANSKPSTICKYYQKGYCAYGTRYDHTRPSAAAGGAVGTMAHSVPSPAFHSPHPPSEVTASIVKTNSHEPGKREKRTLVLRDRNLSGMAERKTQPSMVSNPGSCSDPQPSPEMKPHSYLDAIRSGLDDVEASSSYSNEQQLCPYAAAGECRFGDACVYLHGEVCEICRLQVLHPFDPEQRKAHEKICMLTFEHEMEKAFAFQASQDKVCSICMEVILEKASASERRFGILSNCNHTYCLSCIRQWRCAKQFENPIIKSCPECRVISEFVIPSVYWVEDQNKKNELIEAFKQGMGKKACKYFEQGKGTCPFGSKCLYRHAYPDGRLAEPEKPRKQLSSQGTVRFFNSVRLWDFIENRESRHVPNNEDVDMTELGDLFMHLSGVESSEP

SEQ ID NO: 29315 - protein, 95 aa, Artificial Sequence
  Synthetic polypeptide
LQKNKLSVPLILHYGILCMVCVGKEVSAYSHMTWQTANRPPSASTTRRATVPMELDMTTRGPLLQLEVLWAPWPTVCPPQLSTVLTLLPRSLHPL

SEQ ID NO: 29316 - protein, 74 aa, Artificial Sequence
  Synthetic polypeptide
MLSEVLWSPVAPWSLTVYSEKNKRRQNESSPFPCKPEQLVVWEPRGAQRRTARTSSSSWGAVRGAGRPGPAGAG

SEQ ID NO: 29317 - protein, 138 aa, Artificial Sequence
  Synthetic polypeptide
GDLAKCFLRSFGVLWLHGASQSTQRKIKEGKMSPPHFHASQNSWLCGSLVVPSGGRPGPAPAAGVQCGAQGVQVQLVQDDPSGEGVLPSARGPATFLPFLTVDLPVYVLQEVLPSSGGPAGPEATQFPGSTINLQDLQ

SEQ ID NO: 29318 - protein, 18 aa, Artificial Sequence
  Synthetic polypeptide
GPLESCGSMEPHSLLREK

SEQ ID NO: 29319 - protein, 41 aa, Artificial Sequence
  Synthetic polypeptide
PLGLHLVPFPSRGTRTSSPASGPPCFPGGCRWLSSGCLKTW

SEQ ID NO: 29320 - protein, 37 aa, Artificial Sequence
  Synthetic polypeptide
LWDCISCHFPRVAPAPRPQPQDRRVFLEGAAGSAQAV

SEQ ID NO: 29321 - protein, 241 aa, Artificial Sequence
  Synthetic polypeptide
SGTASRAISLAWHPHLVPSLRTAVFSWRVPLAQLRLSENVVNRMKEPSSPPPAPTSSTFGLQDGNLRAPHKESTLPRSGSSGGQQPSGMKEGVKRYEQEHAAIQDKLFQVAKREREAATKHSKASLPTGEGSISHEEQKSVRLARELESREAELRRRDTFYKEQLERIERKNAEMYKLSSEQFHEAASKMESTIKPRRVEPVCSGLQAQILHCYRDRPHEVLLCSDLVKAYQRCVSAAHKG

SEQ ID NO: 29322 - protein, 146 aa, Artificial Sequence
  Synthetic polypeptide
SGTASRAISLAWHPHLVPSLRTAVFSWRVPLAQLRLSENVVNRMKEPSSPPPAPTSSTFGLQDGNLRAPHKESTLPRSGSSGGQQPSGMKEGVKRYEQEHAAIQDKLFQVAKREREAATKHSKASLPTGEGSISHEEQKSVRLIIH

SEQ ID NO: 29323 - protein, 262 aa, Artificial Sequence
  Synthetic polypeptide
SGTASRAISLAWHPHLVPSLRTAVFSWRVPLAQLRLSENVVNRMKEPSSPPPAPTSSTFGLQDGNLRAPHKESTLPRSGSSGGQQPSGMKEGVKRYEQEHAAIQDKLFQVAKREREAATKHSKASLPTGEGSISHEEQKSVRLQARELESREAELRRRDTFYKEQLERIERKNAEMYKLSSEQFHEAASKMESTIKPRRVEPVCSGLQAQILHCYRDRPHEVLLCSDLVKAYQRCVSAAHKVRPCLPPRFPRALGGRRGTSI

SEQ ID NO: 29324 - protein, 112 aa, Artificial Sequence
  Synthetic polypeptide
MYPPSRSCLCPLVLARELESREAELRRRDTFYKEQLERIERKNAEMYKLSSEQFHEAASKMESTIKPRRVEPVCSGLQAQILHCYRDRPHEVLLCSDLVKAYQRCVSAAHKG

SEQ ID NO: 29325 - protein, 33 aa, Artificial Sequence
  Synthetic polypeptide
QEKFQDWLKCTLLQEAVYALWCWPGSWRAERQS

SEQ ID NO: 29326 - protein, 58 aa, Artificial Sequence
  Synthetic polypeptide
FVPWSVALVSWNVPFFFLPQVNRRSFRIGLNVPSFKKLSMPSGAGQGAGEQRGRAKTP

SEQ ID NO: 29327 - protein, 132 aa, Artificial Sequence
  Synthetic polypeptide
MYPPSRSCLCPLVLARELESREAELRRRDTFYKEQLERIERKNAEMYKLSSEQFHEAASKMESTIKPRRVEPVCSGLQAQILHCYRDRPHEVLLCSDLVKAYQRCVSAAHKVRPCLPPRFPRALGGRRGTSI

SEQ ID NO: 29328 - protein, 109 aa, Artificial Sequence
  Synthetic polypeptide
MYPPSRSCLCPLVLARELESREAELRRRDTFYKEQLERIERKNAEMYKLSSEQFHEAASKMESTIKVEPVCSGLQAQILHCYRDRPHEVLLCSDLVKAYQRCVSAAHKG

SEQ ID NO: 29329 - protein, 17 aa, Artificial Sequence
  Synthetic polypeptide
FLHFHLRPGSWRAERQS

SEQ ID NO: 29330 - protein, 129 aa, Artificial Sequence
  Synthetic polypeptide
RSQDGRIGTAPVHSSQRERRRRWVISAFPSEARELESREAELRRRDTFYKEQLERIERKNAEMYKLSSEQFHEAASKMESTIKPRRVEPVCSGLQAQILHCYRDRPHEVLLCSDLVKAYQRCVSAAHKG

SEQ ID NO: 29331 - protein, 149 aa, Artificial Sequence
  Synthetic polypeptide
RSQDGRIGTAPVHSSQRERRRRWVISAFPSEARELESREAELRRRDTFYKEQLERIERKNAEMYKLSSEQFHEAASKMESTIKPRRVEPVCSGLQAQILHCYRDRPHEVLLCSDLVKAYQRCVSAAHKVRPCLPPRFPRALGGRRGTSI

SEQ ID NO: 29332 - protein, 126 aa, Artificial Sequence
  Synthetic polypeptide
RSQDGRIGTAPVHSSQRERRRRWVISAFPSEARELESREAELRRRDTFYKEQLERIERKNAEMYKLSSEQFHEAASKMESTIKVEPVCSGLQAQILHCYRDRPHEVLLCSDLVKAYQRCVSAAHKG

SEQ ID NO: 29333 - protein, 53 aa, Artificial Sequence
  Synthetic polypeptide
TSQPPELPRRVEPVCSGLQAQILHCYRDRPHEVLLCSDLVKAYQRCVSAAHKG

SEQ ID NO: 29334 - protein, 64 aa, Artificial Sequence
  Synthetic polypeptide
IRKWALTRHQICQCLDLRLLSLQNCPAGWSPSAQGCRPRFSTATEIARMRCCCARTWSRHTSAA

SEQ ID NO: 29335 - protein, 88 aa, Artificial Sequence
  Synthetic polypeptide
LDHGSGGLMGGICALMKGTPESSLSFSTMLRTQREDTIYESESGPSPDIRSASALILDFSASRTAPQGGARLLRVAGPDSPLLPRSPA

SEQ ID NO: 29336 - protein, 73 aa, Artificial Sequence
  Synthetic polypeptide
TSQPPELPRRVEPVCSGLQAQILHCYRDRPHEVLLCSDLVKAYQRCVSAAHKVRPCLPPRFPRALGGRRGTSI

SEQ ID NO: 29337 - protein, 94 aa, Artificial Sequence
  Synthetic polypeptide
THCGTSILWTATPNPPGIMLNEKDLKTLPACQRKVPPGGPRRAFPTRTSLTWSMQTDSTSSAGTGNPQAHPRPSSLCPMEPESTVAAMKSWLGC

SEQ ID NO: 29338 - protein, 4 aa, Artificial Sequence
  Synthetic polypeptide
MKRT

SEQ ID NO: 29339 - protein, 311 aa, Artificial Sequence
  Synthetic polypeptide
KGPEDPSSMPEESSPRRTPQSIPYQDLPHLVNADGQYLFCRYWKPTGTPKALIFVSHGAGEHSGRYEELARMLMGLDLLVFAHDHVGHGQSEGERMVVSDFHVFVRDVLQHVDSMQKDYPGLPVFLLGHSMGGAIAILTAAERPGHFAGMVLISPLVLANPESATTFKVLAAKVLNLVLPNLSLGPIDSSVLSRNKTEVDIYNSDPLICRAGLKVCFGIQLLNAVSRVERALPKLTVPFLLLQGSADRLCDSKGAYLLMELAKSQDKTLKIYEGAYHVLHKELPEVTNSVFHEINMWVSQRTATAGTASPP

SEQ ID NO: 29340 - protein, 281 aa, Artificial Sequence
  Synthetic polypeptide
KGPEDPSSMPEESSPRRTPQSIPYQDLPHLVNADGQYLFCRYWKPTGTPKALIFVSHGAGEHSGRYEELARMLMGLDLLVFAHDHVGHGQSEGERMVVSDFHVFVRDVLQHVDSMQKDYPGLPVFLLGHSMGGAIAILTAAERPGHFAGMVLISPLVLANPESATTFKVDIYNSDPLICRAGLKVCFGIQLLNAVSRVERALPKLTVPFLLLQGSADRLCDSKGAYLLMELAKSQDKTLKIYEGAYHVLHKELPEVTNSVFHEINMWVSQRTATAGTASPP

SEQ ID NO: 29341 - protein, 73 aa, Artificial Sequence
  Synthetic polypeptide
SQHFGRPRWEDHLSPGVGDQPGKHSRAPPLQKTQKLARQLWLWLLLRSWVVRSPSAQWWGVKFTQLRSRRQRC

SEQ ID NO: 29342 - protein, 13 aa, Artificial Sequence
  Synthetic polypeptide
PDSSGSGYCSGAG

SEQ ID NO: 29343 - protein, 311 aa, Artificial Sequence
  Synthetic polypeptide
GSTSTKNTKISQTALALAIAQELGSKVPFCPMVGSEVYSTEIKKTEVLMENFRRAIGLRIKETKEVYEGEVTELTPCETENPMGGYGKTISHVIIGLKTAKGTKQLKLDPSIFESLQKERVEAGDVIYIEANSGAVKRQGRCDTYATEFDLEAEEYVPLPKGDVHKKKEIIQDVTLHDLDVANARPQGGQDILSMMGQLMKPKKTEITDKLRGEINKVVNKYIDQGIAELVPGVLFVDEVHMLDIECFTYLHRALESSIAPIVIFASNRGNCVIRGTEDITSPHGIPLDLLDRVMIIRTMLYTPQEMKQVP

SEQ ID NO: 29344 - protein, 392 aa, Artificial Sequence
  Synthetic polypeptide
GSTSTKNTKISQTALALAIAQELGSKVPFCPMVGSEVYSTEIKKTEVLMENFRRAIGLRIKETKEVYEGEVTELTPCETENPMGGYGKTISHVIIGLKTAKGTKQLKLDPSIFESLQKERVEAGDVIYIEANSGAVKRQGRCDTYATEFDLEAEEYVPLPKGDVHKKKEIIQDVTLHDLDVANARPQGGQDILSMMGQLMKPKKTEITDKLRGEINKVVNKYIDQGIAELVPGVLFVDEVHMLDIECFTYLHRALESSIAPIVIFASNRGNCVIRGTEDITSPHGIPLDLLDRVMIIRTMLYTPQEMKQIIKIRAQTEGINISEEALNHLGEIGTKTTLRYSVQLLTPANLLAKINGKDSIEKEHVEEISELFYDAKSSAKILADQQDKYMK

SEQ ID NO: 29345 - protein, 322 aa, Artificial Sequence
  Synthetic polypeptide
GSTSTKNTKISQTALALAIAQELGSKVPFCPMVGSEVYSTEIKKTEVLMENFRRAIGLRIKETKEVYEGEVTELTPCETENPMGGYGKTISHVIIGLKTAKGTKQLKLDPSIFESLQKERVEAGDVIYIEANSGAVKRQGRCDTYATEFDLEAEEYVPLPKGDVHKKKEIIQDVTLHDLDVANARPQGGQDILSMMGQLMKPKKTEITDKLRGEINKVVNKYIDQGIAELVPGVLFVDEVHMLDIECFTYLHRALESSIAPIVIFASNRGNCVIRGTEDITSPHGIPLDLLDRVMIIRTMLYTPQEMKQVLSAAADPGQLAC

SEQ ID NO: 29346 - protein, 42 aa, Artificial Sequence
  Synthetic polypeptide
SQHFGRPRWEDHLSPGVGDQPGKHSRAPPLQKTQKLARHVAS

SEQ ID NO: 29347 - protein, 42 aa, Artificial Sequence
  Synthetic polypeptide
PGMWRHSRINQKQENGWKSCLVGRTSWNWQDSSGSGYCSGAG

SEQ ID NO: 29348 - protein, 421 aa, Artificial Sequence
  Synthetic polypeptide
GSTSTKNTKISQACGVIVELIKSKKMAGRAVLLAGPPGTGKTALALAIAQELGSKVPFCPMVGSEVYSTEIKKTEVLMENFRRAIGLRIKETKEVYEGEVTELTPCETENPMGGYGKTISHVIIGLKTAKGTKQLKLDPSIFESLQKERVEAGDVIYIEANSGAVKRQGRCDTYATEFDLEAEEYVPLPKGDVHKKKEIIQDVTLHDLDVANARPQGGQDILSMMGQLMKPKKTEITDKLRGEINKVVNKYIDQGIAELVPGVLFVDEVHMLDIECFTYLHRALESSIAPIVIFASNRGNCVIRGTEDITSPHGIPLDLLDRVMIIRTMLYTPQEMKQIIKIRAQTEGINISEEALNHLGEIGTKTTLRYSVQLLTPANLLAKINGKDSIEKEHVEEISELFYDAKSSAKILADQQDKYMK

SEQ ID NO: 29349 - protein, 351 aa, Artificial Sequence
  Synthetic polypeptide
GSTSTKNTKISQACGVIVELIKSKKMAGRAVLLAGPPGTGKTALALAIAQELGSKVPFCPMVGSEVYSTEIKKTEVLMENFRRAIGLRIKETKEVYEGEVTELTPCETENPMGGYGKTISHVIIGLKTAKGTKQLKLDPSIFESLQKERVEAGDVIYIEANSGAVKRQGRCDTYATEFDLEAEEYVPLPKGDVHKKKEIIQDVTLHDLDVANARPQGGQDILSMMGQLMKPKKTEITDKLRGEINKVVNKYIDQGIAELVPGVLFVDEVHMLDIECFTYLHRALESSIAPIVIFASNRGNCVIRGTEDITSPHGIPLDLLDRVMIIRTMLYTPQEMKQVLSAAADPGQLAC

SEQ ID NO: 29350 - protein, 12 aa, Artificial Sequence
  Synthetic polypeptide
LLKERSFPISRS

SEQ ID NO: 29351 - protein, 574 aa, Artificial Sequence
  Synthetic polypeptide
YSRKEVFPFPEVSQDELNEINQFLGPVEKFFTEEVDSRKIDQEGKIPDETLEKLKSLGLFGLQVPEEYGGLGFSNTMYSRLGEIISMDGSITVTLAAHQAIGLKGIILAGTEEQKAKYLPKLASGEHIAAFCLTEPASGSDAASIRSRATLSEDKKHYILNGSKVWITNGGLANIFTVFAKTEVVDSDGSVKDKITAFIVERDFGGVTNGKPEDKLGIRGSNTCEVHFENTKIPVENILGEVGDGFKVAMNILNSGRFSMGSVVAGLLKRLIEMTAEYACTRKQFNKRLSEFGLIQEKFALMAQKAYVMESMTYLTAGMLDQPGFPDCSIEAAMVKVFSSEAAWQCVSEALQILGGLGYTRDYPYERILRDTRILLIFEGTNEILRMYIALTGLQHAGRILTTRIHELKQAKVSTVMDTVGRRLRDSLGRTVDLGLTGNHGVVHPSLADSANKFEENTYCFGRTVETLLLRFGKTIMEEQLVLKRVANILINLYGMTAVLSRASRSIRIGLRNHDHEVLLANTFCVEAYLQNLFSLSQLDKYAPENLDEQIKKVSQQILEKRAYICAHPLDRTC

SEQ ID NO: 29352 - protein, 53 aa, Artificial Sequence
  Synthetic polypeptide
TQGKKFSHFQKLAKMNLMKSISSWDPWKNSSLKRWTPEKLTRKGKSQMKLWRN

SEQ ID NO: 29353 - protein, 126 aa, Artificial Sequence
  Synthetic polypeptide
YSRKEVFPFPEVSQDELNEINQFLGPVEKFFTEEAYICLIKIFLLAVDSRKIDQEGKIPDETLEKLKSLGLFGLQVPEEYGGLGFSNTMYSRLGEIISMDGSITVTLAAHQAIGLKGIILAGTEEQ

SEQ ID NO: 29354 - protein, 38 aa, Artificial Sequence
  Synthetic polypeptide
TQGKKFSHFQKLAKMNLMKSISSWDPWKNSSLKRLIFV

SEQ ID NO: 29355 - protein, 443 aa, Artificial Sequence
  Synthetic polypeptide
IAAELRSGSDAASIRSRATLSEDKKHYILNGSKVWITNGGLANIFTVFAKTEVVDSDGSVKDKITAFIVERDFGGVTNGKPEDKLGIRGSNTCEVHFENTKIPVENILGEVGDGFKVAMNILNSGRFSMGSVVAGLLKRLIEMTAEYACTRKQFNKRLSEFGLIQEKFALMAQKAYVMESMTYLTAGMLDQPGFPDCSIEAAMVKVFSSEAAWQCVSEALQILGGLGYTRDYPYERILRDTRILLIFEGTNEILRMYIALTGLQHAGRILTTRIHELKQAKVSTVMDTVGRRLRDSLGRTVDLGLTGNHGVVHPSLADSANKFEENTYCFGRTVETLLLRFGKTIMEEQLVLKRVANILINLYGMTAVLSRASRSIRIGLRNHDHEVLLANTFCVEAYLQNLFSLSQLDKYAPENLDEQIKKVSQQILEKRAYICAHPLDRTC

SEQ ID NO: 29356 - protein, 14 aa, Artificial Sequence
  Synthetic polypeptide
GVGAMQPQSGAEPH

SEQ ID NO: 29357 - protein, 20 aa, Artificial Sequence
  Synthetic polypeptide
SSRVEEWERCSLNPEQSHTK

SEQ ID NO: 29358 - protein, 325 aa, Artificial Sequence
  Synthetic polypeptide
CQSTPGGRDIPKGQKGKYASLIEKYKKHPKTDSSVTKMRRFYHIEYFLLPDDEEPKKVDILLFPMVAKVFLESGVKTVKPWHEGDKAWVSWEQTFNITVTKELLKKINFHKITLRLWNTKDKMSRKVRYYRLKTAGFTDDVGAFHKSEVRHLVLNQRKLSEQGIENTNIVREESNQEHPPGKQEKTEKHPKSLQGSHQAEPETSSKNSEEYEKSLKMDDSSTIQWSVSRTPTISLAGASMMEIKELIESESLSSLTNILDRQRSQIKGKDSEGRRKIQRRHKKPLAEEEADPTLTGPRKQSAFSIQLAVMPLLAVRKKKGNSPIS

SEQ ID NO: 29359 - protein, 20 aa, Artificial Sequence
  Synthetic polypeptide
VSLPQEAGISLKVRRENMQV

SEQ ID NO: 29360 - protein, 334 aa, Artificial Sequence
  Synthetic polypeptide
CQSTPGGRDIPKGQKGKYASLIEKYKKHPKTDSSVTKMRRFYHIEYFLLPDDEEPKKVDILLFPMVAKVFLESGVKTVKPWHEGDKAWVSWEQTFNITVTKELLKKINFHKITLRLWNTKDKMSRKVRYYRLKTAGFTDDVGAFHKSEVRHLVLNQRKLSEQGIENTNIVREESNQEHPPGKQEKTEKHPKSLQGSHQAEPETSSKNSEEYEKSLKMDDSSTIQWSVSRTPTISLAGASMMEIKELIESESLSSLTNILDRQRSQIKGKDSEGRRKIQRRHKKPLAEEEADPTLTGPRKQSAFSIQLAVMPLLAGTHCLPCSQQLLLVLWPERP

SEQ ID NO: 29361 - protein, 65 aa, Artificial Sequence
  Synthetic polypeptide
PGQHGENLSLQKIKKLASCRSGTRPARSGSAPSPRATTAVPMGPSLPTTSPRGAPSCRCLTGLRM

SEQ ID NO: 29362 - protein, 46 aa, Artificial Sequence
  Synthetic polypeptide
PAADLGHGRPGAVPHHHPELLPQCQWGHPCLRHHQEELLPVGASLD

SEQ ID NO: 29363 - protein, 182 aa, Artificial Sequence
  Synthetic polypeptide
IPTLWEAEAGGLLQPRNLRLAWATWGEPVSAKNKKISQLQIWDTAGQERFRTITQSYYRSANGAILAYDITKRSSFLSVPHWIEDVRKYAGSNIVQLLIGNKSDLSELREVSLAEAQSLAEHYDILCAIETSAKDSSNVEEAFLRVATELIMRHGGPLFSEKSPDHIQLNSKDIGEGWGCGC

SEQ ID NO: 29364 - protein, 86 aa, Artificial Sequence
  Synthetic polypeptide
IPTLWEAEAGGLLQPRNLRLAWATWGEPVSAKNKKISQLQIWDTAGQERFRTITQSYYRSANGAILAYDITKRSSFLSVPHWIEDV

SEQ ID NO: 29365 - protein, 125 aa, Artificial Sequence
  Synthetic polypeptide
IPTLWEAEAGGLLQPRNLRLAWATWGEPVSAKNKKISQLQIWDTAGQERFRTITQSYYRSANGAILAYDITKRSSFLSVPHWIEDVRKYAGSNIVQLLIEMQSCYVAQADLELLASSNPPASTSK

SEQ ID NO: 29366 - protein, 36 aa, Artificial Sequence
  Synthetic polypeptide
PGQHGENLSLQKIKKLASCRSGTRPARSGSAPSPRA

SEQ ID NO: 29367 - protein, 19 aa, Artificial Sequence
  Synthetic polypeptide
PAADLGHGRPGAVPHHHPE

SEQ ID NO: 29368 - protein, 56 aa, Artificial Sequence
  Synthetic polypeptide
IPTLWEAEAGGLLQPRNLRLAWATWGEPVSAKNKKISQLQIWDTAGQERFRTITQS

SEQ ID NO: 29369 - protein, 38 aa, Artificial Sequence
  Synthetic polypeptide
SQRFGRPRQGDHQCSSFSAAHPRLLSAMLLFVPSIRLP

SEQ ID NO: 29370 - protein, 43 aa, Artificial Sequence
  Synthetic polypeptide
MGTVAHACNPSALGGRGRGITSAPAFLQLTQGCSPLCCCSYPQ

SEQ ID NO: 29371 - protein, 605 aa, Artificial Sequence
  Synthetic polypeptide
WARWLTPVIPALWEAEAGGSPVLQLFCSSPKAALRYAAVRTLNKVAMKHPSAVTACNLDLENLVTDSNRSIATLAITTLLKTGSESSIDRLMKQISSFMSEISDEFKVVVVQAISALCQKYPRKHAVLMNFLFTMLREEGGFEYKRAIVDCIISIIEENSESKETGLSHLCEFIEDCEFTVLATRILHLLGQEGPKTTNPSKYIRFIYNRVVLEHEEVRAGAVSALAKFGAQNEEMLPSILVLLKRCVMDDDNEVRDRATFYLNVLEQKQKALNAGYILNGLTVSIPGLERALQQYTLEPSEKPFDLKSVPLATAPMAEQRTESTPITAVKQPEKVAATRQEIFQEQLAAVPEFRGLGPLFKSSPEPVALTESETEYVIRCTKHTFTNHMVFQFDCTNTLNDQTLENVTVQMEPTEAYEVLCYVPARSLPYNQPGTCYTLVALPKEDPTAVACTFSCMMKFTVKDCDPTTGETDDEGYEDEYVLEDLEVTVADHIQKVMKLNFEAAWDEVGDEFEKEETFTLSTIKTLEEAVGNIVKFLGMHPCERSDKVPDNKNTHTLLLAGVFRGGHDILVRSRLLLLDTVTMQVTARSLEELPVDIILASVG

SEQ ID NO: 29372 - protein, 484 aa, Artificial Sequence
  Synthetic polypeptide
GLVQWLTPVILVLWEAEAGGSPEIERLEVSSLAQTSSAVASSTDGSIHTDSVDGTPDPQRTKAAIAHLQQKILKLTEQIKIAQTARDDNVAEYLKLANSADKQQAARIKQVFEKKNQKSAQTILQLQKKLEHYHRKLREVEQNGIPRQPKDVFRDMHQGLKDVGAKVTGFSEGVVDSVKGGFSSFSQATHSAAGAVVSKPREIASLIRNKFGSADNIPNLKDSLEEGQVDDAGKALGVISNFQSSPKYGSEEDCSSATSGSVGANSTTGGIAVGASSSKTNTLDMQSSGFDALLHEIQEIRETQARLEESFETLKEHYQRDYSLIMQTLQEERYRCERLEEQLNDLTELHQNEILNLKQELASMEEKIAYQSYERARDIQEALEACQTRISKMELQQQQQQVVQLEGLENATARNLLGKLINILLAVMAVLLVFVSTVANCVVPLMKTRNRTFSTLFLVVFIAFLWKHWDALFSYVERFFSSPR

SEQ ID NO: 29373 - protein, 17 aa, Artificial Sequence
  Synthetic polypeptide
YFGRLRRADHLRSNGWK

SEQ ID NO: 29374 - protein, 28 aa, Artificial Sequence
  Synthetic polypeptide
GLVQWLTPVILVLWEAEAGGSPEIERLE

SEQ ID NO: 29375 - protein, 228 aa, Artificial Sequence
  Synthetic polypeptide
EIPAWRILVRLVVCSRTLFPVKMFINDNVCPAGRGPSSVILVSPWPCDLTLSLCPCDILLPLKHMISVTHSLFVHHSPFETPNKNLLVLWLKGHHRTCRHVMSPPETQLAAQVPEVPLGSMERRASQGIRVIQDKTITSKDKRAPKENKEDKVEVDRKGCKAVLVPEAAGEEKVKGDSEVSQENQEILDLQAHWELKDYKAHRGHREILAEKEKKEARGRKDLRVLLG

SEQ ID NO: 29376 - protein, 29 aa, Artificial Sequence
  Synthetic polypeptide
CHPQRPSWQPRFQRCPWAVWREGLPRGSG

SEQ ID NO: 29377 - protein, 1147 aa, Artificial Sequence
  Synthetic polypeptide
KLAGFVAQGASQNLPTCDVTPRDPAGSPGSRGAPGQYGEKGFPGDPGNPGQNNNIKGQKGSKGEQGRQGRSGQKGVQGSPSSRGSRGREGQRGLRGVSGEPGNPGPTGTLGAEGLQGPQGSQGNPGRKGEKGSQGQKGPQGSPGLMGAKGSTGRPGLLGKKGEPGLPGDLGPVGQTGQRGRQGDSGIPGYGQMGRKGVKGPRGFPGDAGQKGDIGNPGIPGGPGPKGFRGLALTVGLKGEEGSRGLPGPPGQRGIKGMAGQPVYSQCDLIRFLREHSLCSLEKCPAYPTELVFALDNSYDVTEESFNKTRDIITSIVNDLNIRENNCPVGARVAMVSYNSGTSYLIRWSDYNRKKQLLQQLSQIKYQDTTEPRDVGNAMRFVTRNVFKRTYAGANVRRVAVFFSNGQTASRSSIITATMEFSALDISPTVFAFDERVFLEAFGFDNTGTFQVIPVPPNGENQTLERLRRCALCYDKCFPNACIREAFLPEDSYMDVVFLIDNSRNIAKDEFKAVKALVSSVIDNFNIASDPLISDSGDRIALLSYSPWESSRRKMGTVKTEFDFITYDNQLLMKNHIQTSFQQLNGEATIGRALLWTTENLFPETPYLRKHKVIFVVSAGENYERKEFVKMMALRAKCQGYVIFVISLGSTRKDDMEELASYPLDQHLIQLGRIHKPDLNYIAKFLKPFLYSVRRGFNQYPPPMLEDACRLINLGGENIQNDGFQFVTELQEDFLGGNGFIGQELNSGRESPFVKTEDNGSDYLVYLPSQMFEPQKLMINYEKDQKSAEIASLTSGHENYGRKEEPDHTYEPGDVSLQEYYMDVAFLIDASQRVGSDEFKEVKAFITSVLDYFHIAPTPLTSTLGDRVAVLSYSPPGYMPNTEECPVYLEFDLVTYNSIHQMKHHLQDSQQLNGDVFIGHALQWTIDNVFVGTPNLRKNKVIFVISAGETNSLDKDVLRNVSLRAKCQGYSIFVFSFGPKHNDKELEELASHPLDHHLVQLGRTHKPDWNYIIKFVKPFVHLIRRAINKYPTEDMKATCVNMTSPNPENGGTENTVLLLPGIYEIKTENGDLFDEFDSQAQHLLVLGNNHSSGSETATDLMQKLYLLFSTEKLAMKDKEKAHLEEISALVVDKQQEKEDKEMEATDI

SEQ ID NO: 29378 - protein, 1147 aa, Artificial Sequence
  Synthetic polypeptide
KLAGFVAQGASQNLPTCDVTPRDPAGSPGSRGAPGQYGEKGFPGDPGNPGQNNNIKGQKGSKGEQGRQGRSGQKGVQGSPSSRGSRGREGQRGLRGVSGEPGNPGPTGTLGAEGLQGPQGSQGNPGRKGEKGSQGQKGPQGSPGLMGAKGSTGRPGLLGKKGEPGLPGDLGPVGQTGQRGRQGDSGIPGYGQMGRKGVKGPRGFPGDAGQKGDIGNPGIPGGPGPKGFRGLALTVGLKGEEGSRGLPGPPGQRGIKGMAGQPVYSQCDLIRFLREHSPCWKEKCPAYPTELVFALDNSYDVTEESFNKTRDIITSIVNDLNIRENNCPVGARVAMVSYNSGTSYLIRWSDYNRKKQLLQQLSQIKYQDTTEPRDVGNAMRFVTRNVFKRTYAGANVRRVAVFFSNGQTASRSSIITATMEFSALDISPTVFAFDERVFLEAFGFDNTGTFQVIPVPPNGENQTLERLRRCALCYDKCFPNACIREAFLPEDSYMDVVFLIDNSRNIAKDEFKAVKALVSSVIDNFNIASDPLISDSGDRIALLSYSPWESSRRKMGTVKTEFDFITYDNQLLMKNHIQTSFQQLNGEATIGRALLWTTENLFPETPYLRKHKVIFVVSAGENYERKEFVKMMALRAKCQGYVIFVISLGSTRKDDMEELASYPLDQHLIQLGRIHKPDLNYIAKFLKPFLYSVRRGFNQYPPPMLEDACRLINLGGENIQNDGFQFVTELQEDFLGGNGFIGQELNSGRESPFVKTEDNGSDYLVYLPSQMFEPQKLMINYEKDQKSAEIASLTSGHENYGRKEEPDHTYEPGDVSLQEYYMDVAFLIDASQRVGSDEFKEVKAFITSVLDYFHIAPTPLTSTLGDRVAVLSYSPPGYMPNTEECPVYLEFDLVTYNSIHQMKHHLQDSQQLNGDVFIGHALQWTIDNVFVGTPNLRKNKVIFVISAGETNSLDKDVLRNVSLRAKCQGYSIFVFSFGPKHNDKELEELASHPLDHHLVQLGRTHKPDWNYIIKFVKPFVHLIRRAINKYPTEDMKATCVNMTSPNPENGGTENTVLLLPGIYEIKTENGDLFDEFDSQAQHLLVLGNNHSSGSETATDLMQKLYLLFSTEKLAMKDKEKAHLEEISALVVDKQQEKEDKEMEATDI

SEQ ID NO: 29379 - protein, 1058 aa, Artificial Sequence
  Synthetic polypeptide
KLAGFVAQGASQNLPTCDVTPRDPAGSPGSRGAPGQYGEKGFPGDPGNPGQNNNIKGQKGSKGEQGRQGRSGQKGVQGSPSSRGSRGREGQRGLRGVSGEPGNPGPTGTLGAEGLQGPQGSQGNPGRKGEKGSQGQKGPQGSPGLMGAKGSTGRPGLLGKKGEPGLPGDLGPVGQTGQRGRQGDSGIPGYGQMGRKGVKGPRGFPGDAGQKGDIGNPGIPGGPGPKGFRGLALTVGLKGEEGSRGLPGPPGQRGIKGMAGQPVYSQCDLIRFLREHSLCSLEKCPAYPTELVFALDNSYDVTEESFNKTRDIITSIVNDLNIRENNCPVGARVAMVSYNSGTSYLIRWSDYNRKKQLLQQLSQIKYQDTTEPRDVGNAMRFVTRNVFKRTYAGANVRRVAVFFSNGQTASRSSIITATMEFSALDISPTVFAFDERVFLEAFGFDNTGTFQVIPVPPNGENQTLERLRRCALCYDKCFPNACIREAFLPEDSYMDVVFLIDNSRNIAKDEFKAVKALVSSVIDNFNIASDPLISDSGDRIALLSYSPWESSRRKMGTVKTEFDFITYDNQLLMKNHIQTSFQQLNGEATIGRALLWTTENLFPETPYLRKHKVIFVVSAGENYERKEFVKMMALRAKCQGYVIFVISLGSTRKDDMEELASYPLDQHLIQLGRIHKPDLNYIAKFLKPFLYSVRRGFNQYPPPMLEDACRLINLGGENIQNDGFQFVTELQEDFLGGNGFIGQELNSGRESPFVKTEDNGSDYLVYLPSQMFEPQKLMINYEKDQKSAEIASLTSGHENYGRKEEPDHTYEPGDVSLQEYYMDVAFLIDASQRVGSDEFKEVKAFITSVLDYFHIAPTPLTSTLGDRVAVLSYSPPGYMPNTEECPVYLEFDLVTYNSIHQMKHHLQDSQQLNGDVFIGHALQWTIDNVFVGTPNLRKNKVIFVISAGETNSLDKDVLRNVSLRAKCQGYSIFVFSFGPKHNDKELEELASHPLDHHLVQLGRTHKPDWNYIIKFVKPFVHLIRRAINKYPTEDMKATCVNMTSPNPENGGTENTVLW

SEQ ID NO: 29380 - protein, 873 aa, Artificial Sequence
  Synthetic polypeptide
MLCCISCEKCPAYPTELVFALDNSYDVTEESFNKTRDIITSIVNDLNIRENNCPVGARVAMVSYNSGTSYLIRWSDYNRKKQLLQQLSQIKYQDTTEPRDVGNAMRFVTRNVFKRTYAGANVRRVAVFFSNGQTASRSSIITATMEFSALDISPTVFAFDERVFLEAFGFDNTGTFQVIPVPPNGENQTLERLRRCALCYDKCFPNACIREAFLPEDSYMDVVFLIDNSRNIAKDEFKAVKALVSSVIDNFNIASDPLISDSGDRIALLSYSPWESSRRKMGTVKTEFDFITYDNQLLMKNHIQTSFQQLNGEATIGRALLWTTENLFPETPYLRKHKVIFVVSAGENYERKEFVKMMALRAKCQGYVIFVISLGSTRKDDMEELASYPLDQHLIQLGRIHKPDLNYIAKFLKPFLYSVRRGFNQYPPPMLEDACRLINLGGENIQNDGFQFVTELQEDFLGGNGFIGQELNSGRESPFVKTEDNGSDYLVYLPSQMFEPQKLMINYEKDQKSAEIASLTSGHENYGRKEEPDHTYEPGDVSLQEYYMDVAFLIDASQRVGSDEFKEVKAFITSVLDYFHIAPTPLTSTLGDRVAVLSYSPPGYMPNTEECPVYLEFDLVTYNSIHQMKHHLQDSQQLNGDVFIGHALQWTIDNVFVGTPNLRKNKVIFVISAGETNSLDKDVLRNVSLRAKCQGYSIFVFSFGPKHNDKELEELASHPLDHHLVQLGRTHKPDWNYIIKFVKPFVHLIRRAINKYPTEDMKATCVNMTSPNPENGGTENTVLLLPGIYEIKTENGDLFDEFDSQAQHLLVLGNNHSSGSETATDLMQKLYLLFSTEKLAMKDKEKAHLEEISALVVDKQQEKEDKEMEATDI

SEQ ID NO: 29381 - protein, 34 aa, Artificial Sequence
  Synthetic polypeptide
FLEGSAALDSSLHAFHSECYAAFHVKNVQHIQQS

SEQ ID NO: 29382 - protein, 784 aa, Artificial Sequence
  Synthetic polypeptide
MLCCISCEKCPAYPTELVFALDNSYDVTEESFNKTRDIITSIVNDLNIRENNCPVGARVAMVSYNSGTSYLIRWSDYNRKKQLLQQLSQIKYQDTTEPRDVGNAMRFVTRNVFKRTYAGANVRRVAVFFSNGQTASRSSIITATMEFSALDISPTVFAFDERVFLEAFGFDNTGTFQVIPVPPNGENQTLERLRRCALCYDKCFPNACIREAFLPEDSYMDVVFLIDNSRNIAKDEFKAVKALVSSVIDNFNIASDPLISDSGDRIALLSYSPWESSRRKMGTVKTEFDFITYDNQLLMKNHIQTSFQQLNGEATIGRALLWTTENLFPETPYLRKHKVIFVVSAGENYERKEFVKMMALRAKCQGYVIFVISLGSTRKDDMEELASYPLDQHLIQLGRIHKPDLNYIAKFLKPFLYSVRRGFNQYPPPMLEDACRLINLGGENIQNDGFQFVTELQEDFLGGNGFIGQELNSGRESPFVKTEDNGSDYLVYLPSQMFEPQKLMINYEKDQKSAEIASLTSGHENYGRKEEPDHTYEPGDVSLQEYYMDVAFLIDASQRVGSDEFKEVKAFITSVLDYFHIAPTPLTSTLGDRVAVLSYSPPGYMPNTEECPVYLEFDLVTYNSIHQMKHHLQDSQQLNGDVFIGHALQWTIDNVFVGTPNLRKNKVIFVISAGETNSLDKDVLRNVSLRAKCQGYSIFVFSFGPKHNDKELEELASHPLDHHLVQLGRTHKPDWNYIIKFVKPFVHLIRRAINKYPTEDMKATCVNMTSPNPENGGTENTVLW

SEQ ID NO: 29383 - protein, 19 aa, Artificial Sequence
  Synthetic polypeptide
AGGLLEPRRSRLQVCNRRG

SEQ ID NO: 29384 - protein, 258 aa, Artificial Sequence
  Synthetic polypeptide
CEPVVSATLEAELEDCLSQEGRGCRSAIEEGKGIYNNIKNFVRFQLSTSIAALTLISLATLMNFPNPLNAMQILWINIIMDGPPAQSLGVEPVDKDVIRKPPRNWKDSILTKNLILKILVSSIIIVCGTLFVFWRELRDNVITPRDTTMTFTCFVFFDMFNALSSRSQTKSVFEIGLCSNRMFCYAVLGSIMGQLLVIYFPPLQKVFQTESLSILDLLFLLGLTSSVCIVAEIIKKVERSREKIQKHVSSTSSSFLEV

SEQ ID NO: 29385 - protein, 28 aa, Artificial Sequence
  Synthetic polypeptide
AKKVEAAGLQSKRVKGFIITLKISLDSS

SEQ ID NO: 29386 - protein, 288 aa, Artificial Sequence
  Synthetic polypeptide
CEPVVSATLEAELEDCLSQEGRGCRSAIEEGKGIYNNIKNFVRFQLSTSIAALTLISLATLMNFPNPLNAMQILWINIIMDGPPAQSLGVEPVDKDVIRKPPRNWKDSILTKNLILKILVSSIIIVCGTLFVFWRELRDNVITPRDTTMTFTCFVFFDMFNALSSRSQTKSVFEIGLCSNRMFCYAVLGSIMGQLLVIYFPPLQKVFQTESLSILDLLFLLGLTSSVCIVAEIIKKVERSREKIQKHVSSTSSSFLEVWLWERSGQQLVEIHPHLETGLPLTEDVSCV

SEQ ID NO: 29387 - protein, 278 aa, Artificial Sequence
  Synthetic polypeptide
CEPVVSATLEAELEDCLSQEGRGCRSAIEEGKGIYNNIKNFVRFQLSTSIAALTLISLATLMNFPNPLNAMQILWINIIMDGPPAQSLGVEPVDKDVIRKPPRNWKDSILTKNLILKILVSSIIIVCGTLFVFWRELRDNVITPRDTTMTFTCFVFFDMFNALSSRSQTKSVFEIGLCSNRMFCYAVLGSIMGQLLVIYFPPLQKVFQTESLSILDLLFLLGLTSSVCIVAEIIKKVERSREKIQKHVWLWERSGQQLVEIHPHLETGLPLTEDVSCV

SEQ ID NO: 29388 - protein, 227 aa, Artificial Sequence
  Synthetic polypeptide
CEPVVSATLEAELEDCLSQEGRGCRSAIEEGKGIYNNIKNFVRFQLSTSIAALTLISLATLMNFPNPLNAMQILWINIIMDGPPAQSLGVEPVDKDVIRKPPRNWKDSILTKNLILKILVSSIIIVCGTLFVFWRELRDNVITPRDTTMTFTCFVFFDMFNALSSRSQTKSVFEIGLCSNRMFCYAVLGSIMGQLLVIYFPPLQKVFQTESLSILGLALGEEWTAAG

SEQ ID NO: 29389 - protein, 135 aa, Artificial Sequence
  Synthetic polypeptide
CEPVVSATLEAELEDCLSQEGRGCRSAIEEGKGIYNNIKNFVRFQLSTSIAALTLISLATLMNFPNPLNAMQILWINIIMDGPPAQSLGVEPVDKDVIRKPPRNWKDSILTKNLILKILVSSIIIVCGTLFVFWR

SEQ ID NO: 29390 - protein, 65 aa, Artificial Sequence
  Synthetic polypeptide
CEPVVSATLEAELEDCLSQEGRGCRSAIEEGKGIYNNIKNFVRFQLSTFCGSILLWMDPQLRALE

SEQ ID NO: 29391 - protein, 543 aa, Artificial Sequence
  Synthetic polypeptide
HFSVKVPKAFAASLLDYIGSQAQYLHTFMAITHAAKVESEQHGDRLPRVEMALEALRNVIKYNPGSESECIGHFKLIFSLLRVHGAGQVQQLALEVVNIVTSNQDCVNNIAESMVLSSLLALLHSLPSSRQLVLETLYALTSSTKIIKEAMAKGALIYLLDMFCNSTHPQVRAQTAELFAKMTADKLIGPKVRITLMKFLPSVFMDAMRDNPEAAVHIFEGTHENPELIWNDNSRDKVSTTVREMMLEHFKNQQDNPEANWKLPEDFAVVFGEAEGELAVGGVFLRIFIAQPAWVLRKPREFLIALLEKLTELLEKNNPHGETLETLTMATVCLFSAQPQLADQVPPLGHLPKVIQAMNHRNNAIPKSAIRVIHALSENELCVRAMASLETIGPLMNGMKKRADTVGLACEAINRMFQKEQSELVAQALKADLVPYLLKLLEGIGLENLDSPAATKAQIVKALKAMTRSLQYGEQVNEILCRSSVWSAFKDQKHDLFISESQTAGYLTGPGVAGYLTAGTSTSVMSNLPPPVDHEAGDLGYQT

SEQ ID NO: 29392 - protein, 44 aa, Artificial Sequence
  Synthetic polypeptide
LVSSCQHQGDIPTSKKIDLLKAQMIVSIFQLRFQKHLLQVSWII

SEQ ID NO: 29393 - protein, 34 aa, Artificial Sequence
  Synthetic polypeptide
QEQDFASKNKTKMNGKNWSKKRLITAASGFRQCK

SEQ ID NO: 29394 - protein, 21 aa, Artificial Sequence
  Synthetic polypeptide
HAIALQPGDKSKTLPQKIRRR

SEQ ID NO: 29395 - protein, 36 aa, Artificial Sequence
  Synthetic polypeptide
GRARWLMRVIPALWERKAGGSLEVRSSRPLPNMVEF

SEQ ID NO: 29396 - protein, 611 aa, Artificial Sequence
  Synthetic polypeptide
SQHFGSARRVDHLKSGVRDHCPIWWSFDETVTHFIYQGRPNDTNREYKSVKERGVHIVSEHWLLDCAQECKHLPESLYPHTYNPKMSLDISAVQDGRLCNSRLLSAVSSTKDDEPDPLILEENDVDNMATNNKESAPSNGSGKNDSKGVLTQTLEMRENFQKQLQEIMSATSIVKPQGQRTSLSRSGCNSASSTPDSTRSARSGRSRVLEALRQSRQTVPDVNTEPSQNEQIIWDDPTAREERARLASNLQWPSCPTQYSELQVDIQNLEDSPFQKPLHDSEIAKQAVCDPGNIRVTEAPKHPISEELETPIKDSHLIPTPQAPSIAFPLANPPVAPHPREKIITIEETHEELKKQYIFQLSSLNPQERIDYCHLIEKLGGLVIEKQCFDPTCTHIVVGHPLRNEKYLASVAAGKWVLHRSYLEACRTAGHFVQEEDYEWGSSSILDVLTGINVQQRRLALAAMRWRKKIQQRQESGIVEGAFSGWKVILHVDQSREAGFKRLLQSGGAKVLPGHSVPLFKEATHLFSDLNKLKPDDSGVNIAEAAAQNVYCLRTEYIADYLMQESPPHVENYCLPEAISFIQNNKELGTGLSQKRKAPTEKNKIKRPRVH

SEQ ID NO: 29397 - protein, 17 aa, Artificial Sequence
  Synthetic polypeptide
SQEFETTAQYGGVLMKQ

SEQ ID NO: 29398 - protein, 66 aa, Artificial Sequence
  Synthetic polypeptide
GGSLEARSWTPAWATWMHLQPWKLQDVPANRKGNRVRHSQKLLSKTCNLLWQIALEMLSLFLPALN

SEQ ID NO: 29399 - protein, 68 aa, Artificial Sequence
  Synthetic polypeptide
AGHSGSCLLSQHIEAEVDHLRQGVGHQPGQHGCTCSLGNSRTSQPTEKETEYATLRSYCQKLATCFGK

SEQ ID NO: 29400 - protein, 693 aa, Artificial Sequence
  Synthetic polypeptide
GKELDTSLGNMDALAALETPGRPSQQKRKPSTPLSEVIVKNLQLALANSSRNAVALSASPQLKEAQSEKEEAPKPLHKVVVCVSKKLSKKQSELNGIAASLGADYRWSFDETVTHFIYQGRPNDTNREYKSVKERGVHIVSEHWLLDCAQECKHLPESLYPHTYNPKMSLDISAVQDGRLCNSRLLSAVSSTKDDEPDPLILEENDVDNMATNNKESAPSNGSGKNDSKGVLTQTLEMRENFQKQLQEIMSATSIVKPQGQRTSLSRSGCNSASSTPDSTRSARSGRSRVLEALRQSRQTVPDVNTEPSQNEQIIWDDPTAREERARLASNLQWPSCPTQYSELQVDIQNLEDSPFQKPLHDSEIAKQAVCDPGNIRVTEAPKHPISEELETPIKDSHLIPTPQAPSIAFPLANPPVAPHPREKIITIEETHEELKKQYIFQLSSLNPQERIDYCHLIEKLGGLVIEKQCFDPTCTHIVVGHPLRNEKYLASVAAGKWVLHRSYLEACRTAGHFVQEEDYEWGSSSILDVLTGINVQQRRLALAAMRWRKKIQQRQESGIVEGAFSGWKVILHVDQSREAGFKRLLQSGGAKVLPGHSVPLFKEATHLFSDLNKLKPDDSGVNIAEAAAQNVYCLRTEYIADYLMQESPPHVENYCLPEAISFIQNNKELGTGLSQKRKAPTEKNKIKRPRVH

SEQ ID NO: 29401 - protein, 9 aa, Artificial Sequence
  Synthetic polypeptide
PLLVFPSYK

SEQ ID NO: 29402 - protein, 195 aa, Artificial Sequence
  Synthetic polypeptide
FSFSIALLLSLRLRDCINCSDRCWSSPATSEIRVPGRAGIRKGEVFWVAQLHHIHGRRLGPRGWQPRASVHYPDLLQPRDQPSHCHPSDSGFCGGSPWARSLWSQPLPALPGFLPGHVLHALRPVGWDSGHDHSLPHCLHAPGSCCACSPHASSQPWTQPPLFRCLITHISQCIASCSQSQPSLRAVEPSLCLPL

SEQ ID NO: 29403 - protein, 189 aa, Artificial Sequence
  Synthetic polypeptide
HCCCLSGCVIVLIVLTAAGLPQLQVKSGSPAVLAFAKEKSFGWPSFITYTVGVLDPAAGSQGPLSTTLTFSSPVTNQAIAIPVTVAFVVDRRGPGPYGASLFQHFLDSYQVMFFTLFALLAGTAVMIIAYHTVCTPRDLAVPAALTPRASPGHSPHYFAASSPTSPNALPPARKASPPSGLWSPAYASH

SEQ ID NO: 29404 - protein, 46 aa, Artificial Sequence
  Synthetic polypeptide
ASGYTQPSCTSMCQRHAGQSCTRRATTSPSWAWRSCIPLMPENGAK

SEQ ID NO: 29405 - protein, 70 aa, Artificial Sequence
  Synthetic polypeptide
CAEALQPDTPECTPASPQTCTVTLGTPGLLSEPLATHNPAVPACARDTLANRVLAALQHHLHGPGEAASL

SEQ ID NO: 29406 - protein, 358 aa, Artificial Sequence
  Synthetic polypeptide
PWAHLVCSLSLWLHTTQLYQHVPETRWPIVYSPRYNITFMGLEKLHPFDAGKWGKVINFLKEEKLLSDSMLVEAREASEEDLLVVHTRRYLNELKWSFAVATITEIPPVIFLPNFLVQRKVLRPLRTQTGGTIMAGKLAVERGWAINVGGGFHHCSSDRGGGFCAYADITLAIKFLFERVEGISRATIIDLDAHQGNGHERDFMDDKRVYIMDVYNRHIYPGDRFAKQAIRRKVELEWGTEDDEYLDKVERNIKKSLQEHLPDVVVYNAGTDILEGDRLGGLSISPAGIVKRDELVFRMVRGRRVPILMVTSGGYQKRTARIIADSILNLFGLGLIGPESPSVSAQNSDTPLLPPAVP

SEQ ID NO: 29407 - protein, 192 aa, Artificial Sequence
  Synthetic polypeptide
PWAHLVCSLSLWLHTTQLYQHVPETRWPIVYSPRYNITFMGLEKLHPFDAGKWGKVINFLKEAIRRKVELEWGTEDDEYLDKVERNIKKSLQEHLPDVVVYNAGTDILEGDRLGGLSISPAGIVKRDELVFRMVRGRRVPILMVTSGGYQKRTARIIADSILNLFGLGLIGPESPSVSAQNSDTPLLPPAVP

SEQ ID NO: 29408 - protein, 279 aa, Artificial Sequence
  Synthetic polypeptide
PWAHLVCSLSLWLHTTQLYQHVPETRWPIVYSPRYNITFMGLEKLHPFDAGKWGKVINFLKEEKLLSDSMLVEAREASEEDLLVVHTRRYLNELKFLFERVEGISRATIIDLDAHQGNGHERDFMDDKRVYIMDVYNRHIYPGDRFAKQAIRRKVELEWGTEDDEYLDKVERNIKKSLQEHLPDVVVYNAGTDILEGDRLGGLSISPAGIVKRDELVFRMVRGRRVPILMVTSGGYQKRTARIIADSILNLFGLGLIGPESPSVSAQNSDTPLLPPAVP

SEQ ID NO: 29409 - protein, 64 aa, Artificial Sequence
  Synthetic polypeptide
PWAHLVCSLSLWLHTTQLYQHVPETRWPIVYSPRYNITFMGLEKLHPFDAGKWGKVINFLKVSV

SEQ ID NO: 29410 - protein, 157 aa, Artificial Sequence
  Synthetic polypeptide
PWAHLVCSLSLWLHTTQLYQHVPETRWPIVYSPRYNITFMGLEKLHPFDAGKWGKVINFLKEEKLLSDSMLVEAREASEEDLLVVHTRRYLNELKRPSGGRWSWSGAQRMMSTWIRWRGTSRNPSRSTCPTWWYTMQAPTSSRGTALGGCPSAQRAS

SEQ ID NO: 29411 - protein, 258 aa, Artificial Sequence
  Synthetic polypeptide
PWAHLVCSLSLWLHTTQLYQHVPETRWPIVYSPRYNITFMGLEKLHPFDAGKWGKVINFLKEEKLLSDSMLVEAREASEEDLLVVHTRRYLNELKGNGHERDFMDDKRVYIMDVYNRHIYPGDRFAKQAIRRKVELEWGTEDDEYLDKVERNIKKSLQEHLPDVVVYNAGTDILEGDRLGGLSISPAGIVKRDELVFRMVRGRRVPILMVTSGGYQKRTARIIADSILNLFGLGLIGPESPSVSAQNSDTPLLPPAVP

SEQ ID NO: 29412 - protein, 197 aa, Artificial Sequence
  Synthetic polypeptide
PWAHLVCSLSLWLHTTQLYQHVPETRWPIVYSPRYNITFMGLEKLHPFDAGKWGKVINFLKEEKLLSDSMLVEAREASEEDLLVVHTRRYLNELKWSFAVATITEIPPVIFLPNFLVQRKVLRPLRTQTGGTIMAGKLAVERGWAINVGGGFHHCSSDRGGGFCAYADITLAIKGTGHAPSSREPSLTTSCMHTWSP

SEQ ID NO: 29413 - protein, 99 aa, Artificial Sequence
  Synthetic polypeptide
PWAHLVCSLSLWLHTTQLYQHVPETRWPIVYSPRYNITFMGLEKLHPFDAGKWGKVINFLKEEKLLSDSMLVEAREASEEDLLVVHTRRYLNELKWSFA

SEQ ID NO: 29414 - protein, 160 aa, Artificial Sequence
  Synthetic polypeptide
PWAHLVCSLSLWLHTTQLYQHVPETRWPIVYSPRYNITFMGLEKLHPFDAGKWGKVINFLKEEKLLSDSMLVEAREASEEDLLVVHTRRYLNELKGVASTTAPATVAGASVPMRTSRSPSSFCLSVWRASPGLPSLILMPIRAMGMSETSWTTSVCTSWM

SEQ ID NO: 29415 - protein, 20 aa, Artificial Sequence
  Synthetic polypeptide
GRAWWLTPVIPALSEAEVAE

SEQ ID NO: 29416 - protein, 369 aa, Artificial Sequence
  Synthetic polypeptide
SQHFRRPRLLNNHHDDASKFICLLAKPNCSSLEQEDFIPLLQDVVDTHPGLTFLKDAPEFHSRYITTVIQRIFYTVNRSWSGKITSTEIRKSNFLQTLALLEEEEDINQITDYFSYEHFYVIYCKFWELDTDHDLYISQADLSRYNDQASSSRIIERIFSGAVTRGKTIQKEGRMSYADFVWFLISEEDKRNPTSIEYWFRCMDVDGDGVLSMYELEYFYEEQCERMEAMGIEPLPFHDLLCQMLDLVKPAVDGKITLRDLKRCRMAHIFYDTFFNLEKYLDHEQRDPFAVQKDVENDGPEPSDWDRFAAEEYETLVAEESAQAQFQEGFEDYETDEPASPSEFGNKSNKILSASLPEKCGKLQSVDEE

SEQ ID NO: 29417 - protein, 18 aa, Artificial Sequence
  Synthetic polypeptide
PGVVAHACNPSTFGGRGC

SEQ ID NO: 29418 - protein, 116 aa, Artificial Sequence
  Synthetic polypeptide
SQHFRRPRLLNNHHDDASKFICLLAKPNCSSLEQEDFIPLLQDVVDTHPGLTFLKDAPEFHSRYITTVIQRIFYTVNRSWSGKITSTEIRKSNFLQSNEDLAKLAVHDGYTNIFLF

SEQ ID NO: 29419 - protein, 6 aa, Artificial Sequence
  Synthetic polypeptide
ASAWES

SEQ ID NO: 29420 - protein, 27 aa, Artificial Sequence
  Synthetic polypeptide
NPDSKLVHGKANSQGEDQSLAGPWQLC

SEQ ID NO: 29421 - protein, 480 aa, Artificial Sequence
  Synthetic polypeptide
CMGKLTARERISLLLDPGSFVESDMFVEHRCADFGMAADKNKFPGDSVVTGRGRINGRLVYVFSQDFTVFGGSLSGAHAQKICKIMDQAITVGAPVIGLNDSGGARIQEGVESLAGYADIFLRNVTASGVIPQISLIMGPCAGGAVYSPALTDFTFMVKDTSYLFITGPDVVKSVTNEDVTQEELGGAKTHTTMSGVAHRAFENDVDALCNLRDFFNYLPLSSQDPAPVRECHDPSDRLVPELDTIVPLESTKAYNMVDIIHSVVDEREFFEIMPNYAKNIIVGFARMNGRTVGIVGNQPKVASGCLDINSSVKGARFVRFCDAFNIPLITFVDVPGFLPGTAQEYGGIIRHGAKLLYAFAEATVPKVTVITRKAYGGAYDVMSSKHLCGDTNYAWPTAEIAVMGAKGAVEIIFKGHENVEAAQAEYIEKFANPFPAAVRGFVDDIIQPSSTRARICCDLDVLASKKVQRPWRKHANIPL

SEQ ID NO: 29422 - protein, 457 aa, Artificial Sequence
  Synthetic polypeptide
CMGKLTARERISLLLDPGSFVESDMFVEHRCADFGMAADKNKDFTVFGGSLSGAHAQKICKIMDQAITVGAPVIGLNDSGGARIQEGVESLAGYADIFLRNVTASGVIPQISLIMGPCAGGAVYSPALTDFTFMVKDTSYLFITGPDVVKSVTNEDVTQEELGGAKTHTTMSGVAHRAFENDVDALCNLRDFFNYLPLSSQDPAPVRECHDPSDRLVPELDTIVPLESTKAYNMVDIIHSVVDEREFFEIMPNYAKNIIVGFARMNGRTVGIVGNQPKVASGCLDINSSVKGARFVRFCDAFNIPLITFVDVPGFLPGTAQEYGGIIRHGAKLLYAFAEATVPKVTVITRKAYGGAYDVMSSKHLCGDTNYAWPTAEIAVMGAKGAVEIIFKGHENVEAAQAEYIEKFANPFPAAVRGFVDDIIQPSSTRARICCDLDVLASKKVQRPWRKHANIPL

SEQ ID NO: 29423 - protein, 500 aa, Artificial Sequence
  Synthetic polypeptide
CMGKLTARERISLLLDPGSFVESDMFVEHRCADFGMAADKNKFPGDSVVTGRGRINGRLVYVFSQDFTVFGGSLSGAHAQKICKIMDQAITVGAPVIGLNDSGGARIQEGVESLAGYADIFLRNVTASGVIPQISLIMGPCAGGAVYSPALTDFTFMVKDTSYLFITGPDVVKSVTNEDVTQEELGGAKTHTTMSGVAHRAFENDVDALCNLRDFFNYLPLSSQDPAPVRECHDPSDRLVPELDTIVPLESTKAYNMVDIIHSVVDEREFFEIMPNYAKNIIVGFARMNGRTVGIVGNQPKVASDSISFTPWNYARRQYRPYFAGCLDINSSVKGARFVRFCDAFNIPLITFVDVPGFLPGTAQEYGGIIRHGAKLLYAFAEATVPKVTVITRKAYGGAYDVMSSKHLCGDTNYAWPTAEIAVMGAKGAVEIIFKGHENVEAAQAEYIEKFANPFPAAVRGFVDDIIQPSSTRARICCDLDVLASKKVQRPWRKHANIPL

SEQ ID NO: 29424 - protein, 511 aa, Artificial Sequence
  Synthetic polypeptide
CMGKLTARERISLLLDPGSFVESDMFVEHRCADFGMAADKNKFPGDSVVTGRGRINGRLVYVFSQIRASAMSPRLVSDSWTQAIHLPWPPKVLGLQDFTVFGGSLSGAHAQKICKIMDQAITVGAPVIGLNDSGGARIQEGVESLAGYADIFLRNVTASGVIPQISLIMGPCAGGAVYSPALTDFTFMVKDTSYLFITGPDVVKSVTNEDVTQEELGGAKTHTTMSGVAHRAFENDVDALCNLRDFFNYLPLSSQDPAPVRECHDPSDRLVPELDTIVPLESTKAYNMVDIIHSVVDEREFFEIMPNYAKNIIVGFARMNGRTVGIVGNQPKVASGCLDINSSVKGARFVRFCDAFNIPLITFVDVPGFLPGTAQEYGGIIRHGAKLLYAFAEATVPKVTVITRKAYGGAYDVMSSKHLCGDTNYAWPTAEIAVMGAKGAVEIIFKGHENVEAAQAEYIEKFANPFPAAVRGFVDDIIQPSSTRARICCDLDVLASKKVQRPWRKHANIPL

SEQ ID NO: 29425 - protein, 461 aa, Artificial Sequence
  Synthetic polypeptide
CMGKLTARERISLLLDPGSFVESDMFVEHRCADFGMAADKNKFPGDSVVTGRGRINGRLVYVFSQIMDQAITVGAPVIGLNDSGGARIQEGVESLAGYADIFLRNVTASGVIPQISLIMGPCAGGAVYSPALTDFTFMVKDTSYLFITGPDVVKSVTNEDVTQEELGGAKTHTTMSGVAHRAFENDVDALCNLRDFFNYLPLSSQDPAPVRECHDPSDRLVPELDTIVPLESTKAYNMVDIIHSVVDEREFFEIMPNYAKNIIVGFARMNGRTVGIVGNQPKVASGCLDINSSVKGARFVRFCDAFNIPLITFVDVPGFLPGTAQEYGGIIRHGAKLLYAFAEATVPKVTVITRKAYGGAYDVMSSKHLCGDTNYAWPTAEIAVMGAKGAVEIIFKGHENVEAAQAEYIEKFANPFPAAVRGFVDDIIQPSSTRARICCDLDVLASKKVQRPWRKHANIPL

SEQ ID NO: 29426 - protein, 346 aa, Artificial Sequence
  Synthetic polypeptide
CMGKLTARERISLLLDPGSFVESDMFVEHRCADFGMAADKNKFPGDSVVTGRGRINGRLVYVFSQDFTVFGGSLSGAHAQKICKIMDQAITVGAPVIGLNDSGGARIQEGVESLAGYADIFLRNVTASGVIPQISLIMGPCAGGAVYSPALTDFTFMVKDTSYLFITGPDVVKSVTNEDVTQEELGGAKTHTTMSGVAHRAFENDVDALCNLRDFFNYLPLSSQDPAPVRECHDPSDRLVPELDTIVPLESTKAYNMVDIIHSVVDEREFFEIMPNYAKNIIVGFARMNGRTVGIVGNQPKVASGCLDINSSVKGARFVRFCDAFNIPLITFVDVPGFLPGLWRCL

SEQ ID NO: 29427 - protein, 423 aa, Artificial Sequence
  Synthetic polypeptide
CMGKLTARERISLLLDPGSFVESDMFVEHRCADFGMAADKNKFPGDSVVTGRGRINGRLVYVFSQRNVTASGVIPQISLIMGPCAGGAVYSPALTDFTFMVKDTSYLFITGPDVVKSVTNEDVTQEELGGAKTHTTMSGVAHRAFENDVDALCNLRDFFNYLPLSSQDPAPVRECHDPSDRLVPELDTIVPLESTKAYNMVDIIHSVVDEREFFEIMPNYAKNIIVGFARMNGRTVGIVGNQPKVASGCLDINSSVKGARFVRFCDAFNIPLITFVDVPGFLPGTAQEYGGIIRHGAKLLYAFAEATVPKVTVITRKAYGGAYDVMSSKHLCGDTNYAWPTAEIAVMGAKGAVEIIFKGHENVEAAQAEYIEKFANPFPAAVRGFVDDIIQPSSTRARICCDLDVLASKKVQRPWRKHANIPL

SEQ ID NO: 29428 - protein, 491 aa, Artificial Sequence
  Synthetic polypeptide
CMGKLTARERISLLLDPGSFVESDMFVEHRCADFGMAADKNKFPGDSVVTGRGRINGRLVYVFSQDFTVFGGSLSGAHAQKICKIMDQAITVGAPVIGLNDSGGARIQEGVESLAGYADIFLRNVTASGVIPQISLIMGPCAGGAVYSPALTDFTFMVKDTSYLFITGPDVVKSVTNEDVTQEELGGAKTHTTMSGVAHRAFENDVDALCNLRDFFNYLPLSSQDPAPVRECHDPSDRLVPELDTIVPLESTKAYNMVDIIHSVVDEREFFEIMPNYAKNIIVGFARMNGRTVGIVGNQPKVASGCLDINSSVKGARFVRFCDAFNIPLITFVDVPGFLPGTAQEYGGIIRHGAKLLYAFAEATVPKVTVITRKAYGGAYDVMSSKHLCGDTNYAWPTAEIAVMGAKGAVEIIFKGHENVEAAQAEYIEKFANPFPAAVRGFVDDIIQPSSTRARICCDLDVLASKKVRVQEVFHQVVQSGHRDGRGAVRW

SEQ ID NO: 29429 - protein, 500 aa, Artificial Sequence
  Synthetic polypeptide
CMGKLTARERISLLLDPGSFVESDMFVEHRCADFGMAADKNKFPGDSVVTGRGRINGRLVYVFSQQIIGWAQWLPLVISALWEAEDFTVFGGSLSGAHAQKICKIMDQAITVGAPVIGLNDSGGARIQEGVESLAGYADIFLRNVTASGVIPQISLIMGPCAGGAVYSPALTDFTFMVKDTSYLFITGPDVVKSVTNEDVTQEELGGAKTHTTMSGVAHRAFENDVDALCNLRDFFNYLPLSSQDPAPVRECHDPSDRLVPELDTIVPLESTKAYNMVDIIHSVVDEREFFEIMPNYAKNIIVGFARMNGRTVGIVGNQPKVASGCLDINSSVKGARFVRFCDAFNIPLITFVDVPGFLPGTAQEYGGIIRHGAKLLYAFAEATVPKVTVITRKAYGGAYDVMSSKHLCGDTNYAWPTAEIAVMGAKGAVEIIFKGHENVEAAQAEYIEKFANPFPAAVRGFVDDIIQPSSTRARICCDLDVLASKKVQRPWRKHANIPL

SEQ ID NO: 29430 - protein, 103 aa, Artificial Sequence
  Synthetic polypeptide
CMGKLTARERISLLLDPGSFVESDMFVEHRCADFGMAADKNKFPGDSVVTGRGRINGRLVYVFSQDFTVFGGSLSGAHAQKICKIMDQAITVGAPVIGLNDSG

SEQ ID NO: 29431 - protein, 244 aa, Artificial Sequence
  Synthetic polypeptide
CMGKLTARERISLLLDPGSFVESDMFVEHRCADFGMAADKNKFPGDSVVTGRGRINGRLVYVFSQDFTVFGGSLSGAHAQKICKIMDQAITVGAPVIGLNDSGGARIQEGVESLAGYADIFLRNVTASGVIPQISLIMGPCAGGAVYSPALTDFTFMVKDTSYLFITGPDVVKSVTNEDVTQEELGGAKTHTTMSGVAHRAFENDVDALCNLRDFFNYLPLSSQDPAPVRECHDPSPTFCLWLH

SEQ ID NO: 29432 - protein, 148 aa, Artificial Sequence
  Synthetic polypeptide
CMGKLTARERISLLLDPGSFVESDMFVEHRCADFGMAADKNKFPGDSVVTGRGRINGRLVYVFSQDFTVFGGSLSGAHAQKICKIMDQAITVGAPVIGLNDSGGARIQEGVESLAGYADIFLRNVTASGVIPQISLIMGPCAGGAVYS

SEQ ID NO: 29433 - protein, 964 aa, Artificial Sequence
  Synthetic polypeptide
FLHFHLSDAIAEIRAICIEEIGVWMKMYSDAFLNDSYLKYVGWTLHDRQGEVRLKCLKALQSLYTNRELFPKLELFTNRFKDRIVSMTLDKEYDVAVEAIRLVTLILHGSEEALSNEDCENVYHLVYSAHRPVAVAAGEFLHKKLFSRHDPQAEEALAKRRGRNSPNGNLIRMLVLFFLESELHEHAAYLVDSLWESSQELLKDWECMTELLLEEPVQGEEAMSDRQESALIELMVCTIRQAAEAHPPVGRGTGKRVLTAKERKTQIDDRNKLTEHFIITLPMLLSKYSADAEKVANLLQIPQYFDLEIYSTGRMEKHLDALLKQIKFVVEKHVESDVLEACSKTYSILCSEEYTIQNRVDIARSQLIDEFVDRFNHSVEDLLQEGEEADDDDIYNVLSTLKRLTSFHNAHDLTKWDLFGNCYRLLKTGIEHGAMPEQIVVQALQCSHYSILWQLVKITDGSPSKEDLLVLRKTVKSFLAVCQQCLSNVNTPVKEQAFMLLCDLLMIFSHQLMTGGREGLQPLVFNPDTGLQSELLSFVMDHVFIDQDEENQSMEGDEEDEANKIEALHKRRNLLAAFSKLIIYDIVDMHAAADIFKHYMKYYNDYGDIIKETLSKTRQIDKIQCAKTLILSLQQLFNELVQEQGPNLDRTSAHVSGIKELARRFALTFGLDQIKTREAVATLHKDGIEFAFKYQNQKGQEYPPPNLAFLEVLSEFSSKLLRQDKKTVHSYLEKFLTEQMMERREDVWLPLISYRNSLVTGGEDDRMSVNSGSSSSKTSSVRNKKGRPPLHKKRVEDESLDNTWLNRTDTMIQTPGPLPAPQLTSTVLRENSRPMGDQIQEPESEHGSEPDFLHNPQMQISWLGQPKLEDLNRKDRTGMNYMKVRTGVRHAVRGLMEEDAEPIFEDVMMSSRSQLEDMNEEFEDTMVIDLPPSRNRRERAELRPDFFDSAAIIEDDSGFGMPMF

SEQ ID NO: 29434 - protein, 927 aa, Artificial Sequence
  Synthetic polypeptide
FLHFHLSDAIAEIRAICIEEIGVWMKMYSDAFLNDSYLKYVGWTLHDRQGEVRLKCLKALQSLYTNRELFPKLELFTNRFKDRIVSMTLDKEYDVAVEAIRLVTLILHGSEEALSNEDCENVYHLVYSAHRPVAVAAGEFLHKKLFSRHDPQAEEALAKRRGRNSPNGNLIRMLVLFFLESELHEHAAYLVDSLWESSQELLKDWECMTELLLEEPVQGEEAMSDRQESALIELMVCTIRQAAEAHPPVGRGTGKRVLTAKERKTQIDDRNKLTEHFIITLPMLLSKYSADAEKVANLLQIPQYFDLEIYSTGRMEKHLDALLKQIKFVVEKHVESDVLEACSKTYSILCSEEYTIQNRVDIARSQLIDEFVDRFNHSVEDLLQEGEEADDDDIYNVLSTLKRLTSFHNAHDLTKWDLFGNCYRLLKTGIEHGAMPEQIVVQALQCSHYSILWQLVKITDGSPSKEDLLVLRKTVKSFLAVCQQCLSNVNTPVKEQAFMLLCDLLMIFSHQLMTGGREGLQPLVFNPDTGLQSELLSFVMDHVFIDQDEENQSMEGDEEDEANKIEALHKRRNLLAAFSKLIIYDIVDMHAAADIFKHYMKYYNDYGDIIKETLSKTRQIDKIQCAKTLILSLQQLFNELVQEQGPNLDRTSAHVSGIKELARRFALTFGLDQIKTREAVATLHKDGIEFAFKYQNQKGQEYPPPNLAFLEVLSEFSSKLLRQDKKTVHSYLEKFLTEQMMERREDVWLPLISYRNSLVTGGEDDRMSVNSGSSSSKTSSVRNKKGRPPLHKKRVEDESLDNTWLNRTDTMIQTPGPLPAPQLTSTVLRENSRPMGDQIQEPESEHGSEPDFLHNRGLMEEDAEPIFEDVMMSSRSQLEDMNEEFEDTMVIDLPPSRNRRERAELRPDFFDSAAIIEDDSGFGMPMF

SEQ ID NO: 29435 - protein, 930 aa, Artificial Sequence
  Synthetic polypeptide
FLHFHLSDAIAEIRAICIEEIGVWMKMYSDAFLNDSYLKYVGWTLHDRQGEVRLKCLKALQSLYTNRELFPKLELFTNRFKDRIVSMTLDKEYDVAVEAIRLVTLILHGSEEALSNEDCENVYHLVYSAHRPVAVAAGEFLHKKLFSRHDPQAEEALAKRRGRNSPNGNLIRMLVLFFLESELHEHAAYLVDSLWESSQELLKDWECMTELLLEEPVQGEEAMSDRQESALIELMVCTIRQAAEAHPPVGRGTGKRVLTAKERKTQIDDRNKLTEHFIITLPMLLSKYSADAEKVANLLQIPQYFDLEIYSTGRMEKHLDALLKQIKFVVEKHVESDVLEACSKTYSILCSEEYTIQNRVDIARSQLIDEFVDRFNHSVEDLLQEGEEADDDDIYNVLSTLKRLTSFHNAHDLTKWDLFGNCYRLLKTGIEHGAMPEQIVVQALQCSHYSILWQLVKITDGSPSKEDLLVLRKTVKSFLAVCQQCLSNVNTPVKEQAFMLLCDLLMIFSHQLMTGGREGLQPLVFNPDTGLQSELLSFVMDHVFIDQDEENQSMEGDEEDEANKIEALHKRRNLLAAFSKLIIYDIVDMHAAADIFKHYMKLFNELVQEQGPNLDRTSAHVSGIKELARRFALTFGLDQIKTREAVATLHKDGIEFAFKYQNQKGQEYPPPNLAFLEVLSEFSSKLLRQDKKTVHSYLEKFLTEQMMERREDVWLPLISYRNSLVTGGEDDRMSVNSGSSSSKTSSVRNKKGRPPLHKKRVEDESLDNTWLNRTDTMIQTPGPLPAPQLTSTVLRENSRPMGDQIQEPESEHGSEPDFLHNPQMQISWLGQPKLEDLNRKDRTGMNYMKVRTGVRHAVRGLMEEDAEPIFEDVMMSSRSQLEDMNEEFEDTMVIDLPPSRNRRERAELRPDFFDSAAIIEDDSGFGMPMF

SEQ ID NO: 29436 - protein, 32 aa, Artificial Sequence
  Synthetic polypeptide
DPVSTKIEKLARYCENRDVSKYAECRNHQKND

SEQ ID NO: 29437 - protein, 1128 aa, Artificial Sequence
  Synthetic polypeptide
PGTVRIEMFRNMQNAEIIRKMTEEFDEDSGDYPLTMPGPQWKKFRSNFCEFIGVLIRQCQYSIIYDEYMMDTVISLLTGLSDSQVRAFRHTSTLAAMKLMTALVNVALNLSIHQDNTQRQYEAERNKMIGKRANERLELLLQKRKELQENQDEIENMMNSIFKGIFVHRYRDAIAEIRAICIEEIGVWMKMYSDAFLNDSYLKYVGWTLHDRQGEVRLKCLKALQSLYTNRELFPKLELFTNRFKDRIVSMTLDKEYDVAVEAIRLVTLILHGSEEALSNEDCENVYHLVYSAHRPVAVAAGEFLHKKLFSRHDPQAEEALAKRRGRNSPNGNLIRMLVLFFLESELHEHAAYLVDSLWESSQELLKDWECMTELLLEEPVQGEEAMSDRQESALIELMVCTIRQAAEAHPPVGRGTGKRVLTAKERKTQIDDRNKLTEHFIITLPMLLSKYSADAEKVANLLQIPQYFDLEIYSTGRMEKHLDALLKQIKFVVEKHVESDVLEACSKTYSILCSEEYTIQNRVDIARSQLIDEFVDRFNHSVEDLLQEGEEADDDDIYNVLSTLKRLTSFHNAHDLTKWDLFGNCYRLLKTGIEHGAMPEQIVVQALQCSHYSILWQLVKITDGSPSKEDLLVLRKTVKSFLAVCQQCLSNVNTPVKEQAFMLLCDLLMIFSHQLMTGGREGLQPLVFNPDTGLQSELLSFVMDHVFIDQDEENQSMEGDEEDEANKIEALHKRRNLLAAFSKLIIYDIVDMHAAADIFKHYMKYYNDYGDIIKETLSKTRQIDKIQCAKTLILSLQQLFNELVQEQGPNLDRTSAHVSGIKELARRFALTFGLDQIKTREAVATLHKDGIEFAFKYQNQKGQEYPPPNLAFLEVLSEFSSKLLRQDKKTVHSYLEKFLTEQMMERREDVWLPLISYRNSLVTGGEDDRMSVNSGSSSSKTSSVRNKKGRPPLHKKRVEDESLDNTWLNRTDTMIQTPGPLPAPQLTSTVLRENSRPMGDQIQEPESEHGSEPDFLHNPQMQISWLGQPKLEDLNRKDRTGMNYMKVRTGVRHAVRGLMEEDAEPIFEDVMMSSRSQLEDMNEEFEDTMVIDLPPSRNRRERAELRPDFFDSAAIIEDDSGFGMPMF

SEQ ID NO: 29438 - protein, 26 aa, Artificial Sequence
  Synthetic polypeptide
AQEFKTSLDNIVRPCLYKNRKISQVL

SEQ ID NO: 29439 - protein, 1091 aa, Artificial Sequence
  Synthetic polypeptide
PGTVRIEMFRNMQNAEIIRKMTEEFDEDSGDYPLTMPGPQWKKFRSNFCEFIGVLIRQCQYSIIYDEYMMDTVISLLTGLSDSQVRAFRHTSTLAAMKLMTALVNVALNLSIHQDNTQRQYEAERNKMIGKRANERLELLLQKRKELQENQDEIENMMNSIFKGIFVHRYRDAIAEIRAICIEEIGVWMKMYSDAFLNDSYLKYVGWTLHDRQGEVRLKCLKALQSLYTNRELFPKLELFTNRFKDRIVSMTLDKEYDVAVEAIRLVTLILHGSEEALSNEDCENVYHLVYSAHRPVAVAAGEFLHKKLFSRHDPQAEEALAKRRGRNSPNGNLIRMLVLFFLESELHEHAAYLVDSLWESSQELLKDWECMTELLLEEPVQGEEAMSDRQESALIELMVCTIRQAAEAHPPVGRGTGKRVLTAKERKTQIDDRNKLTEHFIITLPMLLSKYSADAEKVANLLQIPQYFDLEIYSTGRMEKHLDALLKQIKFVVEKHVESDVLEACSKTYSILCSEEYTIQNRVDIARSQLIDEFVDRFNHSVEDLLQEGEEADDDDIYNVLSTLKRLTSFHNAHDLTKWDLFGNCYRLLKTGIEHGAMPEQIVVQALQCSHYSILWQLVKITDGSPSKEDLLVLRKTVKSFLAVCQQCLSNVNTPVKEQAFMLLCDLLMIFSHQLMTGGREGLQPLVFNPDTGLQSELLSFVMDHVFIDQDEENQSMEGDEEDEANKIEALHKRRNLLAAFSKLIIYDIVDMHAAADIFKHYMKYYNDYGDIIKETLSKTRQIDKIQCAKTLILSLQQLFNELVQEQGPNLDRTSAHVSGIKELARRFALTFGLDQIKTREAVATLHKDGIEFAFKYQNQKGQEYPPPNLAFLEVLSEFSSKLLRQDKKTVHSYLEKFLTEQMMERREDVWLPLISYRNSLVTGGEDDRMSVNSGSSSSKTSSVRNKKGRPPLHKKRVEDESLDNTWLNRTDTMIQTPGPLPAPQLTSTVLRENSRPMGDQIQEPESEHGSEPDFLHNRGLMEEDAEPIFEDVMMSSRSQLEDMNEEFEDTMVIDLPPSRNRRERAELRPDFFDSAAIIEDDSGFGMPMF

SEQ ID NO: 29440 - protein, 102 aa, Artificial Sequence
  Synthetic polypeptide
PGTVRIEMFRNMQNAEIIRKMTEEFDEDSGDYPLTMPGPQWKKFRSNFCEFIGVLIRQCQYSIIYDEYMMDTVISLLTGLSDSQVRAFRHTSTLAGQVLGTR

SEQ ID NO: 29441 - protein, 17 aa, Artificial Sequence
  Synthetic polypeptide
QSCELMEIITWTSIKQA

SEQ ID NO: 29442 - protein, 19 aa, Artificial Sequence
  Synthetic polypeptide
HSNPVSSWKLLLGQVSSRL

SEQ ID NO: 29443 - protein, 13 aa, Artificial Sequence
  Synthetic polypeptide
AHGNYYLDKYQAG

SEQ ID NO: 29444 - protein, 152 aa, Artificial Sequence
  Synthetic polypeptide
NHANSVMSFLDTAGQEEFSAMREQYMRTGDGFLIVYSVTDKASFEHVDRFHQLILRVKDRESFPMILVANKVDLMHLRKITREQGKEMATKHNIPYIETSAKDPPLNVDKAFHDLVRVIRQQIPEKSQKKKKKTKWRGDRATGTHKLQCVIL

SEQ ID NO: 29445 - protein, 58 aa, Artificial Sequence
  Synthetic polypeptide
CHFWTQLGRRNSAPCGSNTCARGMASSSSTPSLTRPALSTWTASTSLSCASKTGSHSR

SEQ ID NO: 29446 - protein, 40 aa, Artificial Sequence
  Synthetic polypeptide
LESCQLSDVISGHSWAGGIQRHAGAIHAHGGWLPHRLLRH

SEQ ID NO: 29447 - protein, 18 aa, Artificial Sequence
  Synthetic polypeptide
LLFLFSSSKATSVITGAY

SEQ ID NO: 29448 - protein, 295 aa, Artificial Sequence
  Synthetic polypeptide
YCFYSPVLKLHQLLQELINHKKAEDTEKKDEPSKYNQQQALIDQRYFQVLCSINSIIHNPRAPVIIYKQTKGGVQNFNKDLVQDCGFEHLVPVIEMWADQLTSLKDLYKSLKTLSAELVPWLNLKKQDENEGIKVEDLLFIVDTMLEEVENKEKDSNMPHFQTLQAIVSHFQKLFDVPSLNGVYPRMNEVYTRLGEMNNAVRNLQELLELDSSSSLCVLVSTVGKLCRLINEDVNEQVMQVLGPEDLQSIIYKLEEHEEFFPAFQAFTNDLLEILEIDDLDAIVPAVKKLKVLSY

SEQ ID NO: 29449 - protein, 32 aa, Artificial Sequence
  Synthetic polypeptide
SYISYYRSLLIIRRLRTQRRKMSPANIISNRP

SEQ ID NO: 29450 - protein, 252 aa, Artificial Sequence
  Synthetic polypeptide
YCFYSPVLKLHQLLQELINHKKAEDTEKKDEPSKYNQQQALIDQRYFQVLCSINSIIHNPRAPVIIYKQTKGGVQNFNKDLVQDCGFEHLVPVIEMWADQLTSLKDLYKSLKTLSAELVPWLNLKKQDENEGIKVEDLLFIVDTMLEEVENKEKDSNMPHFQTLQAIVSHFQKLFDVPSLNGVYPRMNEVYTRLGEMNNAVRNLQELLELDSSSSLCVLVSTVGKLCRLINEDVNEQVMQVLGPEDLQRYLF

SEQ ID NO: 29451 - protein, 7 aa, Artificial Sequence
  Synthetic polypeptide
KGEVPAL

SEQ ID NO: 29452 - protein, 476 aa, Artificial Sequence
  Synthetic polypeptide
PLFYLIIGPRCKRNDAGNLDMPKRSCEVLPLSEKVKCQHYKKKRTEQEETIASLQMEVCRLKKEEEDRIVTQNRVFAYLCKRVPHTVLDRQLLCLIDYYESKIRKIHTQRQYKEDESQSEEENDYRNLDASPTYKGLLMSLQNQLKESKSKIDALSSEKLNLQKDLETRPTQHELRLYKQQVKKLEKALKKNVKLQELINHKKAEDTEKKDEPSKYNQQQALIDQRYFQVLCSINSIIHNPRAPVIIYKQTKGGVQNFNKDLVQDCGFEHLVPVIEMWADQLTSLKDLYKSLKTLSAELVPWLNLKKQDENEGIKVEDLLFIVDTMLEEVENKEKDSNMPHFQTLQAIVSHFQKLFDVPSLNGVYPRMNEVYTRLGEMNNAVRNLQELLELDSSSSLCVLVSTVGKLCRLINEDVNEQVMQVLGPEDLQSIIYKLEEHEEFFPAFQAFTNDLLEILEIDDLDAIVPAVKKLKVLSY

SEQ ID NO: 29453 - protein, 3 aa, Artificial Sequence
  Synthetic polypeptide
VKR

SEQ ID NO: 29454 - protein, 433 aa, Artificial Sequence
  Synthetic polypeptide
PLFYLIIGPRCKRNDAGNLDMPKRSCEVLPLSEKVKCQHYKKKRTEQEETIASLQMEVCRLKKEEEDRIVTQNRVFAYLCKRVPHTVLDRQLLCLIDYYESKIRKIHTQRQYKEDESQSEEENDYRNLDASPTYKGLLMSLQNQLKESKSKIDALSSEKLNLQKDLETRPTQHELRLYKQQVKKLEKALKKNVKLQELINHKKAEDTEKKDEPSKYNQQQALIDQRYFQVLCSINSIIHNPRAPVIIYKQTKGGVQNFNKDLVQDCGFEHLVPVIEMWADQLTSLKDLYKSLKTLSAELVPWLNLKKQDENEGIKVEDLLFIVDTMLEEVENKEKDSNMPHFQTLQAIVSHFQKLFDVPSLNGVYPRMNEVYTRLGEMNNAVRNLQELLELDSSSSLCVLVSTVGKLCRLINEDVNEQVMQVLGPEDLQRYLF

SEQ ID NO: 29455 - protein, 169 aa, Artificial Sequence
  Synthetic polypeptide
PLFYLIIGPRCKRNDAGNLDMPKRSCEVLPLSEKVKCQHYKKKRTEQEETIASLQMEVCRLKKEEEDRIVTQNRVFAYLCKRVPHTVLDRQLLCLIDYYESKIRKIHTQRQYKEDESQSEEENDYRNLDASPTYKGLLMSLQNQLKESKSKIDALSSEKLNLQKDLETR

SEQ ID NO: 29456 - protein, 158 aa, Artificial Sequence
  Synthetic polypeptide
PLFYLIIGPRCKRNDAGNLDMPKRSCEVLPLSEKVKCQHYKKKRTEQEETIASLQMEVCRLKKEEEDRIVTQNRVFAYLCKRVPHTVLDRQLLCLIDYYESKIRKIHTQRQYKEDESQSEEENDYRNLDASPTYKGLLMSLQNQLKESKSKIDALSSE

SEQ ID NO: 29457 - protein, 91 aa, Artificial Sequence
  Synthetic polypeptide
PLFYLIIGPRCKRNDAGNLDMPKRSCEVLPLSEKVKCQHYKKKRTEQEETIASLQMEVCRLKKEEEDRIVTQNRVFAYLCKRVPHTVLDRQ

SEQ ID NO: 29458 - protein, 33 aa, Artificial Sequence
  Synthetic polypeptide
SQHFGRPRQVDRLSSGVPDQPGQHASGAASDLA

SEQ ID NO: 29459 - protein, 491 aa, Artificial Sequence
  Synthetic polypeptide
AQEFQTSLGNMLQALLQIWPKLPPREALELLDFNYPDQYVREYAVGCLRQMSDEELSQYLLQLVQVLKYEPFLDCALSRFLLERALGNRRIGQFLFWHLRSEVHIPAVSVQFGVILEAYCRGSVGHMKVLSKQVEALNKLKTLNSLIKLNAVKLNRAKGKEAMHTCLKQSAYREALSDLQSPLNPCVILSELYVEKCKYMDSKMKPLWLVYNNKVFGEDSVGVIFKNGDDLRQDMLTLQMLRLMDLLWKEAGLDLRMLPYGCLATGDRSGLIEVVSTSETIADIQLNSSNVAAAAAFNKDALLNWLKEYNSGDDLDRAIEEFTLSCAGYCVASYVLGIGDRHSDNIMVKKTGQLFHIDFGHILGNFKSKFGIKRERVPFILTYDFIHVIQQGKTGNTEKFGRFRQCCEDAYLILRRHGNLFITLFALMLTAGLPELTSVKDIQYLKDSLALGKSEEEALKQFKQKFDEALRESWTTKVNWMAHTVRKDYRS

SEQ ID NO: 29460 - protein, 45 aa, Artificial Sequence
  Synthetic polypeptide
HTPLIPALWEAKAGGSLELRSSRPAWATCFRRCFRFGLNCPPGRP

SEQ ID NO: 29461 - protein, 496 aa, Artificial Sequence
  Synthetic polypeptide
AQEFQTSLGNMLQALLQIWPKLPPREALELLDFNYPDQYVREYAVGCLRQMSDEELSQYLLQLVQVLKYEPFLDCALSRFLLERALGNRRIGQFLFWHLRSEVHIPAVSVQFGVILEAYCRGSVGHMKVLSKQVEALNKLKTLNSLIKLNAVKLNRAKGKEAMHTCLKQSAYREALSDLQSPLNPCVILSELYVEKCKYMDSKMKPLWLVYNNKVFGEDSVGVIFKNGDVCFPLDLRQDMLTLQMLRLMDLLWKEAGLDLRMLPYGCLATGDRSGLIEVVSTSETIADIQLNSSNVAAAAAFNKDALLNWLKEYNSGDDLDRAIEEFTLSCAGYCVASYVLGIGDRHSDNIMVKKTGQLFHIDFGHILGNFKSKFGIKRERVPFILTYDFIHVIQQGKTGNTEKFGRFRQCCEDAYLILRRHGNLFITLFALMLTAGLPELTSVKDIQYLKDSLALGKSEEEALKQFKQKFDEALRESWTTKVNWMAHTVRKDYRS

SEQ ID NO: 29462 - protein, 134 aa, Artificial Sequence
  Synthetic polypeptide
AQEFQTSLGNMLQALLQIWPKLPPREALELLDFNYPDQYVREYAVGCLRQMSDEELSQYLLQLVQVLKYEPFLDCALSRFLLERALGNRRIGQFLFWHLRSEVHIPAVSVQFGVILEAYCRGSVGHMKVLSKQC

SEQ ID NO: 29463 - protein, 21 aa, Artificial Sequence
  Synthetic polypeptide
AQEMKATVSRDHTTALQPGSA

SEQ ID NO: 29464 - protein, 948 aa, Artificial Sequence
  Synthetic polypeptide
AVITPLHSSLGLHEFDSLKDPEVNEFRRKMRKFSEEKILSLVGLSWMDWLKQTYPPEHEPSIPENLEDKLYGGKLIVAVHFENCQDVFSFQVSPNMNPIKVNELAIQKRLTIHGKEDEVSPYDYVLQVSGRVEYVFGDHPLIQFQYIRNCVMNRALPHFILVECCKIKKMYEQEMIAIEAAINRNSSNLPLPLPPKKTRIISHVWENNNPFQIVLVKGNKLNTEETVKVHVRAGLFHGTELLCKTIVSSEVSGKNDHIWNEPLEFDINICDLPRMARLCFAVYAVLDKVKTKKSTKTINPSKYQTIRKAGKVHYPVAWVNTMVFDFKGQLRTGDIILHSWSSFPDELEEMLNPMGTVQTNPYTENATALHVKFPENKKQPYYYPPFDKIIEKAAEIASSDSANVSSRGGKKFLPVLKEILDRDPLSQLCENEMDLIWTLRQDCREIFPQSLPKLLLSIKWNKLEDVAQLQALLQIWPKLPPREALELLDFNYPDQYVREYAVGCLRQMSDEELSQYLLQLVQVLKYEPFLDCALSRFLLERALGNRRIGQFLFWHLRSEVHIPAVSVQFGVILEAYCRGSVGHMKVLSKQVEALNKLKTLNSLIKLNAVKLNRAKGKEAMHTCLKQSAYREALSDLQSPLNPCVILSELYVEKCKYMDSKMKPLWLVYNNKVFGEDSVGVIFKNGDDLRQDMLTLQMLRLMDLLWKEAGLDLRMLPYGCLATGDRSGLIEVVSTSETIADIQLNSSNVAAAAAFNKDALLNWLKEYNSGDDLDRAIEEFTLSCAGYCVASYVLGIGDRHSDNIMVKKTGQLFHIDFGHILGNFKSKFGIKRERVPFILTYDFIHVIQQGKTGNTEKFGRFRQCCEDAYLILRRHGNLFITLFALMLTAGLPELTSVKDIQYLKDSLALGKSEEEALKQFKQKFDEALRESWTTKVNWMAHTVRKDYRS

SEQ ID NO: 29465 - protein, 15 aa, Artificial Sequence
  Synthetic polypeptide
SHHCTPAWVCMNLIP

SEQ ID NO: 29466 - protein, 191 aa, Artificial Sequence
  Synthetic polypeptide
AVITPLHSSLGLHEFDSLKDPEVNEFRRKMRKFSEEKILSLVGLSWMDWLKQTYPPEHEPSIPENLEDKLYGGKLIVAVHFENCQDVFSFQVSPNMNPIKVNELAIQKRLTIHGKEDEVSPYDYVLQVSGRVEYVFGDHPLIQFQHVWENNNPFQIVLVKGNKLNTEETVKVHVRAGLFHGTELLCKTIVS

SEQ ID NO: 29467 - protein, 14 aa, Artificial Sequence
  Synthetic polypeptide
YTVRLLVDNTGEDI

SEQ ID NO: 29468 - protein, 860 aa, Artificial Sequence
  Synthetic polypeptide
ITLVKTFEVCDLPVRAAKFVARKNWVVTGADDMQIRVFNYNTLERVHMFEAHSDYIRCIAVHPTQPFILTSSDDMLIKLWDWDKKWSCSQVFEGHTHYVMQIVINPKDNNQFASASLDRTIKVWQLGSSSPNFTLEGHEKGVNCIDYYSGGDKPYLISGADDRLVKIWDYQNKTCVQTLEGHAQNVSCASFHPELPIIITGSEDGTVRIWHSSTYRLESTLNYGMERVWCVASLRGSNNVALGYDEGSIIVKLGREEPAMSMDANGKIIWAKHSEVQQANLKAMGDAEIKDGERLPLAVKDMGSCEIYPQTIQHNPNGRFVVVCGDGEYIIYTAMALRNKSFGSAQEFAWAHDSSEYAIRESNSIVKIFKNFKEKKSFKPDFGAESIYGGFLLGVRSVNGLAFYDWDNTELIRRIEIQPKHIFWSDSGELVCIATEESFFILKYLSEKVLAAQETHEGVTEDGIEDAFEVLGEIQEIVKTGLWVGDCFIYTSSVNRLNYYVGGEIVTIAHLDRTMYLLGYIPKDNRLYLGDKELNIISYSLLVSVLEYQTAVMRRDFSMADKVLPTIPKEQRTRVAHFLEKQGFKQQALTVSTDPEHRFELALQLGELKIAYQLAVEAESEQKWKQLAELAISKCQFGLAQECLHHAQDYGGLLLLATASGNANMVNKLAEGAERDGKNNVAFMSYFLQGKVDACLELLIRTGRLPEAAFLARTYLPSQVSRVVKLWRENLSKVNQKAAESLADPTEYENLFPGLKEAFVVEEWVKETHADLWPAKQYPLVTPNEERNVMEEGKDFQPSRSTAQQELDGKPASPTPVIVASHTANKEEKSLLELEVDLDNLELEDIDTTDINLDEDILDD

SEQ ID NO: 29469 - protein, 106 aa, Artificial Sequence
  Synthetic polypeptide
ITLVKTFEVCDLPVRAAKFVARKNWVVTGADDMQIRVFNYNTLERVHMFEAHSDYIRCIAVHPTQPFILTSSGHTHYVMQIVINPKDNNQFASASLDRTIKVWQLG

SEQ ID NO: 29470 - protein, 94 aa, Artificial Sequence
  Synthetic polypeptide
ITLVKTFEVCDLPVRAAKFVARKNWVVTGADDMQIRVFNYNTLERVHMFEAHSDYIRCIAVHPTQPFILTSSDDMLIKLWDWDKKWSCSQVFEG

SEQ ID NO: 29471 - protein, 72 aa, Artificial Sequence
  Synthetic polypeptide
ITLVKTFEVCDLPVRAAKFVARKNWVVTGADDMQIRVFNYNTLERVHMFEAHSDYIRCIAVHPTQPFILTSS

SEQ ID NO: 29472 - protein, 69 aa, Artificial Sequence
  Synthetic polypeptide
ITLVKTFEVCDLPVRAAKFVARKNWVVTGADDMQIRVFNYNTLERVHMFEAHSDYIRCIAVHPTQPFIL

SEQ ID NO: 29473 - protein, 60 aa, Artificial Sequence
  Synthetic polypeptide
ITLVKTFEVCDLPVRAAKFVARKNWVVTGADDMQIRVFNYNTLERVHMFEAHSDYIRCIA

SEQ ID NO: 29474 - protein, 26 aa, Artificial Sequence
  Synthetic polypeptide
SRTECITPSKDDSHVPFQGPQGRLSQ

SEQ ID NO: 29475 - protein, 167 aa, Artificial Sequence
  Synthetic polypeptide
KEKKNTRAEQNASHLVRMTVMSLSRDLKDDFHSDTVLSILNEQRIRGILCDVTIIVEDTKFKAHSNVLAASSLYFKNIFWSHTICISSHVLELDDLKAEVFTEILNYIYSSTVVVKRQETVTDLAAAGKKLGISFLEDLTDRNFSNSPGPYVFCITEKGVVKEEKNE

SEQ ID NO: 29476 - protein, 135 aa, Artificial Sequence
  Synthetic polypeptide
KEKKNTRAEQNASHLVRMTVMSLSRDLKDDFHSDTVLSILNEQRIRGILCDVTIIVEDTKFKAHSNVLAASSLYFKNIFWSHTICISSHVLELDDLKAEVFTEILNYIYSSTVVVKRQETVTDLAAAGKKLGISF

SEQ ID NO: 29477 - protein, 51 aa, Artificial Sequence
  Synthetic polypeptide
KEKKNTRAEQNASHLVRMTVMSLSRDLKDDFHSDTVLSILNEQRIRGILCD

SEQ ID NO: 29478 - protein, 125 aa, Artificial Sequence
  Synthetic polypeptide
KEKKNTRAEQNASHLVRMTVMSLSRDLKDDFHSDTVLSILNEQRIRGILCDVTIIVEDTKFKAHSNVLAASSLYFKNIFWSHTICISSHVLELDDLKAEVFTEILNYIYSSTVVVKRQETVTDLA

SEQ ID NO: 29479 - protein, 788 aa, Artificial Sequence
  Synthetic polypeptide
KEKKNTRAEQNASHLVRMTVMSLSRDLKDDFHSDTVLSILNEQRIRGILCDVTIIVEDTKFKAHSNVLAASSLYFKNIFWSHTICISSHVLELDDLKAEVFTEILNYIYSSTVVVKRQETVTDLAAAGKKLGISFLEDLTDRNFSNSPGPYVFCITEKGVVKEEKNEKRHEEPAITNGPRITNAFSIIETENSNNMFSPLDLRASFKKVSDSMRTASLCLERTDVCHEAEPVRTLAEHSYAVSSVAEAYRSQPVREHDGSSPGNTGKENCEALAAKPKTCRKPKTFSIPQDSDSATENIPPPPVSNLEVNQERSPQPAAVLTRSKSPNNEGDVHFSREDENQSSDVPGPPAAEVPPLVYNCSCCSKAFDSSTLLSAHMQLHKPTQEPLVCKYCNKQFTTLNRLDRHEQICMRSSHMPIPGGNQRFLENYPTIGQNGGSFTGPEPLLSENRIGEFSSTGSTLPDTDHMVKFVNGQMLYSCVVCKRSYVTLSSLRRHANVHSWRRTYPCHYCNKVFALAEYRTRHEIWHTGERRYQCIFCLETFMTYYILKNHQKSFHAIDHRLSISKKTANGGLKPSVYPYKLYRLLPMKCKRAPYKSYRNSSYENARENSQMNESAPGTYVVQNPHSSELPTLNFQDTVNTLTNSPAIPLETSACQDIPTSANVQNAEGTKWGEEALKMDLDNNFYSTEVSVSSTENAVSSDLRAGDVPVLSLSNSSENAASVISYSGSAPSVIVHSSQFSSVIMHSNAIAAMTSSNHRAFSDPAVSQSLKDDSKPEPDKVGRFASRP

SEQ ID NO: 29480 - protein, 1212 aa, Artificial Sequence
  Synthetic polypeptide
KEKKNTRAEQNASHLVRMTVMSLSRDLKDDFHSDTVLSILNEQRIRGILCDVTIIVEDTKFKAHSNVLAASSLYFKNIFWSHTICISSHVLELDDLKAEVFTEILNYIYSSTVVVKRQETVTDLAAAGKKLGISFLEDLTDRNFSNSPGPYVFCITEKGVVKEEKNEKRHEEPAITNGPRITNAFSIIETENSNNMFSPLDLRASFKKVSDSMRTASLCLERTDVCHEAEPVRTLAEHSYAVSSVAEAYRSQPVREHDGSSPGNTGKENCEALAAKPKTCRKPKTFSIPQDSDSATENIPPPPVSNLEVNQERSPQPAAVLTRSKSPNNEGDVHFSREDENQSSDVPGPPAAEVPPLVYNCSCCSKAFDSSTLLSAHMQLHKPTQEPLVCKYCNKQFTTLNRLDRHEQICMRSSHMPIPGGNQRFLENYPTIGQNGGSFTGPEPLLSENRIGEFSSTGSTLPDTDHMVKFVNGQMLYSCVVCKRSYVTLSSLRRHANVHSWRRTYPCHYCNKVFALAEYRTRHEIWHTGERRYQCIFCLETFMTYYILKNHQKSFHAIDHRLSISKKTANGGLKPSVYPYKLYRLLPMKCKRAPYKSYRNSSYENARENSQMNESAPGTYVVQNPHSSELPTLNFQDTVNTLTNSPAIPLETSACQDIPTSANVQNAEGTKWGEEALKMDLDNNFYSTEVSVSSTENAVSSDLRAGDVPVLSLSNSSENAASVISYSGSAPSVIVHSSQFSSVIMHSNAIAAMTSSNHRAFSDPAVSQSLKDDSKPEPDKVGRFASRPKSIKEKKKTTSHTRGEIPEESNYVADPGGSLSKTTNIAEETSKIETYIAKPALPGTSTNSNVAPLCQITVKIGNEAIVKRHILGSKLFYKRGRRPKYQMQEEPLPQGNDPEPSGDSPLGLCQSECMEMSEVFDDASDQDSTDKPWRPYYNYKPKKKSRQLKKMRKVNWRKEHGNRSPSHKCKYPAELDCAVGKAPQDKPFEEEETKEMPKLQCELCDGDKAVGAGNQGRPHRHLTSRPYACELCAKQFQSPSTLKMHMRCHTGEKPYQCKTCGRCFSVQGNLQKHERIHLGLKEFVCQYCNKAFTLNETLKIHERIHTGEKRYHCQFCFQRFLYLSTKRNHEQRHIREHNGKGYACFQCPKICKTAAALGMHQKKHLFKSPSQQEKIGDVCHENSNPLENQHFIGSEDNDQKDNIQTGVENVVL

SEQ ID NO: 29481 - protein, 163 aa, Artificial Sequence
  Synthetic polypeptide
KEKKNTRAEQNASHLVRMTVMSLSRDLKDDFHSDTVLSILNEQRIRGILCDVTIIVEDTKFKAHSNVLAASSLYFKNIFWSHTICISSHVLELDDLKAEVFTEILNYIYSSTVVVKRQETVTDLAAAGKKLGISFLEDLTDRNFSNSPGPYVFCITEKGVVKE

SEQ ID NO: 29482 - protein, 111 aa, Artificial Sequence
  Synthetic polypeptide
KEKKNTRAEQNASHLVRMTVMSLSRDLKDDFHSDTVLSILNEQRIRGILCDVTIIVEDTKFKAHSNVLAASSLYFKNIFWSHTICISSHVLELDDLKAEVFTEILNYIYSS

SEQ ID NO: 29483 - protein, 86 aa, Artificial Sequence
  Synthetic polypeptide
KEKKNTRAEQNASHLVRMTVMSLSRDLKDDFHSDTVLSILNEQRIRGILCDVTIIVEDTKFKAHSNVLAASSLYFKNIFWSHTICI

SEQ ID NO: 29484 - protein, 227 aa, Artificial Sequence
  Synthetic polypeptide
KEKKNTRAEQNASHLVRMTVMSLSRDLKDDFHSDTVLSILNEQRIRGILCDVTIIVEDTKFKAHSNVLAASSLYFKNIFWSHTICISSHVLELDDLKAEVFTEILNYIYSSTVVVKRQETVTDLAAAGKKLGISFLEDLTDRNFSNSPGPYVFCITEKGVVKEEKNEKRHEEPAITNGPRITNAFSIIETENSNNMFSPLDLRASFKKVSDSMRTASLCLERTDVCH

SEQ ID NO: 29485 - protein, 128 aa, Artificial Sequence
  Synthetic polypeptide
KEKKNTRAEQNASHLVRMTVMSLSRDLKDDFHSDTVLSILNEQRIRGILCDVTIIVEDTKFKAHSNVLAASSLYFKNIFWSHTICISSHVLELDDLKAEVFTEILNYIYSSTVVVKRQETVTDLAAAG

SEQ ID NO: 29486 - protein, 56 aa, Artificial Sequence
  Synthetic polypeptide
AFQISKSKIPNAPGCKTEHQHDSQRKYSLEHFRFSDLGCTTGEAKNLLPYLGPHKM

SEQ ID NO: 29487 - protein, 57 aa, Artificial Sequence
  Synthetic polypeptide
VEHSKFQSPKFQMLQDAKLSTNMILKGNTHWSISDFQIWDAQLVKQKIYCHILDPTK

SEQ ID NO: 29488 - protein, 20 aa, Artificial Sequence
  Synthetic polypeptide
FSKEILIGAFQIFRFGMHNW

SEQ ID NO: 29489 - protein, 847 aa, Artificial Sequence
  Synthetic polypeptide
AFQISKSKIPNAPGCKTEHQHDSQRKYSLEHFRFSDLGCTTGEAKNLLPYLGPHKMRDCFCTINLDQEEVYRTQVVEKSLSPFFSEEFYFEIPRTFQYLSFYVYDKNVLQRDLRIGKVAIKKEDLCNHSGKETWFSLQPVDSNSEVQGKVHLELKLNELITENGTVCQQLVVHIKACHGLPLINGQSCDPYATVSLVGPSRNDQKKTKVKKKTSNPQFNEIFYFEVTRSSSYTRKSQFQVEEEDIEKLEIRIDLWNNGNLVQDVFLGEIKVPVNVLRTDSSHQAWYLLQPRDNGNKSSKTDDLGSLRLNICYTEDYVLPSEYYGPLKTLLLKSPDVQPISASAAYILSEICRDKNDAVLPLVRLLLHHDKLVPFATAVAELDLKDTQDANTIFRGNSLATRCLDEMMKIVGGHYLKVTLKPILDEICDSSKSCEIDPIKLKEGDNVENNKENLRYYVDKLFNTIVKSSMSCPTVMCDIFYSLRQMATQRFPNDPHVQYSAVSSFVFLRFFAVAVVSPHTFHLRPHHPDAQTIRTLTLISKTIQTLGSWGSLSKSKSSFKETFMCEFFKMFQEEGYIIAVKKFLDEISSTETKESSGTSEPVHLKEGEMYKRAQGRTRIGKKNFKKRWFCLTSRELTYHKQPGSKDAIYTIPVKNILAVEKLEESSFNKKNMFQVIHTEKPLYVQANNCVEANEWIDVLCRVSRCNQNRLSFYHPSVYLNGNWLCCQETGENTLGCKPCTAGVPADIQIDIDEDRETERIYSLFTLSLLKLQKMEEACGTIAVYQGPQKEPDDYSNFVIEDSVTTFKTIQQIKSIIEKLDEPHEKYRKKRSSSAKYGSKENPIVGKAS

SEQ ID NO: 29490 - protein, 846 aa, Artificial Sequence
  Synthetic polypeptide
AFQISKSKIPNAPGCKTEHQHDSQRKYSLEHFRFSDLGCTTGEAKNLLPYLGPHKMRDCFCTINLDQEEVYRTQVVEKSLSPFFSEEFYFEIPRTFQYLSFYVYDKNVLQRDLRIGKVAIKKEDLCNHSGKETWFSLQPVDSNSEVQGKVHLELKLNELITENGTVCQQLVVHIKACHGLPLINGQSCDPYATVSLVGPSRNDQKKTKVKKKTSNPQFNEIFYFEVTRSSSYTRKSQFQVEEEDIEKLEIRIDLWNNGNLVQDVFLGEIKVPVNVLRTDSSHQAWYLLQPRDNGNKSSKTDDLGSLRLNICYTEDYVLPSEYYGPLKTLLLKSPDVQPISASAAYILSEICRDKNDAVLPLVRLLLHHDKLVPFATAVAELDLKDTQDANTIFRGNSLATRCLDEMMKIVGGHYLKVTLKPILDEICDSSKSCEIDPIKLKEGDNVENNKENLRYYVDKLFNTIVKSSMSCPTVMCDIFYSLRQMATQRFPNDPHVQYSAVSSFVFLRFFAVAVVSPHTFHLRPHHPDAQTIRTLTLISKTIQTLGSWGSLSKSKSSFKETFMCEFFKMFQEEGYIIAVKKFLDEISSTETKESSGTSEPVHLKEGEMYKRAQGRTRIGKKNFKKRWFCLTSRELTYHKQPGKDAIYTIPVKNILAVEKLEESSFNKKNMFQVIHTEKPLYVQANNCVEANEWIDVLCRVSRCNQNRLSFYHPSVYLNGNWLCCQETGENTLGCKPCTAGVPADIQIDIDEDRETERIYSLFTLSLLKLQKMEEACGTIAVYQGPQKEPDDYSNFVIEDSVTTFKTIQQIKSIIEKLDEPHEKYRKKRSSSAKYGSKENPIVGKAS

SEQ ID NO: 29491 - protein, 258 aa, Artificial Sequence
  Synthetic polypeptide
GDLALCAVLELPKLAVSEMYKRAQGRTRIGKKNFKKRWFCLTSRELTYHKQPGSKDAIYTIPVKNILAVEKLEESSFNKKNMFQVIHTEKPLYVQANNCVEANEWIDVLCRVSRCNQNRLSFYHPSVYLNGNWLCCQETGENTLGCKPCTAGVPADIQIDIDEDRETERIYSLFTLSLLKLQKMEEACGTIAVYQGPQKEPDDYSNFVIEDSVTTFKTIQQIKSIIEKLDEPHEKYRKKRSSSAKYGSKENPIVGKAS

SEQ ID NO: 29492 - protein, 26 aa, Artificial Sequence
  Synthetic polypeptide
QSVRCIKELKEELGLEKRILRNDGSA

SEQ ID NO: 29493 - protein, 257 aa, Artificial Sequence
  Synthetic polypeptide
GDLALCAVLELPKLAVSEMYKRAQGRTRIGKKNFKKRWFCLTSRELTYHKQPGKDAIYTIPVKNILAVEKLEESSFNKKNMFQVIHTEKPLYVQANNCVEANEWIDVLCRVSRCNQNRLSFYHPSVYLNGNWLCCQETGENTLGCKPCTAGVPADIQIDIDEDRETERIYSLFTLSLLKLQKMEEACGTIAVYQGPQKEPDDYSNFVIEDSVTTFKTIQQIKSIIEKLDEPHEKYRKKRSSSAKYGSKENPIVGKAS

SEQ ID NO: 29494 - protein, 44 aa, Artificial Sequence
  Synthetic polypeptide
GQAQWLTPVIPALWEAEAGGSRDQEIETILANKVLSLSLCTFPV

SEQ ID NO: 29495 - protein, 1251 aa, Artificial Sequence
  Synthetic polypeptide
SQHFGRPRRADHEIRRLRPSWLTRYYPYHYAPFLSDIHNISTLKIHFELGKPFKPFEQLLAVLPAASKNLLPACYQHLMTNEDSPIIEYYPPDFKTDLNGKQQEWEAVVLIPFIDEKRLLEAMETCNHSLKKEERKRNQHSECLMCWYDRDTEFIYPSPWPEKFPAIERCCTRYKIISLDAWRVDINKNKITRIDQKALYFCGFPTLKHIRHKFFLKKSGVQVFQQSSRGENMMLEILVDAESDELTVENVASSVLGKSVFVNWPHLEEARVVAVSDGETKFYLEEPPGTQKLYSGRTAPPSKVVHLGDKEQSNWAKEVQGISEHYLRRKGIIINETSAVVYAQLLTGRKYQINQNGEVRLEKQWSKQVVPFVYQTIVKDIRAFDSRFSNIKTLDDLFPLRSMVFMLGTPYYGCTGEVQDSGDVITEGRIRVIFSIPCEPNLDALIQNQHKYSIKYNPGYVLASRLGVSGYLVSRFTGSIFIGRGSRRNPHGDHKANVGLNLKFNKKNEEVPGYTKKVGSEWMYSSAAEQLLAEYLERAPELFSYIAKNSQEDVFYEDDIWPGENENGAEKVQEIITWLKGHPVSTLSRSSCDLQILDAAIVEKIEEEVEKCKQRKNNKKVRVTVKPHLLYRPLEQQHGVIPDRDAEFCLFDRVVNVRENFSVPVGLRGTIIGIKGANREADVLFEVLFDEEFPGGLTIRCSPGRGYRLPTSALVNLSHGSRSETGNQKLTAIVKPQPAVHQHSSSSSVSSGHLGALNHSPQSLFVPTQVPTKDDDEFCNIWQSLQGSGKMQYFQPTIQEKGAVLPQEISQVNQHHKSGFNDNSVKYQQRKHDPHRKFKEECKSPKAECWSQKMSNKQPNSGIENFLASLNISKENEVQSSHHGEPPSEEHLSPQSFAMGTRMLKEILKIDGSNTVDHKNEIKQIANEIPVSSNRRDEYGLPSQPKQNKKLASYMNKPHSANEYHNVQSMDNMCWPAPSQIPPVSTPVTELSRICSLVGMPQPDFSFLRMPQTMTVCQVKLSNGLLVHGPQCHSENEAKEKAALFALQQLGSLGMNFPLPSQVFANYPSAVPPGTIPPAFPPPTGWDHYGSNYALGAANIMPSSSHLFGSMPWGPSVPVPGKPFHHTLYSGTMPMAGGIPGGVHNQFIPLQVTKKRVANKKNFENKEAQSSQATPVQTSQPDSSNIVKVSPRESSSASLKSSPIAQPASSFQVETASQGHSISHHKSTPISSSRRKSRKLAVNFGVSKPSE

SEQ ID NO: 29496 - protein, 26 aa, Artificial Sequence
  Synthetic polypeptide
QGIILIIMHLSCLIYTTSVHSKSILN

SEQ ID NO: 29497 - protein, 1239 aa, Artificial Sequence
  Synthetic polypeptide
SQHFGRPRRADHEIRRLRPSWLTRYYPYHYAPFLSDIHNISTLKIHFELGKPFKPFEQLLAVLPAASKNLLPACYQHLMTNEDSPIIEYYPPDFKTDLNGKQQEWEAVVLIPFIDEKRLLEAMETCNHSLKKEERKRNQHSECLMCWYDRDTEFIYPSPWPEKFPAIERCCTRYKIISLDAWRVDINKNKITRIDQKALYFCGFPTLKHIRHKFFLKKSGVQVFQQSSRGENMMLEILVDAESDELTVENVASSVLGKSVFVNWPHLEEARVVAVSDGETKFYLEEPPGTQKLYSGRTAPPSKVVHLGDKEQSNWAKEVQGISEHYLRRKGIIINETSAVVYAQLLTGRKYQINQNGEVRLEKQWSKQVVPFVYQTIVKDIRAFDSRFSNIKTLDDLFPLRSMVFMLGTPYYGCTGEVQDSGDVITEGRIRVIFSIPCEPNLDALIQNQHKYSIKYNPGYVLASRLGVSGYLVSRFTGSIFIGRGSRRNPHGDHKANVGLNLKFNKKNEEVPGYTKKVGSEWMYSSAAEQLLAEYLERAPELFSYIAKNSQEDVFYEDDIWPGENENGAEKVQEIITWLKGHPVSTLSRSSCDLQILDAAIVEKIEEEVEKCKQRKNNKKVRVTVKPHLLYRPLEQQHGVIPDRDAEFCLFDRVVNVRENFSVPVGLRGTIIGIKGANREADVLFEVLFDEEFPGGLTIRCSPGRGYRLPTSALVNLSHGSRSETGNQKLTAIVKPQPAVHQHSSSSSVSSGHLGALNHSPQSLFVPTQVPTKDDDEFCNIWQSLQGSGKMQYFQPTIQEKGAVLPQEISQVNQHHKSGFNDNSVKYQQRKHDPHRKFKEECKSPKAECWSQKMSNKQPNSGIENFLASLNISKENEVQSSHHGEPPSEEHLSPQSFAMKGTRMLKEILKIDGSNTVDHKNEIKQIANEIPVSSNRRDEYGLPSQPKQNKKLASYMNKPHSANEYHNVQSMDNMCWPAPSQIPPVSTPVTELSRICSLVGMPQPDFSFLRMPQTMTVCQVKLSNGLLVHGPQCHSENEAKEKAALFALQQLGSLGMNFPLPSQVFANYPSAVPPGTIPPAFPPPTANIMPSSSHLFGSMPWGPSVPVPGKPFHHTLYSGTMPMAGGIPGGVHNQFIPLQVTKKRVANKKNFENKEAQSSQATPVQTSQPDSSNIVKVSPRESSSASLKSSPIAQPASSFQVETASQGHSISHHKSTPISSSRRKSRKLAVNFGVSKPSE

SEQ ID NO: 29498 - protein, 22 aa, Artificial Sequence
  Synthetic polypeptide
RKCGIYLYNMEISSYISQCHEC

SEQ ID NO: 29499 - protein, 35 aa, Artificial Sequence
  Synthetic polypeptide
VSINMGMNKENVAYISTIWKSVHISVNATNVNSMA

SEQ ID NO: 29500 - protein, 577 aa, Artificial Sequence
  Synthetic polypeptide
IKKMWHISLQYGNQFIYQSMPRMLTLWLDYGTKAYEWEKAGRSDRVQMRNDLGKINKVITEHTNYLAPYQFLTAFSQLISRICHSHDEVFVVLMEIIAKVFLAYPQQAMWMMTAVSKSSYPMRVNRCKEILNKAIHMKKSLEKFVGDATRLTDKLLELCNKPVDGSSSTLSMSTHFKMLKKLVEEATFSEILIPLQSVMIPTLPSILGTHANHASHEPFPGHWAYIAGFDDMVEILASLQKPKKISLKGSDGKFYIMMCKPKDDLRKDCRLMEFNSLINKCLRKDAESRRRELHIRTYAVIPLNDECGIIEWVNNTAGLRPILTKLYKEKGVYMTGKELRQCMLPKSAALSEKLKVFREFLLPRHPPIFHEWFLRTFPDPTSWYSSRSAYCRSTAVMSMVGYILGLGDRHGENILFDSLTGECVHVDFNCLFNKGETFEVPEIVPFRLTHNMVNGMGPMGTEGLFRRACEVTMRLMRDQREPLMSVLKTFLHDPLVEWSKPVKGHSKAPLNETGEVVNEKAKTHVLDIEQRLQGVIKTRNRVTGLPLSIEGHVHYLIQEATDENLLCQMYLGWTPYM

SEQ ID NO: 29501 - protein, 26 aa, Artificial Sequence
  Synthetic polypeptide
RQHTKISTIWKSVHISVNATNVNSMA

SEQ ID NO: 29502 - protein, 595 aa, Artificial Sequence
  Synthetic polypeptide
DSNKRLLEQINEFNKVAGYKGNIQKSLQYGNQFIYQSMPRMLTLWLDYGTKAYEWEKAGRSDRVQMRNDLGKINKVITEHTNYLAPYQFLTAFSQLISRICHSHDEVFVVLMEIIAKVFLAYPQQAMWMMTAVSKSSYPMRVNRCKEILNKAIHMKKSLEKFVGDATRLTDKLLELCNKPVDGSSSTLSMSTHFKMLKKLVEEATFSEILIPLQSVMIPTLPSILGTHANHASHEPFPGHWAYIAGFDDMVEILASLQKPKKISLKGSDGKFYIMMCKPKDDLRKDCRLMEFNSLINKCLRKDAESRRRELHIRTYAVIPLNDECGIIEWVNNTAGLRPILTKLYKEKGVYMTGKELRQCMLPKSAALSEKLKVFREFLLPRHPPIFHEWFLRTFPDPTSWYSSRSAYCRSTAVMSMVGYILGLGDRHGENILFDSLTGECVHVDFNCLFNKGETFEVPEIVPFRLTHNMVNGMGPMGTEGLFRRACEVTMRLMRDQREPLMSVLKTFLHDPLVEWSKPVKGHSKAPLNETGEVVNEKAKTHVLDIEQRLQGVIKTRNRVTGLPLSIEGHVHYLIQEATDENLLCQMYLGWTPYM

SEQ ID NO: 29503 - protein, 31 aa, Artificial Sequence
  Synthetic polypeptide
MNSIKLQDIKATYKNLYNMEISSYISQCHEC

SEQ ID NO: 29504 - protein, 53 aa, Artificial Sequence
  Synthetic polypeptide
GRFQDGRIGTAPVYSSQHEQRRRWVISAFPTEISTIWKSVHISVNATNVNSMA

SEQ ID NO: 29505 - protein, 577 aa, Artificial Sequence
  Synthetic polypeptide
FLHFQLRSLQYGNQFIYQSMPRMLTLWLDYGTKAYEWEKAGRSDRVQMRNDLGKINKVITEHTNYLAPYQFLTAFSQLISRICHSHDEVFVVLMEIIAKVFLAYPQQAMWMMTAVSKSSYPMRVNRCKEILNKAIHMKKSLEKFVGDATRLTDKLLELCNKPVDGSSSTLSMSTHFKMLKKLVEEATFSEILIPLQSVMIPTLPSILGTHANHASHEPFPGHWAYIAGFDDMVEILASLQKPKKISLKGSDGKFYIMMCKPKDDLRKDCRLMEFNSLINKCLRKDAESRRRELHIRTYAVIPLNDECGIIEWVNNTAGLRPILTKLYKEKGVYMTGKELRQCMLPKSAALSEKLKVFREFLLPRHPPIFHEWFLRTFPDPTSWYSSRSAYCRSTAVMSMVGYILGLGDRHGENILFDSLTGECVHVDFNCLFNKGETFEVPEIVPFRLTHNMVNGMGPMGTEGLFRRACEVTMRLMRDQREPLMSVLKTFLHDPLVEWSKPVKGHSKAPLNETGEVVNEKAKTHVLDIEQRLQGVIKTRNRVTGLPLSIEGHVHYLIQEATDENLLCQMYLGWTPYM

SEQ ID NO: 29506 - protein, 29 aa, Artificial Sequence
  Synthetic polypeptide
IEITQSEEKGGKRLKKKSSRNQKKKEKRP

SEQ ID NO: 29507 - protein, 65 aa, Artificial Sequence
  Synthetic polypeptide
RKRARETRKKKKRGPESTSPLSRVAMLCQGISIVEDSLTDLPALLKPPTGQTGITLQESLVCGTL

SEQ ID NO: 29508 - protein, 45 aa, Artificial Sequence
  Synthetic polypeptide
RKRRKKIEEKELEKPEKKRKEALSPLLPSLVLLCYVRGSVLWRTP

SEQ ID NO: 29509 - protein, 72 aa, Artificial Sequence
  Synthetic polypeptide
GPDTSWPGSIPHPPPVTVIAGRCPHLSGQSPHLENAGRLLHSHFSIRHAPGAAGPRADAAGRGRRHQVLSVS

SEQ ID NO: 29510 - protein, 118 aa, Artificial Sequence
  Synthetic polypeptide
KMQVVYFTATFPFAMLLVLLVRGLTLPGAGAGIKFYLYPDITRLEDPQVWIDAGTQIFFSYAICLGAMTSLGSYNKYKYNSYRSWPGLHCLPKSCDNDAAAHILVHSFFYYASLAWTG

SEQ ID NO: 29511 - protein, 54 aa, Artificial Sequence
  Synthetic polypeptide
HQLAWIHPASTTSNCDCRQVPPPLWAVSSSRKCRSSTSQPLFHSPCSWCCWSEG

SEQ ID NO: 29512 - protein, 379 aa, Artificial Sequence
  Synthetic polypeptide
KMQVVYFTATFPFAMLLVLLVRGLTLPGAGAGIKFYLYPDITRLEDPQVWIDAGTQIFFSYAICLGAMTSLGSYNKYKYNSYRDCMLLGCLNSGTSFVSGFAIFSILGFMAQEQGVDIADVAESGPGLAFIAYPKAVTMMPLPTFWSILFFIMLLLLGLDSQFVEVEGQITSLVDLYPSFLRKGYRREIFIAFVCSISYLLGLTMVTEGGMYVFQLFDYYAASGVCLLWVAFFECFVIAWIYGGDNLYDGIEDMIGYRPGPWMKYSWAVITPVLCVGCFIFSLVKYVPLTYNKTYVYPNWAIGLGWSLALSSMLCVPLVIVIRLCQTEGPFLVRVKYLLTPREPNRWAVEREGATPYNSRTVMNGALVKPTHIIVETMM

SEQ ID NO: 29513 - protein, 9 aa, Artificial Sequence
  Synthetic polypeptide
IWDFHETHR

SEQ ID NO: 29514 - protein, 49 aa, Artificial Sequence
  Synthetic polypeptide
DFGAIRFDCLSEFGTFMRLTDECFSPGNKLASWVSSSVSTDSIPRTSRI

SEQ ID NO: 29515 - protein, 45 aa, Artificial Sequence
  Synthetic polypeptide
DFGAIRFDCLSEFGTFMRLTDECFSPGNKLASWVSSSVSTDSIPR

SEQ ID NO: 29516 - protein, 649 aa, Artificial Sequence
  Synthetic polypeptide
QTWIQSLRSQHLLWDLGRGWAAVCSSVKCAYTEPYKVCPISSAAPKEDLTSDEEQRSSEEEDSASRDPSVTHKVEGQSRALVIAQELLSSEKAYVEMLQHLNLDFHGAVMRALDDMDHEGRDTLAREELRQGLSELPAIHDLHQGILEELEERLSNWESQQKVADVFLAREQGFDHHATHILQFDRYLGLLSENCLHSPRLAAAVREFEQSVQGGSQTAKHRLLRVVQRLFQYQVLLTDYLNNLCPDSAEYDNTQGALSLISKVTDRANDSMEQGENLQKLVHIEHSVRGQGDLLQPGREFLKEGTLMKVTGKNRRPRHLFLMNDVLLYTYPQKDGKYRLKNTLAVANMKVSRPVMEKVPYALKIETSESCLMLSASSCAERDEWYGCLSRALPEDYKAQALAAFHHSVEIRERLGVSLGERPPTLVPVTHVMMCMNCGCDFSLTLRRHHCHACGKIVCRNCSRNKYPLKYLKDRMAKVCDGCFGELKKRGRAVPGLMRERPVSMSFPLSSPRFSGSAFSSVFQSINPSTFKKQKKVPSALTEVAASGEGSAISGYLSRCKRGKRHWKKLWFVIKGKVLYTYMASEDKVALESMPLLGFTIAPEKEEGSSEVGPIFHLYHKKTLFYSFKAEDTNSAQRWIEAMEDASVL

SEQ ID NO: 29517 - protein, 73 aa, Artificial Sequence
  Synthetic polypeptide
NAPTQSPTKSVPSRRQPPKRTLRRMKSREARRRRTVLQETPVSPTRWKDSPEPLSSHRNCYLQRKHTWRCSST

SEQ ID NO: 29518 - protein, 51 aa, Artificial Sequence
  Synthetic polypeptide
DMDSKPKVPTLVMGPWKRLGRSLLICKMRLHRALQSLSHLVGSPQRGPYVG

SEQ ID NO: 29519 - protein, 606 aa, Artificial Sequence
  Synthetic polypeptide
QTWIQSLRSQHLLWDLGRGWAAVCSSVKCAYTEPYKVCPISSAAPKEDLTSDEEQRSSEEEDSASRDPSVTHKVEGQSRALVIAQELLSSEKAYVEMLQHLNLDFHGAVMRALDDMDHEGRDTLAREELRQGLSELPAIHDLHQGILEELEERLSNWESQQKVADVFLAREQGFDHHATHILQFDRYLGLLSENCLHSPRLAAAVREFEQSVQGGSQTAKHRLLRVVQRLFQYQVLLTDYLNNLCPDSAEYDNTQGALSLISKVTDRANDSMEQGENLQKLVHIEHSVRGQGDLLQPGREFLKEGTLMKVTGKNRRPRHLFLMNDVLLYTYPQKDGKYRLKNTLAVANMKVSRPVMEKVPYALKIETSESCLMLSASSCAERDEWYGCLSRALPEDYKAQALAAFHHSVEIRERLGVSLGERPPTLVPVTHVMMCMNCGCDFSLTLRRHHCHACGKIVCRNCSRNKYPLKYLKDRMAKVCDGCFGELKKRGRAVPGLMRERPVSMSFPLSSPRFSGSAFSSVFQSINPSTFKKQKKVPSALTEDKVALESMPLLGFTIAPEKEEGSSEVGPIFHLYHKKTLFYSFKAEDTNSAQRWIEAMEDASVL

SEQ ID NO: 29520 - protein, 225 aa, Artificial Sequence
  Synthetic polypeptide
QTWIQSLRSQHLLWDLGRGWAAVCSSVKCAYTEPYKVCPISSAAPKEDLTSDEEQRSSEEEDSASRDPSVTHKDFHGAVMRALDDMDHEGRDTLAREELRQGLSELPAIHDLHQGILEELEERLSNWESQQKVADVFLAREQGFDHHATHILQFDRYLGLLSENCLHSPRLAAAVREFEQSVQGGSQTAKHRLLRVVQRLFQYQVLLTDYLNNLCPDSAEYDNTQ

SEQ ID NO: 29521 - protein, 52 aa, Artificial Sequence
  Synthetic polypeptide
NAPTQSPTKSVPSRRQPPKRTLRRMKSREARRRRTVLQETPVSPTRISMELS

SEQ ID NO: 29522 - protein, 42 aa, Artificial Sequence
  Synthetic polypeptide
PHAPARHRSVVCTIFVLPGTRSPVFPPSAFFRWGPRHTEHIF

SEQ ID NO: 29523 - protein, 255 aa, Artificial Sequence
  Synthetic polypeptide
VWSLPPSLRLTWCHATHSRRVHLLRPPSRPSIHSLMLLPATGRWCALFLFCLGHGPPSFPHRHFSGGDQGILNTFFSSWATTDIRKHLPFIYNLSSISIYSYLPAFKVFGASAKVVHFLGRVKPWNYTYDPKTKSVKSEAHDPNMTHPEFLILWWNIFTTNVLPLLQQFGLVKDTCSYVNVLSDLVYTLAFSCGFCRKEDVSGAISHLSLGEIPAMAQPFVSSEERKERWEQGQADYMGADSFDNIKRKLDTYLQ

SEQ ID NO: 29524 - protein, 63 aa, Artificial Sequence
  Synthetic polypeptide
DSPGAMQLIPAESTYSGHLPGLLSIASCSCPPQVGGVHYFCSAWDTVPRLSPIGIFQVGTKAY

SEQ ID NO: 29525 - protein, 238 aa, Artificial Sequence
  Synthetic polypeptide
VWSLPPSLRLTWCHATHSRRVHLLRPPSRPSIHSLMLLPATGRWCALFLFCLGHGPPSFPHRHFSGGDQGILNTFFSSWATTDIRKHLPFIYNLSSISIYSYLPAFKVFGASAKVVHFLGRVKPWNYTYDPKTKSVKSEAHDPNMTHPEFLILWWNIFTTNVLPLLQQFGLVKDTCSYVNVEDVSGAISHLSLGEIPAMAQPFVSSEERKERWEQGQADYMGADSFDNIKRKLDTYLQ

SEQ ID NO: 29526 - protein, 184 aa, Artificial Sequence
  Synthetic polypeptide
VWSLPPSLRLTWCHATHSRRVHLLRPPSRPSIHSLMLLPATGRWCALFLFCLGHGPPSFPHRHFSGGDQGILNTFFSSWATTDIRKHLPFIYNLSSISIYSYLPAFKVKMSQEPYHICPLGRSQLWHSRLYPRKNGRNDGNRARLIIWEQIPLTTSRGNLTLTSSRNTAFFCEHIHFTSLVSDT

SEQ ID NO: 29527 - protein, 174 aa, Artificial Sequence
  Synthetic polypeptide
VWSLPPSLRLTWCHATHSRRVHLLRPPSRPSIHSLMLLPATGRWCALFLFCLGHGPPSFPHRHFSGGDQGILNTFFSSWATTDIRKHLPFIYNLSSISIYSYLPAFKVFGASAKVVHFLGRVKPWNYTYDPKTKSVKSEAHDPNMTHPEFLILWWNIFTTNVLPLLQQFGLVKD

SEQ ID NO: 29528 - protein, 6 aa, Artificial Sequence
  Synthetic polypeptide
VAENSM

SEQ ID NO: 29529 - protein, 16 aa, Artificial Sequence
  Synthetic polypeptide
LCSRPLSWPSLWGCQL

SEQ ID NO: 29530 - protein, 478 aa, Artificial Sequence
  Synthetic polypeptide
SAPALCPGRHYGAVSCEGCKGFFKRSVRKNLTYSCRSNQDCIINKHHRNRCQFCRLKKCLEMGMKMESVQSERKPFDVQREKPSNCAASTEKIYIRKDLRSPLIATPTFVADKDGARQTGLLDPGMLVNIQQPLIREDGTVLLATDSKAETSQGALGTLANVVTSLANLSESLNNGDTSEIQPEDQSASEITRAFDTLAKALNTTDSSSSPSLADGIDTSGGGSIHVISRDQSTPIIEVEGPLLSDTHVTFKLTMPSPMPEYLNVHYICESASRLLFLSMHWARSIPAFQALGQDCNTSLVRACWNELFTLGLAQCAQVMSLSTILAAIVNHLQNSIQEDKLSGDRIKQVMEHIWKLQEFCNSMAKLDIDGYEYAYLKAIVLFSPDHPGLTSTSQIEKFQEKAQMELQDYVQKTYSEDTYRLARILVRLPALRLMSSNITEELFFTGLIGNVSIDSIIPYILKMETAEYNGQITGASL

SEQ ID NO: 29531 - protein, 26 aa, Artificial Sequence
  Synthetic polypeptide
MLPPFVLAVTMGLSVVKVAKVSSKGV

SEQ ID NO: 29532 - protein, 68 aa, Artificial Sequence
  Synthetic polypeptide
SAPALCPGRHYGAVSCEGCKGFFKRSVRKNLTYSCRSNQDCIINKHHRNRCQFCRLKKCLEMGMKMEC

SEQ ID NO: 29533 - protein, 474 aa, Artificial Sequence
  Synthetic polypeptide
RKCGRHYGAVSCEGCKGFFKRSVRKNLTYSCRSNQDCIINKHHRNRCQFCRLKKCLEMGMKMESVQSERKPFDVQREKPSNCAASTEKIYIRKDLRSPLIATPTFVADKDGARQTGLLDPGMLVNIQQPLIREDGTVLLATDSKAETSQGALGTLANVVTSLANLSESLNNGDTSEIQPEDQSASEITRAFDTLAKALNTTDSSSSPSLADGIDTSGGGSIHVISRDQSTPIIEVEGPLLSDTHVTFKLTMPSPMPEYLNVHYICESASRLLFLSMHWARSIPAFQALGQDCNTSLVRACWNELFTLGLAQCAQVMSLSTILAAIVNHLQNSIQEDKLSGDRIKQVMEHIWKLQEFCNSMAKLDIDGYEYAYLKAIVLFSPDHPGLTSTSQIEKFQEKAQMELQDYVQKTYSEDTYRLARILVRLPALRLMSSNITEELFFTGLIGNVSIDSIIPYILKMETAEYNGQITGASL

SEQ ID NO: 29534 - protein, 25 aa, Artificial Sequence
  Synthetic polypeptide
MDKENVAVTMGLSVVKVAKVSSKGV

SEQ ID NO: 29535 - protein, 32 aa, Artificial Sequence
  Synthetic polypeptide
LFTMAKMWNQLKYPTADEWIKKMWPSLWGCQL

SEQ ID NO: 29536 - protein, 64 aa, Artificial Sequence
  Synthetic polypeptide
RKCGRHYGAVSCEGCKGFFKRSVRKNLTYSCRSNQDCIINKHHRNRCQFCRLKKCLEMGMKMEC

SEQ ID NO: 29537 - protein, 41 aa, Artificial Sequence
  Synthetic polypeptide
AQEAEVAVSGDRAIVLHLGNYDFAWRKLTRKLQNTSGWQHH

SEQ ID NO: 29538 - protein, 19 aa, Artificial Sequence
  Synthetic polypeptide
VEIAPLYSTLEITTLHGES

SEQ ID NO: 29539 - protein, 536 aa, Artificial Sequence
  Synthetic polypeptide
FQLLRTPRHENRLSPGGRGCSEWRSRHCTPPWKLRLCMEKVDQKAPEYIRMAASLNAGETTYSLEHASDLRVEVQKVYELIDALSKKILTLGLNQDPPPHPSNLRLQRMIRYSATLFVQEKLLGLMSLPTKEQFEELKKKRKEEMERKRAVERQAALESQRRLEERQSGLASRAANGEVASLRRGPAPLRKAEGWLPLSGGQGQSEDSDPLLQQIHNITSFIRQAKAAGRMDEVRTLQENLRQLQDEYDQQQTEKAIELSRRQAEEEDLQREQLQMLRERELEREREQFRVASLHTRTRSLDFREIGPFQLEPSREPRTHLAYALDLGSSPVPSSTAPKTPSLSSTQPTRVWSGPPAVGQERLPQSSMPQQHEGPSLNPFDEEDLSSPMEEATTGPPAAGVSLDPSARILKEYNPFEEEDEEEEAVAGNPFIQPDSPAPNPFSEEDEHPQQRLSSPLVPGNPFEEPTCINPFEMDSDSGPEAEEPIEEELLLQQIDNIKAYIFDAKQCGRLDEVEVLTENLRELKHTLAKQKGGTD

SEQ ID NO: 29540 - protein, 163 aa, Artificial Sequence
  Synthetic polypeptide
FQLLRTPRHENRLSPGGRGCSEWRSRHCTPPWKLRLCMEKVDQKAPEYIRMAASLNAGETTYSLEHASDLRVEVQKVYELIDALSKKILTLGLNQDPPPHPSNLRLQRMIRYSATLFVQEKLLGLMSLPTKEQFEELKKKRKEEMERKRAVERQGLFFFQSFC

SEQ ID NO: 29541 - protein, 28 aa, Artificial Sequence
  Synthetic polypeptide
AQEAEVAVSGDRAIVLHLGNYDFAWRKL

SEQ ID NO: 29542 - protein, 41 aa, Artificial Sequence
  Synthetic polypeptide
FQLLRTPRHENRLSPGGRGCSEWRSRHCTPPWKLRLCMEKV

SEQ ID NO: 29543 - protein, 347 aa, Artificial Sequence
  Synthetic polypeptide
DKAQLEAQKATQDFQRATEVLRAAKETISLAEQRLLEDDKRQFDSAWQEMLNHATQRVMEAEQTKTRSELVHKETAARYNAAMGRMRQLEKKLKRAINKSKPYFELKAKYYVQLEQLKKTVDDLQAKLTLAKGEYKMALKNLEMISDEIHERRRSSAMGPRGCGVGAEGSSTSVEDLPGSKPEPDAISVASEAFEDDSCSNFVSEDDSETQSVSSFSSGPTSPSEMPDQFPAVVRPGSLDLPSPVSLSEFGMMFPVLGPRSECSGASSPECEVERGDRAEGAENKTSDKANNNRGLSSSSGSGGSSKSQSSTSPEGQALENRMKQLSLQCSKGRDGIIADIKMVQIG

SEQ ID NO: 29544 - protein, 50 aa, Artificial Sequence
  Synthetic polypeptide
IRLSWKLRKPRRTSRGPQRCSVPPRRPSPWPSSGCWRMTSGSSTPPGRRC

SEQ ID NO: 29545 - protein, 20 aa, Artificial Sequence
  Synthetic polypeptide
ELMRHQRKCCPVSKLQGKGP

SEQ ID NO: 29546 - protein, 500 aa, Artificial Sequence
  Synthetic polypeptide
GIRENAVLYQNYKEKALDIDSDEESEPKEQKSDEKIVIHHKPLRSTWSQLSAVKRKGLSQTVSQEERKRQEAIFEVISSEHSYLLSLEILIRMFKNSKELSDTMTKTERHHLFSNITDVCEASKKFFIELEARHQNNIFIDDISDIVEKHTASTFDPYVKYCTNEVYQQRTLQKLLATNPSFKEVLSRIESHEDCRNLPMISFLILPMQRVTRLPLLMDTICQKTPKDSPKYEVCKRALKEVSKLVRLCNEGARKMERTEMMYTINSQLEFKIKPFPLVSSSRWLVKRGELTAYVEDTVLFSRRTSKQQVYFFLFNDVLIITKKKSEESYNVNDYSLRDQLLVESCDNEELNSSPGKNSSTMLYSRQSSASHLFTLTVLSNHANEKVEMLLGAETQSERARWITALGHSSGKPPADRTSLTQVEIVRSFTAKQPDELSLQVADVVLIYQRVSDGWYEGERLRDGERGWFPMECAKEITCQATIDKNVERMGRLLGLETNV

SEQ ID NO: 29547 - protein, 40 aa, Artificial Sequence
  Synthetic polypeptide
RAHEASEKMLSCIKTTRKRPLTLILMKSQSPKNRSQMKKL

SEQ ID NO: 29548 - protein, 420 aa, Artificial Sequence
  Synthetic polypeptide
GIRENAVLYQNYKEKALDIDSDEESEPKEQKSDEKIVIHHKPLRSTWSQLSAVKRKGLSQTVSQEERKRQEAIFEVISSEHSYLLSLEILIRMFKNSKELSDTMTKTERHHLFSNITDVCEASKKFFIELEARHQNNIFIDDISDIVEKHTASTFDPYVKYCTNEVYQQRTLQKLLATNPSFKEVLSRIESHEDCRNLPMISFLILPMQRVTRLPLLMDTICQKTPKDSPKYEVCKRALKEVSKLVRLCNEGARKMERTEMMYTINSQLEFKIKPFPLVSSSRWLVKRGELTAYVEDTVLFSRRTSKQQVYFFLFNDVLIITKKKSEESYNVNDYSLRDQLLVESCDNEELNSSPGKNSSTMLYSRQSSASHLFTLTVLSNHANEKVEMLLGAETQSERARWITALGHSSGKPPADRTCG

SEQ ID NO: 29549 - protein, 75 aa, Artificial Sequence
  Synthetic polypeptide
GIRENAVLYQNYKEKALDIDSDEESEPKEQKSDEKIVIHHKPLRSTWSQLSAVKRKVILIVGFMEMKDGRLRGGK

SEQ ID NO: 29550 - protein, 2 aa, Artificial Sequence
  Synthetic polypeptide
LG

SEQ ID NO: 29551 - protein, 27 aa, Artificial Sequence
  Synthetic polypeptide
NPISTKNTKTNWGKSLHKNRWPGCCSS

SEQ ID NO: 29552 - protein, 172 aa, Artificial Sequence
  Synthetic polypeptide
DQPGHRGETPSLLRIQKLIGVKVYTKTDGLVAVHPKSVNVEQTDFHYNWLIYHLKMRTSSIYLYDCTEVSPYCLLFFGGDISIQKDNDQETIAVDEWIVFQSPARIAHLVKELRKELDILLQEKIESPHPVDWNDTKSRDCAVLSAIIDLIKTQEKATPRNFPPRFQDGYYS

SEQ ID NO: 29553 - protein, 47 aa, Artificial Sequence
  Synthetic polypeptide
DQPGHRGETPSLLRIQKLIGVKVYTKTDGLVAVHPKSVNVEQTDFHY

SEQ ID NO: 29554 - protein, 38 aa, Artificial Sequence
  Synthetic polypeptide
RIGTAPVYSSQRERHRRRMISAFPTEVSNKSLEPGILC

SEQ ID NO: 29555 - protein, 19 aa, Artificial Sequence
  Synthetic polypeptide
FLHFQLRSQTKVWNLGFFV

SEQ ID NO: 29556 - protein, 22 aa, Artificial Sequence
  Synthetic polypeptide
TMIAPLYSSLGDRVKMGKPHYT

SEQ ID NO: 29557 - protein, 11 aa, Artificial Sequence
  Synthetic polypeptide
SHHCTLAWATE

SEQ ID NO: 29558 - protein, 755 aa, Artificial Sequence
  Synthetic polypeptide
PGRQSKDGKTPLHMTALHGRFSRSQTIIQSGAVIDCEDKNGNTPLHIAARYGHELLINTLITSGADTAKRGIHGMFPLHLAALSGFSDCCRKLLSSGFDIDTPDDFGRTCLHAAAAGGNLECLNLLLNTGADFNKKDKFGRSPLHYAAANCNYQCLFALVGSGASVNDLDERGCTPLHYAATSDTDGKCLEYLLRNDANPGIRDKQGYNAVHYSAAYGHRLCLQLIASETPLDVLMETSGTDMLSDSDNRATISPLHLAAYHGHHQALEVLVQSLLDLDVRNSSGRTPLDLAAFKGHVECVDVLINQGASILVKDYILKRTPIHAAATNGHSECLRLLIGNAEPQNAVDIQDGNGQTPLMLSVLNGHTDCVYSLLNKGANVDAKDKWGRTALHRGAVTGHEECVDALLQHGAKCLLRDSRGRTPIHLSAACGHIGVLGALLQSAASMDANPATADNHGYTALHWACYNGHETCVELLLEQEVFQKTEGNAFSPLHCAVINDNEGAAEMLIDTLGASIVNATDSKGRTPLHAAAFTDHVECLQLLLSHNAQVNSVDSTGKTPLMMAAENGQTNTVEMLVSSASAELTLQDNSKNTALHLACSKGHETSALLILEKITDRNLINATNAALQTPLHVAARNGLTMVVQELLGKGASVLAVDENGYTPALACAPNKDVADCLALILATMMPVSSSSPLSSLTFNAINRYTNTSKTVSFEALPIMRNEPSSYCSFNNIGGEQEYLYTDVDELNDSDSETY

SEQ ID NO: 29559 - protein, 480 aa, Artificial Sequence
  Synthetic polypeptide
PGRQSKDGKTPLHMTALHGRFSRSQTIIQSGAVIDCEDKNGNTPLHIAARYGHELLINTLITSGADTAKRGIHGMFPLHLAALSGFSDCCRKLLSSGFDIDTPDDFGRTCLHAAAAGGNLECLNLLLNTGADFNKKDKFGRSPLHYAAANCNYQCLFALVGSGASVNDLDERGCTPLHYAATSDTDGKCLEYLLRNDANPGIRDKQGYNAVHYSAAYGHRLCLQLIASETPLDVLMETSGTDMLSDSDNRATISPLHLAAYHGHHQALEVLVQSLLDLDVRNSSGRTPLDLAAFKGHVECVDVLINQGASILVKDYILKRTPIHAAATNGHSECLRLLIGNAEPQNAVDIQDGNGQTPLMLSVLNGHTDCVYSLLNKGANVDAKDKWGRTALHRGAVTGHEECVDALLQHGAKCLLRDSRGRTPIHLSAACGHIGVLGALLQSAASMDANPATADNHGYTALHWACYNELLSMQPPSQTM

SEQ ID NO: 29560 - protein, 29 aa, Artificial Sequence
  Synthetic polypeptide
GLVRWLTPVIPALWEAETSGSPEQKLMKH

SEQ ID NO: 29561 - protein, 16 aa, Artificial Sequence
  Synthetic polypeptide
SQHFGRPRQADHLSKS

SEQ ID NO: 29562 - protein, 19 aa, Artificial Sequence
  Synthetic polypeptide
FLHFHLRLIGRPADGLHQG

SEQ ID NO: 29563 - protein, 752 aa, Artificial Sequence
  Synthetic polypeptide
DGRIGTAPVYSSQRERRRRRVISAFPSEVNWKACRWSSSGVIPNEKIRNIGISAHIDSGKTTLTERVLYYTGRIAKMHEVKGKDGVGAVMDSMELERQRGITIQSAATYTMWKDVNINIIDTPGHVDFTIEVERALRVLDGAVLVLCAVGGVQCQTMTVNRQMKRYNVPFLTFINKLDRMGSNPARALQQMRSKLNHNAAFMQIPMGLEGNFKGIVDLIEERAIYFDGDFGQIVRYGEIPAELRAAATDHRQELIECVANSDEQLGEMFLEEKIPSISDLKLAIRRATLKRSFTPVFLGSALKNKGVQPLLDAVLEYLPNPSEVQNYAILNKEDDSKEKTKILMNSSRDNSHPFVGLAFKLEVGRFGQLTYVRSYQGELKKGDTIYNTRTRKKVRLQRLARMHADMMEDVEEVYAGDICALFGIDCASGDTFTDKANSGLSMESIHVPDPVISIAMKPSNKNDLEKFSKGIGRFTREDPTFKVYFDTENKETVISGMGELHLEIYAQRLEREYGCPCITGKPKVAFRETITAPVPFDFTHKKQSGGAGQYGKVIGVLEPLDPEDYTKLEFSDETFGSNIPKQFVPAVEKGFLDACEKGPLSGHKLSGLRFVLQDGAHHMVDSNEISFIRAGEGALKQALANATLCILEPIMAVEVVAPNEFQGQVIAGINRRHGVITGQDGVEDYFTLYADVPLNDMFGYSTELRSCTEGKGEYTMEYSRYQPCLPSTQEDVINKYLEATGQLPVKKGKAKN

SEQ ID NO: 29564 - protein, 592 aa, Artificial Sequence
  Synthetic polypeptide
DGRIGTAPVYSSQRERRRRRVISAFPSEVNWKACRWSSSGVIPNEKIRNIGISAHIDSGKTTLTERVLYYTGRIAKMHEVKGKDGVGAVMDSMELERQRGITIQSAATYTMWKDVNINIIDTPGHVDFTIEVERALRVLDGAVLVLCAVGGVQCQTMTVNRQMKRYNVPFLTFINKLDRMGSNPARALQQMRSKLNHNAAFMQIPMGLEGNFKGIVDLIEERAIYFDGDFGQIVRYGEIPAELRAAATDHRQELIECVANSDEQLGEMFLEEKIPSISDLKLAIRRATLKRSFTPVFLGSALKNKGVQPLLDAVLEYLPNPSEVQNYAILNKEDDSKEKTKILMNSSRDNSHPFVGLAFKLEVGRFGQLTYVRSYQGELKKGDTIYNTRTRKKVRLQRLARMHADMMEDVEEVYAGDICALFGIDCASGDTFTDKANSGLSMESIHVPDPVISIAMKPSNKNDLEKFSKGIGRFTREDPTFKVYFDTENKETVISGMGELHLEIYAQRLEREYGCPCITGKPKVAFRETITAPVPFDFTHKKQSGGAGQYGKVIGVLEPLDPEDYTKLEFSDETFGSNIPKQFVPAVEKVNF

SEQ ID NO: 29565 - protein, 454 aa, Artificial Sequence
  Synthetic polypeptide
DGRIGTAPVYSSQRERRRRRVISAFPSEVNWKACRWSSSGVIPNEKIRNIGISAHIDSGKTTLTERVLYYTGRIAKMHEVKGKDGVGAVMDSMELERQRGITIQSAATYTMWKDVNINIIDTPGHVDFTIEVERALRVLDGAVLVLCAVGGVQCQTMTVNRQMKRYNVPFLTFINKLDRMGSNPARALQQMRSKLNHNAAFMQIPMGLEGNFKGIVDLIEERAIYFDGDFGQIVRYGEIPAELRAAATDHRQELIECVANSDEQLGEMFLEEKIPSISDLKATIRRATLKRSFTPVFLGSALKNKGVQPLLDAVLEYLPNPSEVQNYAILNKEDDSKEKTKILMNSSRDNSHPFVGLAFKLEVGRFGQLTYVRSYQGELKKGDTIYNTRTRKKVRLQRLARMHADMMEASTEKYMPETSVHCLALTVLVETHSQTKPTAAFLWSQFMFLILSFQ

SEQ ID NO: 29566 - protein, 771 aa, Artificial Sequence
  Synthetic polypeptide
DGRIGTAPVYSSQRERRRRRVISAFPSEVNWKACRWSSSGVIPNEKIRNIGISAHIDSGKTTLTERVLYYTGRIAKMHEVKGKDGVGAVMDSMELERQRGITIQSAATYTMWKDVNINIIDTPGHVDFTIEVERALRVLDGAVLVLCAVGGVQCQTMTVNRQMKRYNVPFLTFINKLDRMGSNPARALQQMRSKLNHNAAFMQIPMGLEGNFKGIVDLIEERAIYFDGDFGHFLRDFLPLLWNWDRRSGSQIVRYGEIPAELRAAATDHRQELIECVANSDEQLGEMFLEEKIPSISDLKLAIRRATLKRSFTPVFLGSALKNKGVQPLLDAVLEYLPNPSEVQNYAILNKEDDSKEKTKILMNSSRDNSHPFVGLAFKLEVGRFGQLTYVRSYQGELKKGDTIYNTRTRKKVRLQRLARMHADMMEDVEEVYAGDICALFGIDCASGDTFTDKANSGLSMESIHVPDPVISIAMKPSNKNDLEKFSKGIGRFTREDPTFKVYFDTENKETVISGMGELHLEIYAQRLEREYGCPCITGKPKVAFRETITAPVPFDFTHKKQSGGAGQYGKVIGVLEPLDPEDYTKLEFSDETFGSNIPKQFVPAVEKGFLDACEKGPLSGHKLSGLRFVLQDGAHHMVDSNEISFIRAGEGALKQALANATLCILEPIMAVEVVAPNEFQGQVIAGINRRHGVITGQDGVEDYFTLYADVPLNDMFGYSTELRSCTEGKGEYTMEYSRYQPCLPSTQEDVINKYLEATGQLPVKKGKAKN

SEQ ID NO: 29567 - protein, 34 aa, Artificial Sequence
  Synthetic polypeptide
GQAQWLTPVIPALWKAEVGRSRVRLFDMVRFQLN

SEQ ID NO: 29568 - protein, 19 aa, Artificial Sequence
  Synthetic polypeptide
SQHFGRPRWADHESDCSIW

SEQ ID NO: 29569 - protein, 543 aa, Artificial Sequence
  Synthetic polypeptide
PGAVAHACNPSTLEGRGGQITSQIVRYGEIPAELRAAATDHRQELIECVANSDEQLGEMFLEEKIPSISDLKLAIRRATLKRSFTPVFLGSALKNKGVQPLLDAVLEYLPNPSEVQNYAILNKEDDSKEKTKILMNSSRDNSHPFVGLAFKLEVGRFGQLTYVRSYQGELKKGDTIYNTRTRKKVRLQRLARMHADMMEDVEEVYAGDICALFGIDCASGDTFTDKANSGLSMESIHVPDPVISIAMKPSNKNDLEKFSKGIGRFTREDPTFKVYFDTENKETVISGMGELHLEIYAQRLEREYGCPCITGKPKVAFRETITAPVPFDFTHKKQSGGAGQYGKVIGVLEPLDPEDYTKLEFSDETFGSNIPKQFVPAVEKGFLDACEKGPLSGHKLSGLRFVLQDGAHHMVDSNEISFIRAGEGALKQALANATLCILEPIMAVEVVAPNEFQGQVIAGINRRHGVITGQDGVEDYFTLYADVPLNDMFGYSTELRSCTEGKGEYTMEYSRYQPCLPSTQEDVINKYLEATGQLPVKKGKAKN

SEQ ID NO: 29570 - protein, 383 aa, Artificial Sequence
  Synthetic polypeptide
PGAVAHACNPSTLEGRGGQITSQIVRYGEIPAELRAAATDHRQELIECVANSDEQLGEMFLEEKIPSISDLKLAIRRATLKRSFTPVFLGSALKNKGVQPLLDAVLEYLPNPSEVQNYAILNKEDDSKEKTKILMNSSRDNSHPFVGLAFKLEVGRFGQLTYVRSYQGELKKGDTIYNTRTRKKVRLQRLARMHADMMEDVEEVYAGDICALFGIDCASGDTFTDKANSGLSMESIHVPDPVISIAMKPSNKNDLEKFSKGIGRFTREDPTFKVYFDTENKETVISGMGELHLEIYAQRLEREYGCPCITGKPKVAFRETITAPVPFDFTHKKQSGGAGQYGKVIGVLEPLDPEDYTKLEFSDETFGSNIPKQFVPAVEKVNF

SEQ ID NO: 29571 - protein, 245 aa, Artificial Sequence
  Synthetic polypeptide
PGAVAHACNPSTLEGRGGQITSQIVRYGEIPAELRAAATDHRQELIECVANSDEQLGEMFLEEKIPSISDLKATIRRATLKRSFTPVFLGSALKNKGVQPLLDAVLEYLPNPSEVQNYAILNKEDDSKEKTKILMNSSRDNSHPFVGLAFKLEVGRFGQLTYVRSYQGELKKGDTIYNTRTRKKVRLQRLARMHADMMEASTEKYMPETSVHCLALTVLVETHSQTKPTAAFLWSQFMFLILSFQ

SEQ ID NO: 29572 - protein, 35 aa, Artificial Sequence
  Synthetic polypeptide
ICWHFDLGFPATRTAAIFAMIILLPFRLKLNEICK

SEQ ID NO: 29573 - protein, 27 aa, Artificial Sequence
  Synthetic polypeptide
SGSSPEPESAGTLILDFQPPEPQLFLL

SEQ ID NO: 29574 - protein, 86 aa, Artificial Sequence
  Synthetic polypeptide
SWISSHQNRSYFCYDNPAALQTQVKRDMQVNTTKFMLLYAWYSWPNVVLCFFGGFLIDRVFGIRWGTIIFSCFVCIGQVVFALGGI

SEQ ID NO: 29575 - protein, 31 aa, Artificial Sequence
  Synthetic polypeptide
ICWHFDLGFPATRTAAIFAMIILLPFRLKLN

SEQ ID NO: 29576 - protein, 26 aa, Artificial Sequence
  Synthetic polypeptide
SWISSHQNRSYFCYDNPAALQTQVKR

SEQ ID NO: 29577 - protein, 419 aa, Artificial Sequence
  Synthetic polypeptide
SWISSHQNRSYFCYDNPAALQTQVKRDMQVNTTKFMLLYAWYSWPNVVLCFFGGFLIDRVFGIRWGTIIFSCFVCIGQVVFALGGIFNAFWLMEFGRFVFGIGGESLAVAQNTYAVSWFKGKELNLVFGLQLSMARIGSTVNMNLMGWLYSKIEALLGSAGHTTLGITLMIGGITCILSLICALALAYLDQRAERILHKEQGKTGEVIKLTDVKDFSLPLWLIFIICVCYYVAVFPFIGLGKVFFTEKFGFSSQAASAINSVVYVISAPMSPVFGLLVDKTGKNIIWVLCAVAATLVSHMMLAFTMWNPWIAMCLLGLSYSLLACALWPMVAFVVPEHQLGTAYGFMQSIQNLGLAIISIIAGMILDSRGYLFLEVFFIACVSLSLLSVVLLYLVNRAQGGNLNYSARQREEIKFSHTE

SEQ ID NO: 29578 - protein, 38 aa, Artificial Sequence
  Synthetic polypeptide
ICWHFDLGFPATRTAAIFAMIILLPFRLKLNEWGTIIF

SEQ ID NO: 29579 - protein, 32 aa, Artificial Sequence
  Synthetic polypeptide
SWISSHQNRSYFCYDNPAALQTQVKRMGHNHF

SEQ ID NO: 29580 - protein, 38 aa, Artificial Sequence
  Synthetic polypeptide
ICWHFDLGFPATRTAAIFAMIILLPFRLKLNDFIFFSY

SEQ ID NO: 29581 - protein, 32 aa, Artificial Sequence
  Synthetic polypeptide
SWISSHQNRSYFCYDNPAALQTQVKRFYFLFI

SEQ ID NO: 29582 - protein, 30 aa, Artificial Sequence
  Synthetic polypeptide
SWISSHQNRSYFCYDNPAALQTQVKRDMQV

SEQ ID NO: 29583 - protein, 142 aa, Artificial Sequence
  Synthetic polypeptide
SWISSHQNRSYFCYDNPAALQTQVKRDMQVNTTKFMLLYAWYSWPNVVLCFFGGFLIDRVFGIRWGTIIFSCFVCIGQVVFALGGIFNAFWLMEFGRFVFGIGGESLAVAQNTYAVSWFKGKELNLVFGLQLSMARIGSTVN

SEQ ID NO: 29584 - protein, 93 aa, Artificial Sequence
  Synthetic polypeptide
SWISSHQNRSYFCYDNPAALQTQVKRDMQVNTTKFMLLYAWYSWPNVVLCFFGGFLIDRVFGIRWGTIIFSCFVCIGQVVFALGGIFNAFWLM

SEQ ID NO: 29585 - protein, 15 aa, Artificial Sequence
  Synthetic polypeptide
NRVQISRSTICVRKN

SEQ ID NO: 29586 - protein, 28 aa, Artificial Sequence
  Synthetic polypeptide
NYEIECKFQGVLFVLGRTEKIAESSRTS

SEQ ID NO: 29587 - protein, 567 aa, Artificial Sequence
  Synthetic polypeptide
REILEKRMHKFYIAHCSEQHDEISSHPTLFSQDMNHPFVQHIHSVHYPPWSYALEKPNTGSIFNIAWSIDGTQIAGACGNGHVVFAHVVEQHWEWKNFQVTLTKRRAMQVRNVLNDAVDLLEFRDRVIKASLNYAHLVVSTSLQCYVFSTKNWNTPIIFDLKEGTVSLILQAERHFLLVDGSSIYLYSYEGRFISSPKFPGMRTDILNAQTVSLSNDTIAIRDKADEKIIFLFEASTGKPLGDGKFLSHKNEILEIALDQKGLTNDRKIAFIDKNRDLCITSVKRFGKEEQIIKLGTMVHTLAWNDTCNILCGLQDTRFIVWYYPNTVYVDRDILPKTLYERDASEFSKNPHIVSFVGNQVTIRRADGSLVHISITPYPAILHEYVSSSKWEDAVRLCRFVKEQTMWACLAAMAVANRDMTTAEIAYAAIGEIDKVQYINSIKNLPSKESKMAHILLFSGNIQEAEIVLLQAGLVYQAIQININLYNWERALELAVKYKTHVDTVLAYRQKFLETFGKQETNKRYLHYAEGLQIDWEKIKAKIEMEITKEREQSSSSQSSKSIGLKP

SEQ ID NO: 29588 - protein, 19 aa, Artificial Sequence
  Synthetic polypeptide
IIPLSSISTLYTTHPGHMH

SEQ ID NO: 29589 - protein, 41 aa, Artificial Sequence
  Synthetic polypeptide
NLKPSYFVFPGHESSLCPAYPLCTLPTLVICIRKTQHWQHI

SEQ ID NO: 29590 - protein, 24 aa, Artificial Sequence
  Synthetic polypeptide
LTIHFLTHPEQLPSLQAPFIGHMH

SEQ ID NO: 29591 - protein, 27 aa, Artificial Sequence
  Synthetic polypeptide
LTQNNFQACKLHSLVICIRKTQHWQHI

SEQ ID NO: 29592 - protein, 548 aa, Artificial Sequence
  Synthetic polypeptide
YAVVFQAFTLTHHSLPDSPRTTSKPASSIHWSYALEKPNTGSIFNIAWSIDGTQIAGACGNGHVVFAHVVEQHWEWKNFQVTLTKRRAMQVRNVLNDAVDLLEFRDRVIKASLNYAHLVVSTSLQCYVFSTKNWNTPIIFDLKEGTVSLILQAERHFLLVDGSSIYLYSYEGRFISSPKFPGMRTDILNAQTVSLSNDTIAIRDKADEKIIFLFEASTGKPLGDGKFLSHKNEILEIALDQKGLTNDRKIAFIDKNRDLCITSVKRFGKEEQIIKLGTMVHTLAWNDTCNILCGLQDTRFIVWYYPNTVYVDRDILPKTLYERDASEFSKNPHIVSFVGNQVTIRRADGSLVHISITPYPAILHEYVSSSKWEDAVRLCRFVKEQTMWACLAAMAVANRDMTTAEIAYAAIGEIDKVQYINSIKNLPSKESKMAHILLFSGNIQEAEIVLLQAGLVYQAIQININLYNWERALELAVKYKTHVDTVLAYRQKFLETFGKQETNKRYLHYAEGLQIDWEKIKAKIEMEITKEREQSSSSQSSKSIGLKP

SEQ ID NO: 29593 - protein, 40 aa, Artificial Sequence
  Synthetic polypeptide
CLMICHCLPSPPAVTILLQENKFRAPTDSMLCGKLMMALF

SEQ ID NO: 29594 - protein, 21 aa, Artificial Sequence
  Synthetic polypeptide
PSCCRKTSSGLPLILCYVESS

SEQ ID NO: 29595 - protein, 598 aa, Artificial Sequence
  Synthetic polypeptide
FYVMWKAHDGIILKVDWNSVNDLILSAGEDCKYKVWDSYGRPLYNSQPHEHPITSVAWAPDGELFAVGSFHTLRLCDKTGWSYALEKPNTGSIFNIAWSIDGTQIAGACGNGHVVFAHVVEQHWEWKNFQVTLTKRRAMQVRNVLNDAVDLLEFRDRVIKASLNYAHLVVSTSLQCYVFSTKNWNTPIIFDLKEGTVSLILQAERHFLLVDGSSIYLYSYEGRFISSPKFPGMRTDILNAQTVSLSNDTIAIRDKADEKIIFLFEASTGKPLGDGKFLSHKNEILEIALDQKGLTNDRKIAFIDKNRDLCITSVKRFGKEEQIIKLGTMVHTLAWNDTCNILCGLQDTRFIVWYYPNTVYVDRDILPKTLYERDASEFSKNPHIVSFVGNQVTIRRADGSLVHISITPYPAILHEYVSSSKWEDAVRLCRFVKEQTMWACLAAMAVANRDMTTAEIAYAAIGEIDKVQYINSIKNLPSKESKMAHILLFSGNIQEAEIVLLQAGLVYQAIQININLYNWERALELAVKYKTHVDTVLAYRQKFLETFGKQETNKRYLHYAEGLQIDWEKIKAKIEMEITKEREQSSSSQSSKSIGLKP

SEQ ID NO: 29596 - protein, 36 aa, Artificial Sequence
  Synthetic polypeptide
CLMICHCLPSPPAVTILLQENKFRAPTDSMLCGKLM

SEQ ID NO: 29597 - protein, 8 aa, Artificial Sequence
  Synthetic polypeptide
FYVMWKAH

SEQ ID NO: 29598 - protein, 80 aa, Artificial Sequence
  Synthetic polypeptide
FYVMWKAHDGIILKVDWNSVNDLILSAGEDCKYKVWDSYGRPLYNSQPHEHPITSVAWAPDGELFAVGSFHTLRLCDKTG

SEQ ID NO: 29599 - protein, 35 aa, Artificial Sequence
  Synthetic polypeptide
FYVMWKAHDGIILKVDWNSVNDLILSAGEDCKYKV

SEQ ID NO: 29600 - protein, 42 aa, Artificial Sequence
  Synthetic polypeptide
CLMICHCLPSPPAVTILLQENKFRAPTDSMLWNTSVFSSVGP

SEQ ID NO: 29601 - protein, 648 aa, Artificial Sequence
  Synthetic polypeptide
PSCCRKTSSGLPLILCYGTPVYSVAWGPDSEKVLYTAGKQLIIKPLQPNAKVLQWKAHDGIILKVDWNSVNDLILSAGEDCKYKVWDSYGRPLYNSQPHEHPITSVAWAPDGELFAVGSFHTLRLCDKTGWSYALEKPNTGSIFNIAWSIDGTQIAGACGNGHVVFAHVVEQHWEWKNFQVTLTKRRAMQVRNVLNDAVDLLEFRDRVIKASLNYAHLVVSTSLQCYVFSTKNWNTPIIFDLKEGTVSLILQAERHFLLVDGSSIYLYSYEGRFISSPKFPGMRTDILNAQTVSLSNDTIAIRDKADEKIIFLFEASTGKPLGDGKFLSHKNEILEIALDQKGLTNDRKIAFIDKNRDLCITSVKRFGKEEQIIKLGTMVHTLAWNDTCNILCGLQDTRFIVWYYPNTVYVDRDILPKTLYERDASEFSKNPHIVSFVGNQVTIRRADGSLVHISITPYPAILHEYVSSSKWEDAVRLCRFVKEQTMWACLAAMAVANRDMTTAEIAYAAIGEIDKVQYINSIKNLPSKESKMAHILLFSGNIQEAEIVLLQAGLVYQAIQININLYNWERALELAVKYKTHVDTVLAYRQKFLETFGKQETNKRYLHYAEGLQIDWEKIKAKIEMEITKEREQSSSSQSSKSIGLKP

SEQ ID NO: 29602 - protein, 10 aa, Artificial Sequence
  Synthetic polypeptide
FYVMEHQCIQ

SEQ ID NO: 29603 - protein, 41 aa, Artificial Sequence
  Synthetic polypeptide
PSCCRKTSSGLPLILCYGTPVYSVAWGPDSEKVLYTAVESS

SEQ ID NO: 29604 - protein, 130 aa, Artificial Sequence
  Synthetic polypeptide
PSCCRKTSSGLPLILCYGTPVYSVAWGPDSEKVLYTAGKQLIIKPLQPNAKVLQWKAHDGIILKVDWNSVNDLILSAGEDCKYKVWDSYGRPLYNSQPHEHPITSVAWAPDGELFAVGSFHTLRLCDKTG

SEQ ID NO: 29605 - protein, 85 aa, Artificial Sequence
  Synthetic polypeptide
PSCCRKTSSGLPLILCYGTPVYSVAWGPDSEKVLYTAGKQLIIKPLQPNAKVLQWKAHDGIILKVDWNSVNDLILSAGEDCKYKV

SEQ ID NO: 29606 - protein, 50 aa, Artificial Sequence
  Synthetic polypeptide
PSCCRKTSSGLPLILCYGTPVYSVAWGPDSEKVLYTAGKQLIIKPLQPNA

SEQ ID NO: 29607 - protein, 40 aa, Artificial Sequence
  Synthetic polypeptide
PSCCRKTSSGLPLILCYGTPVYSVAWGPDSEKVLYTAGKQ

SEQ ID NO: 29608 - protein, 16 aa, Artificial Sequence
  Synthetic polypeptide
TRIYTSLKQDYEKTTK

SEQ ID NO: 29609 - protein, 500 aa, Artificial Sequence
  Synthetic polypeptide
SRTMRRQRNEVVVELRKNKRDEHLLKRRNVPHEDICEDSDIDGDYRVQNTSLEAIVQNASSDNQGIQLSAVQAARKLLSSDRNPPIDDLIKSGILPILVHCLERDDNPSLQFEAAWALTNIASGTSEQTQAVVQSNAVPLFLRLLHSPHQNVCEQAVWALGNIIGDGPQCRDYVISLGVVKPLLSFISPSIPITFLRNVTWVMVNLCRHKDPPPPMETIQEILPALCVLIHHTDVNILVDTVWALSYLTDAGNEQIQMVIDSGIVPHLVPLLSHQEVKVQTAALRAVGNIVTGTDEQTQVVLNCDALSHFPALLTHPKEKINKEAVWFLSNITAGNQQQVQAVIDANLVPMIIHLLDKGDFGTQKEAAWAISNLTISGRKDQVAYLIQQNVIPPFCNLLTVKDAQVVQVVLDGLSNILKMAEDEAETIGNLIEECGGLEKIEQLQNHENEDIYKLAYEIIDQFFSSDDIDEDPSLVPEAIQGGTFGFNSSANVPTEGFQF

SEQ ID NO: 29610 - protein, 9 aa, Artificial Sequence
  Synthetic polypeptide
NLHLIKAGL

SEQ ID NO: 29611 - protein, 6 aa, Artificial Sequence
  Synthetic polypeptide
LFAIRL

SEQ ID NO: 29612 - protein, 11 aa, Artificial Sequence
  Synthetic polypeptide
YLPLDYEKTTK

SEQ ID NO: 29613 - protein, 17 aa, Artificial Sequence
  Synthetic polypeptide
DLSGAPWVLSSEAGLPA

SEQ ID NO: 29614 - protein, 23 aa, Artificial Sequence
  Synthetic polypeptide
VRKKKTHMLKLLRSKRSSLGPQQ

SEQ ID NO: 29615 - protein, 16 aa, Artificial Sequence
  Synthetic polypeptide
SQHFERQKRADHEESK

SEQ ID NO: 29616 - protein, 113 aa, Artificial Sequence
  Synthetic polypeptide
RACNPSTLRGRSGLITRNPNETQNNSTSWPVFKSTEQKYLTLNTESTRIMTKLRAQQCRFWTSFFPKVLEMTGNIDEAEWEWKAGFHRWNNYMMDWKNQFNDYTSKKESCVGL

SEQ ID NO: 29617 - protein, 25 aa, Artificial Sequence
  Synthetic polypeptide
SRGIQMRLRTIAQAGLSSKALNKNI

SEQ ID NO: 29618 - protein, 73 aa, Artificial Sequence
  Synthetic polypeptide
RACNPSTLRGRSGLITRNPNETQNNSTSWPVFKSTEQKYLTLNTESTRIMTKLRAQQCRFWTSFFPKVLEMTG

SEQ ID NO: 29619 - protein, 101 aa, Artificial Sequence
  Synthetic polypeptide
RACNPSTLRGRSGLITRNPNETQNNSTSWPVFKSTEQKYLTLNTESTRIMTKLRAQQCRFWTSFFPKVLEMTEPICCYCEPGTALAARAAQMKMTGSAYSQ

SEQ ID NO: 29620 - protein, 41 aa, Artificial Sequence
  Synthetic polypeptide
GQARWLTPVIPALWEAEAGGSRGQEIETIPANTNQFCLWEE

SEQ ID NO: 29621 - protein, 35 aa, Artificial Sequence
  Synthetic polypeptide
SQHFGRLRREDHEVRRSRPSQLIRINSVYGKSDKS

SEQ ID NO: 29622 - protein, 26 aa, Artificial Sequence
  Synthetic polypeptide
YESILFMGRVTNPDTQEIKGRDLDSL

SEQ ID NO: 29623 - protein, 6 aa, Artificial Sequence
  Synthetic polypeptide
ITQSQI

SEQ ID NO: 29624 - protein, 127 aa, Artificial Sequence
  Synthetic polypeptide
TSFLYKLPSLRFKVEQKVDFKDVLYSLNITEIFSGGCDLSGITDSSEVYVSQVTQKVFFEINEDGSEAATSTGIHIPVIMSLAQSQFIANHPFLFIMKHNPTESILFMGRVTNPDTQEIKGRDLDSL

SEQ ID NO: 29625 - protein, 37 aa, Artificial Sequence
  Synthetic polypeptide
YLPGNQQMPASCSLYSLWNCEPIKLLFFINYPVSDLK

SEQ ID NO: 29626 - protein, 27 aa, Artificial Sequence
  Synthetic polypeptide
KEKLRGRIFCTEVIFLCHLREKTRIYI

SEQ ID NO: 29627 - protein, 24 aa, Artificial Sequence
  Synthetic polypeptide
SFLISLGLRFLTVKRKVEGKNFLY

SEQ ID NO: 29628 - protein, 20 aa, Artificial Sequence
  Synthetic polypeptide
NNNNKRPVYSIISVGVRRSL

SEQ ID NO: 29629 - protein, 526 aa, Artificial Sequence
  Synthetic polypeptide
IIIIRDPCTVSSQLELEEAFRLYELNKDSELLIHVFPCVPERPGMPCPGEDKSIYRRGARRWRKLYCANGHTFQAKRFNRRAHCAICTDRIWGLGRQGYKCINCKLLVHKKCHKLVTIECGRHSLPQEPVMPMDQSSMHSDHAQTVIPYNPSSHESLDQVGEEKEAMNTRESGKASSSLGLQDFDLLRVIGRGSYAKVLLVRLKKTDRIYAMKVVKKELVNDDEDIDWVQTEKHVFEQASNHPFLVGLHSCFQTESRLFFVIEYVNGGDLMFHMQRQRKLPEEHARFYSAEISLALNYLHERGIIYRDLKLDNVLLDSEGHIKLTDYGMCKEGLRPGDTTSTFCGTPNYIAPEILRGEDYGFSVDWWALGVLMFEMMAGRSPFDIVGSSDNPDQNTEDYLFQVILEKQIRIPRSLSVKAASVLKSFLNKDPKERLGCHPQTGFADIQGHPFFRNVDWDMMEQKQVVPPFKPNISGEFGLDNFDSQFTNEPVQLTPDDDDIVRKIDQSEFEGFEYINPLLMSAEECV

SEQ ID NO: 29630 - protein, 54 aa, Artificial Sequence
  Synthetic polypeptide
GRPGPASGIQDSQSGLRAGLPRPDDCCLGPGSAGHFTAADCSSLHPDGPGARCG

SEQ ID NO: 29631 - protein, 146 aa, Artificial Sequence
  Synthetic polypeptide
ADPGQPPASRTHNLGYVQACRALMIAASVLGLPAILLLLTVLPCIRMGQEPGVAKYRRAQLAGVLLILLALCALVATIWFPVCAHRETTIVSFGYSLYAGWIGAVLCLVGGCVILCCAGDAQAFGENRFYYTAGSSSPTHAKSAHV

SEQ ID NO: 29632 - protein, 22 aa, Artificial Sequence
  Synthetic polypeptide
QTRASLRHPGLTIWATCRPAAP

SEQ ID NO: 29633 - protein, 104 aa, Artificial Sequence
  Synthetic polypeptide
ADPGQPPASRTHNLGYVQACRALMIAASVLGLPAILLLLTVLPCIRMGQEPGVAKYRRAQLAGVLLILLGCQLLWAKTESSLHSQHLVQFKQKYLEDFSYLQGD

SEQ ID NO: 29634 - protein, 27 aa, Artificial Sequence
  Synthetic polypeptide
EMPFTFCHDCETSPAMWNYDSVPQGVD

SEQ ID NO: 29635 - protein, 121 aa, Artificial Sequence
  Synthetic polypeptide
NLMGLSGISTLLLSYSLLPPPCKKCLSPSAMIVRPPQPCGTMIQSLKALIENADAVYEKIVHCQKAAMEFHEHLHSIGTKEGLKERKLQKAVESFTWNITILKIRKTGRRSIFVPQTPIMV

SEQ ID NO: 29636 - protein, 8 aa, Artificial Sequence
  Synthetic polypeptide
DLPSHVEL

SEQ ID NO: 29637 - protein, 162 aa, Artificial Sequence
  Synthetic polypeptide
NLMGLSGISTLLLSYSLLPPPCKKCLSPSAMIVRPPQPCGTMIQSLKALIENADAVYEKIVHCQKAAMEFHEHLHSIGTKEGLKERKLQKAVESFTWNITILKGQADLLKYAKNETLENLKQIHFAAVSCGLNKPGTENADVQKPRRSLEVIPEKANDETGE

SEQ ID NO: 29638 - protein, 11 aa, Artificial Sequence
  Synthetic polypeptide
IPWNSMNTCTA

SEQ ID NO: 29639 - protein, 26 aa, Artificial Sequence
  Synthetic polypeptide
PTLLEDDEDEDLCDDPLPRDKYHGIP

SEQ ID NO: 29640 - protein, 72 aa, Artificial Sequence
  Synthetic polypeptide
KMMRMKTFVMIHFHVINTMEFHEHLHSIGTKEGLKERKLQKAVESFTWNITILKIRKTGRRSIFVPQTPIMV

SEQ ID NO: 29641 - protein, 113 aa, Artificial Sequence
  Synthetic polypeptide
KMMRMKTFVMIHFHVINTMEFHEHLHSIGTKEGLKERKLQKAVESFTWNITILKGQADLLKYAKNETLENLKQIHFAAVSCGLNKPGTENADVQKPRRSLEVIPEKANDETGE

SEQ ID NO: 29642 - protein, 39 aa, Artificial Sequence
  Synthetic polypeptide
LRSSFTSGHDCEASPAMWNWSSCQNGPACSHQGYGCHRG

SEQ ID NO: 29643 - protein, 1355 aa, Artificial Sequence
  Synthetic polypeptide
RGVALHKHSCLHHVRCDFAPHSLPAMTVRLPRPCGTGRHVKTGQLAAIKVMDVTGDEEEEIKQEINMLKKYSHHRNIATYYGAFIKKNPPGMDDQLWLVMEFCGAGSVTDLIKNTKGNTLKEEWIAYICREILRGLSHLHQHKVIHRDIKGQNVLLTENAEVKLVDFGVSAQLDRTVGRRNTFIGTPYWMAPEVIACDENPDATYDFKSDLWSLGITAIEMAEGAPPLCDMHPMRALFLIPRNPAPRLKSKKWSKKFQSFIESCLVKNHSQRPATEQLMKHPFIRDQPNERQVRIQLKDHIDRTKKKRGEKDETEYEYSGSEEEEEENDSGEPSSILNLPGESTLRRDFLRLQLANKERSEALRRQQLEQQQRENEEHKRQLLAERQKRIEEQKEQRRRLEEQQRREKELRKQQEREQRRHYEEQMRREEERRRAEHEQEYIRRQLEEEQRQLEILQQQLLHEQALLLEYKRKQLEEQRQAERLQRQLKQERDYLVSLQHQRQEQRPVEKKPLYHYKEGMSPSEKPAWAKEVEERSRLNRQSSPAMPHKVANRISDPNLPPRSESFSISGVQPARTPPMLRPVDPQIPHLVAVKSQGPALTASQSVHEQPTKGLSGFQEALNVTSHRVEMPRQNSDPTSENPPLPTRIEKFDRSSWLRQEEDIPPKVPQRTTSISPALARKNSPGNGSALGPRLGSQPIRASNPDLRRTEPILESPLQRTSSGSSSSSSTPSSQPSSQGGSQPGSQAGSSERTRVRANSKSEGSPVLPHEPAKVKPEESRDITRPSRPASYKKAIDEDLTALAKELRELRIEETNRPMKKVTDYSSSSEESESSEEEEEDGESETHDGTVAVSDIPRLIPTGAPGSNEQYNVGMVGTHGLETSHADSFSGSISREGTLMIRETSGEKKRSGHSDSNGFAGHINLPDLVQQSHSPAGTPTEGLGRVSTHSQEMDSGTEYGMGSSTKASFTPFVDPRVYQTSPTDEDEEDEESSAAALFTSELLRQEQAKLNEARKISVVNVNPTNIRPHSDTPEIRKYKKRFNSEILCAALWGVNLLVGTENGLMLLDRSGQGKVYNLINRRRFQQMDVLEGLNVLVTISGKKNKLRVYYLSWLRNRILHNDPEVEKKQGWITVGDLEGCIHYKVVKYERIKFLVIALKNAVEIYAWAPKPYHKFMAFKSFADLQHKPLLVDLTVEEGQRLKVIFGSHTGFHVIDVDSGNSYDIYIPSHIQGNITPHAIVILPKTDGMEMLVCYEDEGVYVNTYGRITKDVVLQWGEMPTSVAYIHSNQIMGWGEKAIEIRSVETGHLDGVFMHKRAQRLKFLCERNDKVFFASVRSGGSSQVFFMTLNRNSMMNW

SEQ ID NO: 29644 - protein, 39 aa, Artificial Sequence
  Synthetic polypeptide
GFPGHVELVVMSKRASLQPSRLWMSQGMKRKKSNKKLTC

SEQ ID NO: 29645 - protein, 1333 aa, Artificial Sequence
  Synthetic polypeptide
RGVALHKHSCLHHVRCDFAPHSLPAMTVRLPRPCGTGRHVKTGQLAAIKVMDVTGDEEEEIKQEINMLKKYSHHRNIATYYGAFIKKNPPGMDDQLWLVMEFCGAGSVTDLIKNTKGNTLKEEWIAYICREILRGLSHLHQHKVIHRDIKGQNVLLTENAEVKIVDFGVSAQLDRTVGRRNTFIGTPYWMAPEVIACDENPDATYDFKSDLWSLGITAIEMAEGAPPLCDMHPMRALFLIPRNPAPRLKSKKWSKKFQSFIESCLVKNHSQRPATEQLMKHPFIRDQPNERQVRIQLKDHIDRTKKKRGEKDETEYEYSGSEEEEEENDSGEPSSILNLPGESTLRRDFLRLQLANKERSEALRRQQLEQQQRENEEHKRQLLAERQKRIEEQKEQRRRLEEQQRREKELRKQQEREQRRHYEEQMRREEERRRAEHEQEYKRKQLEEQRQAERLQRQLKQERDYLVSLQHQRQEQRPVEKKPLYHYKEGMSPSEKPAWAKEVEERSRLNRQSSPAMPHKVANRISDPNLPPRSESFSISGVQPARTPPMLRPVDPQIPHLVAVKSQGPALTASQSVHEQPTKGLSGFQEALNVTSHRVEMPRQNSDPTSENPPLPTRIEKFDRSSWLRQEEDIPPKVPQRTTSISPALARKNSPGNGSALGPRLGSQPIRASNPDLRRTEPILESPLQRTSSGSSSSSSTPSSQPSSQGGSQPGSQAGSSERTRVRANSKSEGSPVLPHEPAKVKPEESRDITRPSRPAVSAFLSKSFELLIYQDLTALAKELRELRIEETNRPMKKVTDYSSSSEESESSEEEEEDGESETHDGTVAVSDIPRLIPTGAPGSNEQYNVGMVGTHGLETSHADSFSGSISREGTLMIRETSGEKKRSGHSDSNGFAGHINLPDLVQQSHSPAGTPTEGLGRVSTHSQEMDSGTEYGMGSSTKASFTPFVDPRVYQTSPTDEDEEDEESSAAALFTSELLRQEQAKLNEARKISVVNVNPTNIRPHSDTPEIRKYKKRFNSEILCAALWGVNLLVGTENGLMLLDRSGQGKVYNLINRRRFQQMDVLEGLNVLVTISGKKNKLRVYYLSWLRNRILHNDPEVEKKQGWITVGDLEGCIHYKVVKYERIKFLVIALKNAVEIYAWAPKPYHKFMAFKSFADLQHKPLLVDLTVEEGQRLKVIFGSHTGFHVIDVDSGNSYDIYIPSHIQGNITPHAIVILPKTDGMEMLVCYEDEGVYVNTYGRITKDVVLQWGEMPTSVAYIHSNQIMGWGEKAIEIRSVETGHLDGVFMHKRAQRLKFLCERNDKVFFASVRSGGSSQVFFMTLNRNSMMNW

SEQ ID NO: 29646 - protein, 1307 aa, Artificial Sequence
  Synthetic polypeptide
RGVALHKHSCLHHVRCDFAPHSLPAMTVRLPRPCGTGRHVKTGQLAAIKVMDVTGDEEEEIKQEINMLKKYSHHRNIATYYGAFIKKNPPGMDDQLWLVMEFCGAGSVTDLIKNTKGNTLKEEWIAYICREILRGLSHLHQHKVIHRDIKGQNVLLTENAEVKIVDFGVSAQLDRTVGRRNTFIGTPYWMAPEVIACDENPDATYDFKSDLWSLGITAIEMAEGAPPLCDMHPMRALFLIPRNPAPRLKSKKWSKKFQSFIESCLVKNHSQRPATEQLMKHPFIRDQPNERQVRIQLKDHIDRTKKKRGEKDETEYEYSGSEEEEEENDSGEPSSILNLPGESTLRRDFLRLQLANKERSEALRRQQLEQQQRENEEHKRQLLAERQKRIEEQKEQRRRLEEQQRREKELRKQQEREQRRHYEEQMRREEERRRAEHEQEYIRRQLEEEQRQLEILQQQLLHEQALLLEYKRKQLEEQRQAERLQRQLKQERDYLVSLQHQRQEQRPVEKKPLYHYKEGMSPSEKPAWAKEIPHLVAVKSQGPALTASQSVHEQPTKGLSGFQEALNVTSHRVEMPRQNSDPTSENPPLPTRIEKFDRSSWLRQEEDIPPKVPQRTTSISPALARKNSPGNGSALGPRLGSQPIRASNPDLRRTEPILESPLQRTSSGSSSSSSTPSSQPSSQGGSQPGSQAGSSERTRVRANSKSEGSPVLPHEPAKVKPEESRDITRPSRPAVSAFLSKSFELLIYQDLTALAKELRELRIEETNRPMKKVTDYSSSSEESESSEEEEEDGESETHDGTVAVSDIPRLIPTGAPGSNEQYNVGMVGTHGLETSHADSFSGSISREGTLMIRETSGEKKRSGHSDSNGFAGHINLPDLVQQSHSPAGTPTEGLGRVSTHSQEMDSGTEYGMGSSTKASFTPFVDPRVYQTSPTDEDEEDEESSAAALFTSELLRQEQAKLNEARKISVVNVNPTNIRPHSDTPEIRKYKKRFNSEILCAALWGVNLLVGTENGLMLLDRSGQGKVYNLINRRRFQQMDVLEGLNVLVTISGKKNKLRVYYLSWLRNRILHNDPEVEKKQGWITVGDLEGCIHYKVVKYERIKFLVIALKNAVEIYAWAPKPYHKFMAFKSFADLQHKPLLVDLTVEEGQRLKVIFGSHTGFHVIDVDSGNSYDIYIPSHIQGNITPHAIVILPKTDGMEMLVCYEDEGVYVNTYGRITKDVVLQWGEMPTSVAYIHSNQIMGWGEKAIEIRSVETGHLDGVFMHKRAQRLKFLCERNDKVFFASVRSGGSSQVFFMTLNRNSMMNW

SEQ ID NO: 29647 - protein, 1271 aa, Artificial Sequence
  Synthetic polypeptide
RGVALHKHSCLHHVRCDFAPHSLPAMTVRLPRPCGTGRHVKTGQLAAIKVMDVTGDEEEEIKQEINMLKKYSHHRNIATYYGAFIKKNPPGMDDQLWLVMEFCGAGSVTDLIKNTKGNTLKEEWIAYICREILRGLSHLHQHKVIHRDIKGQNVLLTENAEVKLVDFGVSAQLDRTVGRRNTFIGTPYWMAPEVIACDENPDATYDFKSDLWSLGITAIEMAEGAPPLCDMHPMRALFLIPRNPAPRLKSKKWSKKFQSFIESCLVKNHSQRPATEQLMKHPFIRDQPNERQVRIQLKDHIDRTKKKRGEKDETEYEYSGSEEEEEENDSGEPSSILNLPGESTLRRDFLRLQLANKERSEALRRQQLEQQQRENEEHKRQLLAERQKRIEEQKEQRRRLEEQQRREKELRKQQEREQRRHYEEQMRREEERRRAEHEQEYKRKQLEEQRQAERLQRQLKQERDYLVSLQHQRQEQRPVEKKPLYHYKEGMSPSEKPAWAKEIPHLVAVKSQGPALTASQSVHEQPTKGLSGFQEALNVTSHRVEMPRQNSDPTSENPPLPTRIEKFDRSSWLRQEEDIPPKVPQRTTSISPALARKNSPGNGSALGPRLGSQPIRASNPDLRRTEPILESPLQRTSSGSSSSSSTPSSQPSSQGGSQPGSQAGSSERTRVRANSKSEGSPVLPHEPAKVKPEESRDITRPSRPASYKKAIDEDLTALAKELRELRIEETNRPMKKVTDYSSSSEESESSEEEEEDGESETHDGTVAVSDIPRLIPTGAPGSNEQYNVGMVGTHGLETSHADSFSGSISREGTLMIRETSGEKKRSGHSDSNGFAGHINLPDLVQQSHSPAGTPTEGLGRVSTHSQEMDSGTEYGMGSSTKASFTPFVDPRVYQTSPTDEDEEDEESSAAALFTSELLRQEQAKLNEARKISVVNVNPTNIRPHSDTPEIRKYKKRFNSEILCAALWGVNLLVGTENGLMLLDRSGQGKVYNLINRRRFQQMDVLEGLNVLVTISGKKNKLRVYYLSWLRNRILHNDPEVEKKQGWITVGDLEGCIHYKVVKYERIKFLVIALKNAVEIYAWAPKPYHKFMAFKSFADLQHKPLLVDLTVEEGQRLKVIFGSHTGFHVIDVDSGNSYDIYIPSHIQGNITPHAIVILPKTDGMEMLVCYEDEGVYVNTYGRITKDVVLQWGEMPTSVAYIHSNQIMGWGEKAIEIRSVETGHLDGVFMHKRAQRLKFLCERNDKVFFASVRSGGSSQVFFMTLNRNSMMNW

SEQ ID NO: 29648 - protein, 1347 aa, Artificial Sequence
  Synthetic polypeptide
RGVALHKHSCLHHVRCDFAPHSLPAMTVRLPRPCGTGRHVKTGQLAAIKVMDVTGDEEEEIKQEINMLKKYSHHRNIATYYGAFIKKNPPGMDDQLWLVMEFCGAGSVTDLIKNTKGNTLKEEWIAYICREILRGLSHLHQHKVIHRDIKGQNVLLTENAEVKLVDFGVSAQLDRTVGRRNTFIGTPYWMAPEVIACDENPDATYDFKSDLWSLGITAIEMAEGAPPLCDMHPMRALFLIPRNPAPRLKSKKWSKKFQSFIESCLVKNHSQRPATEQLMKHPFIRDQPNERQVRIQLKDHIDRTKKKRGEKDETEYEYSGSEEEEEENDSGEPSSILNLPGESTLRRDFLRLQLANKERSEALRRQQLEQQQRENEEHKRQLLAERQKRIEEQKEQRRRLEEQQRREKELRKQQEREQRRHYEEQMRREEERRRAEHEQEYIRRQLEEEQRQLEILQQQLLHEQALLLEYKRKQLEEQRQAERLQRQLKQERDYLVSLQHQRQEQRPVEKKPLYHYKEGMSPSEKPAWAKEVEERSRLNRQSSPAMPHKVANRISDPNLPPRSESFSISGVQPARTPPMLRPVDPQIPHLVAVKSQGPALTASQSVHEQPTKGLSGFQEALNVTSHRVEMPRQNSDPTSENPPLPTRIEKFDRSSWLRQEEDIPPKVPQRTTSISPALARKNSPGNGSALGPRLGSQPIRASNPDLRRTEPILESPLQRTSSGSSSSSSTPSSQPSSQGGSQPGSQAGSSERTRVRANSKSEGSPVLPHEPAKVKPEESRDITRPSRPADLTALAKELRELRIEETNRPMKKVTDYSSSSEESESSEEEEEDGESETHDGTVAVSDIPRLIPTGAPGSNEQYNVGMVGTHGLETSHADSFSGSISREGTLMIRETSGEKKRSGHSDSNGFAGHINLPDLVQQSHSPAGTPTEGLGRVSTHSQEMDSGTEYGMGSSTKASFTPFVDPRVYQTSPTDEDEEDEESSAAALFTSELLRQEQAKLNEARKISVVNVNPTNIRPHSDTPEIRKYKKRFNSEILCAALWGVNLLVGTENGLMLLDRSGQGKVYNLINRRRFQQMDVLEGLNVLVTISGKKNKLRVYYLSWLRNRILHNDPEVEKKQGWITVGDLEGCIHYKVVKYERIKFLVIALKNAVEIYAWAPKPYHKFMAFKSFADLQHKPLLVDLTVEEGQRLKVIFGSHTGFHVIDVDSGNSYDIYIPSHIQGNITPHAIVILPKTDGMEMLVCYEDEGVYVNTYGRITKDVVLQWGEMPTSVAYIHSNQIMGWGEKAIEIRSVETGHLDGVFMHKRAQRLKFLCERNDKVFFASVRSGGSSQVFFMTLNRNSMMNW

SEQ ID NO: 29649 - protein, 1326 aa, Artificial Sequence
  Synthetic polypeptide
RGVALHKHSCLHHVRCDFAPHSLPAMTVRLPRPCGTGRHVKTGQLAAIKVMDVTGDEEEEIKQEINMLKKYSHHRNIATYYGAFIKKNPPGMDDQLWLVMEFCGAGSVTDLIKNTKGNTLKEEWIAYICREILRGLSHLHQHKVIHRDIKGQNVLLTENAEVKLVDFGVSAQLDRTVGRRNTFIGTPYWMAPEVIACDENPDATYDFKSDLWSLGITAIEMAEGAPPLCDMHPMRALFLIPRNPAPRLKSKKWSKKFQSFIESCLVKNHSQRPATEQLMKHPFIRDQPNERQVRIQLKDHIDRTKKKRGEKDETEYEYSGSEEEEEENDSGEPSSILNLPGESTLRRDFLRLQLANKERSEALRRQQLEQQQRENEEHKRQLLAERQKRIEEQKEQRRRLEEQQRREKELRKQQEREQRRHYEEQMRREEERRRAEHEQEYKRKQLEEQRQAERLQRQLKQERDYLVSLQHQRQEQRPVEKKPLYHYKEGMSPSEKPAWAKEVEERSRLNRQSSPAMPHKVANRISDPNLPPRSESFSISGVQPARTPPMLRPVDPQIPHLVAVKSQGPALTASQSVHEQPTKGLSGFQEALNVTSHRVEMPRQNSDPTSENPPLPTRIEKFDRSSWLRQEEDIPPKVPQRTTSISPALARKNSPGNGSALGPRLGSQPIRASNPDLRRTEPILESPLQRTSSGSSSSSSTPSSQPSSQGGSQPGSQAGSSERTRVRANSKSEGSPVLPHEPAKVKPEESRDITRPSRPASYKKAIDEDLTALAKELRELRIEETNRPMKKVTDYSSSSEESESSEEEEEDGESETHDGTVAVSDIPRLIPTGAPGSNEQYNVGMVGTHGLETSHADSFSGSISREGTLMIRETSGEKKRSGHSDSNGFAGHINLPDLVQQSHSPAGTPTEGLGRVSTHSQEMDSGTEYGMGSSTKASFTPFVDPRVYQTSPTDEDEEDEESSAAALFTSELLRQEQAKLNEARKISVVNVNPTNIRPHSDTPEIRKYKKRFNSEILCAALWGVNLLVGTENGLMLLDRSGQGKVYNLINRRRFQQMDVLEGLNVLVTISGKKNKLRVYYLSWLRNRILHNDPEVEKKQGWITVGDLEGCIHYKVVKYERIKFLVIALKNAVEIYAWAPKPYHKFMAFKSFADLQHKPLLVDLTVEEGQRLKVIFGSHTGFHVIDVDSGNSYDIYIPSHIQGNITPHAIVILPKTDGMEMLVCYEDEGVYVNTYGRITKDVVLQWGEMPTSVAYIHSNQIMGWGEKAIEIRSVETGHLDGVFMHKRAQRLKFLCERNDKVFFASVRSGGSSQVFFMTLNRNSMMNW

SEQ ID NO: 29650 - protein, 1292 aa, Artificial Sequence
  Synthetic polypeptide
RGVALHKHSCLHHVRCDFAPHSLPAMTVRLPRPCGTGRHVKTGQLAAIKVMDVTGDEEEEIKQEINMLKKYSHHRNIATYYGAFIKKNPPGMDDQLWLVMEFCGAGSVTDLIKNTKGNTLKEEWIAYICREILRGLSHLHQHKVIHRDIKGQNVLLTENAEVKLVDFGVSAQLDRTVGRRNTFIGTPYWMAPEVIACDENPDATYDFKSDLWSLGITAIEMAEGAPPLCDMHPMRALFLIPRNPAPRLKSKKWSKKFQSFIESCLVKNHSQRPATEQLMKHPFIRDQPNERQVRIQLKDHIDRTKKKRGEKDETEYEYSGSEEEEEENDSGEPSSILNLPGESTLRRDFLRLQLANKERSEALRRQQLEQQQRENEEHKRQLLAERQKRIEEQKEQRRRLEEQQRREKELRKQQEREQRRHYEEQMRREEERRRAEHEQEYIRRQLEEEQRQLEILQQQLLHEQALLLEYKRKQLEEQRQAERLQRQLKQERDYLVSLQHQRQEQRPVEKKPLYHYKEGMSPSEKPAWAKEIPHLVAVKSQGPALTASQSVHEQPTKGLSGFQEALNVTSHRVEMPRQNSDPTSENPPLPTRIEKFDRSSWLRQEEDIPPKVPQRTTSISPALARKNSPGNGSALGPRLGSQPIRASNPDLRRTEPILESPLQRTSSGSSSSSSTPSSQPSSQGGSQPGSQAGSSERTRVRANSKSEGSPVLPHEPAKVKPEESRDITRPSRPADLTALAKELRELRIEETNRPMKKVTDYSSSSEESESSEEEEEDGESETHDGTVAVSDIPRLIPTGAPGSNEQYNVGMVGTHGLETSHADSFSGSISREGTLMIRETSGEKKRSGHSDSNGFAGHINLPDLVQQSHSPAGTPTEGLGRVSTHSQEMDSGTEYGMGSSTKASFTPFVDPRVYQTSPTDEDEEDEESSAAALFTSELLRQEQAKLNEARKISVVNVNPTNIRPHSDTPEIRKYKKRFNSEILCAALWGVNLLVGTENGLMLLDRSGQGKVYNLINRRRFQQMDVLEGLNVLVTISGKKNKLRVYYLSWLRNRILHNDPEVEKKQGWITVGDLEGCIHYKVVKYERIKFLVIALKNAVEIYAWAPKPYHKFMAFKSFADLQHKPLLVDLTVEEGQRLKVIFGSHTGFHVIDVDSGNSYDIYIPSHIQGNITPHAIVILPKTDGMEMLVCYEDEGVYVNTYGRITKDVVLQWGEMPTSVAYIHSNQIMGWGEKAIEIRSVETGHLDGVFMHKRAQRLKFLCERNDKVFFASVRSGGSSQVFFMTLNRNSMMNW

SEQ ID NO: 29651 - protein, 1318 aa, Artificial Sequence
  Synthetic polypeptide
RGVALHKHSCLHHVRCDFAPHSLPAMTVRLPRPCGTGRHVKTGQLAAIKVMDVTGDEEEEIKQEINMLKKYSHHRNIATYYGAFIKKNPPGMDDQLWLVMEFCGAGSVTDLIKNTKGNTLKEEWIAYICREILRGLSHLHQHKVIHRDIKGQNVLLTENAEVKLVDFGVSAQLDRTVGRRNTFIGTPYWMAPEVIACDENPDATYDFKSDLWSLGITAIEMAEGAPPLCDMHPMRALFLIPRNPAPRLKSKKWSKKFQSFIESCLVKNHSQRPATEQLMKHPFIRDQPNERQVRIQLKDHIDRTKKKRGEKDETEYEYSGSEEEEEENDSGEPSSILNLPGESTLRRDFLRLQLANKERSEALRRQQLEQQQRENEEHKRQLLAERQKRIEEQKEQRRRLEEQQRREKELRKQQEREQRRHYEEQMRREEERRRAEHEQEYKRKQLEEQRQAERLQRQLKQERDYLVSLQHQRQEQRPVEKKPLYHYKEGMSPSEKPAWAKEVEERSRLNRQSSPAMPHKVANRISDPNLPPRSESFSISGVQPARTPPMLRPVDPQIPHLVAVKSQGPALTASQSVHEQPTKGLSGFQEALNVTSHRVEMPRQNSDPTSENPPLPTRIEKFDRSSWLRQEEDIPPKVPQRTTSISPALARKNSPGNGSALGPRLGSQPIRASNPDLRRTEPILESPLQRTSSGSSSSSSTPSSQPSSQGGSQPGSQAGSSERTRVRANSKSEGSPVLPHEPAKVKPEESRDITRPSRPADLTALAKELRELRIEETNRPMKKVTDYSSSSEESESSEEEEEDGESETHDGTVAVSDIPRLIPTGAPGSNEQYNVGMVGTHGLETSHADSFSGSISREGTLMIRETSGEKKRSGHSDSNGFAGHINLPDLVQQSHSPAGTPTEGLGRVSTHSQEMDSGTEYGMGSSTKASFTPFVDPRVYQTSPTDEDEEDEESSAAALFTSELLRQEQAKLNEARKISVVNVNPTNIRPHSDTPEIRKYKKRFNSEILCAALWGVNLLVGTENGLMLLDRSGQGKVYNLINRRRFQQMDVLEGLNVLVTISGKKNKLRVYYLSWLRNRILHNDPEVEKKQGWITVGDLEGCIHYKVVKYERIKFLVIALKNAVEIYAWAPKPYHKFMAFKSFADLQHKPLLVDLTVEEGQRLKVIFGSHTGFHVIDVDSGNSYDIYIPSHIQGNITPHAIVILPKTDGMEMLVCYEDEGVYVNTYGRITKDVVLQWGEMPTSVAYIHSNQIMGWGEKAIEIRSVETGHLDGVFMHKRAQRLKFLCERNDKVFFASVRSGGSSQVFFMTLNRNSMMNW

SEQ ID NO: 29652 - protein, 1263 aa, Artificial Sequence
  Synthetic polypeptide
RGVALHKHSCLHHVRCDFAPHSLPAMTVRLPRPCGTGRHVKTGQLAAIKVMDVTGDEEEEIKQEINMLKKYSHHRNIATYYGAFIKKNPPGMDDQLWLVMEFCGAGSVTDLIKNTKGNTLKEEWIAYICREILRGLSHLHQHKVIHRDIKGQNVLLTENAEVKLVDFGVSAQLDRTVGRRNTFIGTPYWMAPEVIACDENPDATYDFKSDLWSLGITAIEMAEGAPPLCDMHPMRALFLIPRNPAPRLKSKKWSKKFQSFIESCLVKNHSQRPATEQLMKHPFIRDQPNERQVRIQLKDHIDRTKKKRGEKDETEYEYSGSEEEEEENDSGEPSSILNLPGESTLRRDFLRLQLANKERSEALRRQQLEQQQRENEEHKRQLLAERQKRIEEQKEQRRRLEEQQRREKELRKQQEREQRRHYEEQMRREEERRRAEHEQEYKRKQLEEQRQAERLQRQLKQERDYLVSLQHQRQEQRPVEKKPLYHYKEGMSPSEKPAWAKEIPHLVAVKSQGPALTASQSVHEQPTKGLSGFQEALNVTSHRVEMPRQNSDPTSENPPLPTRIEKFDRSSWLRQEEDIPPKVPQRTTSISPALARKNSPGNGSALGPRLGSQPIRASNPDLRRTEPILESPLQRTSSGSSSSSSTPSSQPSSQGGSQPGSQAGSSERTRVRANSKSEGSPVLPHEPAKVKPEESRDITRPSRPADLTALAKELRELRIEETNRPMKKVTDYSSSSEESESSEEEEEDGESETHDGTVAVSDIPRLIPTGAPGSNEQYNVGMVGTHGLETSHADSFSGSISREGTLMIRETSGEKKRSGHSDSNGFAGHINLPDLVQQSHSPAGTPTEGLGRVSTHSQEMDSGTEYGMGSSTKASFTPFVDPRVYQTSPTDEDEEDEESSAAALFTSELLRQEQAKLNEARKISVVNVNPTNIRPHSDTPEIRKYKKRFNSEILCAALWGVNLLVGTENGLMLLDRSGQGKVYNLINRRRFQQMDVLEGLNVLVTISGKKNKLRVYYLSWLRNRILHNDPEVEKKQGWITVGDLEGCIHYKVVKYERIKFLVIALKNAVEIYAWAPKPYHKFMAFKSFADLQHKPLLVDLTVEEGQRLKVIFGSHTGFHVIDVDSGNSYDIYIPSHIQGNITPHAIVILPKTDGMEMLVCYEDEGVYVNTYGRITKDVVLQWGEMPTSVAYIHSNQIMGWGEKAIEIRSVETGHLDGVFMHKRAQRLKFLCERNDKVFFASVRSGGSSQVFFMTLNRNSMMNW

SEQ ID NO: 29653 - protein, 1300 aa, Artificial Sequence
  Synthetic polypeptide
RGVALHKHSCLHHVRCDFAPHSLPAMTVRLPRPCGTGRHVKTGQLAAIKVMDVTGDEEEEIKQEINMLKKYSHHRNIATYYGAFIKKNPPGMDDQLWLVMEFCGAGSVTDLIKNTKGNTLKEEWIAYICREILRGLSHLHQHKVIHRDIKGQNVLLTENAEVKLVDFGVSAQLDRTVGRRNTFIGTPYWMAPEVIACDENPDATYDFKSDLWSLGITAIEMAEGAPPLCDMHPMRALFLIPRNPAPRLKSKKWSKKFQSFIESCLVKNHSQRPATEQLMKHPFIRDQPNERQVRIQLKDHIDRTKKKRGEKDETEYEYSGSEEEEEENDSGEPSSILNLPGESTLRRDFLRLQLANKERSEALRRQQLEQQQRENEEHKRQLLAERQKRIEEQKEQRRRLEEQQRREKELRKQQEREQRRHYEEQMRREEERRRAEHEQEYIRRQLEEEQRQLEILQQQLLHEQALLLEYKRKQLEEQRQAERLQRQLKQERDYLVSLQHQRQEQRPVEKKPLYHYKEGMSPSEKPAWAKEIPHLVAVKSQGPALTASQSVHEQPTKGLSGFQEALNVTSHRVEMPRQNSDPTSENPPLPTRIEKFDRSSWLRQEEDIPPKVPQRTTSISPALARKNSPGNGSALGPRLGSQPIRASNPDLRRTEPILESPLQRTSSGSSSSSSTPSSQPSSQGGSQPGSQAGSSERTRVRANSKSEGSPVLPHEPAKVKPEESRDITRPSRPASYKKAIDEDLTALAKELRELRIEETNRPMKKVTDYSSSSEESESSEEEEEDGESETHDGTVAVSDIPRLIPTGAPGSNEQYNVGMVGTHGLETSHADSFSGSISREGTLMIRETSGEKKRSGHSDSNGFAGHINLPDLVQQSHSPAGTPTEGLGRVSTHSQEMDSGTEYGMGSSTKASFTPFVDPRVYQTSPTDEDEEDEESSAAALFTSELLRQEQAKLNEARKISVVNVNPTNIRPHSDTPEIRKYKKRFNSEILCAALWGVNLLVGTENGLMLLDRSGQGKVYNLINRRRFQQMDVLEGLNVLVTISGKKNKLRVYYLSWLRNRILHNDPEVEKKQGWITVGDLEGCIHYKVVKYERIKFLVIALKNAVEIYAWAPKPYHKFMAFKSFADLQHKPLLVDLTVEEGQRLKVIFGSHTGFHVIDVDSGNSYDIYIPSHIQGNITPHAIVILPKTDGMEMLVCYEDEGVYVNTYGRITKDVVLQWGEMPTSVAYIHSNQIMGWGEKAIEIRSVETGHLDGVFMHKRAQRLKFLCERNDKVFFASVRSGGSSQVFFMTLNRNSMMNW

SEQ ID NO: 29654 - protein, 24 aa, Artificial Sequence
  Synthetic polypeptide
LRSSFTSGHDCEASPAMWNSNEPV

SEQ ID NO: 29655 - protein, 40 aa, Artificial Sequence
  Synthetic polypeptide
RGVALHKHSCLHHVRCDFAPHSLPAMTVRLPRPCGTQMNQ

SEQ ID NO: 29656 - protein, 9 aa, Artificial Sequence
  Synthetic polypeptide
GFPGHVELK

SEQ ID NO: 29657 - protein, 371 aa, Artificial Sequence
  Synthetic polypeptide
WFYKGQFPRTCPLPCCHVRCPFSLPLCSAMIVRPPQPCGTLLRSAADWSAGIKYHEESIHAAYVHVIENSRHYIYIENQFFISCADDKVVFNKIGDAIAQRILKAHRENQKYRVYVVIPLLPGFEGDISTGGGNALQAIMHFNYRTMCRGENSILGQLKAELGNQWINYISFCGLRTHAELEGNLVTELIYVHSKLLIADDNTVIIGSANINDRSMLGKRDSEMAVIVQDTETVPSVMDGKEYQAGRFARGLRLQCFRVVLGYLDDPSEDIQDPVSDKFFKEVWVSTAARNATIYDKVFRCLPNDEVHNLIQLRDFINKPVLAKEDPIRAEEELKKIRGFLVQFPFYFLSEESLLPSVGTKEAIVPMEVWT

SEQ ID NO: 29658 - protein, 19 aa, Artificial Sequence
  Synthetic polypeptide
GLPSHVELCSALLLIGLLV

SEQ ID NO: 29659 - protein, 42 aa, Artificial Sequence
  Synthetic polypeptide
RAVPPHMPSSLLPCKMSLFSSFVFCHDCEASPAMWNFAPLCC

SEQ ID NO: 29660 - protein, 268 aa, Artificial Sequence
  Synthetic polypeptide
WFYKGQFPRTCPLPCCHVRCPFSLPLCSAMIVRPPQPCGTLLRSAADWSAGIKYHEESIHAAYVHVIENSRHYIYIENQFFISCADDKVVFNKIGDAIAQRILKAHRENQKYRVYVVIPLLPGFEGDISTGGGNALQAIMHFNYRTMCRGENSILGQLKAELGNQWINYISFCGLRTHAELEGNLVTELIYVHSKLLIADDNTVIIGSANINDRSMLGKRDSEMAVIVQDTETVPSVMDGKEYQAGRFARGLRLQCFRSKMTPGVEDP

SEQ ID NO: 29661 - protein, 952 aa, Artificial Sequence
  Synthetic polypeptide
HVPVSLQQVGAPRGQRSYLNHLCIHSPSQGEVSNIQARAVVLSWAPPVGLSCGPHSGLSFPYSYEVALSDKGRDGKYKIIYSGEELECNLKDLRPATDYHVRVYAMYNSVKGSCSEPVSFTTHSCAPECPFPPKLAHRSKSSLTLQWKAPIDNGSKITNYLLEWDEGKRNSGFRQCFFGSQKHCKLTKLCPAMGYTFRLAARNDIGTSGYSQEVVCYTLGNIPQMPSAPRLVRAGITWVTLQWSKPEGCSPEEVITYTLEIQEDENDNLFHPKYTGEDLTCTVKNLKRSTQYKFRLTASNTEGKSCPSEVLVCTTSPDRPGPPTRPLVKGPVTSHGFSVKWDPPKDNGGSEILKYLLEITDGNSEANQWEVAYSGSATEYTFTHLKPGTLYKLRACCISTGGHSQCSESLPVRTLSIAPGQCRPPRVLGRPKHKEVHLEWDVPASESGCEVSEYSVEMTEPEDVASEVYHGPELECTVGNLLPGTVYRFRVRALNDGGYGPYSDVSEITTAAGPPGQCKAPCISCTPDGCVLVGWESPDSSGADISEYRLEWGEDEESLELIYHGTDTRFEIRDLLPAAQYCCRLQAFNQAGAGPYSELVLCQTPASAPDPVSTLCVLEEEPLDAYPDSPSACLVLNWEEPCNNGSEILAYTIDLGDTSITVGNTTMHVMKDLLPETTYRIRIQAINEIGAGPFSQFIKAKTRPLPPLPPRLECAAAGPQSLKLKWGDSNSKTHAAEDIVYTLQLEDRNKRFISIYRGPSHTYKVQRLTEFTCYSFRIQAASEAGEGPFSETYTFSTTKSVPPTIKAPRVTQLEGNSCEILWETVPSMKGDPVNYILQVLVGRESEYKQVYKGEEATFQISGLQTNTDYRFRVCACRRCLDTSQELSGAFSPSAAFVLQRSEVMLTGDMGSLDDPKMKSMMPTDEQFAAIIVLGFATLSILFAFILQYFLMK

SEQ ID NO: 29662 - protein, 78 aa, Artificial Sequence
  Synthetic polypeptide
MCLSLFNRLGLLEAKDHTLIIFVSTAPHRVRFLIFRQEQLCCPGLPLLDFPVDPTVVFPSPTVTRWPYQTKDEMENTR

SEQ ID NO: 29663 - protein, 8 aa, Artificial Sequence
  Synthetic polypeptide
AHLDTGVT

SEQ ID NO: 29664 - protein, 46 aa, Artificial Sequence
  Synthetic polypeptide
VHVLCRDMDEAGNHHSEQTVARTENQTLHVLTHRWELNNEHTWTQE

SEQ ID NO: 29665 - protein, 370 aa, Artificial Sequence
  Synthetic polypeptide
TMSTLGHRSNLIHYLGLSHHLLALNFIIVSFGKKSAWSSAQVKVTDTDFDGVEVRVFEGPPKPEEPLKRSVVYIHGGGWALASAKIRYYDELCTAMAEELNAVIVSIEYRLVPKVYFPEQIHDVVRATKYFLKPEVLQKYMVDPGRICISGDSAGGNLAAALGQQFTQDASLKNKLKLQALIYPVLQALDFNTPSYQQNVNTPILPRYVMVKYWVDYFKGNYDFVQAMIVNNHTSLDVEEAAAVRARLNWTSLLPASFTKNYKPVVQTTGNARIVQELPQLLDARSAPLIADQAVLQLLPKTYILTCEHDVLRDDGIMYAKRLESAGVEVTLDHFEDGFHGCMIFTSWPTNFSVGIRTRNSYIKWLDQNL

SEQ ID NO: 29666 - protein, 378 aa, Artificial Sequence
  Synthetic polypeptide
TMSTLGHRSNLIHYLGLSHHLLALNFIIVSFGKKSAWSSAQVKVTDTDFDGVEVRVFEGPPKPEEPLKRSVVYIHGGGWALASASASWSPSDEIRYYDELCTAMAEELNAVIVSIEYRLVPKVYFPEQIHDVVRATKYFLKPEVLQKYMVDPGRICISGDSAGGNLAAALGQQFTQDASLKNKLKLQALIYPVLQALDFNTPSYQQNVNTPILPRYVMVKYWVDYFKGNYDFVQAMIVNNHTSLDVEEAAAVRARLNWTSLLPASFTKNYKPVVQTTGNARIVQELPQLLDARSAPLIADQAVLQLLPKTYILTCEHDVLRDDGIMYAKRLESAGVEVTLDHFEDGFHGCMIFTSWPTNFSVGIRTRNSYIKWLDQNL

SEQ ID NO: 29667 - protein, 246 aa, Artificial Sequence
  Synthetic polypeptide
TMSTLGHRSNLIHYLGLSHHLLALNFIIVSFGKKSAWSSAQVKVTDTDFDGVEVRVFEGPPKPEEPLKRSVVYIHGGGWALASASASWSPSDEIRYYDELCTAMAEELNAVIVSIEYRLVPKVYFPEQIHDVVRATKYFLKPEVLQKYMVDPGRICISGDSAGGNLAAALGQQFTQDASLKNKLKLQALIYPVLQALDFNTPSYQQNVNTPILPRYVMVKYWVDYFKGNYDFVQAMIVNNHTSLDV

SEQ ID NO: 29668 - protein, 788 aa, Artificial Sequence
  Synthetic polypeptide
FLYSLHNRKKMAYQKVHADQRAPGHSQYLDNDDLQATALDLEWDMEKELEESGFDQFQLDGAENQNLGHSETIDLNLDSIQPATSPKGRFQRLQEESDYITHYTRSAPKSNRCNFCHVLKILCTATILFIFGILIGYYVHTNCPSDAPSSGTVDPQLYQEILKTIQAEDIKKSFRNLVQLYKNEDDMEISKKIKTQWTSLGLEDVQFVNYSVLLDLPGPSPSTVTLSSSGQCFHPNGQPCSEEARKDSSQDLLYSYAAYSAKGTLKAEVIDVSYGMADDLKRIRKIKNVTNQIALLKLGKLPLLYKLSSLEKAGFGGVLLYIDPCDLPKTVNPSHDTFMVSLNPGGDPSTPGYPSVDESFRQSRSNLTSLLVQPISAPLVAKLISSPKARTKNEACSSLELPNNEIRVVSMQVQTVTKLKTVTNVVGFVMGLTSPDRYIIVGSHHHTAHSYNGQEWASSTAIITAFIRALMSKVKRGWRPDRTIVFCSWGGTAFGNIGSYEWGEDFKKVLQKNVVAYISLHSPIRGNSSLYPVASPSLQQLVVEKNNFNCTRRAQCPETNISSIQIQGDADYFINHLGVPIVQFAYEDIKTLEGPSFLSEARFSTRATKIEEMDPSFNLHETITKLSGEVILQIANEPVLPFNALDIALEVQNNLKGDQPNTHQLLAMALRLRESAELFQSDEMRPANDPKERAPIRIRMLNDILQDMEKSFLVKQAPPGFYRNILYHLDEKTSRFSILIEAWEHCKPLASNETLQEALSEVLNSINSAQVYFKAGLDVFKSVLDGKN

SEQ ID NO: 29669 - protein, 31 aa, Artificial Sequence
  Synthetic polypeptide
HRDSCTACITVKRWPIRRSMQIKELQDTHST

SEQ ID NO: 29670 - protein, 9 aa, Artificial Sequence
  Synthetic polypeptide
CFLFAVELR

SEQ ID NO: 29671 - protein, 789 aa, Artificial Sequence
  Synthetic polypeptide
ASYLLWNLGKKMAYQKVHADQRAPGHSQYLDNDDLQATALDLEWDMEKELEESGFDQFQLDGAENQNLGHSETIDLNLDSIQPATSPKGRFQRLQEESDYITHYTRSAPKSNRCNFCHVLKILCTATILFIFGILIGYYVHTNCPSDAPSSGTVDPQLYQEILKTIQAEDIKKSFRNLVQLYKNEDDMEISKKIKTQWTSLGLEDVQFVNYSVLLDLPGPSPSTVTLSSSGQCFHPNGQPCSEEARKDSSQDLLYSYAAYSAKGTLKAEVIDVSYGMADDLKRIRKIKNVTNQIALLKLGKLPLLYKLSSLEKAGFGGVLLYIDPCDLPKTVNPSHDTFMVSLNPGGDPSTPGYPSVDESFRQSRSNLTSLLVQPISAPLVAKLISSPKARTKNEACSSLELPNNEIRVVSMQVQTVTKLKTVTNVVGFVMGLTSPDRYIIVGSHHHTAHSYNGQEWASSTAIITAFIRALMSKVKRGWRPDRTIVFCSWGGTAFGNIGSYEWGEDFKKVLQKNVVAYISLHSPIRGNSSLYPVASPSLQQLVVEKNNFNCTRRAQCPETNISSIQIQGDADYFINHLGVPIVQFAYEDIKTLEGPSFLSEARFSTRATKIEEMDPSFNLHETITKLSGEVILQIANEPVLPFNALDIALEVQNNLKGDQPNTHQLLAMALRLRESAELFQSDEMRPANDPKERAPIRIRMLNDILQDMEKSFLVKQAPPGFYRNILYHLDEKTSRFSILIEAWEHCKPLASNETLQEALSEVLNSINSAQVYFKAGLDVFKSVLDGKN

SEQ ID NO: 29672 - protein, 21 aa, Artificial Sequence
  Synthetic polypeptide
SQHFGRPSLSCLREEERDRLQ

SEQ ID NO: 29673 - protein, 167 aa, Artificial Sequence
  Synthetic polypeptide
PGAVAHTCNPSTLGGRAFPASGKKRETDYSDGDPLDVHKRLPSSAGEDRAVMLGFAMMGFSVLMFFLLGTTILKPFMLSIQREESTCTAIHTDIMDDWLDCAFTCGVHCHGQGKYPCLQVFVNLSHPGQKALLHYNEEAVQINPKRDVTDCRVKEKQTLTVSDEHKQ

SEQ ID NO: 29674 - protein, 34 aa, Artificial Sequence
  Synthetic polypeptide
QARWLTPVIPALWEAEPFLPQGRRERQTTVMETH

SEQ ID NO: 29675 - protein, 271 aa, Artificial Sequence
  Synthetic polypeptide
PGAVAHTCNPSTLGGRAFPASGKKRETDYSDGDPLDVHKRLPSSAGEDRAVMLGFAMMGFSVLMFFLLGTTILKPFMLSIQREESTCTAIHTDIMDDWLDCAFTCGVHCHGQGKYPCLQVFVNLSHPGQKALLHYNEEAVQINPKCFYTPKCHQDRNDLLNSALDIKEFFDHKNGTPFSCFYSPASQSEDVILIKKYDQMAIFHCLFWPSLTLLGGALIVGMVRLTQHLSLLCEKYSTVVRDEVGGKVPYIEQHQFKLCIMRRSKGRAEKS

SEQ ID NO: 29676 - protein, 160 aa, Artificial Sequence
  Synthetic polypeptide
SQHFGRPRTAFPASGKKRETDYSDGDPLDVHKRLPSSAGEDRAVMLGFAMMGFSVLMFFLLGTTILKPFMLSIQREESTCTAIHTDIMDDWLDCAFTCGVHCHGQGKYPCLQVFVNLSHPGQKALLHYNEEAVQINPKRDVTDCRVKEKQTLTVSDEHKQ

SEQ ID NO: 29677 - protein, 36 aa, Artificial Sequence
  Synthetic polypeptide
PGAVAHTCNPSTLGGRGQPFLPQGRRERQTTVMETH

SEQ ID NO: 29678 - protein, 31 aa, Artificial Sequence
  Synthetic polypeptide
QARWLTPVIPALWEAEDSLSCLREEERDRLQ

SEQ ID NO: 29679 - protein, 264 aa, Artificial Sequence
  Synthetic polypeptide
SQHFGRPRTAFPASGKKRETDYSDGDPLDVHKRLPSSAGEDRAVMLGFAMMGFSVLMFFLLGTTILKPFMLSIQREESTCTAIHTDIMDDWLDCAFTCGVHCHGQGKYPCLQVFVNLSHPGQKALLHYNEEAVQINPKCFYTPKCHQDRNDLLNSALDIKEFFDHKNGTPFSCFYSPASQSEDVILIKKYDQMAIFHCLFWPSLTLLGGALIVGMVRLTQHLSLLCEKYSTVVRDEVGGKVPYIEQHQFKLCIMRRSKGRAEKS

SEQ ID NO: 29680 - protein, 819 aa, Artificial Sequence
  Synthetic polypeptide
FCFLRPSQPCGTNSEGGLYVCMNTFLAFGREHVERHFRKTGQSVYMHLKRHVREKVRGASGGALPKRRNSKIFLDLDTDDDLNSDDYEYEDEAKLVIFPDHYEIALPNIEELPALVTIACDAVLSSKSPYRKQDPDTWENELPVSKYANNLTQLDNGVRIPPSGWKCARCDLRENLWLNLTDGSVLCGKWFFDSSGGNGHALEHYRDMGYPLAVKLGTITPDGADVYSFQEEEPVLDPHLAKHLAHFGIDMLHMHGTENGLQDNDIKLRVSEWEVIQESGTKLKPMYGPGYTGLKNLGNSCYLSSVMQAIFSIPEFQRAYVGNLPRIFDYSPLDPTQDFNTQMTKLGHGLLSGQYSKPPVKSELIEQVMKEEHKPQQNGISPRMFKAFVSKSHPEFSSNRQQDAQEFFLHLVNLVERNRIGSENPSDVFRFLVEERIQCCQTRKVRYTERVDYLMQLPVAMEAATNKDELIAYELTRREAEANRRPLPELVRAKIPFSACLQAFSEPENVDDFWSSALQAKSAGVKTSRFASFPEYLVVQIKKFTFGLDWVPKKFDVSIDMPDLLDINHLRARGLQPGEEELPDISPPIVIPDDSKDRLMNQLIDPSDIDESSVMQLAEMGFPLEACRKAVYFTGNMGAEVAFNWIIVHMEEPDFAEPLTMPGYGGAASAGASVFGASGLDNQPPEEIVAIITSMGFQRNQAIQALRATNNNLERALDWIFSHPEFEEDSDFVIEMENNANANIISEAKPEGPRVKDGSGTYELFAFISHMGTSTMSGHYICHIKKEGRWVIYNDHKVCASERPPKDLGYMYFYRRIPS

SEQ ID NO: 29681 - protein, 17 aa, Artificial Sequence
  Synthetic polypeptide
GLPSHAELILKVDSMYA

SEQ ID NO: 29682 - protein, 55 aa, Artificial Sequence
  Synthetic polypeptide
FCFLRPSQPCGTNSEGGLYVCMNTFLAFGREHVERHFRKTGQSVYMHLKRHVREI

SEQ ID NO: 29683 - protein, 658 aa, Artificial Sequence
  Synthetic polypeptide
WVYQGFLLLLLPHFLLLPPCKEFLLPPAMILRPPQPCGTKSKEQGYGKLSSDEDLEIIVDQKQGKGSRAADKAVAMVMKEIPREESAEEKPLLTMTSQLVNEQQESRPLLSPSIDDFLCETKSEAIARPVTSNTAVLTTGLDLLDLSEPVSQTQTKAKKSEPSSKTSSLKKKADGSDLISTDAEQRGQPLRVPETSSLDLDIQTQLEKWDDVKFHGDRNTKGHPMAERKSSSSRTGSKELLWSSEHRSQPELSGGKSALNSESASELELVAPTQARLTKEHRWGSALLSRNHSLEEEFERAKAAVESDTEFWDKMQAEWEEMARRNWISENQEAQNQVTISASEKGYYFHTENPFKDWPGAFEEGLKRLKEGDLPVTILFMEAAILQDPGDAEAWQFLGITQAENENEQAAIVALQRCLELQPNNLKALMALAVSYTNTGHQQDACDALKNWIKQNPKYKYLVKSKKGSPGLTRRMSKSPVDSSVLEGVKELYLEAAHQNGDMIDPDLQTGLGVLFHLSGEFNRAIDAFNAALTVRPEDYSLWNRLGATLANGDRSEEAVEAYTRALEIQPGFIRSRYNLGISCINLGAYREAVSNFLTALSLQRKSRNQQQVPHPAISGNIWAALRIALSLMDQPELFQAANLGDLDVLLRAFNLDP

SEQ ID NO: 29684 - protein, 17 aa, Artificial Sequence
  Synthetic polypeptide
GLPSHVELKVKNKDMEN

SEQ ID NO: 29685 - protein, 623 aa, Artificial Sequence
  Synthetic polypeptide
WVYQGFLLLLLPHFLLLPPCKEFLLPPAMILRPPQPCGTKSKEQGYGKLSSDEDLEIIVDQKQLVNEQQESRPLLSPSIDDFLCETKSEAIARPVTSNTAVLTTGLDLLDLSEPVSQTQTKAKKSEPSSKTSSLKKKADGSDLISTDAEQRGQPLRVPETSSLDLDIQTQLEKWDDVKFHGDRNTKGHPMAERKSSSSRTGSKELLWSSEHRSQPELSGGKSALNSESASELELVAPTQARLTKEHRWGSALLSRNHSLEEEFERAKAAVESDTEFWDKMQAEWEEMARRNWISENQEAQNQVTISASEKGYYFHTENPFKDWPGAFEEGLKRLKEGDLPVTILFMEAAILQDPGDAEAWQFLGITQAENENEQAAIVALQRCLELQPNNLKALMALAVSYTNTGHQQDACDALKNWIKQNPKYKYLVKSKKGSPGLTRRMSKSPVDSSVLEGVKELYLEAAHQNGDMIDPDLQTGLGVLFHLSGEFNRAIDAFNAALTVRPEDYSLWNRLGATLANGDRSEEAVEAYTRALEIQPGFIRSRYNLGISCINLGAYREAVSNFLTALSLQRKSRNQQQVPHPAISGNIWAALRIALSLMDQPELFQAANLGDLDVLLRAFNLDP

SEQ ID NO: 29686 - protein, 202 aa, Artificial Sequence
  Synthetic polypeptide
WVYQGFLLLLLPHFLLLPPCKEFLLPPAMILRPPQPCGTKSKEQGYGKLSSDEDLEIIVDQKQLVNEQQESRPLLSPSIDDFLCETKSEAIARPVTSNTAVLTTGLDLLDLSEPVSQTQTKAKKSEPSSKTSSLKKKADGSDLISTDAEQRGQPLRVPETSSLDLDIQTQLEKWDDVKFHGDRNTKGHPMAERKSSSSRTGS

SEQ ID NO: 29687 - protein, 211 aa, Artificial Sequence
  Synthetic polypeptide
WVYQGFLLLLLPHFLLLPPCKEFLLPPAMILRPPQPCGTKSKEQGYGKLSSDEDLEIIVDQKQGKGSRAADKAVAMVMKEIPREESAEEKPLLTMTSQLVNEQQESRPLLSPSIDDFLCETKSEAIARPVTSNTAVLTTGLDLLDLSEPVSQTQTKAKKSEPSSKTSSLKKKADGSDLISTDAEQRGQPLRVPETSSLDLDIQTQLEKWDD

SEQ ID NO: 29688 - protein, 621 aa, Artificial Sequence
  Synthetic polypeptide
GRAPWLMPVIPALCGAEGFIKDVHEDSLTVVFENNWQPERQVPFNEVRLPPPPDIKKEISEGDEVEVYSRANDQEPCGWWLAKVRMMKGEFYVIEYAACDATYNEIVTFERLRPVNQNKTVKKNTFFKCTVDVPEDLREACANENAHKDFKKAVGACRIFYHPETTQLMILSASEATVKRVNILSDMHLRSIRTKLMLMSRNEEATKHLECTKQLAAAFHEEFVVREDLMGLAIGTHGSNIQQARKVPGVTAIELDEDTGTFRIYGESADAVKKARGFLEFVEDFIQVPRNLVGKVIGKNGKVIQEIVDKSGVVRVRIEGDNENKLPREDGMVPFVFVGTKESIGNVQVLLEYHIAYLKEVEQLRMERLQIDEQLRQIGSRSYSGRGRGRRGPNYTSGYGTNSELSNPSETESERKDELSDWSLAGEDDRDSRHQRDSRRRPGGRGRSVSGGRGRGGPRGGKSSISSVLKDPDSNPYSLLDNTESDQTADTDASESHHSTNRRRRSRRRRTDEDAVLMDGMTESDTASVNENGLVTVADYISRAESQSRQRNLPRETLAKNKKEMAKDVIEEHGPSEKAINGPTSASGDDISKLQRTPGEEKINTLKEENTQEAAVLNGVS

SEQ ID NO: 29689 - protein, 45 aa, Artificial Sequence
  Synthetic polypeptide
SQHFVGLRDLSKMFMKTPLQLFLKIIGNQNARFHLMKLDYHHHLI

SEQ ID NO: 29690 - protein, 539 aa, Artificial Sequence
  Synthetic polypeptide
GRAPWLMPVIPALCGAEGFIKDVHEDSLTVVFENNWQPERQVPFNEVRLPPPPDIKKEISEGDEVEVYSRANDQEPCGWWLAKVRMMKGEFYVIEYAACDATYNEIVTFERLRPVNQNKTVKKNTFFKCTVDVPEDLREACANENAHKDFKKAVGACRIFYHPETTQLMILSASEATVKRVNILSDMHLRSIRTKLMLMSRNEEATKHLECTKQLAAAFHEEFVVREDLMGLAIGTHGSNIQQARKVPGVTAIELDEDTGTFRIYGESADAVKKARGFLEFVEDFIQVPRNLVGKVIGKNGKVIQEIVDKSGVVRVRIEGDNENKLPREDGMVPFVFVGTKESIGNVQVLLEYHIAYLKEVEQLRMERLQIDEQLRQIGSRSYSGRGRGRRGPNYTSGYGTNSELSNPSETESERKDELSDWSLAGEDDRDSRHQRDSRRRPGGRGRSVSGGRGRGGPRGGKSSISSVLKDPDSNPYSLLDNTESDQTADTDASESHHSTNRRRRSRRRRTDEDAVLMDGMTESDTASVNENGLGKRCD

SEQ ID NO: 29691 - protein, 147 aa, Artificial Sequence
  Synthetic polypeptide
GRAPWLMPVIPALCGAEGFIKDVHEDSLTVVFENNWQPERQVPFNEVRLPPPPDIKKEISEGDEVEVYSRANDQEPCGWWLAKVRMMKGEFYVIEYAACDATYNEIVTFERLRPVNQNKTVKKNTFFKCTVDVPEDLREACANENAH

SEQ ID NO: 29692 - protein, 1212 aa, Artificial Sequence
  Synthetic polypeptide
GGCGAAAGSAAPGGGGAGAAPVGLGADAAGWGRGAGSEAVAAAAGFDPPHQSDTRTIYVANRFPQNGLYTPQKFIDNRIISSKYTVWNFVPKNLFEQFRRVANFYFLIIFLVQLMIDTPTSPVTSGLPLFFVITVTAIKQGYEDWLRHNSDNEVNGAPVYVVRSGGLVKTRSKNIRVGDIVRIAKDEIFPADLVLLSSDRLDGSCHVTTASLDGETNLKTHVAVPETALLQTVANLDTLVAVIECQQPEADLYRFMGRMIITQQMEEIVRPLGPESLLLRGARLKNTKEIFGVAVYTGMETKMALNYKSKSQKRSAVEKSMNTFLIIYLVILISEAVISTILKYTWQAEEKWDEPWYNQKTEHQRNSSKILRFISDFLAFLVLYNFIIPISLYVTVEMQKFLGSFFIGWDLDLYHEESDQKAQVNTSDLNEELGQVEYVFTDKTGTLTENEMQFRECSINGMKYQEINGRLVPEGPTPDSSEGNLSYLSSLSHLNNLSHLTTSSSFRTSPENETELIKEHDLFFKAVSLCHTVQISNVQTDCTGDGPWQSNLAPSQLEYYASSPDEKALVEAAARIGIVFIGNSEETMEVKTLGKLERYKLLHILEFDSDRRRMSVIVQAPSGEKLLFAKGAESSILPKCIGGEIEKTRIHVDEFALKGLRTLCIAYRKFTSKEYEEIDKRIFEARTALQQREEKLAAVFQFIEKDLILLGATAVEDRLQDKVRETIEALRMAGIKVWVLTGDKHETAVSVSLSCGHFHRTMNILELINQKSDSECAEQLRQLARRITEDHVIQHGLVVDGTSLSLALREHEKLFMEVCRNCSAVLCCRMAPLQKAKVIRLIKISPEKPITLAVGDGANDVSMIQEAHVGIGIMGKEGRQAARNSDYAIARFKFLSKLLFVHGHFYYIRIATLVQYFFYKNVCFITPQFLYQFYCLFSQQTLYDSVYLTLYNICFTSLPILIYSLLEQHVDPHVLQNKPTLYRDISKNRLLSIKTFLYWTILGFSHAFIFFFGSYLLIGKDTSLLGNGQMFGNWTFGTLVFTVMVITVTVKMALETHFWTWINHLVTWGSIIFYFVFSLFYGGILWPFLGSQNMYFVFIQLLSSGSAWFAIILMVVTCLFLDIIKKVFDRHLHPTSTEKAQLTETNAGIKCLDSMCCFPEGEAACASVGRMLERVIGRCSPTHISRSWSASDPFYTNDRSILTLSTMDSSTC

SEQ ID NO: 29693 - protein, 36 aa, Artificial Sequence
  Synthetic polypeptide
DSGPTPRDGDAARGVRQWRRRRVLTHHIRVTQEPST

SEQ ID NO: 29694 - protein, 8 aa, Artificial Sequence
  Synthetic polypeptide
GSGGGGGF

SEQ ID NO: 29695 - protein, 230 aa, Artificial Sequence
  Synthetic polypeptide
GGCGAAAGSAAPGGGGAGAAPVGLGADAAGWGRGAGSEAVAAAAGFDPPHQSDTRTIYVANRFPQNGLYTPQKFIDNRIISSKYTVWNFVPKNLFEQFRRVANFYFLIIFLVQLMIDTPTSPVTSGLPLFFVITVTAIKQGYEDWLRHNSDNEVNGAPVYVVRSGGLVKTRSKNIRVGDIVRIAKDEIFPADLVLLSSDRLDGSCHVTTASLDGETNLKVCLHMFEYCSW

SEQ ID NO: 29696 - protein, 1179 aa, Artificial Sequence
  Synthetic polypeptide
DQEFKTSLANTGFDPPHQSDTRTIYVANRFPQNGLYTPQKFIDNRIISSKYTVWNFVPKNLFEQFRRVANFYFLIIFLVQLMIDTPTSPVTSGLPLFFVITVTAIKQGYEDWLRHNSDNEVNGAPVYVVRSGGLVKTRSKNIRVGDIVRIAKDEIFPADLVLLSSDRLDGSCHVTTASLDGETNLKTHVAVPETALLQTVANLDTLVAVIECQQPEADLYRFMGRMIITQQMEEIVRPLGPESLLLRGARLKNTKEIFGVAVYTGMETKMALNYKSKSQKRSAVEKSMNTFLIIYLVILISEAVISTILKYTWQAEEKWDEPWYNQKTEHQRNSSKILRFISDFLAFLVLYNFIIPISLYVTVEMQKFLGSFFIGWDLDLYHEESDQKAQVNTSDLNEELGQVEYVFTDKTGTLTENEMQFRECSINGMKYQEINGRLVPEGPTPDSSEGNLSYLSSLSHLNNLSHLTTSSSFRTSPENETELIKEHDLFFKAVSLCHTVQISNVQTDCTGDGPWQSNLAPSQLEYYASSPDEKALVEAAARIGIVFIGNSEETMEVKTLGKLERYKLLHILEFDSDRRRMSVIVQAPSGEKLLFAKGAESSILPKCIGGEIEKTRIHVDEFALKGLRTLCIAYRKFTSKEYEEIDKRIFEARTALQQREEKLAAVFQFIEKDLILLGATAVEDRLQDKVRETIEALRMAGIKVWVLTGDKHETAVSVSLSCGHFHRTMNILELINQKSDSECAEQLRQLARRITEDHVIQHGLVVDGTSLSLALREHEKLFMEVCRNCSAVLCCRMAPLQKAKVIRLIKISPEKPITLAVGDGANDVSMIQEAHVGIGIMGKEGRQAARNSDYAIARFKFLSKLLFVHGHFYYIRIATLVQYFFYKNVCFITPQFLYQFYCLFSQQTLYDSVYLTLYNICFTSLPILIYSLLEQHVDPHVLQNKPTLYRDISKNRLLSIKTFLYWTILGFSHAFIFFFGSYLLIGKDTSLLGNGQMFGNWTFGTLVFTVMVITVTVKMALETHFWTWINHLVTWGSIIFYFVFSLFYGGILWPFLGSQNMYFVFIQLLSSGSAWFAIILMVVTCLFLDIIKKVFDRHLHPTSTEKAQLTETNAGIKCLDSMCCFPEGEAACASVGRMLERVIGRCSPTHISRSWSASDPFYTNDRSILTLSTMDSSTC

SEQ ID NO: 29697 - protein, 43 aa, Artificial Sequence
  Synthetic polypeptide
PVTVAHALWEAEASRSLEIRSSRPAWPTRVLTHHIRVTQEPST

SEQ ID NO: 29698 - protein, 30 aa, Artificial Sequence
  Synthetic polypeptide
RSRWLMHFGKPRRADHLRSGVQDQPGQHGF

SEQ ID NO: 29699 - protein, 197 aa, Artificial Sequence
  Synthetic polypeptide
DQEFKTSLANTGFDPPHQSDTRTIYVANRFPQNGLYTPQKFIDNRIISSKYTVWNFVPKNLFEQFRRVANFYFLIIFLVQLMIDTPTSPVTSGLPLFFVITVTAIKQGYEDWLRHNSDNEVNGAPVYVVRSGGLVKTRSKNIRVGDIVRIAKDEIFPADLVLLSSDRLDGSCHVTTASLDGETNLKVCLHMFEYCSW

SEQ ID NO: 29700 - protein, 700 aa, Artificial Sequence
  Synthetic polypeptide
VCDFGTWVWRQRTMKYTTATGRNITKVLIANRGEIACRVMRTAKKLGVQTVAVYSEADRNSMHVDMADEAYSIGPAPSQQSYLSMEKIIQVAKTSAAQAIHPGCGFLSENMEFAELCKQEGIIFIGPPPSAIRDMGIKSTSKSIMAAAGVPVVEGYHGEDQSDQCLKEHARRIGYPVMIKAVRGGGGKGMRIVRSEQEFQEQLESARREAKKSFNDDAMLIEKFVDTPRHVEVQVFGDHHGNAVYLFERDCSVQRRHQKIIEEAPAPGIKSEVRKKLGEAAVRAAKAVNYVGAGTVEFIMDSKHNFCFMEMNTRLQVEHPVTEMITGTDLVEWQLRIAAGEKIPLSQEEITLQGHAFEARIYAEDPSNNFMPVAGPLVHLSTPRADPSTRIETGVRQGDEVSVHYDPMIAKLVVWAADRQAALTKLRYSLRQYNIVGLHTNIDFLLNLSGHPEFEAGNVHTDFIPQHHKQLLLSRKAAAKESLCQAALGLILKEKAMTDTFTLQAHDQFSPFSSSSGRRLNISYTRNMTLKDGKNNVAIAVTYNHDGSYSMQIEDKTFQVLGNLYSEGDCTYLKCSVNGVASKAKLIILENTIYLFSKEGSIEIDIPVPKYLSSVSSQETQGGPLAPMTGTIEKVFVKAGDKVKAGDSLMVMIAMKMEHTIKSPKDGTVKKVFYREGAQANRHTPLVEFEEEESDKRESE

SEQ ID NO: 29701 - protein, 17 aa, Artificial Sequence
  Synthetic polypeptide
LLTRCVTLGHGCGGKEP

SEQ ID NO: 29702 - protein, 51 aa, Artificial Sequence
  Synthetic polypeptide
LWDMGVEAKNHEVHNSHRKKHYQGPHCKQRRNCLQGDAHSQKTGCTDCGGL

SEQ ID NO: 29703 - protein, 22 aa, Artificial Sequence
  Synthetic polypeptide
VCDFGTWVWRQRTMKYTTATGR

SEQ ID NO: 29704 - protein, 20 aa, Artificial Sequence
  Synthetic polypeptide
LWDMGVEAKNHEVHNSHRQM

SEQ ID NO: 29705 - protein, 36 aa, Artificial Sequence
  Synthetic polypeptide
VCDFGTWVWRQRTMKYTTATGYPSRMRFSLRKHGIC

SEQ ID NO: 29706 - protein, 34 aa, Artificial Sequence
  Synthetic polypeptide
LWDMGVEAKNHEVHNSHRLSIQDAVFSQKTWNLL

SEQ ID NO: 29707 - protein, 573 aa, Artificial Sequence
  Synthetic polypeptide
VCDFGTWVWRQRTMKYTTATDEAYSIGPAPSQQSYLSMEKIIQVAKTSAAQAIHPGCGFLSENMEFAELCKQEGIIFIGPPPSAIRDMGIKSTSKSIMAAAGVPVVEGYHGEDQSDQCLKEHARRIGYPVMIKAVRGGGGKGMRIVRSEQEFQEQLESARREAKKSFNDDAMLIEKFVDTPRHVEVQVFGDHHGNAVYLFERDCSVQRRHQKIIEEAPAPGIKSEVRKKLGEAAVRAAKAVNYVGAGTVEFIMDSKHNFCFMEMNTRLQVEHPVTEMITGTDLVEWQLRIAAGEKIPLSQEEITLQGHAFEARIYAEDPSNNFMPVAGPLVHLSTPRADPSTRIETGVRQGDEVSVHYDPMIAKLVVWAADRQAALTKLRYSLRQYNIVGLHTNIDFLLNLSGHPEFEAGNVHTDFIPQHHKQLLLSRKAAAKESLCQAALGLILKEKAMTDTFTLQAHDQFSPFSSSSGRRLNISYTRNMTLKDGKNNVAIAVTYNHDGSYSMQIEDKTFQVLGNLYSEGDCTYLKCSVNGVASKAKLIILENTIYLFSKEGSIEIDIPVPKYLSSVSSQET

SEQ ID NO: 29708 - protein, 18 aa, Artificial Sequence
  Synthetic polypeptide
LWDMGVEAKNHEVHNSHR

SEQ ID NO: 29709 - protein, 87 aa, Artificial Sequence
  Synthetic polypeptide
VCDFGTWVWRQRTMKYTTATGRNITKVLIANRGEIACRVMRTAKKLGVQTVAVYSEADRNSMHVDMQDDLDFTEKIKLRFLPQNLLT

SEQ ID NO: 29710 - protein, 47 aa, Artificial Sequence
  Synthetic polypeptide
GLPSHVELNFARWQSNESKSISRNQRLFSTYCSSNSTGHKKTCPATS

SEQ ID NO: 29711 - protein, 418 aa, Artificial Sequence
  Synthetic polypeptide
EVPFTSHHDSEASPAMWNLILHDGSQMRAKAFPETRDYSQPTAAATVQDIKKPVQQPAKQAPHQTLAARFMDGHITFQTAATVKIPTTTPATTKNTATTSPITYTLVTTQATPNNSHTAPPVTEVTVGPSLAPYSLPPTITPPAHTTGTSSSTVSHTTGNTTQPSNQTTLPATLSIALHKSTTGQKPVQPTHAPGTTAAAHNTTRTAAPASTVPGPTLAPQPSSVKTGIYQVLNGSRLCIKAEMGIQLIVQDKESVFSPRRYFNIDPNATQASGNCGTRKSNLLLNFQGGFVNLTFTKDEESYYISEVGAYLTVSDPETIYQGIKHAVVMFQTAVGHSFKCVSEQSLQLSAHLQVKTTDVQLQAFDFEDDHFGNVDECSSDYTIVLPVIGAIVVGLCLMGMGVYKIRLRCQSSGYQRI

SEQ ID NO: 29712 - protein, 182 aa, Artificial Sequence
  Synthetic polypeptide
EVPFTSHHDSEASPAMWNLILHDGSQMRAKAFPETRDYSQPTAAATVQDIKKPVQQPAKQAPHQTLAARFMDGHITFQTAATVKIPTTTPATTKNTATTSPITYTLVTTQATPNNSHTAPPVTEVTVGPSLAPYSLPPTITPPAHTTGTSSSTVSHTTGNTTQPSNQTTLPATLSIALHKST

SEQ ID NO: 29713 - protein, 241 aa, Artificial Sequence
  Synthetic polypeptide
PRGGKETQHDVWKYNSSINKWIQIEYLNIGRWRHKMVVLGGKVYVIGGFDGLQRINNVETYDPFHNCWSEAAPLLVHVSSFAATSHKKKLYVIGGGPNGKLATDKTQCYDPSTNKWSLKAAMPVEAKCINAVSFRDRIYVVGGAMRALYAYSPLEDSWCLVTQLSHERASCGIAPCNNRLYITGGRDEKNEVIATVLCWDPEAQKLTEECVLPRGVSHHGSVTIRKSYTHIRRIVPGAVSV

SEQ ID NO: 29714 - protein, 45 aa, Artificial Sequence
  Synthetic polypeptide
TWSSMRGNTIAPVPSTVPDLGVAKKHSMMFGNIILRSTSGFRLSI

SEQ ID NO: 29715 - protein, 17 aa, Artificial Sequence
  Synthetic polypeptide
PLYLALCLTSGWQRNTA

SEQ ID NO: 29716 - protein, 29 aa, Artificial Sequence
  Synthetic polypeptide
SPFRAVIIKQEREKGPTQCLAYRPCSATI

SEQ ID NO: 29717 - protein, 13 aa, Artificial Sequence
  Synthetic polypeptide
HIGHVLQRFKGKV

SEQ ID NO: 29718 - protein, 209 aa, Artificial Sequence
  Synthetic polypeptide
GQSWWLTPVIPALWEAKVYVVGGYDGQNRLSSVECYDSFSNRWTEVAPLKEAVSSPAVTSCVGKLFVIGGGPDDNTCSDKVQSYDPETNSWLLRAAIPIAKRCITAVSLNNLIYVAGGLTKAIYCYDPVEDYWMHVQNTFSRQENCGMSVCNGKIYILGGRRENGEATDTILCYDPATSIITGVAAMPRPVSYHGCVTIHRYNEKCFKL

SEQ ID NO: 29719 - protein, 23 aa, Artificial Sequence
  Synthetic polypeptide
SQHFGRPRYMLSVAMMGKTDLAA

SEQ ID NO: 29720 - protein, 23 aa, Artificial Sequence
  Synthetic polypeptide
PVVVAHTCNPSTLGGQGICCRWL

SEQ ID NO: 29721 - protein, 146 aa, Artificial Sequence
  Synthetic polypeptide
GQSWWLTPVIPALWEAKVYVVGGYDGQNRLSSVECYDSFSNRWTEVAPLKEAVSSPAVTSCVGKLFVIGGGPDDNTCSDKVQSYDPETNSWLLRAAIPIAKRCITAVSLNNLIYVAGGLTKAIYCYDPVEDYWMHVQNTFSRQVIT

SEQ ID NO: 29722 - protein, 20 aa, Artificial Sequence
  Synthetic polypeptide
LHSSRYMLSVAMMGKTDLAA

SEQ ID NO: 29723 - protein, 14 aa, Artificial Sequence
  Synthetic polypeptide
ESNCTAVGICCRWL

SEQ ID NO: 29724 - protein, 26 aa, Artificial Sequence
  Synthetic polypeptide
VQDFSGGISCSWIELILACRLLEQRR

SEQ ID NO: 29725 - protein, 14 aa, Artificial Sequence
  Synthetic polypeptide
LKFKTSAEELAAAG

SEQ ID NO: 29726 - protein, 1116 aa, Artificial Sequence
  Synthetic polypeptide
LQLDRTYTGLQTLGAETVVDVELHRHSLGEDCIYPQSSESDISDAPPSLPLTIPAPVKASSPIKQSHEPVPDTSVEKGFPASTEAERHTPFYALPSSLERTPTKMTTSQKVTFCSHGNSAFQPIASSCKIVPQSQVPNPESPGKSFQPITMSCKIVSGSPISTPSPSPLPRTPTSTPVHVKQGTAGSVINNPYVIMDKQPGQVIGATTPSTGSPTNKISTASQVSQGTGSPVPKIHGSSFVTSTVKQEDSLFASMPPLCPIGSHPKVQSPKPITGGLGAFTKVIIKQEPGEAPHVPATGAASQSPLPQYVTVKGGHMIAVSPQKQVITPGEGIAQSAKVQPSKVVGVPVGSALPSTVKQAVAISGGQILVAKASSSVSKAVGPKQVVTQGVAKAIVSGGGGTIVAQPVQTLTKAQVTAAGPQKSGSQGSVMATLQLPATNLANLANLPPGTKLYLTTNSKNPSGKGKLLLIPQGAILRATNNANLQSGSAASGGSGAGGGGGGGGGGGSGSGGGGSTGGGGGTAGGGTQSTAGPGGISQHLTYTSYILKQTPQGTFLVGQPSPQTSGKQLTTGSVVQGTLGVSTSSAQGQQTLKVISGQKTTLFTQAAHGGQASLMKISDSTLKTVPATSQLSKPGTTMLRVAGGVITTATSPAVALSANGPAQQSEGMAPVSSSTVSSVTKTSGQQQVCVSQATVGTCKAATPTVVSATSLVPTPNPISGKATVSGLLKIHSSQSSPQQAVLTIPSQLKPLSVNTSGGVQTILMPVNKVVQSFSTSKPPAILPVAAPTPVVPSSAPAAVAKVKTEPETPGPSCLSQEGQTAVKTEESSELGNYVIKIDHLETIQQLLTAVVKKIPLITAKSEDASCFSAKSVEQYYGWNIGKRRAAEWQRAMTMRKVLQEILEKNPRFHHLTPLKTKHIAHWCRCHGYTPPDPESLRNDGDSIEDVLTQIDSEPECPSSFSSADNLCRKLEDLQQFQKREPENEEEVDILSLSEPVKINIKKEQEEKQEEVKFYLPPTPGSEFIGDVTQKIGITLQPVALHRNVYASVVEDMILKATEQLVNDILRQALAVGYQTASHNRIPKEITVSNIHQAICNIPFLDFLTNKHMGILNEDQ

SEQ ID NO: 29727 - protein, 68 aa, Artificial Sequence
  Synthetic polypeptide
GQAWWLMPIIPALWEAKVGGSPEVRSSRAAWLTWRNPSPLKIEKLARKSYKQDLHGFSGLPRNRFPCS

SEQ ID NO: 29728 - protein, 906 aa, Artificial Sequence
  Synthetic polypeptide
PGSPTNKISTASQVSQGTGSPVPKIHGSSFVTSTVKQEDSLFASMPPLCPIGSHPKVQSPKPITGGLGAFTKVIIKQEPGEAPHVPATGAASQSPLPQYVTVKGGHMIAVSPQKQVITPGEGIAQSAKVQPSKVVGVPVGSALPSTVKQAVAISGGQILVAKASSSVSKAVGPKQVVTQGVAKAIVSGGGGTIVAQPVQTLTKAQVTAAGPQKSGSQGSVMATLQLPATNLANLANLPPGTKLYLTTNSKNPSGKGKLLLIPQGAILRATNNANLQSGSAASGGSGAGGGGGGGGGGGSGSGGGGSTGGGGGTAGGGTQSTAGPGGISQHLTYTSYILKQTPQGTFLVGQPSPQTSGKQLTTGSVVQGTLGVSTSSAQGQQTLKVISGQKTTLFTQAAHGGQASLMKISDSTLKTVPATSQLSKPGTTMLRVAGGVITTATSPAVALSANGPAQQSEGMAPVSSSTVSSVTKTSGQQQVCVSQATVGTCKAATPTVVSATSLVPTPNPISGKATVSGLLKIHSSQSSPQQAVLTIPSQLKPLSVNTSGGVQTILMPVNKVVQSFSTSKPPAILPVAAPTPVVPSSAPAAVAKVKTEPETPGPSCLSQEGQTAVKTEESSELGNYVIKIDHLETIQQLLTAVVKKIPLITAKSEDASCFSAKSVEQYYGWNIGKRRAAEWQRAMTMRKVLQEILEKNPRFHHLTPLKTKHIAHWCRCHGYTPPDPESLRNDGDSIEDVLTQIDSEPECPSSFSSADNLCRKLEDLQQFQKREPENEEEVDILSLSEPVKINIKKEQEEKQEEVKFYLPPTPGSEFIGDVTQKIGITLQPVALHRNVYASVVEDMILKATEQLVNDILRQALAVGYQTASHNRIPKEITVSNIHQAICNIPFLDFLTNKHMGILNEDQ

SEQ ID NO: 29729 - protein, 53 aa, Artificial Sequence
  Synthetic polypeptide
GQEFESSLANMAKPISTKNRKISQEVLQTRSPRLLRSPKEQVPLFLKFMEVVL

SEQ ID NO: 29730 - protein, 66 aa, Artificial Sequence
  Synthetic polypeptide
TWEAEVALSRDRVSLGDRARLHLKKTVKDSLQSVQSAAGRPDDSQPAQTTQRKHIWRGADDPDACE

SEQ ID NO: 29731 - protein, 406 aa, Artificial Sequence
  Synthetic polypeptide
AEIASAWATERDSISKRLLKIHSSQSSPQQAVLTIPSQLKPLSVNTSGGVQTILMPVNKVVQSFSTSKPPAILPVAAPTPVVPSSAPAAVAKVKTEPETPGPSCLSQEGQTAVKTEESSELGNYVIKIDHLETIQQLLTAVVKKIPLITAKSEDASCFSAKSVEQYYGWNIGKRRAAEWQRAMTMRKVLQEILEKNPRFHHLTPLKTKHIAHWCRCHGYTPPDPESLRNDGDSIEDVLTQIDSEPECPSSFSSADNLCRKLEDLQQFQKREPENEEEVDILSLSEPVKINIKKEQEEKQEEVKFYLPPTPGSEFIGDVTQKIGITLQPVALHRNVYASVVEDMILKATEQLVNDILRQALAVGYQTASHNRIPKEITVSNIHQAICNIPFLDFLTNKHMGILNEDQ

SEQ ID NO: 29732 - protein, 40 aa, Artificial Sequence
  Synthetic polypeptide
SQHFGRPRQENRLNLGGRGCTKPRSRQPGRQSETPSQKDC

SEQ ID NO: 29733 - protein, 120 aa, Artificial Sequence
  Synthetic polypeptide
GWMQWFTPVIPALWEAKSGAIMTVLAAVCTKIPEGRLAIIFLPMFTFTAGNALKAIIAMDTAGMILGWKFFDHAAHLGGALFGIWYVTYGHELIWKNREPLVKIWHEIRTNGPKKGGGSK

SEQ ID NO: 29734 - protein, 12 aa, Artificial Sequence
  Synthetic polypeptide
SQHFGRPSLVPS

SEQ ID NO: 29735 - protein, 29 aa, Artificial Sequence
  Synthetic polypeptide
MDAVVYTCNPSTLGGQVWCHHDSPRSCLH

SEQ ID NO: 29736 - protein, 36 aa, Artificial Sequence
  Synthetic polypeptide
GWMQWFTPVIPALWEAKSGAIMTVLAAVCTKIPEGR

SEQ ID NO: 29737 - protein, 39 aa, Artificial Sequence
  Synthetic polypeptide
GQPWWLTPVIPTLWEAEVVGSLEVRSSRPAWPTCFLPLY

SEQ ID NO: 29738 - protein, 30 aa, Artificial Sequence
  Synthetic polypeptide
SQHFGRLRWLDHLRSGVQDQPGQHASFHCI

SEQ ID NO: 29739 - protein, 16 aa, Artificial Sequence
  Synthetic polypeptide
GQEFKTSLANMLPSTV

SEQ ID NO: 29740 - protein, 28 aa, Artificial Sequence
  Synthetic polypeptide
AMIVPLHSPDPAGNNNQPSKPRSPLVIV

SEQ ID NO: 29741 - protein, 213 aa, Artificial Sequence
  Synthetic polypeptide
LCHCTLQTLLETTTSLLNQDLHWSLCNLRASVTRGLNPKQDYCSICLQQYKRRQEMADEIIVFSCGHLYHSFCLQNKECTVEFEGQTRWTCYKCSSSNKVGKLSENSSEIKKGRITPSQVKMSPSYHQSKGDPTAKKGTSEPVLDPQQIQAFDQLCRLYRGSSRLALLTELSQNRSSESYRPFSGSQSAPAFNSIFQNENFQLQLIPPPVTED

SEQ ID NO: 29742 - protein, 27 aa, Artificial Sequence
  Synthetic polypeptide
AQELEAAVSYDCATALSRPCWKQQPAF

SEQ ID NO: 29743 - protein, 64 aa, Artificial Sequence
  Synthetic polypeptide
TSGISPACTQSILPPCEEGACFSFAFCHDCKFPEAFPAMQNCMRWIFVNTMSGSLSGRIIYTWN

SEQ ID NO: 29744 - protein, 51 aa, Artificial Sequence
  Synthetic polypeptide
WFYKHLAFPLLALNPSCRPVKKVPASPLPSAMIVNFLRPSQPCKTACAGYS

SEQ ID NO: 29745 - protein, 511 aa, Artificial Sequence
  Synthetic polypeptide
GLPSHAKLHALDIREHYERKLERANNLYMELSAIMLQLEMREKELIKREQAVEKKYPGTYKRHPVRPIIHPNAMEKLMKRKGVPHKSGMQTKRPDLLRSEGIPTTEVAPTASPLSGSPKMSTSSSKSRYRSKPRHRRGNSRGSHSDFAAILKNQPAQENSPHPTYLHQAQSQYPSLHHHNSLQQQYQQPPPAMSQSHHPRLNMHGQDIATCANNLRYFGPAAALRSPLSNHAQRQLPGSSPDLISTAMAADCWRSSEPDKGQAGPWGCCQADAYDPCLQCRPEQYGSLDIPSAEPVGRSPDLSKSPAHNPLLENAQSSEKTEENEFSGCRSESSLGTSHLGTPPALPRKTRPLQKSGDDSSEEEEGEVDSEVEFPRRQRPHRCISSCQSYSTFSSENFSVSDGEEGNTSDHSNSPDELADKLEDRLAEKLDDLLSQTPEIPIDISSHSDGLSDKECAVRRVKTQMSLGKLCVEERGYENPMQFEESDCDSSDGECSDATVRTNKHYSSATW

SEQ ID NO: 29746 - protein, 46 aa, Artificial Sequence
  Synthetic polypeptide
GLPSHAKLHALDIREHYERKLERANNLYMELSAIMLQLEMREKELI

SEQ ID NO: 29747 - protein, 25 aa, Artificial Sequence
  Synthetic polypeptide
LCFLRSPSRASCTACGSGTYDGGPA

SEQ ID NO: 29748 - protein, 21 aa, Artificial Sequence
  Synthetic polypeptide
GLPAVLPVQLVEVVPMMAGLH

SEQ ID NO: 29749 - protein, 56 aa, Artificial Sequence
  Synthetic polypeptide
VLMRSDGFKVGGTFPFAFSLLPPCEDMLASSSPSAMIVFPEVSQPCFLYSLWKWYL

SEQ ID NO: 29750 - protein, 350 aa, Artificial Sequence
  Synthetic polypeptide
AGRGGLRLQSQHFGRPRQMDHLRSGVQDQPGEHDRLVETRGPLCSLRSEKRCSKGKITDTETMVGIRFENESRRGYQLEPDLSEEVSARLRLGSGSNGLLRRKVSIIETKEKNCSGKERDRRTDDLLELTEDMEKEISNALGHGPQDEILSSAFKLRITRGDIQTLKNYHWLNDEVINFYMNLLVERNKKQGYPALHVFSTFFYPKLKSGGYQAVKRWTKGVNLFEQEIILVPIHRKVHWSLVVIDLRKKCLKYLDSMGQKGHRICEILLQYLQDESKTKRNSDLNLLEWTHHSMKPHEIPQQLNGSDCGMFTCKYADYISRDKPITFTQHQMPLFRKKMVWEILHQQLL

SEQ ID NO: 29751 - protein, 23 aa, Artificial Sequence
  Synthetic polypeptide
GQEFKTSLANMIDLLKQGDLYVH

SEQ ID NO: 29752 - protein, 330 aa, Artificial Sequence
  Synthetic polypeptide
QKAEEIPLKILAHNGLVGRLIGKEGRNLKKIEHETGTKITISSLQDLSIYNPERTITVKGTVEACASAEIEIMKKLREAFENDMLAVNQQANLIPGLNLSALGIFSTGLSVLSPPAGPRGAPPAAPYHPFTTHSGYFSSLYPHHQFGPFPHHHSYPEQEIVNLFIPTQAVGAIIGKKGAHIKQLARFAGASIKIAPAEGPDVSERMVIITGPPEAQFKAQGRIFGKLKEENFFNPKEEVKLEAHIRVPSSTAGRVIGKGGKTVNELQNLTSAEVIVPRDQTPDENEEVIVRIIGHFFASQTAQRKIREIVQQVKQQEQKYPQGVASQRSK

SEQ ID NO: 29753 - protein, 30 aa, Artificial Sequence
  Synthetic polypeptide
RKTGRKERRDKKATRHTENNENDKKPKRFL

SEQ ID NO: 29754 - protein, 59 aa, Artificial Sequence
  Synthetic polypeptide
KSTTHKGRQEERKEGTKKLLDIQKTMKMTKSRRDSSENLGTQWLGWKTDWKRRQKFEEN

SEQ ID NO: 29755 - protein, 287 aa, Artificial Sequence
  Synthetic polypeptide
QKAEEIPLKILAHNGLVGRLIGKEGRNLKKIEHETGTKITISSLQDLSIYNPERTITVKGTVEACASAEIEIMKKLREAFENDMLAVNTHSGYFSSLYPHHQFGPFPHHHSYPEQEIVNLFIPTQAVGAIIGKKGAHIKQLARFAGASIKIAPAEGPDVSERMVIITGPPEAQFKAQGRIFGKLKEENFFNPKEEVKLEAHIRVPSSTAGRVIGKGGKTVNELQNLTSAEVIVPRDQTPDENEEVIVRIIGHFFASQTAQRKIREIVQQVKQQEQKYPQGVASQRSK

SEQ ID NO: 29756 - protein, 2 aa, Artificial Sequence
  Synthetic polypeptide
HG

SEQ ID NO: 29757 - protein, 15 aa, Artificial Sequence
  Synthetic polypeptide
GQEFETSLANMGRYP

SEQ ID NO: 29758 - protein, 402 aa, Artificial Sequence
  Synthetic polypeptide
LIPVIPALWEAEAGGSSEVRSSRPAWLTWVDIHRKENSGAAEKPVTIHATPEGTSEACRMILEIMQKEADETKLAEEIPLKILAHNGLVGRLIGKEGRNLKKIEHETGTKITISSLQDLSIYNPERTITVKGTVEACASAEIEIMKKLREAFENDMLAVNQQANLIPGLNLSALGIFSTGLSVLSPPAGPRGAPPAAPYHPFTTHSGYFSSLYPHHQFGPFPHHHSYPEQEIVNLFIPTQAVGAIIGKKGAHIKQLARFAGASIKIAPAEGPDVSERMVIITGPPEAQFKAQGRIFGKLKEENFFNPKEEVKLEAHIRVPSSTAGRVIGKGGKTVNELQNLTSAEVIVPRDQTPDENEEVIVRIIGHFFASQTAQRKIREIVQQVKQQEQKYPQGVASQRSK

SEQ ID NO: 29759 - protein, 359 aa, Artificial Sequence
  Synthetic polypeptide
LIPVIPALWEAEAGGSSEVRSSRPAWLTWVDIHRKENSGAAEKPVTIHATPEGTSEACRMILEIMQKEADETKLAEEIPLKILAHNGLVGRLIGKEGRNLKKIEHETGTKITISSLQDLSIYNPERTITVKGTVEACASAEIEIMKKLREAFENDMLAVNTHSGYFSSLYPHHQFGPFPHHHSYPEQEIVNLFIPTQAVGAIIGKKGAHIKQLARFAGASIKIAPAEGPDVSERMVIITGPPEAQFKAQGRIFGKLKEENFFNPKEEVKLEAHIRVPSSTAGRVIGKGGKTVNELQNLTSAEVIVPRDQTPDENEEVIVRIIGHFFASQTAQRKIREIVQQVKQQEQKYPQGVASQRSK

SEQ ID NO: 29760 - protein, 387 aa, Artificial Sequence
  Synthetic polypeptide
SQHFGRLKQGDHLRVDIHRKENSGAAEKPVTIHATPEGTSEACRMILEIMQKEADETKLAEEIPLKILAHNGLVGRLIGKEGRNLKKIEHETGTKITISSLQDLSIYNPERTITVKGTVEACASAEIEIMKKLREAFENDMLAVNQQANLIPGLNLSALGIFSTGLSVLSPPAGPRGAPPAAPYHPFTTHSGYFSSLYPHHQFGPFPHHHSYPEQEIVNLFIPTQAVGAIIGKKGAHIKQLARFAGASIKIAPAEGPDVSERMVIITGPPEAQFKAQGRIFGKLKEENFFNPKEEVKLEAHIRVPSSTAGRVIGKGGKTVNELQNLTSAEVIVPRDQTPDENEEVIVRIIGHFFASQTAQRKIREIVQQVKQQEQKYPQGVASQRSK

SEQ ID NO: 29761 - protein, 22 aa, Artificial Sequence
  Synthetic polypeptide
LIPVIPALWEAEAGGSSEGRYP

SEQ ID NO: 29762 - protein, 344 aa, Artificial Sequence
  Synthetic polypeptide
SQHFGRLKQGDHLRVDIHRKENSGAAEKPVTIHATPEGTSEACRMILEIMQKEADETKLAEEIPLKILAHNGLVGRLIGKEGRNLKKIEHETGTKITISSLQDLSIYNPERTITVKGTVEACASAEIEIMKKLREAFENDMLAVNTHSGYFSSLYPHHQFGPFPHHHSYPEQEIVNLFIPTQAVGAIIGKKGAHIKQLARFAGASIKIAPAEGPDVSERMVIITGPPEAQFKAQGRIFGKLKEENFFNPKEEVKLEAHIRVPSSTAGRVIGKGGKTVNELQNLTSAEVIVPRDQTPDENEEVIVRIIGHFFASQTAQRKIREIVQQVKQQEQKYPQGVASQRSK

SEQ ID NO: 29763 - protein, 28 aa, Artificial Sequence
  Synthetic polypeptide
LLTVSPEGAEMVSVLLTTSHGEAKRASV

SEQ ID NO: 29764 - protein, 478 aa, Artificial Sequence
  Synthetic polypeptide
ALREQRWCLSCSPLAMEKLSGHQFENYSFKISYIPDEEVSSPSPPQRAQRGDHSSREQGHAPGGTSQARQIDFPLRILVPTQFVGAIIGKEGLTIKNITKQTQSRVDIHRKENSGAAEKPVTIHATPEGTSEACRMILEIMQKEADETKLAEEIPLKILAHNGLVGRLIGKEGRNLKKIEHETGTKITISSLQDLSIYNPERTITVKGTVEACASAEIEIMKKLREAFENDMLAVNQQANLIPGLNLSALGIFSTGLSVLSPPAGPRGAPPAAPYHPFTTHSGYFSSLYPHHQFGPFPHHHSYPEQEIVNLFIPTQAVGAIIGKKGAHIKQLARFAGASIKIAPAEGPDVSERMVIITGPPEAQFKAQGRIFGKLKEENFFNPKEEVKLEAHIRVPSSTAGRVIGKGGKTVNELQNLTSAEVIVPRDQTPDENEEVIVRIIGHFFASQTAQRKIREIVQQVKQQEQKYPQGVASQRSK

SEQ ID NO: 29765 - protein, 435 aa, Artificial Sequence
  Synthetic polypeptide
ALREQRWCLSCSPLAMEKLSGHQFENYSFKISYIPDEEVSSPSPPQRAQRGDHSSREQGHAPGGTSQARQIDFPLRILVPTQFVGAIIGKEGLTIKNITKQTQSRVDIHRKENSGAAEKPVTIHATPEGTSEACRMILEIMQKEADETKLAEEIPLKILAHNGLVGRLIGKEGRNLKKIEHETGTKITISSLQDLSIYNPERTITVKGTVEACASAEIEIMKKLREAFENDMLAVNTHSGYFSSLYPHHQFGPFPHHHSYPEQEIVNLFIPTQAVGAIIGKKGAHIKQLARFAGASIKIAPAEGPDVSERMVIITGPPEAQFKAQGRIFGKLKEENFFNPKEEVKLEAHIRVPSSTAGRVIGKGGKTVNELQNLTSAEVIVPRDQTPDENEEVIVRIIGHFFASQTAQRKIREIVQQVKQQEQKYPQGVASQRSK

SEQ ID NO: 29766 - protein, 509 aa, Artificial Sequence
  Synthetic polypeptide
PKEVIQKNTQSSDVCNKVFAFSLVNTDTETAVVNVTYATREEAKIAMEKLSGHQFENYSFKISYIPDEEVSSPSPPQRAQRGDHSSREQGHAPGGTSQARQIDFPLRILVPTQFVGAIIGKEGLTIKNITKQTQSRVDIHRKENSGAAEKPVTIHATPEGTSEACRMILEIMQKEADETKLAEEIPLKILAHNGLVGRLIGKEGRNLKKIEHETGTKITISSLQDLSIYNPERTITVKGTVEACASAEIEIMKKLREAFENDMLAVNQQANLIPGLNLSALGIFSTGLSVLSPPAGPRGAPPAAPYHPFTTHSGYFSSLYPHHQFGPFPHHHSYPEQEIVNLFIPTQAVGAIIGKKGAHIKQLARFAGASIKIAPAEGPDVSERMVIITGPPEAQFKAQGRIFGKLKEENFFNPKEEVKLEAHIRVPSSTAGRVIGKGGKTVNELQNLTSAEVIVPRDQTPDENEEVIVRIIGHFFASQTAQRKIREIVQQVKQQEQKYPQGVASQRSK

SEQ ID NO: 29767 - protein, 18 aa, Artificial Sequence
  Synthetic polypeptide
FRRTHNPVMFATKFLPFP

SEQ ID NO: 29768 - protein, 42 aa, Artificial Sequence
  Synthetic polypeptide
CLQQSFCLFPSQHRHRNRRCQRHICNKRRSKNSHGEAKRASV

SEQ ID NO: 29769 - protein, 554 aa, Artificial Sequence
  Synthetic polypeptide
SQLLGRLRQENHLSLGGRGCSAPRSHHCTPAWMTESRKIQIRNIPPHLQWEVLDGLLAQYGTVENVEQVNTDTETAVVNVTYATREEAKIAMEKLSGHQFENYSFKISYIPDEEVSSPSPPQRAQRGDHSSREQGHAPGGTSQARQIDFPLRILVPTQFVGAIIGKEGLTIKNITKQTQSRVDIHRKENSGAAEKPVTIHATPEGTSEACRMILEIMQKEADETKLAEEIPLKILAHNGLVGRLIGKEGRNLKKIEHETGTKITISSLQDLSIYNPERTITVKGTVEACASAEIEIMKKLREAFENDMLAVNQQANLIPGLNLSALGIFSTGLSVLSPPAGPRGAPPAAPYHPFTTHSGYFSSLYPHHQFGPFPHHHSYPEQEIVNLFIPTQAVGAIIGKKGAHIKQLARFAGASIKIAPAEGPDVSERMVIITGPPEAQFKAQGRIFGKLKEENFFNPKEEVKLEAHIRVPSSTAGRVIGKGGKTVNELQNLTSAEVIVPRDQTPDENEEVIVRIIGHFFASQTAQRKIREIVQQVKQQEQKYPQGVASQRSK

SEQ ID NO: 29770 - protein, 56 aa, Artificial Sequence
  Synthetic polypeptide
QRAGKFRFETSLLTCSGRCWMDFWLNMGQWRMWNKSTQTQKPPLSTSHMQQEKKQK

SEQ ID NO: 29771 - protein, 119 aa, Artificial Sequence
  Synthetic polypeptide
TPISTKNAKISQVWWHMPVIPATWEAEAGESLEPGRQRLQCAKVTPLHSSLDDREQENSDSKHPSSPAVGGVGWTFGSIWDSGECGTSQHRHRNRRCQRHICNKRRSKNSHGEAKRASV

SEQ ID NO: 29772 - protein, 560 aa, Artificial Sequence
  Synthetic polypeptide
SQLLGRLRQENHLSLGGRGCSAPRSHHCTPAWMTESRKIQIRNIPPHLQWEVLDGLLAQYGTVENVEQVFAFSLVNTDTETAVVNVTYATREEAKIAMEKLSGHQFENYSFKISYIPDEEVSSPSPPQRAQRGDHSSREQGHAPGGTSQARQIDFPLRILVPTQFVGAIIGKEGLTIKNITKQTQSRVDIHRKENSGAAEKPVTIHATPEGTSEACRMILEIMQKEADETKLAEEIPLKILAHNGLVGRLIGKEGRNLKKIEHETGTKITISSLQDLSIYNPERTITVKGTVEACASAEIEIMKKLREAFENDMLAVNQQANLIPGLNLSALGIFSTGLSVLSPPAGPRGAPPAAPYHPFTTHSGYFSSLYPHHQFGPFPHHHSYPEQEIVNLFIPTQAVGAIIGKKGAHIKQLARFAGASIKIAPAEGPDVSERMVIITGPPEAQFKAQGRIFGKLKEENFFNPKEEVKLEAHIRVPSSTAGRVIGKGGKTVNELQNLTSAEVIVPRDQTPDENEEVIVRIIGHFFASQTAQRKIREIVQQVKQQEQKYPQGVASQRSK

SEQ ID NO: 29773 - protein, 40 aa, Artificial Sequence
  Synthetic polypeptide
QRAGKFRFETSLLTCSGRCWMDFWLNMGQWRMWNKFLPFP

SEQ ID NO: 29774 - protein, 125 aa, Artificial Sequence
  Synthetic polypeptide
TPISTKNAKISQVWWHMPVIPATWEAEAGESLEPGRQRLQCAKVTPLHSSLDDREQENSDSKHPSSPAVGGVGWTFGSIWDSGECGTSFCLFPSQHRHRNRRCQRHICNKRRSKNSHGEAKRASV

SEQ ID NO: 29775 - protein, 511 aa, Artificial Sequence
  Synthetic polypeptide
SQLLGRLRQENHLSLGGRGCSAPRSHHCTPAWMTESRKIQIRNIPPHLQWEVLDGLLAQYGTVENVEQVNTDTETAVVNVTYATREEAKIAMEKLSGHQFENYSFKISYIPDEEVSSPSPPQRAQRGDHSSREQGHAPGGTSQARQIDFPLRILVPTQFVGAIIGKEGLTIKNITKQTQSRVDIHRKENSGAAEKPVTIHATPEGTSEACRMILEIMQKEADETKLAEEIPLKILAHNGLVGRLIGKEGRNLKKIEHETGTKITISSLQDLSIYNPERTITVKGTVEACASAEIEIMKKLREAFENDMLAVNTHSGYFSSLYPHHQFGPFPHHHSYPEQEIVNLFIPTQAVGAIIGKKGAHIKQLARFAGASIKIAPAEGPDVSERMVIITGPPEAQFKAQGRIFGKLKEENFFNPKEEVKLEAHIRVPSSTAGRVIGKGGKTVNELQNLTSAEVIVPRDQTPDENEEVIVRIIGHFFASQTAQRKIREIVQQVKQQEQKYPQGVASQRSK

SEQ ID NO: 29776 - protein, 64 aa, Artificial Sequence
  Synthetic polypeptide
KFSRLWWCTPVVPATGRGGGGGGGGWRAAQDRDQIYRRRSPSPYYSRGGYRSRSRSRSYSPRRY

SEQ ID NO: 29777 - protein, 53 aa, Artificial Sequence
  Synthetic polypeptide
SQLLAEEEVEEEEDGELPKTGIRFIEGGHLLLTIVVEDTDHVPDLDHTHLVAI

SEQ ID NO: 29778 - protein, 33 aa, Artificial Sequence
  Synthetic polypeptide
PVVVVHACSPSYWQRRRWRRRRMESCPRQGSDL

SEQ ID NO: 29779 - protein, 63 aa, Artificial Sequence
  Synthetic polypeptide
KFSRLWWCTPVVPATGRGGGGGGGGWRAAQDRDQIYRRSPSPYYSRGGYRSRSRSRSYSPRRY

SEQ ID NO: 29780 - protein, 52 aa, Artificial Sequence
  Synthetic polypeptide
SQLLAEEEVEEEEDGELPKTGIRFIGGHLLLTIVVEDTDHVPDLDHTHLVAI

SEQ ID NO: 29781 - protein, 18 aa, Artificial Sequence
  Synthetic polypeptide
TSKFGYHREALPQRQFVQ

SEQ ID NO: 29782 - protein, 229 aa, Artificial Sequence
  Synthetic polypeptide
KPKRTGLGELSDSLIGGGSCRAAQPGRAWKLCIPSPIPCSTHLFICILCSILDDKPVNLVTTEKRFLKDSLYNEGILIVWDPSVYHSDIPKWYQNPDYNFFNNYKTYRKLHPNQPFYILKPQMPWELWDILQEISPEEIQPNPPSSGMLGIIIMMTLCDQVDIYEFLPSKRKTDVCYYYQKFFDSACTMGAYHPLLYEKNLVKHLNQGTDEDIYLLGKATLPGFRTIHC

SEQ ID NO: 29783 - protein, 75 aa, Artificial Sequence
  Synthetic polypeptide
KPKRTGLGELSDSLIGGGSCRAAQPGRAWKLCIPSPIPCSTHLFICILCSILDDKPVNLVTTEKRFLKDSLYNEG

SEQ ID NO: 29784 - protein, 106 aa, Artificial Sequence
  Synthetic polypeptide
KPKRTGLGELSDSLIGGGSCRAAQPGRAWKLCIPSPIPCSTHLFICILCSILDDKPVNLVTTEKRFLKDSLYNEGILIVWDPSVYHSDIPKWYQNPDYNFFNNYKT

SEQ ID NO: 29785 - protein, 73 aa, Artificial Sequence
  Synthetic polypeptide
KPKRTGLGELSDSLIGGGSCRAAQPGRAWKLCIPSPIPCSTHLFICILCSILDDKPVNLVTTEKRFLKDSLYN

SEQ ID NO: 29786 - protein, 169 aa, Artificial Sequence
  Synthetic polypeptide
KPKRTGLGELSDSLIGGGSCRAAQPGRAWKLCIPSPIPCSTHLFICILCSILDDKPVNLVTTEKRFLKDSLYNEGILIVWDPSVYHSDIPKWYQNPDYNFFNNYKTYRKLHPNQPFYILKPQMPWELWDILQEISPEEIQPNPPSSGMLGIIIMMTLCDQVDIYEFLPS

SEQ ID NO: 29787 - protein, 12 aa, Artificial Sequence
  Synthetic polypeptide
NHGAAVLAVEKT

SEQ ID NO: 29788 - protein, 78 aa, Artificial Sequence
  Synthetic polypeptide
CIKGCQVQERDKVSEDRTRTMGPLCSLWRKRSWGRYRMHCHGSGLPRGLFYLHHLQQQAPRAAILCCGKESILRALLH

SEQ ID NO: 29789 - protein, 231 aa, Artificial Sequence
  Synthetic polypeptide
QTWKQCLLNFDVLKDVKSKREIRSQKTELEPWGRCARCGENVVGEGTGCTAMDQVFHVDCFTCIICNNKLRGQPFYAVEKKAYCEPCYINTLEQCNVCSKPIMERILRATGKAYHPHCFTCVMCHRSLDGIPFTVDAGGLIHCIEDFHKKFAPRCSVCKEPIMPAPGQEETVRIVALDRDFHVHCYRCEDCGGLLSEGDNQGCYPLDGHILCKTCNSARIRVLTAKASTDL

SEQ ID NO: 29790 - protein, 18 aa, Artificial Sequence
  Synthetic polypeptide
AGNRETGQPSQRWGNLVS

SEQ ID NO: 29791 - protein, 42 aa, Artificial Sequence
  Synthetic polypeptide
MGTERLDSLHKGGETLFRRNPSSFLLERKLLPIHHVPEHTDK

SEQ ID NO: 29792 - protein, 675 aa, Artificial Sequence
  Synthetic polypeptide
WEQRDWTAFTKVGKPCFVETPAHFSWKESYYRSTMSQSTQTNEFLSPEVFQHIWDFLEQPICSVQPIDLNFVDEPSEDGATNKIEISMDCIRMQDSDLSDPMWPQYTNLGLLNSMDQQIQNGSSSTSPYNTDHAQNSVTAPSPYAQPSSTFDALSPSPAIPSNTDYPGPHSFDVSFQQSSTAKSATWTYSTELKKLYCQIAKTCPIQIKVMTPPPQGAVIRAMPVYKKAEHVTEVVKRCPNHELSREFNEGQIAPPSHLIRVEGNSHAQYVEDPITGRQSVLVPYEPPQVGTEFTTVLYNFMCNSSCVGGMNRRPILIIVTLETRDGQVLGRRCFEARICACPGRDRKADEDSIRKQQVSDSTKNGDGTKRPFRQNTHGIQMTSIKKRRSPDDELLYLPVRGRETYEMLLKIKESLELMQYLPQHTIETYRQQQQQQHQHLLQKQTSIQSPSSYGNSSPPLNKMNSMNKLPSVSQLINPQQRNALTPTTIPDGMGANIPMMGTHMPMAGDMNGLSPTQALPPPLSMPSTSHCTPPPPYPTDCSIVSFLARLGCSSCLDYFTTQGLTTIYQIEHYSMDDLASLKIPEQFRHAIWKGILDHRQLHEFSSPSHLLRTPSSASTVSVGSSETRGERVIDAVRFTLRQTISFPPRDEWNDFNFDMDARRNKQQRIKEEGE

SEQ ID NO: 29793 - protein, 590 aa, Artificial Sequence
  Synthetic polypeptide
WEQRDWTAFTKVGKPCFVETPAHFSWKESYYRSTMSQSTQTNEFLSPEVFQHIWDFLEQPICSVQPIDLNFVDEPSEDGATNKIEISMDCIRMQDSDLSDPMWYSTELKKLYCQIAKTCPIQIKVMTPPPQGAVIRAMPVYKKAEHVTEVVKRCPNHELSREFNEGQIAPPSHLIRVEGNSHAQYVEDPITGRQSVLVPYEPPQVGTEFTTVLYNFMCNSSCVGGMNRRPILIIVTLETRDGQVLGRRCFEARICACPGRDRKADEDSIRKQQVSDSTKNGDGTKRPFRQNTHGIQMTSIKKRRSPDDELLYLPVRGRETYEMLLKIKESLELMQYLPQHTIETYRQQQQQQHQHLLQKQTSIQSPSSYGNSSPPLNKMNSMNKLPSVSQLINPQQRNALTPTTIPDGMGANIPMMGTHMPMAGDMNGLSPTQALPPPLSMPSTSHCTPPPPYPTDCSIVSFLARLGCSSCLDYFTTQGLTTIYQIEHYSMDDLASLKIPEQFRHAIWKGILDHRQLHEFSSPSHLLRTPSSASTVSVGSSETRGERVIDAVRFTLRQTISFPPRDEWNDFNFDMDARRNKQQRIKEEGE

SEQ ID NO: 29794 - protein, 482 aa, Artificial Sequence
  Synthetic polypeptide
WEQRDWTAFTKVGKPCFVETPAHFSWKESYYRSTMSQSTQTNEFLSPEVFQHIWDFLEQPICSVQPIDLNFVDEPSEDGATNKIEISMDCIRMQDSDLSDPMWPQYTNLGLLNSMDQQIQNGSSSTSPYNTDHAQNSVTAPSPYAQPSSTFDALSPSPAIPSNTDYPGPHSFDVSFQQSSTAKSATWTYSTELKKLYCQIAKTCPIQIKVMTPPPQGAVIRAMPVYKKAEHVTEVVKRCPNHELSREFNEGQIAPPSHLIRVEGNSHAQYVEDPITGRQSVLVPYEPPQVGTEFTTVLYNFMCNSSCVGGMNRRPILIIVTLETRDGQVLGRRCFEARICACPGRDRKADEDSIRKQQVSDSTKNGDGTKRPFRQNTHGIQMTSIKKRRSPDDELLYLPVRGRETYEMLLKIKESLELMQYLPQHTIETYRQQQQQQHQHLLQKHLLSACFRNELVEPRRETPKQSDVFFRHSKPPNRSVYP

SEQ ID NO: 29795 - protein, 505 aa, Artificial Sequence
  Synthetic polypeptide
WEQRDWTAFTKVGKPCFVETPAHFSWKESYYRSTMSQSTQTNEFLSPEVFQHIWDFLEQPICSVQPIDLNFVDEPSEDGATNKIEISMDCIRMQDSDLSDPMWPQYTNLGLLNSMDQQIQNGSSSTSPYNTDHAQNSVTAPSPYAQPSSTFDALSPSPAIPSNTDYPGPHSFDVSFQQSSTAKSATWTYSTELKKLYCQIAKTCPIQIKVMTPPPQGAVIRAMPVYKKAEHVTEVVKRCPNHELSREFNEGQIAPPSHLIRVEGNSHAQYVEDPITGRQSVLVPYEPPQVGTEFTTVLYNFMCNSSCVGGMNRRPILIIVTLETRDGQVLGRRCFEARICACPGRDRKADEDSIRKQQVSDSTKNGDGTKRPFRQNTHGIQMTSIKKRRSPDDELLYLPVRGRETYEMLLKIKESLELMQYLPQHTIETYRQQQQQQHQHLLQKQTSIQSPSSYGNSSPPLNKMNSMNKLPSVSQLINPQQRNALTPTTIPDGMGANRSGKSENP

SEQ ID NO: 29796 - protein, 550 aa, Artificial Sequence
  Synthetic polypeptide
WEQRDWTAFTKVGKPCFVETPAHFSWKESYYRSTMSQSTQTNEFLSPEVFQHIWDFLEQPICSVQPIDLNFVDEPSEDGATNKIEISMDCIRMQDSDLSDPMWPQYTNLGLLNSMDQQIQNGSSSTSPYNTDHAQNSVTAPSPYAQPSSTFDALSPSPAIPSNTDYPGPHSFDVSFQQSSTAKSATWTYSTELKKLYCQIAKTCPIQIKVMTPPPQGAVIRAMPVYKKAEHVTEVVKRCPNHELSREFNEGQIAPPSHLIRVEGNSHAQYVEDPITGRQSVLVPYEPPQVGTEFTTVLYNFMCNSSCVGGMNRRPILIIVTLETRDGQVLGRRCFEARICACPGRDRKADEDSIRKQQVSDSTKNGDGTKRPFRQNTHGIQMTSIKKRRSPDDELLYLPVRGRETYEMLLKIKESLELMQYLPQHTIETYRQQQQQQHQHLLQKQTSIQSPSSYGNSSPPLNKMNSMNKLPSVSQLINPQQRNALTPTTIPDGMGANIPMMGTHMPMAGDMNGLSPTQALPPPLSMPSTSHCTPPPPYPTDCSIVRIWQV

SEQ ID NO: 29797 - protein, 671 aa, Artificial Sequence
  Synthetic polypeptide
WEQRDWTAFTKVGKPCFVETPAHFSWKESYYRSTMSQSTQTNEFLSPEVFQHIWDFLEQPICSVQPIDLNFVDEPSEDGATNKIEISMDCIRMQDSDLSDPMWPQYTNLGLLNSMDQQIQNGSSSTSPYNTDHAQNSVTAPSPYAQPSSTFDALSPSPAIPSNTDYPGPHSFDVSFQQSSTAKSATWTYSTELKKLYCQIAKTCPIQIKVMTPPPQGAVIRAMPVYKKAEHVTEVVKRCPNHELSREFNEGQIAPPSHLIRVEGNSHAQYVEDPITGRQSVLVPYEPPQVGTEFTTVLYNFMCNSSCVGGMNRRPILIIVTLETRDGQVLGRRCFEARICACPGRDRKADEDSIRKQQVSDSTKNGDAFRQNTHGIQMTSIKKRRSPDDELLYLPVRGRETYEMLLKIKESLELMQYLPQHTIETYRQQQQQQHQHLLQKQTSIQSPSSYGNSSPPLNKMNSMNKLPSVSQLINPQQRNALTPTTIPDGMGANIPMMGTHMPMAGDMNGLSPTQALPPPLSMPSTSHCTPPPPYPTDCSIVSFLARLGCSSCLDYFTTQGLTTIYQIEHYSMDDLASLKIPEQFRHAIWKGILDHRQLHEFSSPSHLLRTPSSASTVSVGSSETRGERVIDAVRFTLRQTISFPPRDEWNDFNFDMDARRNKQQRIKEEGE

SEQ ID NO: 29798 - protein, 32 aa, Artificial Sequence
  Synthetic polypeptide
LCSPARTSKQALKCQLQDTQWNWLVVLEPQSC

SEQ ID NO: 29799 - protein, 107 aa, Artificial Sequence
  Synthetic polypeptide
IQLIWLAKRVSPSSLTVSRDSFPKLRTQWKRTTICNRGGLVFCQGYRSSCAPLLEPPNKLSSASSKIHSGTGLWFWSHSPASGDSHCCLPCLLARDGPILPGSFWNR

SEQ ID NO: 29800 - protein, 227 aa, Artificial Sequence
  Synthetic polypeptide
NLQTSSQVPAPRYTVELACGFGATVLLVVILIVVYHVYWLEMVLFYRAHFGTDETILDGKEYDIYVSYARNAEEEEFVLLTLRGVLENEFGYKLCIFDRDSLPGGIVTDETLSFIQKSRRLLVVLSPNYVLQGTQALLELKAGLENMASRGNINVILVQYKAVKETKVKELKRAKTVLTVIKWKGEKSKYPQGRFWKQLQVAMPVKKSPRRSSSDEQGLSYSSLKNV

SEQ ID NO: 29801 - protein, 344 aa, Artificial Sequence
  Synthetic polypeptide
NLQTSSQVPAPRYTVELACGFGATVLLVVILIVVYHVYWLEMVLFYRAHFGTDETILDGKEYDIYVSYARNAEEEEFVLLTLRGVLENEFGYKLCIFDRDSLPGGNTVEAVFDFIQRSRRMIVVLSPDYVTEKSISMLEFKLGVMCQNSIATKLIVVEYRPLEHPHPGILQLKESVSFVSWKGEKSKHSGSKFWKALRLALPLRSLSASSGWNESCSSQSDISLDHVQRRRSRLKEPPELQSSERAAGSPPAPGTMSKHRGKSSATCRCCVTYCEGENHLRNKSRAEIHNQPQWETHLCKPVPQESETQWIQNGTRLEPPAPQISALALHHFTDLSNNNDFYIL

SEQ ID NO: 29802 - protein, 53 aa, Artificial Sequence
  Synthetic polypeptide
NLQTSSQVPAPRYTVELACGFGATVLLVVILIVVYHVYWLEMVLFYRAHFGTD

SEQ ID NO: 29803 - protein, 84 aa, Artificial Sequence
  Synthetic polypeptide
SDSSSTTYFRCDLEKMMQLPWTLVFSSVNVTVSASLHLYLEDKVRKIMYFSYMNNKTVKLLRKFRRSWLLRQRDDAFRRRRMRT

SEQ ID NO: 29804 - protein, 236 aa, Artificial Sequence
  Synthetic polypeptide
SEKNNVLLIYEQQDCEIAQEIQEKLAIEAERRRIQEKKDEDIARLLQEKELQEEKKRKKHFPEFPATRAYADSYYYEDGGMKPRVMKEAVSTPSRMAHRDQEWYDAEIARKLQEEELLATQVDMRAAQVAQDEEIARLLMAEEKKAYKKAKEREKSSLDKRKQDPEWKPKTAKAANSKSKESDEPHHSKNERPARPPPPIMTDGEDADYTHFTNQQSSTRHFSKSESSHKGFHYKH

SEQ ID NO: 29805 - protein, 412 aa, Artificial Sequence
  Synthetic polypeptide
SEKNNVLLIYEQQDCEIAQEIQEKLAIEAERRRIQEKKDEDIARLLQEKELQEEKKRKKHFPEFPATRAYADSYYYEDGDQPGSRRARELGSGFSRPCRLQRDGKTVKHKKEKPEHPLENLEEPEQHCSSKRSLSSSSSGKGRDNPHINNEQHERKRSTQERPRRPLLPTISGEVFLSTECDDWETKINHQTRNWEKQSRHQDRLSPKSSQKAGLHCKEVVYGRDHGQGEHRKRRHRPRTPPFSESEEQLHLHDAGMKPRVMKEAVSTPSRMAHRDQEWYDAEIARKLQEEELLATQVDMRAAQVAQDEEIARLLMAEEKKAYKKAKEREKSSLDKRKQDPEWKPKTAKAANSKSKESDEPHHSKNERPARPPPPIMTDGEDADYTHFTNQQSSTRHFSKSESSHKGFHYKH

SEQ ID NO: 29806 - protein, 11 aa, Artificial Sequence
  Synthetic polypeptide
QAFQNPSSKGL

SEQ ID NO: 29807 - protein, 39 aa, Artificial Sequence
  Synthetic polypeptide
ETIRNQHVNKHFRTPAQRDCDKVIQPAGILPADAPRWYH

SEQ ID NO: 29808 - protein, 212 aa, Artificial Sequence
  Synthetic polypeptide
PGEIVKNSDSQALPIQTSTSCFERPSGISMLTSISEPQLKGIVTRLFSQQGYFLQMHPDGTIDGTKDENSDYTLFNLIPVGLRVVAIQGVKASLYVAMNGEGYLYSSDVFTPECKFKESVFENYYVIYSSTLYRQQESGRAWFLGLNKEGQIMKGNRVKKTKPSSHFVPKPIEVCMYREPSLHEIGEKQGRSRKSSGTPTMNGGKVVNQDST

SEQ ID NO: 29809 - protein, 138 aa, Artificial Sequence
  Synthetic polypeptide
PGEIVKNSDSQALPIQTSTSCFERPSGISMLTSISEPQLKGIVTRLFSQQGYFLQMHPDGTIDGTKDENSDYTLFNLIPVGLRVVAIQGVKASLYVAMNGEGYLYSSDVFTPECKFKESVFENYYVIYSSTLYRQQES

SEQ ID NO: 29810 - protein, 52 aa, Artificial Sequence
  Synthetic polypeptide
SSRKVNNSWVWWRVPAVLEAEEWCKSWTKSFQWLMNTCCSLEVSGKAWWTWT

SEQ ID NO: 29811 - protein, 33 aa, Artificial Sequence
  Synthetic polypeptide
LQEKLTIVGCGGVFLQSWRLRNGAKAGPKASSG

SEQ ID NO: 29812 - protein, 10 aa, Artificial Sequence
  Synthetic polypeptide
NPISTKRQAC

SEQ ID NO: 29813 - protein, 44 aa, Artificial Sequence
  Synthetic polypeptide
DQPVQHGETPSLLKDKHAKGTPSDYKKFKPCSIRLLLENGTRVC

SEQ ID NO: 29814 - protein, 15 aa, Artificial Sequence
  Synthetic polypeptide
IWLLGRPYKKNFPAL

SEQ ID NO: 29815 - protein, 30 aa, Artificial Sequence
  Synthetic polypeptide
VSWKECRSGCLGDPTRRIFPLYDRTERERA

SEQ ID NO: 29816 - protein, 297 aa, Artificial Sequence
  Synthetic polypeptide
CHGKNVDLVAWETLQEEFSRFMTEPKGKEHDDIFDKLKEAVKEESIKRHKWNDFAEDSLRVIQHNALEDRSISDKQQWDAAIYFMEEALQARLKDTENAIENMVGPDWKKRWLYWKNRTQEQCVHNETKNELEKMLKCNEEHPAYLASDEITTVRKNLESRGVEVDPSLIKDTWHQVYRRHFLKTALNHCNLCRRGFYYYQRHFVDSELECNDVVLFWRIQRMLAITANTLRQQLTNTEVRRLEKNVKEVLEDFAEDGEKKIKLLTGKRVQLAEDLKKVREIQEKLDAFIEALHQEK

SEQ ID NO: 29817 - protein, 23 aa, Artificial Sequence
  Synthetic polypeptide
EGCLGDPTRRIFPLYDRTERERA

SEQ ID NO: 29818 - protein, 300 aa, Artificial Sequence
  Synthetic polypeptide
VSWKECRSGEKVAWETLQEEFSRFMTEPKGKEHDDIFDKLKEAVKEESIKRHKWNDFAEDSLRVIQHNALEDRSISDKQQWDAAIYFMEEALQARLKDTENAIENMVGPDWKKRWLYWKNRTQEQCVHNETKNELEKMLKCNEEHPAYLASDEITTVRKNLESRGVEVDPSLIKDTWHQVYRRHFLKTALNHCNLCRRGFYYYQRHFVDSELECNDVVLFWRIQRMLAITANTLRQQLTNTEVRRLEKNVKEVLEDFAEDGEKKIKLLTGKRVQLAEDLKKVREIQEKLDAFIEALHQEK

SEQ ID NO: 29819 - protein, 24 aa, Artificial Sequence
  Synthetic polypeptide
CHGKNVDLVRRLLGRPYKKNFPAL

SEQ ID NO: 29820 - protein, 160 aa, Artificial Sequence
  Synthetic polypeptide
WQSKMRQALGFAKEARESPDTQALLTCAEKEEENQENLDWVPLTTLSHCKSLRTMTAISRYMELTIEPVQQAGCSATRLPGDGQTSAGDASLQDPPSYPPVQVIRARVSSGSSSEVSSINSDLEWDPEDVNLEGSKENVELLGSQVHQDSVRTAHLSDDD

SEQ ID NO: 29821 - protein, 26 aa, Artificial Sequence
  Synthetic polypeptide
DQPGQHGETRSLLKIRKLPEHDGRAR

SEQ ID NO: 29822 - protein, 27 aa, Artificial Sequence
  Synthetic polypeptide
KYENYPSMMAEQDETGLRICQGSQREP

SEQ ID NO: 29823 - protein, 171 aa, Artificial Sequence
  Synthetic polypeptide
WQSKMRQALGFAKEARESPDTQALLTCAEKEEENQENLDWVPLTTLSHCKSLRTMTAISRYMELTIEPVQQAGCSATRLPGDGQTSAGDASLQDPPSYPPVQVIRARVSSGSSSEVSSINSDLEQKYWEALNSEQWDPEDVNLEGSKENVELLGSQVHQDSVRTAHLSDDD

SEQ ID NO: 29824 - protein, 128 aa, Artificial Sequence
  Synthetic polypeptide
WQSKMRQALGFAKEARESPDTQALLTCAEKEEENQENLDWVPLTTLSHCKSLRTMTAISRYMELTIEPVQQAAVPPGCQVTGRRAPEMRPCRTPRRTLPFRSSGPGCLPAAPLRSPPSTPTWSGTLKM

SEQ ID NO: 29825 - protein, 170 aa, Artificial Sequence
  Synthetic polypeptide
WQSKMRQALGFAKEARESPDTQALLTCAEKEEENQENLDWVPLTTLSHCKSLRTMTAISRYMELTIEPVQQAGCSATRLPGDGQTSAGDASLQDPPSYPPVQVIRARVSSGSSSEVSSINSDLEKYWEALNSEQWDPEDVNLEGSKENVELLGSQVHQDSVRTAHLSDDD

SEQ ID NO: 29826 - protein, 119 aa, Artificial Sequence
  Synthetic polypeptide
WQSKMRQALGFAKEARESPDTQALLTCAEKEEENQENLDWVPLTTLSHCKSLRTMTAISRYMELTIEPVQQAAVPPGCQVTGRRAPEMRPCRTPRRTLPFRSSGPGCLPAAPLSGTLKM

SEQ ID NO: 29827 - protein, 169 aa, Artificial Sequence
  Synthetic polypeptide
WQIIFLSCVMKSKMRQALGFAKEARESPDTQALLTCAEKEEENQENLDWVPLTTLSHCKSLRTMTAISRYMELTIEPVQQAGCSATRLPGDGQTSAGDASLQDPPSYPPVQVIRARVSSGSSSEVSSINSDLEWDPEDVNLEGSKENVELLGSQVHQDSVRTAHLSDDD

SEQ ID NO: 29828 - protein, 30 aa, Artificial Sequence
  Synthetic polypeptide
DQPGQHGETRSLLKIRKLPEHDGRLFSFRV

SEQ ID NO: 29829 - protein, 36 aa, Artificial Sequence
  Synthetic polypeptide
KYENYPSMMADYFPFVCDEEQDETGLRICQGSQREP

SEQ ID NO: 29830 - protein, 180 aa, Artificial Sequence
  Synthetic polypeptide
WQIIFLSCVMKSKMRQALGFAKEARESPDTQALLTCAEKEEENQENLDWVPLTTLSHCKSLRTMTAISRYMELTIEPVQQAGCSATRLPGDGQTSAGDASLQDPPSYPPVQVIRARVSSGSSSEVSSINSDLEQKYWEALNSEQWDPEDVNLEGSKENVELLGSQVHQDSVRTAHLSDDD

SEQ ID NO: 29831 - protein, 137 aa, Artificial Sequence
  Synthetic polypeptide
WQIIFLSCVMKSKMRQALGFAKEARESPDTQALLTCAEKEEENQENLDWVPLTTLSHCKSLRTMTAISRYMELTIEPVQQAAVPPGCQVTGRRAPEMRPCRTPRRTLPFRSSGPGCLPAAPLRSPPSTPTWSGTLKM

SEQ ID NO: 29832 - protein, 179 aa, Artificial Sequence
  Synthetic polypeptide
WQIIFLSCVMKSKMRQALGFAKEARESPDTQALLTCAEKEEENQENLDWVPLTTLSHCKSLRTMTAISRYMELTIEPVQQAGCSATRLPGDGQTSAGDASLQDPPSYPPVQVIRARVSSGSSSEVSSINSDLEKYWEALNSEQWDPEDVNLEGSKENVELLGSQVHQDSVRTAHLSDDD

SEQ ID NO: 29833 - protein, 139 aa, Artificial Sequence
  Synthetic polypeptide
SLRLLLTRHTFWQFRHENPQTRVGGPPPEGLPGFNSGVMLLNLEAMRQSPLYSRLLEPAQVQQLADKYHFRGHLGDQDFFTMIGMEHPKLFHVLDCTWNRQLCTWWRDHGYSDVFEAYFRCEGHVKIYHGNCNTPIPED

SEQ ID NO: 29834 - protein, 50 aa, Artificial Sequence
  Synthetic polypeptide
KNVDFGARLSGFSPCVCCLLGTHSGSSAMRTPRPGLGARPPRGCRASTAG

SEQ ID NO: 29835 - protein, 42 aa, Artificial Sequence
  Synthetic polypeptide
GQEFKTSLANPVSTKNKKFCRAWWRAPVIPATREAEEPQRTH

SEQ ID NO: 29836 - protein, 18 aa, Artificial Sequence
  Synthetic polypeptide
FQLLGRLRNHRGHINNWK

SEQ ID NO: 29837 - protein, 62 aa, Artificial Sequence
  Synthetic polypeptide
GKLPDPPRELWGRELLVAWPEHTDAVCGALPSQRGDLRGRPVGPGHQPAPAEQLHPHRAWRQ

SEQ ID NO: 29838 - protein, 637 aa, Artificial Sequence
  Synthetic polypeptide
PWTGHVACCSSFQRASLFANHRESCLTHLESCGAENYWWRGQNTRTLCVGPFPRNVVTSVAGLSAQDISQPLQNSFIHTGHGDSDPRHCWGFPDRIDELYLGNPMDPPDLLSVELSTSRPPQHLGGVKREPPPRPPQPAFFTQKPTYDPVSEDQDPLSSDFKRLGLRKPGLPRGLWLAKPSARVPGTKASRGSGAEVTLIDFGEEPVVPALRPCAPSLAQLAMDACSLLDETPPQSPTRALPRPLHPTPVVDWDARPLPPPPAYDDVAQDEDDFEICSINSTLVGAGVPAGPSQGQTNYAFVPEQARPPPPLEDNLFLPPQGGGKPPSSAQTAEIFQALQQECMRQLQAPAGSPAPSPSPGGDDKPQVPPRVPIPPRPTRPHVQLSPAPPGEEETSQWPGPASPPRVPPREPLSPQGSRTPSPLVPPGSSPLPPRLSSSPGKTMPTTQSFASDPKYATPQVIQAPGPRAGPCILPIVRDGKKVSSTHYYLLPERPSYLERYQRFLREAQSPEEPTPLPVPLLLPPPSTPAPAAPTATVRPMPQAALDPKANFSTNNSNPGARPPPPRATARLPQRGCPGDGPEAGRPADKIQMVEQLFGLGLRPRGECHKVLEMFDWNLEQAGCHLLGSWGPAHHKR

SEQ ID NO: 29839 - protein, 27 aa, Artificial Sequence
  Synthetic polypeptide
RVVGPRTTGGVARTHGRCVWGPSLATW

SEQ ID NO: 29840 - protein, 652 aa, Artificial Sequence
  Synthetic polypeptide
PWTGHVACCSSFQRASLFANHRESCLTHLESCGAENYWWRGQNTRTLCVGPFPRNVVTSVAGLSAQDISQPLQNSFIHTGHGDSDPRHCWGFPDRIDELYLGNPMDPPDLLSVELSTSRPPQHLGGVKKPTYDPVSEDQDPLSSDFKRLGLRKPGLPRGLWLAKPSARVPGTKASRGSGAEVTLIDFGEEPVVPALRPCAPSLAQLAMDACSLLDETPPQSPTRALPRPLHPTPVVDWDARPLPPPPAYDDVAQDEDDFEICSINSTLVGAGVPAGPSQGQTNYAFVPEQARPPPPLEDNLFLPPQGGGKPPSSAQTAEIFQALQQECMRQLQAPAGSPAPSPSPGGDDKPQVPPRVPIPPRPTRPHVQLSPAPPGEEETSQWPGPASPPRVPPREPLSPQGSRTPSPLVPPGSSPLPPRLSSSPGKTMPTTQSFASDPKYATPQVIQAPGPRAGPCILPIVRDGKKVSSTHYYLLPERPSYLERYQRFLREAQSPEEPTPLPVPLLLPPPSTPAPAAPTATVRPMPQAALDPKANFSTNNSNPGARPPPPRATARLPQRGCPGDGPEAGRPADKIQMAMVHGVTTEECQAALQCHGWSVQRAAQYLKVEQLFGLGLRPRGECHKVLEMFDWNLEQAGCHLLGSWGPAHHKR

SEQ ID NO: 29841 - protein, 622 aa, Artificial Sequence
  Synthetic polypeptide
PWTGHVACCSSFQRASLFANHRESCLTHLESCGAENYWWRGQNTRTLCVGPFPRNVVTSVAGLSAQDISQPLQNSFIHTGHGDSDPRHCWGFPDRIDELYLGNPMDPPDLLSVELSTSRPPQHLGGVKKPTYDPVSEDQDPLSSDFKRLGLRKPGLPRGLWLAKPSARVPGTKASRGSGAEVTLIDFGEEPVVPALRPCAPSLAQLAMDACSLLDETPPQSPTRALPRPLHPTPVVDWDARPLPPPPAYDDVAQDEDDFEICSINSTLVGAGVPAGPSQGQTNYAFVPEQARPPPPLEDNLFLPPQGGGKPPSSAQTAEIFQALQQECMRQLQAPAGSPAPSPSPGGDDKPQVPPRVPIPPRPTRPHVQLSPAPPGEEETSQWPGPASPPRVPPREPLSPQGSRTPSPLVPPGSSPLPPRLSSSPGKTMPTTQSFASDPKYATPQVIQAPGPRAGPCILPIVRDGKKVSSTHYYLLPERPSYLERYQRFLREAQSPEEPTPLPVPLLLPPPSTPAPAAPTATVRPMPQAALDPKANFSTNNSNPGARPPPPRATARLPQRGCPGDGPEAGRPADKIQMVEQLFGLGLRPRGECHKVLEMFDWNLEQAGCHLLGSWGPAHHKR

SEQ ID NO: 29842 - protein, 142 aa, Artificial Sequence
  Synthetic polypeptide
PWTGHVACCSSFQRASLFANHRESCLTHLESCGAENYWWRGQNTRTLCVGPFPRNVVTSVAGLSAQDISQPLQNSFIHTGHGDSDPRHCWGFPDRIDECPFSAFSPGHPPAETCGQVLWTGRREACASDPRLHPVSSRTKGL

SEQ ID NO: 29843 - protein, 246 aa, Artificial Sequence
  Synthetic polypeptide
PWTGHVACCSSFQRASLFANHRESCLTHLESCGAENYWWRGQNTRTLCVGPFPRNVVTSVAGLSAQDISQPLQNSFIHTGHGDSDPRHCWGFPDRIDELYLGNPMDPPDLLSVELSTSRPPQHLGGVKKPTYDPVSEDQDPLSSDFKRLGLRKPGLPRGLWLAKPSARVPGTKASRGSGAEVTLIDFGEEPVVPALRPCAPSLAQLAMDACSLLDETPPQSPTRALPRPLHPTPVVDWDARPLPPP

SEQ ID NO: 29844 - protein, 169 aa, Artificial Sequence
  Synthetic polypeptide
PWTGHVACCSSFQRASLFANHRESCLTHLESCGAENYWWRGQNTRTLCVGPFPRNVVTSVAGLSAQDISQPLQNSFIHTGHGDSDPRHCWGFPDRIDELYLGNPMDPPDLLSVELSTSRPPQHLGGVKKPTYDPVSEDQDPLSSDFKRLGLRKPGLPRGLWLAKPSARV

SEQ ID NO: 29845 - protein, 39 aa, Artificial Sequence
  Synthetic polypeptide
FPNFNEAGRRQNAARGGHRLAAGAAVRGAAATVLPAAPR

SEQ ID NO: 29846 - protein, 1034 aa, Artificial Sequence
  Synthetic polypeptide
FQTLMRLGGGRMQPEEGTGWLLELLSEVQLQQYFLRLRDDLNVTRLSHFEYVKNEDLEKIGMGRPGQRRLWEAVKRRKALCKRKSWMSKVFSGKRLEAEFPPHHSQSTFRKTSPAPGGPAGEGPLQSLTCLIGEKDLRLLEKLGDGSFGVVRRGEWDAPSGKTVSVAVKCLKPDVLSQPEAMDDFIREVNAMHSLDHRNLIRLYGVVLTPPMKMVTELAPLGSLLDRLRKHQGHFLLGTLSRYAVQVAEGMGYLESKRFIHRDLAARNLLLATRDLVKIGDFGLMRALPQNDDHYVMQEHRKVPFAWCAPESLKTRTFSHASDTWMFGVTLWEMFTYGQEPWIGLNGSQILHKIDKEGERLPRPEDCPQDIYNVMVQCWAHKPEDRPTFVALRDFLLEAQPTDMRALQDFEEPDKLHIQMNDVITVIEGRAENYWWRGQNTRTLCVGPFPRNVVTSVAGLSAQDISQPLQNSFIHTGHGDSDPRHCWGFPDRIDELYLGNPMDPPDLLSVELSTSRPPQHLGGVKREPPPRPPQPAFFTQKPTYDPVSEDQDPLSSDFKRLGLRKPGLPRGLWLAKPSARVPGTKASRGSGAEVTLIDFGEEPVVPALRPCAPSLAQLAMDACSLLDETPPQSPTRALPRPLHPTPVVDWDARPLPPPPAYDDVAQDEDDFEICSINSTLVGAGVPAGPSQGQTNYAFVPEQARPPPPLEDNLFLPPQGGGKPPSSAQTAEIFQALQQECMRQLQAPAGSPAPSPSPGGDDKPQVPPRVPIPPRPTRPHVQLSPAPPGEEETSQWPGPASPPRVPPREPLSPQGSRTPSPLVPPGSSPLPPRLSSSPGKTMPTTQSFASDPKYATPQVIQAPGPRAGPCILPIVRDGKKVSSTHYYLLPERPSYLERYQRFLREAQSPEEPTPLPVPLLLPPPSTPAPAAPTATVRPMPQAALDPKANFSTNNSNPGARPPPPRATARLPQRGCPGDGPEAGRPADKIQMVEQLFGLGLRPRGECHKVLEMFDWNLEQAGCHLLGSWGPAHHKR

SEQ ID NO: 29847 - protein, 1019 aa, Artificial Sequence
  Synthetic polypeptide
FQTLMRLGGGRMQPEEGTGWLLELLSEVQLQQYFLRLRDDLNVTRLSHFEYVKNEDLEKIGMGRPGQRRLWEAVKRRKALCKRKSWMSKVFSGKRLEAEFPPHHSQSTFRKTSPAPGGPAGEGPLQSLTCLIGEKDLRLLEKLGDGSFGVVRRGEWDAPSGKTVSVAVKCLKPDVLSQPEAMDDFIREVNAMHSLDHRNLIRLYGVVLTPPMKMVTELAPLGSLLDRLRKHQGHFLLGTLSRYAVQVAEGMGYLESKRFIHRDLAARNLLLATRDLVKIGDFGLMRALPQNDDHYVMQEHRKVPFAWCAPESLKTRTFSHASDTWMFGVTLWEMFTYGQEPWIGLNGSQILHKIDKEGERLPRPEDCPQDIYNVMVQCWAHKPEDRPTFVALRDFLLEAQPTDMRALQDFEEPDKLHIQMNDVITVIEGRAENYWWRGQNTRTLCVGPFPRNVVTSVAGLSAQDISQPLQNSFIHTGHGDSDPRHCWGFPDRIDELYLGNPMDPPDLLSVELSTSRPPQHLGGVKKPTYDPVSEDQDPLSSDFKRLGLRKPGLPRGLWLAKPSARVPGTKASRGSGAEVTLIDFGEEPVVPALRPCAPSLAQLAMDACSLLDETPPQSPTRALPRPLHPTPVVDWDARPLPPPPAYDDVAQDEDDFEICSINSTLVGAGVPAGPSQGQTNYAFVPEQARPPPPLEDNLFLPPQGGGKPPSSAQTAEIFQALQQECMRQLQAPAGSPAPSPSPGGDDKPQVPPRVPIPPRPTRPHVQLSPAPPGEEETSQWPGPASPPRVPPREPLSPQGSRTPSPLVPPGSSPLPPRLSSSPGKTMPTTQSFASDPKYATPQVIQAPGPRAGPCILPIVRDGKKVSSTHYYLLPERPSYLERYQRFLREAQSPEEPTPLPVPLLLPPPSTPAPAAPTATVRPMPQAALDPKANFSTNNSNPGARPPPPRATARLPQRGCPGDGPEAGRPADKIQMVEQLFGLGLRPRGECHKVLEMFDWNLEQAGCHLLGSWGPAHHKR

SEQ ID NO: 29848 - protein, 90 aa, Artificial Sequence
  Synthetic polypeptide
FQTLMRLGGGRMQPEEGTGWLLELLSEVQLQQYFLRLRDDLNVTRLSHFEYVKNEDLEKIGMGRPGQRRLWEAVKRRKALCKRKSWMSKV

SEQ ID NO: 29849 - protein, 96 aa, Artificial Sequence
  Synthetic polypeptide
GRARWLTPVISALWEAEAGRSPETRTLRGWEAAECSQRRAQAGCWSCCPRCSCNSTSCGSEMTSTSPACPTLSTSRMRTWRRSAWVGLASGGCGRL

SEQ ID NO: 29850 - protein, 1034 aa, Artificial Sequence
  Synthetic polypeptide
DEDAERLGGGRMQPEEGTGWLLELLSEVQLQQYFLRLRDDLNVTRLSHFEYVKNEDLEKIGMGRPGQRRLWEAVKRRKALCKRKSWMSKVFSGKRLEAEFPPHHSQSTFRKTSPAPGGPAGEGPLQSLTCLIGEKDLRLLEKLGDGSFGVVRRGEWDAPSGKTVSVAVKCLKPDVLSQPEAMDDFIREVNAMHSLDHRNLIRLYGVVLTPPMKMVTELAPLGSLLDRLRKHQGHFLLGTLSRYAVQVAEGMGYLESKRFIHRDLAARNLLLATRDLVKIGDFGLMRALPQNDDHYVMQEHRKVPFAWCAPESLKTRTFSHASDTWMFGVTLWEMFTYGQEPWIGLNGSQILHKIDKEGERLPRPEDCPQDIYNVMVQCWAHKPEDRPTFVALRDFLLEAQPTDMRALQDFEEPDKLHIQMNDVITVIEGRAENYWWRGQNTRTLCVGPFPRNVVTSVAGLSAQDISQPLQNSFIHTGHGDSDPRHCWGFPDRIDELYLGNPMDPPDLLSVELSTSRPPQHLGGVKREPPPRPPQPAFFTQKPTYDPVSEDQDPLSSDFKRLGLRKPGLPRGLWLAKPSARVPGTKASRGSGAEVTLIDFGEEPVVPALRPCAPSLAQLAMDACSLLDETPPQSPTRALPRPLHPTPVVDWDARPLPPPPAYDDVAQDEDDFEICSINSTLVGAGVPAGPSQGQTNYAFVPEQARPPPPLEDNLFLPPQGGGKPPSSAQTAEIFQALQQECMRQLQAPAGSPAPSPSPGGDDKPQVPPRVPIPPRPTRPHVQLSPAPPGEEETSQWPGPASPPRVPPREPLSPQGSRTPSPLVPPGSSPLPPRLSSSPGKTMPTTQSFASDPKYATPQVIQAPGPRAGPCILPIVRDGKKVSSTHYYLLPERPSYLERYQRFLREAQSPEEPTPLPVPLLLPPPSTPAPAAPTATVRPMPQAALDPKANFSTNNSNPGARPPPPRATARLPQRGCPGDGPEAGRPADKIQMVEQLFGLGLRPRGECHKVLEMFDWNLEQAGCHLLGSWGPAHHKR

SEQ ID NO: 29851 - protein, 1019 aa, Artificial Sequence
  Synthetic polypeptide
DEDAERLGGGRMQPEEGTGWLLELLSEVQLQQYFLRLRDDLNVTRLSHFEYVKNEDLEKIGMGRPGQRRLWEAVKRRKALCKRKSWMSKVFSGKRLEAEFPPHHSQSTFRKTSPAPGGPAGEGPLQSLTCLIGEKDLRLLEKLGDGSFGVVRRGEWDAPSGKTVSVAVKCLKPDVLSQPEAMDDFIREVNAMHSLDHRNLIRLYGVVLTPPMKMVTELAPLGSLLDRLRKHQGHFLLGTLSRYAVQVAEGMGYLESKRFIHRDLAARNLLLATRDLVKIGDFGLMRALPQNDDHYVMQEHRKVPFAWCAPESLKTRTFSHASDTWMFGVTLWEMFTYGQEPWIGLNGSQILHKIDKEGERLPRPEDCPQDIYNVMVQCWAHKPEDRPTFVALRDFLLEAQPTDMRALQDFEEPDKLHIQMNDVITVIEGRAENYWWRGQNTRTLCVGPFPRNVVTSVAGLSAQDISQPLQNSFIHTGHGDSDPRHCWGFPDRIDELYLGNPMDPPDLLSVELSTSRPPQHLGGVKKPTYDPVSEDQDPLSSDFKRLGLRKPGLPRGLWLAKPSARVPGTKASRGSGAEVTLIDFGEEPVVPALRPCAPSLAQLAMDACSLLDETPPQSPTRALPRPLHPTPVVDWDARPLPPPPAYDDVAQDEDDFEICSINSTLVGAGVPAGPSQGQTNYAFVPEQARPPPPLEDNLFLPPQGGGKPPSSAQTAEIFQALQQECMRQLQAPAGSPAPSPSPGGDDKPQVPPRVPIPPRPTRPHVQLSPAPPGEEETSQWPGPASPPRVPPREPLSPQGSRTPSPLVPPGSSPLPPRLSSSPGKTMPTTQSFASDPKYATPQVIQAPGPRAGPCILPIVRDGKKVSSTHYYLLPERPSYLERYQRFLREAQSPEEPTPLPVPLLLPPPSTPAPAAPTATVRPMPQAALDPKANFSTNNSNPGARPPPPRATARLPQRGCPGDGPEAGRPADKIQMVEQLFGLGLRPRGECHKVLEMFDWNLEQAGCHLLGSWGPAHHKR

SEQ ID NO: 29852 - protein, 90 aa, Artificial Sequence
  Synthetic polypeptide
DEDAERLGGGRMQPEEGTGWLLELLSEVQLQQYFLRLRDDLNVTRLSHFEYVKNEDLEKIGMGRPGQRRLWEAVKRRKALCKRKSWMSKV

SEQ ID NO: 29853 - protein, 1081 aa, Artificial Sequence
  Synthetic polypeptide
VVDEWEKGLGITQIAFDLVISLTSCVTSLGNIMSLGFSFLVSAVGQDFPCSVRLGGGRMQPEEGTGWLLELLSEVQLQQYFLRLRDDLNVTRLSHFEYVKNEDLEKIGMGRPGQRRLWEAVKRRKALCKRKSWMSKVFSGKRLEAEFPPHHSQSTFRKTSPAPGGPAGEGPLQSLTCLIGEKDLRLLEKLGDGSFGVVRRGEWDAPSGKTVSVAVKCLKPDVLSQPEAMDDFIREVNAMHSLDHRNLIRLYGVVLTPPMKMVTELAPLGSLLDRLRKHQGHFLLGTLSRYAVQVAEGMGYLESKRFIHRDLAARNLLLATRDLVKIGDFGLMRALPQNDDHYVMQEHRKVPFAWCAPESLKTRTFSHASDTWMFGVTLWEMFTYGQEPWIGLNGSQILHKIDKEGERLPRPEDCPQDIYNVMVQCWAHKPEDRPTFVALRDFLLEAQPTDMRALQDFEEPDKLHIQMNDVITVIEGRAENYWWRGQNTRTLCVGPFPRNVVTSVAGLSAQDISQPLQNSFIHTGHGDSDPRHCWGFPDRIDELYLGNPMDPPDLLSVELSTSRPPQHLGGVKREPPPRPPQPAFFTQKPTYDPVSEDQDPLSSDFKRLGLRKPGLPRGLWLAKPSARVPGTKASRGSGAEVTLIDFGEEPVVPALRPCAPSLAQLAMDACSLLDETPPQSPTRALPRPLHPTPVVDWDARPLPPPPAYDDVAQDEDDFEICSINSTLVGAGVPAGPSQGQTNYAFVPEQARPPPPLEDNLFLPPQGGGKPPSSAQTAEIFQALQQECMRQLQAPAGSPAPSPSPGGDDKPQVPPRVPIPPRPTRPHVQLSPAPPGEEETSQWPGPASPPRVPPREPLSPQGSRTPSPLVPPGSSPLPPRLSSSPGKTMPTTQSFASDPKYATPQVIQAPGPRAGPCILPIVRDGKKVSSTHYYLLPERPSYLERYQRFLREAQSPEEPTPLPVPLLLPPPSTPAPAAPTATVRPMPQAALDPKANFSTNNSNPGARPPPPRATARLPQRGCPGDGPEAGRPADKIQMVEQLFGLGLRPRGECHKVLEMFDWNLEQAGCHLLGSWGPAHHKR

SEQ ID NO: 29854 - protein, 85 aa, Artificial Sequence
  Synthetic polypeptide
VSVSWCLRWARTSPAVSGWEAAECSQRRAQAGCWSCCPRCSCNSTSCGSEMTSTSPACPTLSTSRMRTWRRSAWVGLASGGCGRL

SEQ ID NO: 29855 - protein, 69 aa, Artificial Sequence
  Synthetic polypeptide
SGYIAYKLCNFLGQHNVFRFQFLGVCGGPGLPLQCQAGRRQNAARGGHRLAAGAAVRGAAATVLPAAPR

SEQ ID NO: 29856 - protein, 1066 aa, Artificial Sequence
  Synthetic polypeptide
VVDEWEKGLGITQIAFDLVISLTSCVTSLGNIMSLGFSFLVSAVGQDFPCSVRLGGGRMQPEEGTGWLLELLSEVQLQQYFLRLRDDLNVTRLSHFEYVKNEDLEKIGMGRPGQRRLWEAVKRRKALCKRKSWMSKVFSGKRLEAEFPPHHSQSTFRKTSPAPGGPAGEGPLQSLTCLIGEKDLRLLEKLGDGSFGVVRRGEWDAPSGKTVSVAVKCLKPDVLSQPEAMDDFIREVNAMHSLDHRNLIRLYGVVLTPPMKMVTELAPLGSLLDRLRKHQGHFLLGTLSRYAVQVAEGMGYLESKRFIHRDLAARNLLLATRDLVKIGDFGLMRALPQNDDHYVMQEHRKVPFAWCAPESLKTRTFSHASDTWMFGVTLWEMFTYGQEPWIGLNGSQILHKIDKEGERLPRPEDCPQDIYNVMVQCWAHKPEDRPTFVALRDFLLEAQPTDMRALQDFEEPDKLHIQMNDVITVIEGRAENYWWRGQNTRTLCVGPFPRNVVTSVAGLSAQDISQPLQNSFIHTGHGDSDPRHCWGFPDRIDELYLGNPMDPPDLLSVELSTSRPPQHLGGVKKPTYDPVSEDQDPLSSDFKRLGLRKPGLPRGLWLAKPSARVPGTKASRGSGAEVTLIDFGEEPVVPALRPCAPSLAQLAMDACSLLDETPPQSPTRALPRPLHPTPVVDWDARPLPPPPAYDDVAQDEDDFEICSINSTLVGAGVPAGPSQGQTNYAFVPEQARPPPPLEDNLFLPPQGGGKPPSSAQTAEIFQALQQECMRQLQAPAGSPAPSPSPGGDDKPQVPPRVPIPPRPTRPHVQLSPAPPGEEETSQWPGPASPPRVPPREPLSPQGSRTPSPLVPPGSSPLPPRLSSSPGKTMPTTQSFASDPKYATPQVIQAPGPRAGPCILPIVRDGKKVSSTHYYLLPERPSYLERYQRFLREAQSPEEPTPLPVPLLLPPPSTPAPAAPTATVRPMPQAALDPKANFSTNNSNPGARPPPPRATARLPQRGCPGDGPEAGRPADKIQMVEQLFGLGLRPRGECHKVLEMFDWNLEQAGCHLLGSWGPAHHKR

SEQ ID NO: 29857 - protein, 137 aa, Artificial Sequence
  Synthetic polypeptide
VVDEWEKGLGITQIAFDLVISLTSCVTSLGNIMSLGFSFLVSAVGQDFPCSVRLGGGRMQPEEGTGWLLELLSEVQLQQYFLRLRDDLNVTRLSHFEYVKNEDLEKIGMGRPGQRRLWEAVKRRKALCKRKSWMSKV

SEQ ID NO: 29858 - protein, 22 aa, Artificial Sequence
  Synthetic polypeptide
FNKHYRYQQLQGFCQPTVVYAY

SEQ ID NO: 29859 - protein, 276 aa, Artificial Sequence
  Synthetic polypeptide
LTSTTGTSNFKVSASPLLYTLIEKTMQNVKHPVTGQFLYQDSNWASKVEKLTLDNAAFPFLAYSGIPAVSFCFCEDTDYPYLGTTMDTYKELIERIPELNKVARAAAEVAGQFVIKLTHDVELNLDYERYNSQLLSFVRDLNQYRADIKEMGLSLQWLYSARGDFFRATSRLTTDFGNAEKTDRFVMKKLNDRVMRVEYHFLSPYVSPKESPFRHVFWGSGSHTLPALLENLKLRKQNNGAFNETLFRNQLALATWTIQGAANALSGDVWDIDNEF

SEQ ID NO: 29860 - protein, 27 aa, Artificial Sequence
  Synthetic polypeptide
QALQVPATSRFLPAHCCIRLLRKQCKM

SEQ ID NO: 29861 - protein, 24 aa, Artificial Sequence
  Synthetic polypeptide
NPVSTENTKISQPWALWNLPSLAS

SEQ ID NO: 29862 - protein, 47 aa, Artificial Sequence
  Synthetic polypeptide
SQHFGRPRQADHLRSRVQDQPGQCGEILSLLKIQKLASPGPCGTCPH

SEQ ID NO: 29863 - protein, 297 aa, Artificial Sequence
  Synthetic polypeptide
PALGPVELALTSILTLLALGSIAIFLEDAVYLYKNTLCPIKRRTLLWKSSAPTVVSVLCCFGLWIPRSLVLVEMTITSFYAVCFYLLMLVMVEGFGGKEAVLRTLRDTPMMVHTGPCCCCCPCCPRLLLTRKKLQLLMLGPFQYAFLKITLTLVGLFLVPDGIYDPADISEGSTALWINTFLGVSTLLALWTLGIISRQARLHLGEQNMGAKFALFQVLLILTALQPSIFSVLANGGQIACSPPYSSKTRSQVMNCHLLILETFLMTVLTRMYYRRKDHKVGYETFSSPDLDLNLKA

SEQ ID NO: 29864 - protein, 198 aa, Artificial Sequence
  Synthetic polypeptide
PALGPVELALTSILTLLALGSIAIFLEDAVYLYKNTLCPIKRRTLLWKSSAPTLATFKERCLECVGFASCVLAAKGFRSLRVSLPPSPAPAPSEQVVSVLCCFGLWIPRSLVLVEMTITSFYAVCFYLLMLVMVEGFGGKEAVLRTLRDTPMMVHTGPCCCCCPCCPRLLLTRKKLQLLMLGPFQYAFLKITLTLVGL

SEQ ID NO: 29865 - protein, 141 aa, Artificial Sequence
  Synthetic polypeptide
HGERPVRVYADGIFDLFHSGHARALMQAKNLFPNTYLIVGVCSDELTHNFKGFTVMNENERYDAVQHCRYVDEVVRNAPWTLTPEFLAEHRGMNSIAFVCRKPEARPLFTLGLITRPRPLPRRGSSHLESQHFGRPKRTDH

SEQ ID NO: 29866 - protein, 15 aa, Artificial Sequence
  Synthetic polypeptide
CQEFETSLVNMVSDL

SEQ ID NO: 29867 - protein, 34 aa, Artificial Sequence
  Synthetic polypeptide
PGVVAHTCNPSTLDTKAGRSSLDVRSSRPAWLTW

SEQ ID NO: 29868 - protein, 309 aa, Artificial Sequence
  Synthetic polypeptide
HGERPVRVYADGIFDLFHSGHARALMQAKNLFPNTYLIVGVCSDELTHNFKGFTVMNENERYDAVQHCRYVDEVVRNAPWTLTPEFLAEHRIDFVAHDDIPYSSAGSDDVYKHIKEAGMFAPTQRTEGISTSDIITRIVRDYDVYARRNLQRGYTAKELNVSFINEKKYHLQERVDKVKKKVKDVEEKSKEFVQKVEEKSIDLIQKWEEKSREFIGSFLEMFGPEGALKHMLKEGKGRMLQAISPKQSPSSSPTRERSPSPSFRWPFSGKTSPPCSPANLSRHKAAAYDIRYSYLEQSKFGSHVLLTQV

SEQ ID NO: 29869 - protein, 296 aa, Artificial Sequence
  Synthetic polypeptide
HGERPVRVYADGIFDLFHSGHARALMQAKNLFPNTYLIVGVCSDELTHNFKGFTVMNENERYDAVQHCRYVDEVVRNAPWTLTPEFLAEHRIDFVAHDDIPYSSAGSDDVYKHIKEAGMFAPTQRTEGISTSDIITRIVRDYDVYARRNLQRGYTAKELNVSFINEKKYHLQERVDKVKKKVKDVEEKSKEFVQKVEEKSIDLIQKWEEKSREFIGSFLEMFGPEGALKHMLKEGKGRMLQAISPKQSPSSSPTRERSPSPSFRWPFSGKTSPPCSPANLSRHKAAAYDISEDEED

SEQ ID NO: 29870 - protein, 222 aa, Artificial Sequence
  Synthetic polypeptide
HGERPVRVYADGIFDLFHSGHARALMQAKNLFPNTYLIVGVCSDELTHNFKGFTVMNENERYDAVQHCRYVDEVVRNAPWTLTPEFLAEHRIDFVAHDDIPYSSAGSDDVYKHIKEAGMFAPTQRTEGISTSDIITRIVRDYDVYARRNLQRGYTAKELNVSFINEKKYHLQERVDKVKKKVKDVEEKSKEFVQKVEEKSIDLIQKWEEKSREFIGSFLEMF

SEQ ID NO: 29871 - protein, 196 aa, Artificial Sequence
  Synthetic polypeptide
HGERPVRVYADGIFDLFHSGHARALMQAKNLFPNTYLIVGVCSDELTHNFKGFTVMNENERYDAVQHCRYVDEVVRNAPWTLTPEFLAEHRIDFVAHDDIPYSSAGSDDVYKHIKEAGMFAPTQRTEGISTSDIITRIVRDYDVYARRNLQRGYTAKELNVSFINVSSSLTPEFPDSVGDISPPTPSQLNWLCSWL

SEQ ID NO: 29872 - protein, 63 aa, Artificial Sequence
  Synthetic polypeptide
HGERPVRVYADGIFDLFHSGHARALMQAKNLFPNTYLIVGDFFPVGEDGCSPKQWEKMGEVGG

SEQ ID NO: 29873 - protein, 62 aa, Artificial Sequence
  Synthetic polypeptide
HGERPVRVYADGIFDLFHSGHARALMQAKNLFPNTYLIVGVCSDELTHNFKGFTVMNENERY

SEQ ID NO: 29874 - protein, 44 aa, Artificial Sequence
  Synthetic polypeptide
HGERPVRVYADGIFDLFHSGHARALMQAKNLFPNTYLIVGVCSD

SEQ ID NO: 29875 - protein, 10 aa, Artificial Sequence
  Synthetic polypeptide
KLSVCLHSKV

SEQ ID NO: 29876 - protein, 12 aa, Artificial Sequence
  Synthetic polypeptide
NRNFQCVYIVRL

SEQ ID NO: 29877 - protein, 8 aa, Artificial Sequence
  Synthetic polypeptide
AECDEQFL

SEQ ID NO: 29878 - protein, 412 aa, Artificial Sequence
  Synthetic polypeptide
AQEFETSLGNKVRPCFFRKINNEPSVMNNFCEGSISASPLNSRKSDPVTPKSEKKSKNKQRNTGDIQKYLTPKSQFGSASHSEAVQEVRKDSVSKDIDSSDRKSPTGQDTEIEDMPTLSPQISLGVGEQGADSSIESPMPWLCACGAEWYHEGNVKTRPSNHGKELCVLSHERPKTRVPYSKETAVMPCGRTESGCAPTSGVTQTNGNNTGETENEESCLLISKEISKRKNQESSFEAVKDPCFSAKRRKVSPESSPDQEETEINFTQKLIDLEHLLFERHKQEEQDRLLALQLQKEVDKEQMVPNRQKGSPDEYHLRATSSPPDKVLNGQRKNPKDGNFKRQTHTKHPTPERGSRDKNRQVSLKMQLKQSVNRRKMPNSTRDHCKVSKSAHSLQPSISQKSVFQMFQRCTK

SEQ ID NO: 29879 - protein, 10 aa, Artificial Sequence
  Synthetic polypeptide
DQPGQQKQFL

SEQ ID NO: 29880 - protein, 396 aa, Artificial Sequence
  Synthetic polypeptide
AQEFETSLGNKNNFCEGSISASPLNSRKSDPVTPKSEKKSKNKQRNTGDIQKYLTPKSQFGSASHSEAVQEVRKDSVSKDIDSSDRKSPTGQDTEIEDMPTLSPQISLGVGEQGADSSIESPMPWLCACGAEWYHEGNVKTRPSNHGKELCVLSHERPKTRVPYSKETAVMPCGRTESGCAPTSGVTQTNGNNTGETENEESCLLISKEISKRKNQESSFEAVKDPCFSAKRRKVSPESSPDQEETEINFTQKLIDLEHLLFERHKQEEQDRLLALQLQKEVDKEQMVPNRQKGSPDEYHLRATSSPPDKVLNGQRKNPKDGNFKRQTHTKHPTPERGSRDKNRQVSLKMQLKQSVNRRKMPNSTRDHCKVSKSAHSLQPSISQKSVFQMFQRCTK

SEQ ID NO: 29881 - protein, 44 aa, Artificial Sequence
  Synthetic polypeptide
VRWLGPVIPVHWEAEARGSLEPRSLRPAWATKTISVREVSRLLP

SEQ ID NO: 29882 - protein, 8 aa, Artificial Sequence
  Synthetic polypeptide
SQHFGRPR

SEQ ID NO: 29883 - protein, 215 aa, Artificial Sequence
  Synthetic polypeptide
GRAQWLMPVIPALWEAEVMLWSLQKARPLWITNLQEDETEEMEGPQSPGQLLNPALAHSISVASCGNIFSCGAEDGKVRIFRVMGVKCEQELGFKGHTSGVSQVCFLPESYLLLTGGNDGKITLWDANSEVEKKQKSPTKRTHRKKPKRGTCTKQGGNTNASVTDEEEHGNILPKLNIEHGEKVNWLLGTKIKGHQNILVADQTSCISVYPLNEF

SEQ ID NO: 29884 - protein, 36 aa, Artificial Sequence
  Synthetic polypeptide
QGTVAHACNPSTLGGRGDAVESSKSPTTLDYKFTGG

SEQ ID NO: 29885 - protein, 134 aa, Artificial Sequence
  Synthetic polypeptide
AETAGSGGGSGGPRAGCCPSCGAAPWCASTGTAACTAMRTARCGGACAPAAWQKRLCARTSCATCPATRPRYVLFNMPSALMTAPGMSTLRRMALLYIETPLLRALMVQGPRLVSVRAAMHGKCGGRALWALWQ

SEQ ID NO: 29886 - protein, 37 aa, Artificial Sequence
  Synthetic polypeptide
QRRREAAAAAAALGPAAVRAAELRPGVQALVPLPARR

SEQ ID NO: 29887 - protein, 237 aa, Artificial Sequence
  Synthetic polypeptide
GRLLSELRSCALVCKHWYRCLHGDENSEVWRSLCARSLAEEALRTDILCNLPSYKAKIRAFQHAFSTNDCSRNVYIKKNGFTLHRNPIAQSTDGARTKIGFSEGRHAWEVWWEGPLGTVAVIGIATKRAPMQCQGYVALLGSDDQSWGWNLVDNNLLHNGEVNGSFPQCNNAPKYQIGERIRVILDMEDKTLAFERGYEFLGVAFRGLPKVCLYPAVSAVYGNTEVTLVYLGKPLDG

SEQ ID NO: 29888 - protein, 6 aa, Artificial Sequence
  Synthetic polypeptide
QGGWSR

SEQ ID NO: 29889 - protein, 669 aa, Artificial Sequence
  Synthetic polypeptide
AEITPLHSSLGDRVGGAADCRGQSLASVPSSLPPHARMLTLDANPLKTLWNHSLQPYPLLESLSLHSCHLERISRGAFQEQGHLRSLVLGDNCLSENYEETAAALHALPGLRRLDLSGNALTEDMAALMLQNLSSLRSVSLAGNTIMRLDDSVFEGLERLRELDLQRNYIFEIEGGAFDGLAELRHLNLAFNNLPCIVDFGLTRLRVLNVSYNVLEWFLATGGEAAFELETLDLSHNQLLFFPLLPQYSKLRTLLLRDNNMGFYRDLYNTSSPREMVAQFLLVDGNVTNITTVSLWEEFSSSDLADLRFLDMSQNQFQYLPDGFLRKMPSLSHLNLHQNCLMTLHIREHEPPGALTELDLSHNQLSELHLAPGLASCLGSLRLFNLSSNQLLGVPPGLFANARNITTLDMSHNQISLCPLPAASDRVGPPSCVDFRNMASLRSLSLEGCGLGALPDCPFQGTSLTYLDLSSNWGVLNGSLAPLQDVAPMLQVLSLRNMGLHSSFMALDFSGFGNLRDLDLSGNCLTTFPRFGGSLALETLDLRRNSLTALPQKAVSEQLSRGLRTIYLSQNPYDCCGVDGWGALQHGQTVADWAMVTCNLSSKIIRVTELPGGVPRDCKWERLDLGLLYLVLILPSCLTLLVACTVIVLTFKKPLLQVIKSRCHWSSVY

SEQ ID NO: 29890 - protein, 142 aa, Artificial Sequence
  Synthetic polypeptide
SQLLGRLKQENCSNPGGRDCSELRSHHCTPAWVTGWVEPLTAEGRASLRCPAASRPTPGCSPWMPTLSRPCGITPSSLTLSWRASACTAATWSASAAAPSRSKVTCAAWSWGTTASQRTTKRRQPPSTPCRACGGWTCQETP

SEQ ID NO: 29891 - protein, 176 aa, Artificial Sequence
  Synthetic polypeptide
SQHFGRSRTPDHEVTSSRPAWQTRDLLIKVKFGESIEDLHTCRLLIKQDIPAGLYVDPYELASLRERNITEAVMVSENFDIEAPNYLSKESEVLIYARRDSQCIDCFQAFLPVHCRYHRPHSEDGEASIVVNNPDLLMFCDQEFPILKCWAHSEVAAPCALENEDICQWNKMKYKS

SEQ ID NO: 29892 - protein, 35 aa, Artificial Sequence
  Synthetic polypeptide
MGTVAHACNPSTLGGRGPRITRSRVRDQRGKHETF

SEQ ID NO: 29893 - protein, 44 aa, Artificial Sequence
  Synthetic polypeptide
WARWLMPVIPALWEVEDPGSRGHEFETSVANTRPFNQSEVWGKH

SEQ ID NO: 29894 - protein, 223 aa, Artificial Sequence
  Synthetic polypeptide
SQHFGRSRTPDHEVTSSRPAWQTRDLLIKVKFGESIEDLHTCRLLIKQDIPAGLYVDPYELASLRERNITEAVMVSENFDIEAPNYLSKESEVLIYARRDSQCIDCFQAFLPVHCRYHRPHSEDGEASIVVNNPDLLMFCDQEFPILKCWAHSEVAAPCALENEDICQWNKMKYKSVYKNVILQVPVGLTVHTSLVCSVTLLITILCSTLILVAVFKYGHFSL

SEQ ID NO: 29895 - protein, 241 aa, Artificial Sequence
  Synthetic polypeptide
SQHFGRSRTPDHEVTSSRPAWQTRDLLIKVKFGESIEDLHTCRLLIKQDIPAGLYVDPYELASLRERNITEAVMVSENFDIEAPNYLSKESEVLIYARRDSQCIDCFQAFLPVHCRYHRPHSEDGEASIVVNNPDLLMFCDQAGSRRMIRFRFDSFDKTIEFPILKCWAHSEVAAPCALENEDICQWNKMKYKSVYKNVILQVPVGLTVHTSLVCSVTLLITILCSTLILVAVFKYGHFSL

SEQ ID NO: 29896 - protein, 85 aa, Artificial Sequence
  Synthetic polypeptide
SQHFGRSRTPDHEVTSSRPAWQTRDLLIKVKFGESIEDLHTCRLLIKQDIPAGLYVDPYELASLRERNITEEKTSWRRLWLPSDN

SEQ ID NO: 29897 - protein, 156 aa, Artificial Sequence
  Synthetic polypeptide
SQHFGRSRTPDHEVTSSRPAWQTRDLLIKVKFGESIEDLHTCRLLIKQDIPAGLYVDPYELASLRERNITEAVMVSENFDIEAPNYLSKESEVLIYARRDSQCIDCFQAFLPVHCRYHRPHSEDGEASIVVNNPDLLMFCDQGEGCKCFLRVETSE

SEQ ID NO: 29898 - protein, 133 aa, Artificial Sequence
  Synthetic polypeptide
SQHFGRSRTPDHEVTSSRPAWQTRDLLIKVKFGESIEDLHTCRLLIKQDIPAGLYVDPYELASLRERNITEAVMVSENFDIEAPNYLSKESEVLIYARRDSQCIDCFQAFLPVHCRYHRPHSEDGEASIVVNN

SEQ ID NO: 29899 - protein, 36 aa, Artificial Sequence
  Synthetic polypeptide
SQLLGRLRQENHLNTGGGGYSEPRSWHRTPAWGTGK

SEQ ID NO: 29900 - protein, 483 aa, Artificial Sequence
  Synthetic polypeptide
IREVEVTVSQDRGTALQPGEQGSKKKEKERPEISPPSDFEHTIHVGFDAVTGEFTGMPEQWARLLQTSNITKLEQKKNPQAVLDVLKFYDSNTVKQKYLSFTPPEKDGFPSGTPALNAKGTEAPAVVTEEEDDDEETAPPVIAPRPDHTKSIYTRSVIDPVPAPVGDSHVDGAAKSLDKQKKKTKMTDEEIMEKLRTIVSIGDPKKKYTRYEKIGQGASGTVFTATDVALGQEVAIKQINLQKQPKKELIINEILVMKELKNPNIVNFLDSYLVGDELFVVMEYLAGGSLTDVVTETCMDEAQIAAVCRECLQALEFLHANQVIHRDIKSDNVLLGMEGSVKLTDFGFCAQITPEQSKRSTMVGTPYWMAPEVVTRKAYGPKVDIWSLGIMAIEMVEGEPPYLNENPLRALYLIATNGTPELQNPEKLSPIFRDFLNRCLEMDVEKRGSAKELLQHPFLKLAKPLSSLTPLIMAAKEAMKSNR

SEQ ID NO: 29901 - protein, 64 aa, Artificial Sequence
  Synthetic polypeptide
AKIVAPHSSLGNREVKRKKRNGQKFLLHLILSTPSMLALMLLLENSLACQNSGLDYYRPPISPN

SEQ ID NO: 29902 - protein, 380 aa, Artificial Sequence
  Synthetic polypeptide
STRLPPYLRWCVLSTPEIQKCGDMAVAFRRQRLKPEIQCVSAKSPQHCMERIQAEQVDAVTLSGEDIYTAGKTYGLVPAAGEHYAPEDSSNSYYVVAVVRRDSSHAFTLDELRGKRSCHAGFGSPAGWDVPVGALIQRGFIRPKDCDVLTAVSEFFNASCVPVNNPKNYPSSLCALCVGDEQGRNKCVGNSQERYYGYRGAFRCLVENAGDVAFVRHTTVFDNTNGHNSEPWAAELRSEDYELLCPNGARAEVSQFAACNLAQIPPHAVMVRPDTNIFTVYGLLDKAQDLFGDDHNKNGFKMFDSSNYHGQDLLFKDATVRAVPVGEKTTYRGWLGLDYVAALEGMSSQQCSGAAAPAPGAPLLPLLLPALAARLLPPAL

SEQ ID NO: 29903 - protein, 102 aa, Artificial Sequence
  Synthetic polypeptide
SPPHPRPWHPVSSSTASRSYSPPLPHGYSPGAGAIFRLDYCSSLQGCPPTCAGVCSPLPRSRSVETWPWPSAGSGSSQRSSACQPSPPNTAWSGSRLSRSTL

SEQ ID NO: 29904 - protein, 96 aa, Artificial Sequence
  Synthetic polypeptide
RPPIHGHGILSALLQPLAPTPRLYPMATALAQVPSFAWTIAVVYKAAPLPALVCALHSRDPEVWRHGRGLPPAAAQARDPVRVSQVPPTLHGADPG

SEQ ID NO: 29905 - protein, 131 aa, Artificial Sequence
  Synthetic polypeptide
GQVWRLTPVIPALWEAEGRRFPPGARPCCHRTSSCCAGMVAGPMSPSGGSAIWPGCLLTPWWSGPTQMGASSSGCSTKASVCSATRAAASRCSALRPMARRIYSSKTLPRSLCPSPHRPMRRGWAMSTCTP

SEQ ID NO: 29906 - protein, 30 aa, Artificial Sequence
  Synthetic polypeptide
SQHFGRPREDASLLGPGPAVTGLRAAVPGW

SEQ ID NO: 29907 - protein, 517 aa, Artificial Sequence
  Synthetic polypeptide
PGVEAHACNPSTLGGRGKTLPSWGQALLSQDFELLCRDGSRADVTEWRQCHLARVPAHAVVVRADTDGGLIFRLLNEGQRLFSHEGSSFQMFSSEAYGQKDLLFKDSTSELVPIATQTYEAWLGHEYLHAMKGLLCDPNRLPPYLRWCVLSTPEIQKCGDMAVAFRRQRLKPEIQCVSAKSPQHCMERIQAEQVDAVTLSGEDIYTAGKTYGLVPAAGEHYAPEDSSNSYYVVAVVRRDSSHAFTLDELRGKRSCHAGFGSPAGWDVPVGALIQRGFIRPKDCDVLTAVSEFFNASCVPVNNPKNYPSSLCALCVGDEQGRNKCVGNSQERYYGYRGAFRCLVENAGDVAFVRHTTVFDNTNGHNSEPWAAELRSEDYELLCPNGARAEVSQFAACNLAQIPPHAVMVRPDTNIFTVYGLLDKAQDLFGDDHNKNGFKMFDSSNYHGQDLLFKDATVRAVPVGEKTTYRGWLGLDYVAALEGMSSQQCSGAAAPAPGAPLLPLLLPALAARLLPPAL

SEQ ID NO: 29908 - protein, 271 aa, Artificial Sequence
  Synthetic polypeptide
TELMRVQWKFGRMQLSHHLRKARNKNPCRFHALREVILKKLKGLKLEHVTSNASDSESSYRGQEEYVLSYEPVNQQEVNYTRPVIILGPMKDRINDDLISEFPDKFGSCVPHTTRPKRDYEVDGRDYHFVTSREQMEKDIQEHKFIEAGQYNNHLYGTSVQSVREVAEKGKHCILDVSGNAIKRLQIAQLYPISIFIKPKSMENIMEMNKRLTEEQARKTFERAMKLEQEFTEHFTAIVQGDTLEDIYNQVKQIIEEQSGSYIWVPAKEKL

SEQ ID NO: 29909 - protein, 26 aa, Artificial Sequence
  Synthetic polypeptide
KPVPLSCFKGGNFEKAQGTKTRACNF

SEQ ID NO: 29910 - protein, 283 aa, Artificial Sequence
  Synthetic polypeptide
TELMRVQWKFGRMQLSHHLRKARNKNPCRFHALREVILKKLKGLKLEHVTSNASDSESSYLILITDEYGCSKGGQEEYVLSYEPVNQQEVNYTRPVIILGPMKDRINDDLISEFPDKFGSCVPHTTRPKRDYEVDGRDYHFVTSREQMEKDIQEHKFIEAGQYNNHLYGTSVQSVREVAEKGKHCILDVSGNAIKRLQIAQLYPISIFIKPKSMENIMEMNKRLTEEQARKTFERAMKLEQEFTEHFTAIVQGDTLEDIYNQVKQIIEEQSGSYIWVPAKEKL

SEQ ID NO: 29911 - protein, 12 aa, Artificial Sequence
  Synthetic polypeptide
DLNANFSSAAEP

SEQ ID NO: 29912 - protein, 516 aa, Artificial Sequence
  Synthetic polypeptide
TLTLALLLSHEELYSSRPYGALDSGFNSVDSGDKRWSGNEPTDEFSDLPLRVAEITKEQRLRRESQYQENRGSLVVTNGGVEHDLDQIDYIDSCTAEEEEAEVRQPKGPDPDSLSSQFMAYIEQRRISHEGSPVKPVAIREFQKTEDMRRYLHQNRVPAEPSSLLSLSASHNQLSHTDLELHQRREQLVERTRREAQLAALQYEEEKIRTKQIQRDAVLDFVKQKASQSPQKQHPLLDGVDGECPFPSRRSQHTDDSALCMSLSGLNQVGCAATLPHSSAFTPLKSDDRPNALLSSPATETVHHSPAYSFPAAIQRNQPQRPESFLFRAGVRAETNKGHASPLPPSAAPTTDSTDSITGQNSRQREEELELIDQLRKHIEYRLKVSLPCDLGAALTDGVVLCHLANHVRPRSVPSIHVPSPAVPKLTMAKCRRNVENFLEACRKIGVPQDNLCSPSDILQLNLSVKRTVETLLSLGAHSEESSFVCLSLQLLGFVAFYCTVMLTLCVLYYWLFPAR

SEQ ID NO: 29913 - protein, 438 aa, Artificial Sequence
  Synthetic polypeptide
TLTLALLLSHEELYSSRPYGALDSGFNSVDSGDKRWSGNEPTDEFSDLPLRVAEITKEQRLRRESQYQENRGSLVVTNGGVEHDLDQIDYIDSCTAEEEEAEGSPVKPVAIREFQKTEDMRRYLHQNRVPAEPSSLLSLSASHNQLSHTDLELHQRREQLVERTRREAQLAALQYEEEKIRTKQIQRDAVLDFVKQKASQSPQKQHPLLDGVDGECPFPSRRSQHTDDSALCMSDDRPNALLSSPATETVHHSPAYSFPAAIQRNQPQRPESFLFRAGVRAETNKGHASPLPPSAAPTTDSTDSITGQNSRQREEELELIDQLRKHIEYRLKVSLPCDLGAALTDGVVLCHLANHVRPRSVPSIHVPSPAVPKLTMAKCRRNVENFLEACRKIGVPQEQLCLPLHILEEKGLSQVAVTVQALLELAPPKQQQHQLSAV

SEQ ID NO: 29914 - protein, 462 aa, Artificial Sequence
  Synthetic polypeptide
TLTLALLLSHEELYSSRPYGALDSGFNSVDSGDKRWSGNEPTDEFSDLPLRVAEITKEQRLRRESQYQENRGSLVVTNGGVEHDLDQIDYIDSCTAEEEEAEGSPVKPVAIREFQKTEDMRRYLHQNRVPAEPSSLLSLSASHNQLSHTDLELHQRREQLVERTRREAQLAALQYEEEKIRTKQIQRDAVLDFVKQKASQSPQKQHPLLDGVDGECPFPSRRSQHTDDSALCMSLSGLNQVGCAATLPHSSAFTPLKSDDRPNALLSSPATETVHHSPAYSFPAAIQRNQPQRPESFLFRAGVRAETNKGHASPLPPSAAPTTDSTDSITGQNSRQREEELELIDQLRKHIEYRLKVSLPCDLGAALTDGVVLCHLANHVRPRSVPSIHVPSPAVPKLTMAKCRRNVENFLEACRKIGVPQEQLCLPLHILEEKGLSQVAVTVQALLELAPPKQQQHQLSAV

SEQ ID NO: 29915 - protein, 425 aa, Artificial Sequence
  Synthetic polypeptide
TLTLALLLSHEELYSSRPYGALDSGFNSVDSGDKRWSGNEPTDEFSDLPLRVAEITKEQRLRRESQYQENRGSLVVTNGGVEHDLDQIDYIDSCTAEEEEAEVRQPKGPDPDSLSSQFMAYIEQRRISHEGSPVKPVAIREFQKTEDMRRYLHQNRVPAEPSSLLSLSASHNQLSHTDLELHQRREQLVERTRREAQLAALQYEEEKIRTKQIQRDAVLDFVKQKASQSPQKQHPLLDGVDGECPFPSRRSQHTDDSALCMSLSGLNQVGCAATLPHSSAFTPLKSDDRPNALLSSPATETVHHSPAYSFPAAIQRNQPQRPESFLFRAGVRAETNKGHASPLPPSAAPTTDSTDSITGQNSRQREEELELIDQLRKHIEYRLKVSLPCDLGAALTDGVVLCHLANHVRPRSVPSIHVPSPAVVS

SEQ ID NO: 29916 - protein, 490 aa, Artificial Sequence
  Synthetic polypeptide
TLTLALLLSHEELYSSRPYGALDSGFNSVDSGDKRWSGNEPTDEFSDLPLRVAEITKEQRLRRESQYQENRGSLVVTNGGVEHDLDQIDYIDSCTAEEEEAEVRQPKGPDPDSLSSQFMAYIEQRRISHEGSPVKPVAIREFQKTEDMRRYLHQNRVPAEPSSLLSLSASHNQLSHTDLELHQRREQLVERTRREAQLAALQYEEEKIRTKQIQRDAVLDFVKQKASQSPQKQHPLLDGVDGECPFPSRRSQHTDDSALCMSLSGLNQVGCAATLPHSSAFTPLKSDDRPNALLSSPATETVHHSPAYSFPAAIQRNQPQRPESFLFRAGVRAETNKGHASPLPPSAAPTTDSTDSITGQNSRQREEELELIDQLRKHIEYRLKVSLPCDLGAALTDGVVLCHLANHVRPRSVPSIHVPSPAVPKLTMAKCRRNVENFLEACRKIGVPQEQLCLPLHILEEKGLSQVAVTVQALLELAPPKQQQHQLSAV

SEQ ID NO: 29917 - protein, 7 aa, Artificial Sequence
  Synthetic polypeptide
DQPGQYT

SEQ ID NO: 29918 - protein, 112 aa, Artificial Sequence
  Synthetic polypeptide
ETSRRITCGWEFKTSLGNIPKLTMAKCRRNVENFLEACRKIGVPQDNLCSPSDILQLNLSVKRTVETLLSLGAHSEESSFVCLSLQLLGFVAFYCTVMLTLCVLYYWLFPAR

SEQ ID NO: 29919 - protein, 21 aa, Artificial Sequence
  Synthetic polypeptide
RQAGGSPVAGSLRPAWAIYLN

SEQ ID NO: 29920 - protein, 86 aa, Artificial Sequence
  Synthetic polypeptide
ETSRRITCGWEFKTSLGNIPKLTMAKCRRNVENFLEACRKIGVPQEQLCLPLHILEEKGLSQVAVTVQALLELAPPKQQQHQLSAV

SEQ ID NO: 29921 - protein, 61 aa, Artificial Sequence
  Synthetic polypeptide
ETSRRITCGWEFKTSLGNIPKLTMAKCRRNVENFLEACRKIGVPQDNLCSPSDILQLNLSV

SEQ ID NO: 29922 - protein, 380 aa, Artificial Sequence
  Synthetic polypeptide
LCVNLHSVMEWCPMQGGLLPCTLSYGESLWPPVTLSWNNWMDPIQKAVINHTFGVPLPHRRKQIISCNICQLRFNSDSQAAAHYKGTKHAKKLKALEAMKNKQKSVTAKDSAKTTFTSITTNTINTSSDKTDGTAGTPAISTTTTVEIRKSSVMTTEITSKVEKSPTTATGNSSCPSTETEEEKAKRLLYCSLCKVAVNSASQLEAHNSGTKHKTMLEARNGSGTIKAFPRAGVKGKGPVNKGNTGLQNKTFHCEICDVHVNSETQLKQHISSRRHKDRAAGKPPKPKYSPYNKLQKTAHPLGVKLVFSKEPSKPLAPRILPNPLAAAAAAAAVAVSSPFSLRTAPAATLFQTSALPPALLRPAPGPIRTAHTPVLFAPY

SEQ ID NO: 29923 - protein, 12 aa, Artificial Sequence
  Synthetic polypeptide
AGITGWTRFRKL

SEQ ID NO: 29924 - protein, 35 aa, Artificial Sequence
  Synthetic polypeptide
LDGPDSESCNKPYIRGSSSPPKKANHIMQHLPVEI

SEQ ID NO: 29925 - protein, 88 aa, Artificial Sequence
  Synthetic polypeptide
LCVNLHSVMEWCPMQGGLLPCTLSYGESLWPPVTLSWNNWMDPIQKAVINHTFGVPLPHRRKQIISCNICQLRFNSDMAQAKELDWPH

SEQ ID NO: 29926 - protein, 57 aa, Artificial Sequence
  Synthetic polypeptide
GVEPRWPNRNSSQHERRRRRVTSAFPTELTLAWQSKNKKTVNSPLWLEQSCILAPRY

SEQ ID NO: 29927 - protein, 7 aa, Artificial Sequence
  Synthetic polypeptide
LLHFQLS

SEQ ID NO: 29928 - protein, 69 aa, Artificial Sequence
  Synthetic polypeptide
GVEPRWPNRNSSQHERRRRRVTSAFPTELTLAWQSKNKKTVNSPLWLEQSCILVCSTSTFALLLLLWPH

SEQ ID NO: 29929 - protein, 56 aa, Artificial Sequence
  Synthetic polypeptide
GVEPRWPNRNSSQHERRRRRVTSAFPTELTLAWQSKNKKTVNSPLWLEQSCILVVS

SEQ ID NO: 29930 - protein, 71 aa, Artificial Sequence
  Synthetic polypeptide
GWAWWHTPVIPALWEAEAGGSPEVRSSRPAWPTCCSICNQCCLLCWSDGATDVDFDSSRVYAVCNCLFKCF

SEQ ID NO: 29931 - protein, 408 aa, Artificial Sequence
  Synthetic polypeptide
SQHFGRPRRADHLRSGVRDQPGQHVALYAISAVYFAGVMVRLMLTLTPVVCMLSAIAFSNVFEHYLGDDMKRENPPVEDSSDEDDKRNQGNLYDKAGKVRKHATEQEKTEEGLGPNIKSIVTMLMLMLLMMFAVHCTWVTSNAYSSPSVVLASYNHDGTRNILDDFREAYFWLRQNTDEHARVMSWWDYGYQIAGMANRTTLVDNNTWNNSHIALVGKAMSSNETAAYKIMRTLDVDYVLVIFGGVIGYSGDDINKFLWMVRIAEGEHPKDIRESDYFTPQGEFRVDKAGSPTLLNCLMYKMSYYRFGEMQLDFRTPPGFDRTRNAEIGNKDIKFKHLEEAFTSEHWLVRIYKVKAPDNRETLDHKPRVTNIFPKQKYLSKKTTKRKRGYIKNKLVFKKGKKISKKTV

SEQ ID NO: 29932 - protein, 24 aa, Artificial Sequence
  Synthetic polypeptide
GQEFETSLANMLLYMQSVLSTLLE

SEQ ID NO: 29933 - protein, 137 aa, Artificial Sequence
  Synthetic polypeptide
QEESDYFTPQGEFRVDKAGSPTLLNCLMYKMSYYRFGEMQLDFRTPPGFDRTRNAEIGNKDIKFKHLEEAFTSEHWLVRIYKVKAPDNRETLDHKPRVTNIFPKQKYLSKKTTKRKRGYIKNKLVFKKGKKISKKTV

SEQ ID NO: 29934 - protein, 37 aa, Artificial Sequence
  Synthetic polypeptide
RSPQTPGSGPALVRGLLGTRPHSRRKVTILPHRENSV

SEQ ID NO: 29935 - protein, 9 aa, Artificial Sequence
  Synthetic polypeptide
EPGHIAGGK

SEQ ID NO: 29936 - protein, 22 aa, Artificial Sequence
  Synthetic polypeptide
VHKLHQTTRGHRRGPRGAEAHF

SEQ ID NO: 29937 - protein, 58 aa, Artificial Sequence
  Synthetic polypeptide
NSENESINFTRLPGGIDEGPEGLKLISDIIREKMGIDISVLMGANIANEVAAEKFCET

SEQ ID NO: 29938 - protein, 8 aa, Artificial Sequence
  Synthetic polypeptide
TSPDYQGA

SEQ ID NO: 29939 - protein, 243 aa, Artificial Sequence
  Synthetic polypeptide
NSENESINFTRLPGGIDEGPEGLKLISDIIREKMGIDISVLMGANIANEVAAEKFCETTIGSKVMENGLLFKELLQTPNFRITVVDDADTVELCGALKNIVAVGAGFCDGLRCGDNTKAAVIRLGLMEMIAFARIFCKGQVSTATFLESCGVADLITTCYGGRNRRVAEAFARTGKTIEELEKEMLNGQKLQGPQTSAEVYRILKQKGLLDKFPLFTAVYQICYESRPVQEMLSCLQSHPEHT

SEQ ID NO: 29940 - protein, 11 aa, Artificial Sequence
  Synthetic polypeptide
VHKLHQTTRGH

SEQ ID NO: 29941 - protein, 16 aa, Artificial Sequence
  Synthetic polypeptide
NSENESINFTRLPGGI

SEQ ID NO: 29942 - protein, 112 aa, Artificial Sequence
  Synthetic polypeptide
NSENESINFTRLPGGIDEGPEGLKLISDIIREKMGIDISVLMGANIANEVAAEKFCETTIGSKVMENGLLFKELLQTPNFRITVVDDADTVELCGALKNIVAVGAGFCDGLR

SEQ ID NO: 29943 - protein, 75 aa, Artificial Sequence
  Synthetic polypeptide
NSENESINFTRLPGGIDEGPEGLKLISDIIREKMGIDISVLMGANIANEVAAEKFCETTIGSKVMENGLLFKELL

SEQ ID NO: 29944 - protein, 53 aa, Artificial Sequence
  Synthetic polypeptide
LYCCSLVAIICPDFLHQLPSWMSAPSCCLCWPSSVKKLYHNVLYVEDFIFLSL

SEQ ID NO: 29945 - protein, 28 aa, Artificial Sequence
  Synthetic polypeptide
SLLFALISYISFPVGCPPQVAVSAGLHL

SEQ ID NO: 29946 - protein, 150 aa, Artificial Sequence
  Synthetic polypeptide
FPTSASQLDVRPKLLSLLAFICEEVVSQCTLCGGLYFFEFVSCSAFLLSLLILIVYCTPFYERVDTTKVKSSDFYITLGTGCVFLLASIIFVSTHDRTSAEIAAIVFGFIASFMFLLDFITMLYEKRQESQLRKPENTTRAEALTEPLNA

SEQ ID NO: 29947 - protein, 8 aa, Artificial Sequence
  Synthetic polypeptide
PGGFNDPS

SEQ ID NO: 29948 - protein, 88 aa, Artificial Sequence
  Synthetic polypeptide
NPISTKNTKISQAASMIHPKEVPPEAILLAVYLELQNGNTQLALQIIKRNQLLPAVKTHSEVRKKPVFQPVHPIQPIQMPAFTTVQRK

SEQ ID NO: 29949 - protein, 23 aa, Artificial Sequence
  Synthetic polypeptide
DQPGQYGETPSLLKIQKLARRLQ

SEQ ID NO: 29950 - protein, 38 aa, Artificial Sequence
  Synthetic polypeptide
NPISTKNTKISQAASMIHPKEVPPEAILLAVYLELQNG

SEQ ID NO: 29951 - protein, 70 aa, Artificial Sequence
  Synthetic polypeptide
VISLTHGQPQLEKRCCTCTVTLALYPSVVSAQWAGMGATASSTSRRHCRTHGHSPSSCWQMPSRDDRQSS

SEQ ID NO: 29952 - protein, 18 aa, Artificial Sequence
  Synthetic polypeptide
SPLPTVSHSWKRGAAPVL

SEQ ID NO: 29953 - protein, 597 aa, Artificial Sequence
  Synthetic polypeptide
DLPYPRSATVGKEVLHLYCDTCSVPICRECTMGRHGGHSFIYLQEALQDSRALTIQLLADAQQGRQAIQLSIEQAQTVAEQVEMKAKVVQSEVKAVTARHKKALEERECELLWKVEKIRQVKAKSLYLQVEKLRQNLNKLESTISAVQQVLEEGRALDILLARDRMLAQVQELKTVRSLLQPQEDDRVMFTPPDQALYLAIKSFGFVSSGAFAPLTKATGDGLKRALQGKVASFTVIGYDHDGEPRLSGGDLMSAVVLGPDGNLFGAEVSDQQNGTYVVSYRPQLEGEHLVSVTLCNQHIENSPFKVVVKSGRSYVGIGLPGLSFGSEGDSDGKLCRPWGVSVDKEGYIIVADRSNNRIQVFKPCGAFHHKFGTLGSRPGQFDRPAGVACDASRRIVVADKDNHRIQIFTFEGQFLLKFGEKGTKNGQFNYPWDVAVNSEGKILVSDTRNHRIQLFGPDGVFLNKYGFEGALWKHFDSPRGVAFNHEGHLVVTDFNNHRLLVIHPDCQSARFLGSEGTGNGQFLRPQGVAVDQEGRIIVADSRNHRVQMFESNGSFLCKFGAQGSGFGQMDRPSGIAITPDGMIVVVDFGNNRILVF

SEQ ID NO: 29954 - protein, 41 aa, Artificial Sequence
  Synthetic polypeptide
PTWRNPISTKNTKLASLKKYQKVLSLHLHQSLHMERSLWKS

SEQ ID NO: 29955 - protein, 2 aa, Artificial Sequence
  Synthetic polypeptide
PV

SEQ ID NO: 29956 - protein, 327 aa, Artificial Sequence
  Synthetic polypeptide
KYKISQFEKVPEGPIPPSTPKFAYGKVTLEKLKTVGAALDILCPSGPIKSLYPLTFIQVKQHYGFVLYRTTLPQDCSNPAPLSSPLNGVHDRAYVAVDGIPQGVLERNNVITLNITGKAGATLDLLVENMGRVNYGAYINDFKGLVSNLTLSSNILTDWTIFPLDTEDAVCSHLGGWGHRDSGHHDEAWAHNSSNYTLPAFYMGNFSIPSGIPDLPQDTFIQFPGWTKGQVWINGFNLGRYWPARGPQLTLFVPQHILMTSAPNTITVLELEWAPCSSDDPELCAVTFVDRPVIGSSVTYDHPSKPVEKRLMPPPPQKNKDSWLDHV

SEQ ID NO: 29957 - protein, 956 aa, Artificial Sequence
  Synthetic polypeptide
FQHFERLSRPFSSKWSTANPSTVAGRVSAGSSKASSLPGSLQRSRSDIDVNAAAGAKAHHAAGQSVRSGRLGAGALNAGSYASLEDTSDKLDGTASEDGRVRAKLSAPLAGMGNAKADSRGRSRTKMVSQSQPGSRSGSPGRVLTTTALSTVSSGVQRVLVNSASAQKRSKIPRSQGCSREASPSRLSVARSSRIPRPSVSQGCSREASRESSRDTSPVRSFQPLGPGYGISQSSRLSSSVSAMRVLNTGSDVEEAVADALLLGDIRTKKKPARRRYESYGMHSDDDANSDASSACSERSYSSRNGSIPTYMRQTEDVAEVLNRCASSNWSERKEGLLGLQNLLKNQRTLSRVELKRLCEIFTRMFADPHGKVFSMFLETLVDFIQVHKDDLQDWLFVLLTQLLKKMGADLLGSVQAKVQKALDVTRESFPNDLQFNILMRFTVDQTQTPSLKVKVAILKYIETLAKQMDPGDFINSSETRLAVSRVITWTTEPKSSDVRKAAQSVLISLFELNTPEFTMLLGALPKTFQDGATKLLHNHLRNTGNGTQSSMGSPLTRPTPRSPANWSSPLTSPTNTSQNTLSPSAFDYDTENMNSEDIYSSLRGVTEAIQNFSFRSQEDMNEPLKRDSKKDDGDSMCGGPGMSDPRAGGDATDSSQTALDNKASLLHSMPTHSSPRSRDYNPYNYSDSISPFNKSALKEAMFDDDADQFPDDLSLDHSDLVAELLKELSNHNERVEERKIALYELMKLTQEESFSVWDEHFKTILLLLLETLGDKEPTIRALALKVLREILRHQPARFKNYAELTVMKTLEAHKDPHKEVVRSAEEAASVLATSISPEQCIKVLCPIIQTADYPINLAAIKMQTKVIERVSKETLNLLLPEIMPGLIQGYDNSESSVRKACVFCLVAVHAVIGDELKPHLSQLTGSKMKLLNLYIKRAQTGSGGADPTTDVSGQS

SEQ ID NO: 29958 - protein, 41 aa, Artificial Sequence
  Synthetic polypeptide
EAESPFFFQMVYSKSINCGWKSISRQQQSQFPSRKPAAFTK

SEQ ID NO: 29959 - protein, 754 aa, Artificial Sequence
  Synthetic polypeptide
FQHFERLSRPFSSKWSTANPSTVAGRVSAGSSKASSLPGSLQRSRSDIDVNAAAGAKAHHAAGQSVRSGRLGAGALNAGSYASLEDTSDKLDDLFSDNGRVRAKLSAPLAGMGNAKADSRGRSRTKMVSQSQRSSSPDKNEGSQSANTIGAGSRSGSPGRVLTTTALSTVSSGVQRVLVNSASAQKRSKIPRSQGCSREASPSRLSVARSSRIPRPSVSQGCSREASRESSRDTSPVRSFQPLGPGYGISQSSRLSSSVSAMRVLNTGSDVEEAVADALVLFDFKTKKKPARRRYESYGMHSDDDANSDASSACSERSYSSRNGSIPTYMRQTEDVAEVLNRCASSNWSERKEGLLGLQNLLKNQRTLSRVELKRLCEIFTRMFADPHGKVFSMFLETLVDFIQVHKDDLQDWLFVLLTQLLKKMGADLLGSVQAKVQKALDVTRESFPNDLQFNILMRFTVDQTQTPSLKVKVAILKYIETLAKQMDPGDFINSSETRLAVSRVITWTTEPKSSDVRKAAQSVLISLFELNTPEFTMLLGALPKTFQDGATKLLHNHLRNTGNGTQSSMGSPLTRPTPRSPANWSSPLTSPTNTSQNTLSPSAFDYDTENMNSEDIYSSLRGVTEAIQNFSFRSQEDMNEPLKRDSKKDDGDSMCGGPGMSDPRAGGDATDSSQTALDNKASLLHSMPTHSSPRSRDYNPYNYSDSISPFNKSALKEAMFDDDADQFPDDLSLDHSDLVAELLKELSNHNERV

SEQ ID NO: 29960 - protein, 949 aa, Artificial Sequence
  Synthetic polypeptide
FQHFERLSRPFSSKWSTANPSTVAGRVSAGSSKASSLPGSLQRSRSDIDVNAAAGAKAHHAAGQSVRSGRLGAGALNAGSYASLEDTSDKLDGTASEDGRVRAKLSAPLAGMGNAKADSRGRSRTKMVSQSQPGSRSGSPGRVLTTTALSTVSSGVQRVLVNSASAQKRSKIPRSQGCSREASPSRLSVARSSRIPRPSVSQGCSREASRESSRDTSPVRSFQPLGPGYGISQSSRLSSSVSAMRVLNTGSDVEEAVADALKKPARRRYESYGMHSDDDANSDASSACSERSYSSRNGSIPTYMRQTEDVAEVLNRCASSNWSERKEGLLGLQNLLKNQRTLSRVELKRLCEIFTRMFADPHGKRVFSMFLETLVDFIQVHKDDLQDWLFVLLTQLLKKMGADLLGSVQAKVQKALDVTRESFPNDLQFNILMRFTVDQTQTPSLKVKVAILKYIETLAKQMDPGDFINSSETRLAVSRVITWTTEPKSSDVRKAAQSVLISLFELNTPEFTMLLGALPKTFQDGATKLLHNHLRNTGNGTQSSMGSPLTRPTPRSPANWSSPLTSPTNTSQNTLSPSAFDYDTENMNSEDIYSSLRGVTEAIQNFSFRSQEDMNEPLKRDSKKDDGDSMCGGPGMSDPRAGGDATDSSQTALDNKASLLHSMPTHSSPRSRDYNPYNYSDSISPFNKSALKEAMFDDDADQFPDDLSLDHSDLVAELLKELSNHNERVEERKIALYELMKLTQEESFSVWDEHFKTILLLLLETLGDKEPTIRALALKVLREILRHQPARFKNYAELTVMKTLEAHKDPHKEVVRSAEEAASVLATSISPEQCIKVLCPIIQTADYPINLAAIKMQTKVIERVSKETLNLLLPEIMPGLIQGYDNSESSVRKACVFCLVAVHAVIGDELKPHLSQLTGSKMKLLNLYIKRAQTGSGGADPTTDVSGQS

SEQ ID NO: 29961 - protein, 948 aa, Artificial Sequence
  Synthetic polypeptide
FQHFERLSRPFSSKWSTANPSTVAGRVSAGSSKASSLPGSLQRSRSDIDVNAAAGAKAHHAAGQSVRSGRLGAGALNAGSYASLEDTSDKLDGTASEDGRVRAKLSAPLAGMGNAKADSRGRSRTKMVSQSQPGSRSGSPGRVLTTTALSTVSSGVQRVLVNSASAQKRSKIPRSQGCSREASPSRLSVARSSRIPRPSVSQGCSREASRESSRDTSPVRSFQPLGPGYGISQSSRLSSSVSAMRVLNTGSDVEEAVADALKKPARRRYESYGMHSDDDANSDASSACSERSYSSRNGSIPTYMRQTEDVAEVLNRCASSNWSERKEGLLGLQNLLKNQRTLSRVELKRLCEIFTRMFADPHGKVFSMFLETLVDFIQVHKDDLQDWLFVLLTQLLKKMGADLLGSVQAKVQKALDVTRESFPNDLQFNILMRFTVDQTQTPSLKVKVAILKYIETLAKQMDPGDFINSSETRLAVSRVITWTTEPKSSDVRKAAQSVLISLFELNTPEFTMLLGALPKTFQDGATKLLHNHLRNTGNGTQSSMGSPLTRPTPRSPANWSSPLTSPTNTSQNTLSPSAFDYDTENMNSEDIYSSLRGVTEAIQNFSFRSQEDMNEPLKRDSKKDDGDSMCGGPGMSDPRAGGDATDSSQTALDNKASLLHSMPTHSSPRSRDYNPYNYSDSISPFNKSALKEAMFDDDADQFPDDLSLDHSDLVAELLKELSNHNERVEERKIALYELMKLTQEESFSVWDEHFKTILLLLLETLGDKEPTIRALALKVLREILRHQPARFKNYAELTVMKTLEAHKDPHKEVVRSAEEAASVLATSISPEQCIKVLCPIIQTADYPINLAAIKMQTKVIERVSKETLNLLLPEIMPGLIQGYDNSESSVRKACVFCLVAVHAVIGDELKPHLSQLTGSKMKLLNLYIKRAQTGSGGADPTTDVSGQS

SEQ ID NO: 29962 - protein, 969 aa, Artificial Sequence
  Synthetic polypeptide
FQHFERLSRPFSSKWSTANPSTVAGRVSAGSSKASSLPGSLQRSRSDIDVNAAAGAKAHHAAGQSVRSGRLGAGALNAGSYASLEDTSDKLDGTASEDGRVRAKLSAPLAGMGNAKADSRGRSRTKMVSQSQPGSRSGSPGRVLTTTALSTVSSGVQRVLVNSASAQKRSKIPRSQGCSREASPSRLSVARSSRIPRPSVSQGCSREASRESSRDTSPVRSFQPLASRHHSRSTGALYAPEVYGASGPGYGISQSSRLSSSVSAMRVLNTGSDVEEAVADALKKPARRRYESYGMHSDDDANSDASSACSERSYSSRNGSIPTYMRQTEDVAEVLNRCASSNWSERKEGLLGLQNLLKNQRTLSRVELKRLCEIFTRMFADPHGKVFSMFLETLVDFIQVHKDDLQDWLFVLLTQLLKKMGADLLGSVQAKVQKALDVTRESFPNDLQFNILMRFTVDQTQTPSLKVKVAILKYIETLAKQMDPGDFINSSETRLAVSRVITWTTEPKSSDVRKAAQSVLISLFELNTPEFTMLLGALPKTFQDGATKLLHNHLRNTGNGTQSSMGSPLTRPTPRSPANWSSPLTSPTNTSQNTLSPSAFDYDTENMNSEDIYSSLRGVTEAIQNFSFRSQEDMNEPLKRDSKKDDGDSMCGGPGMSDPRAGGDATDSSQTALDNKASLLHSMPTHSSPRSRDYNPYNYSDSISPFNKSALKEAMFDDDADQFPDDLSLDHSDLVAELLKELSNHNERVEERKIALYELMKLTQEESFSVWDEHFKTILLLLLETLGDKEPTIRALALKVLREILRHQPARFKNYAELTVMKTLEAHKDPHKEVVRSAEEAASVLATSISPEQCIKVLCPIIQTADYPINLAAIKMQTKVIERVSKETLNLLLPEIMPGLIQGYDNSESSVRKACVFCLVAVHAVIGDELKPHLSQLTGSKMKLLNLYIKRAQTGSGGADPTTDVSGQS

SEQ ID NO: 29963 - protein, 101 aa, Artificial Sequence
  Synthetic polypeptide
FQHFERLSRPFSSKWSTANPSTVAGRVSAGSSKASSLPGSLQRSRSDIDVNAAAGAKAHHAAGQSVRSGRLGAGALNAGSYASLECEAFWRSGRTAKLYSV

SEQ ID NO: 29964 - protein, 124 aa, Artificial Sequence
  Synthetic polypeptide
FQHFERLSRPFSSKWSTANPSTVAGRVSAGSSKASSLPGSLQRSRSDIDVNAAAGAKAHHAAGQSVRSGRLGAGALNAGSYASLGKRTDYGKLYHVLSLISVKTSSYTLIISIHSCYLRIVHMF

SEQ ID NO: 29965 - protein, 1469 aa, Artificial Sequence
  Synthetic polypeptide
ICGFAFYGFTYLWSVVVPKQVSLMGLEILSAFVDRLSTRFKSYVAMVIVALIDRMGDAKDKVRDEAQTLILKLMDQVAPPMYIWEQLASGFKHKNFRSREGVCLCLIETLNIFGAQPLVISKLIPHLCILFGDSNSQVRDAAILAIVEIYRHVGEKVRMDLYKRGIPPARLEMIFAKFDEVQSSGGMILSVCKDKSFDDEESVDGNRPSSAASAFKVPAPKTSGNPANSARKPGSAGGPKVGAGASKEGGAGAVDEDDFIKAFTDVPSIQIYSSRELEETLNKIREILSDDKHDWDQRANALKKIRSLLVAGAAQYDCFFQHLRLLDGALKLSAKDLRSQVVREACITVAHLSTVLGNKFDHGAEAIVPTLFNLVPNSAKVMATSGCAAIRFIIRHTHVPRLIPLITSNCTSKSVPVRRRSFEFLDLLLQEWQTHSLERHAAVLVETIKKGIHDADAEARVEARKTYMGLRNHFPGEAETLYNSLEPSYQKSLQTYLKSSGSVASLPQSDRSSSSSQESLNRPFSSKWSTANPSTVAGRVSAGSSKASSLPGSLQRSRSDIDVNAAAGAKAHHAAGQSVRSGRLGAGALNAGSYASLEDTSDKLDGTASEDGRVRAKLSAPLAGMGNAKADSRGRSRTKMVSQSQPGSRSGSPGRVLTTTALSTVSSGVQRVLVNSASAQKRSKIPRSQGCSREASPSRLSVARSSRIPRPSVSQGCSREASRESSRDTSPVRSFQPLGPGYGISQSSRLSSSVSAMRVLNTGSDVEEAVADALLLGDIRTKKKPARRRYESYGMHSDDDANSDASSACSERSYSSRNGSIPTYMRQTEDVAEVLNRCASSNWSERKEGLLGLQNLLKNQRTLSRVELKRLCEIFTRMFADPHGKVFSMFLETLVDFIQVHKDDLQDWLFVLLTQLLKKMGADLLGSVQAKVQKALDVTRESFPNDLQFNILMRFTVDQTQTPSLKVKVAILKYIETLAKQMDPGDFINSSETRLAVSRVITWTTEPKSSDVRKAAQSVLISLFELNTPEFTMLLGALPKTFQDGATKLLHNHLRNTGNGTQSSMGSPLTRPTPRSPANWSSPLTSPTNTSQNTLSPSAFDYDTENMNSEDIYSSLRGVTEAIQNFSFRSQEDMNEPLKRDSKKDDGDSMCGGPGMSDPRAGGDATDSSQTALDNKASLLHSMPTHSSPRSRDYNPYNYSDSISPFNKSALKEAMFDDDADQFPDDLSLDHSDLVAELLKELSNHNERVEERKIALYELMKLTQEESFSVWDEHFKTILLLLLETLGDKEPTIRALALKVLREILRHQPARFKNYAELTVMKTLEAHKDPHKEVVRSAEEAASVLATSISPEQCIKVLCPIIQTADYPINLAAIKMQTKVIERVSKETLNLLLPEIMPGLIQGYDNSESSVRKACVFCLVAVHAVIGDELKPHLSQLTGSKMKLLNLYIKRAQTGSGGADPTTDVSGQS

SEQ ID NO: 29966 - protein, 6 aa, Artificial Sequence
  Synthetic polypeptide
SQSRYH

SEQ ID NO: 29967 - protein, 39 aa, Artificial Sequence
  Synthetic polypeptide
MWFCFLRFHLPVVSCSPKAGIINGIGNFKCLCGQIINTL

SEQ ID NO: 29968 - protein, 1468 aa, Artificial Sequence
  Synthetic polypeptide
ICGFAFYGFTYLWSVVVPKQVSLMGLEILSAFVDRLSTRFKSYVAMVIVALIDRMGDAKDKVRDEAQTLILKLMDQVAPPMYIWEQLASGFKHKNFRSREGVCLCLIETLNIFGAQPLVISKLIPHLCILFGDSNSQVRDAAILAIVEIYRHVGEKVRMDLYKRGIPPARLEMIFAKFDEVQSSGGMILSVCKDKSFDDEESVDGNRPSSAASAFKVPAPKTSGNPANSARKPGSAGGPKVGGASKEGGAGAVDEDDFIKAFTDVPSIQIYSSRELEETLNKIREILSDDKHDWDQRANALKKIRSLLVAGAAQYDCFFQHLRLLDGALKLSAKDLRSQVVREACITVAHLSTVLGNKFDHGAEAIVPTLFNLVPNSAKVMATSGCAAIRFIIRHTHVPRLIPLITSNCTSKSVPVRRRSFEFLDLLLQEWQTHSLERHAAVLVETIKKGIHDADAEARVEARKTYMGLRNHFPGEAETLYNSLEPSYQKSLQTYLKSSGSVASLPQSDRSSSSSQESLNRPFSSKWSTANPSTVAGRVSAGSSKASSLPGSLQRSRSDIDVNAAAGAKAHHAAGQSVRSGRLGAGALNAGSYASLEDTSDKLDGTASEDGRVRAKLSAPLAGMGNAKADSRGRSRTKMVSQSQPGSRSGSPGRVLTTTALSTVSSGVQRVLVNSASAQKRSKIPRSQGCSREASPSRLSVARSSRIPRPSVSQGCSREASRESSRDTSPVRSFQPLGPGYGISQSSRLSSSVSAMRVLNTGSDVEEAVADALLLGDIRTKKKPARRRYESYGMHSDDDANSDASSACSERSYSSRNGSIPTYMRQTEDVAEVLNRCASSNWSERKEGLLGLQNLLKNQRTLSRVELKRLCEIFTRMFADPHGKVFSMFLETLVDFIQVHKDDLQDWLFVLLTQLLKKMGADLLGSVQAKVQKALDVTRESFPNDLQFNILMRFTVDQTQTPSLKVKVAILKYIETLAKQMDPGDFINSSETRLAVSRVITWTTEPKSSDVRKAAQSVLISLFELNTPEFTMLLGALPKTFQDGATKLLHNHLRNTGNGTQSSMGSPLTRPTPRSPANWSSPLTSPTNTSQNTLSPSAFDYDTENMNSEDIYSSLRGVTEAIQNFSFRSQEDMNEPLKRDSKKDDGDSMCGGPGMSDPRAGGDATDSSQTALDNKASLLHSMPTHSSPRSRDYNPYNYSDSISPFNKSALKEAMFDDDADQFPDDLSLDHSDLVAELLKELSNHNERVEERKIALYELMKLTQEESFSVWDEHFKTILLLLLETLGDKEPTIRALALKVLREILRHQPARFKNYAELTVMKTLEAHKDPHKEVVRSAEEAASVLATSISPEQCIKVLCPIIQTADYPINLAAIKMQTKVIERVSKETLNLLLPEIMPGLIQGYDNSESSVRKACVFCLVAVHAVIGDELKPHLSQLTGSKMKLLNLYIKRAQTGSGGADPTTDVSGQS

SEQ ID NO: 29969 - protein, 1460 aa, Artificial Sequence
  Synthetic polypeptide
ICGFAFYGFTYLWSVVVPKQVSLMGLEILSAFVDRLSTRFKSYVAMVIVALIDRMGDAKDKVRDEAQTLILKLMDQVAPPMYIWEQLASGFKHKNFRSREGVCLCLIETLNIFGAQPLVISKLIPHLCILFGDSNSQVRDAAILAIVEIYRHVGEKVRMDLYKRGIPPARLEMIFAKFDEVQSSGGMILSVCKDKSFDDEESVDGNRPSSAASAFKVPAPKTSGNPANSARKPGSAGGPKVGGASKEGGAGAVDEDDFIKAFTDVPSIQIYSSRELEETLNKIREILSDDKHDWDQRANALKKIRSLLVAGAAQYDCFFQHLRLLDGALKLSAKDLRSQVVREACITVAHLSTVLGNKFDHGAEAIVPTLFNLVPNSAKVMATSGCAAIRFIIRHTHVPRLIPLITSNCTSKSVPVRRRSFEFLDLLLQEWQTHSLERHAAVLVETIKKGIHDADAEARVEARKTYMGLRNHFPGEAETLYNSLEPSYQKSLQTYLKSSGSVASLPQSDRSSSSSQESLNRPFSSKWSTANPSTVAGRVSAGSSKASSLPGSLQRSRSDIDVNAAAGAKAHHAAGQSVRSGRLGAGALNAGSYASLEDTSDKLDGTASEDGRVRAKLSAPLAGMGNAKADSRGRSRTKMVSQSQPGSRSGSPGRVLTTTALSTVSSGVQRVLVNSASAQKRSKIPRSQGCSREASPSRLSVARSSRIPRPSVSQGCSREASRESSRDTSPVRSFQPLGPGYGISQSSRLSSSVSAMRVLNTGSDVEEAVADALKKPARRRYESYGMHSDDDANSDASSACSERSYSSRNGSIPTYMRQTEDVAEVLNRCASSNWSERKEGLLGLQNLLKNQRTLSRVELKRLCEIFTRMFADPHGKVFSMFLETLVDFIQVHKDDLQDWLFVLLTQLLKKMGADLLGSVQAKVQKALDVTRESFPNDLQFNILMRFTVDQTQTPSLKVKVAILKYIETLAKQMDPGDFINSSETRLAVSRVITWTTEPKSSDVRKAAQSVLISLFELNTPEFTMLLGALPKTFQDGATKLLHNHLRNTGNGTQSSMGSPLTRPTPRSPANWSSPLTSPTNTSQNTLSPSAFDYDTENMNSEDIYSSLRGVTEAIQNFSFRSQEDMNEPLKRDSKKDDGDSMCGGPGMSDPRAGGDATDSSQTALDNKASLLHSMPTHSSPRSRDYNPYNYSDSISPFNKSALKEAMFDDDADQFPDDLSLDHSDLVAELLKELSNHNERVEERKIALYELMKLTQEESFSVWDEHFKTILLLLLETLGDKEPTIRALALKVLREILRHQPARFKNYAELTVMKTLEAHKDPHKEVVRSAEEAASVLATSISPEQCIKVLCPIIQTADYPINLAAIKMQTKVIERVSKETLNLLLPEIMPGLIQGYDNSESSVRKACVFCLVAVHAVIGDELKPHLSQLTGSKMKLLNLYIKRAQTGSGGADPTTDVSGQS

SEQ ID NO: 29970 - protein, 31 aa, Artificial Sequence
  Synthetic polypeptide
LLTEWSAGYKLLFVCSKINTEDKNKRCCLFL

SEQ ID NO: 29971 - protein, 1153 aa, Artificial Sequence
  Synthetic polypeptide
YSQSGQQATNYYLSAARLTQKIKIRDAAYFYKRSQCYKDAFRCFEQIQEFDLALKMYCQEELFEEAAIAVEKYEEMLKTKTLPISKLSYSASQFYLEAAAKYLSANKMKEMMAVLSKLDIEDQLVFLKSRKRLAEAADLLNREGRREEAALLMKQHGCLLEAARLTADKDFQASCLLGAARLNVARDSDIEHTKDILREALDICYQTGQLSGIAEAHFLQGVILRDFQKLRDAFFKFDTLNHSAGVVEALYEAASQCEAEPEKILGLAPGGLEILLSLVRALKRVTNNAEKEMVKSCFEFFGISQVDAKYCQIAQNDPGPILRIIFDLDLNLREKKTKDHFLIMTDQVKLALNKHLLGRLCQITRSLLGKTYRGVCMRFIVGLKCEDENCEHFHRPLRRCEAKCLVQSKMNLVAINGLLLEAKKVFPKILAEELKEIDYILSTDMYGLCKSILDVLFPKHFHQRVLSENPMACKEILKPNYKSFRFYRFALKEYIHFLFENESARNRRESTDLWLSAMQAFLLSSNYPEEFEKLLHQEEDNYNRELKALESEKDERGRGRGSRIKGIEGKFGMLAPNRDDENMDKTHLCFIRLLENCIDQFYVYRNPEDYKRLFFRFMNVLIKRCKEPLIPSIGNTVALLEFQFIHCGVVLARLWKNVILCLPKSYIALLHYWEFLFSKKDKELGDVFSIIQEYKPKDVTRAIQDFRFHLSYLAKVLCGYENVNFNVLLDAFSEIDYVVSGEAERTLVLCLVMLVNAEEILQPYCKPLLYRHFREIESRLQLMSMDCPGQVPERLLKVVKRVLVAVNVKSVAEALQDLLFERDEEYLMDCDWRWDPVHTKGSIVRGLYYEEVRLNRLLCLDPVDYFAEPECEFGQDEMDELALEDRDHVLATILSQKQRKASIQRKLRRACLVVSLCISWRRRVGTQMERVREEAREPRAGNFKKADVDRTQCDLCGVKFTRGPENYFSPSKAFEGAASEVAVLSRAELEREECQERNSESYEQHIHLEHHQRQQVAYQKYSEFFHEKVDPAIDEGKLVVQDIEQSVWIHSHVGSKEHSHMLQKVQEHIKRVSDMVEDLYRRKAWAGAEEAMTRLVNILILSVRDARDWLMKTETRLKKEGIVQEDDYENEVEDFGELRPRRRSRKCGKQRKY

SEQ ID NO: 29972 - protein, 73 aa, Artificial Sequence
  Synthetic polypeptide
IRIPHLLFWANYFPFESYFLICKLHYINLFLQSFGEIRNNGQEHLSVISASVSKKRPITKKYSCPRVITEKSL

SEQ ID NO: 29973 - protein, 2804 aa, Artificial Sequence
  Synthetic polypeptide
TYFFRVLVRSEIMDKSTYQSFLLLSAKKDRLPRNIHVPELSLKSLFEKYVFIGLYEKMEQVPKLVQWLISIGASVETIGPYPLHALMRLCIQARENHLFRWLMDHKPEWKGRINQKDGDGCTVLHVVAAHSPGYLVKRQTEDVQMLLRFGADPTLLDRQSRSVVDVLKRNKNFKAIEKINSHLEKLATCSKDLSGFSNGDGPTSENDIFRKVLEQLVKYMNSGNRLLHKNFLKQEVVQRFLRLLSTLQEIPPDLVCDINQDCATTVFKFLLEKQRWPEVLLLLTRKVSGEPPLGDCLIKDCNFSDLDICTIIPHLSTWDQRKKQLLGCLIDSGALPDGLQESQERPVVTCLKHEDFELAFLLLTKGADPRAISLTEGDTPLHAALHIFLEIKADIGFSFLSHLLDLFWSNPTEFDYLNPNVQDSNGNTLMHILFQKGMLKRVKKLLDLLVKFDINFNLKNKEGKDARHRIKKNDSLLLAWNKALMENRRRSRQDSAAHLGKLSKSTAPGHTSQLKSQGSFKSVPCGATARTLPEGSAVPDSWETLPGTQVTRKEPGALRPCSLRDCLMQDITVLIQQVEVDPSFPEDCLQSSEPLEAGAGKEGKKDDKPTLGAGAPDCSEVGEGHAQVGLGALQLVPDDNRGKEGNDDQDDWSTQEIEACLQDFDNMTWEIECTSEMLKKLSSKVMTKVIKKKIILAIQQLGNGEWTQGLQKRLKHLKGSIQLFEAKLDKGARMLWELAIDFSPRCSENPEKIIATEQNTCAMEKSGRIYTEIIRIWDIVLDHCKLADSIKAICNAYNRGLSCVLRKKLKGINKGQVSANMKIQKRIPRCYVEDTEAEKGREHVNPEYFPPASAVETEYNIMKFHSFSTNMAFNILNDTTATVEYPFRVGELEYAVIDLNPRPLEPIILIGRSGTGKTTCCLYRLWKKFHVYWEKAEQAGSPLLAKQVWLKRRLEVEPGKESPGGEEEEEEEDEEEEDSIEVETVESIDEQEYEACAGGAGVEPAGDGQAAEVCAPEHPHQLEHLHQIFVTKNHVLCQEVQRNFIELSKSTKATSHYKPLDPNIHKLQDLRDENFPLFVTSKQLLLLLDASLPKPFFLRNEDGSLKRTIIGWSAQEESTIPSWQEDEEEAEVDGDYSEEDKAVEMRTGDSDPRVYVTFEVFKNEIWPKMTKGRTAYNPALIWKEIKSFLKGSFEALSCPHGRLTEEVYKKLGRKRCPNFKEDRSEIYSLFSLYQQIRSQKGYFDEEDVLYNISRRLSKLRVLPWSIHELYGDEIQDFTQAELALLMKCINDPNSMFLTGDTAQSIMKGVAFRFSDLRSLFHYASRNTIDKQCAVRKPKKIHQLYQNYRSHSGILNLASGVVDLLQFYFPESFDRLPRDSGLFDGPKPTVLESCSVSDLAILLRGNKRKTQPIEFGAHQVILVANETAKEKIPEELGLALVLTIYEAKGLEFDDVLLYNFFTDSEAYKEWKIISSFTPTSTDSREENRPLVEVPLDKPGSSQGRSLMVNPEMYKLLNGELKQLYTAITRARVNLWIFDENREKRAPAFKYFIRRDFVQVVKTDENKDFDDSMFVKTSTPAEWIAQGDYYAKHQCWKVAAKCYQKGGAFEKEKLALAHDTALSMKSKKVSPKEKQLEYLELAKTYLECKEPTLSLKCLSYAKEFQLSAQLCERLGKIRDAAYFYKRSQCYKDAFRCFEQIQEFDLALKMYCQEELFEEAAIAVEKYEEMLKTKTLPISKLSYSASQFYLEAAAKYLSANKMKEMMAVLSKLDIEDQLVFLKSRKRLAEAADLLNREGRREEAALLMKQHGCLLEAARLTADKDFQASCLLGAARLNVARDSDIEHTKDILREALDICYQTGQLSGIAEAHFLQGVILRDFQKLRDAFFKFDTLNHSAGVVEALYEAASQCEAEPEKILGLAPGGLEILLSLVRALKRVTNNAEKEMVKSCFEFFGISQVDAKYCQIAQNDPGPILRIIFDLDLNLREKKTKDHFLIMTDQVKLALNKHLLGRLCQITRSLLGKTYRGVCMRFIVGLKCEDENCEHFHRPLRRCEAKCLVQSKMNLVAINGLLLEAKKVFPKILAEELKEIDYILSTDMYGLCKSILDVLFPKHFHQRVLSENPMACKEILKPNYKSFRFYRFALKEYIHFLFENESARNRRESTDLWLSAMQAFLLSSNYPEEFEKLLHQEEDNYNRELKALESEKDERGRGRGSRIKGIEGKFGMLAPNRDDENMDKTHLCFIRLLENCIDQFYVYRNPEDYKRLFFRFMNVLIKRCKEPLIPSIGNTVALLEFQFIHCGVVLARLWKNVILCLPKSYIALLHYWEFLFSKKDKELGDVFSIIQEYKPKDVTRAIQDFRFHLSYLAKVLCGYENVNFNVLLDAFSEIDYVVSGEAERTLVLCLVMLVNAEEILQPYCKPLLYRHFREIESRLQLMSMDCPGQVPERLLKVVKRVLVAVNVKSVAEALQDLLFERDEEYLMDCDWRWDPVHTKGSIVRGLYYEEVRLNRLLCLDPVDYFAEPECEFGQDEMDELALEDRDHVLATILSQKQRKASIQRKLRRACLVVSLCISWRRRVGTQMERVREEAREPRAGNFKKADVDRTQCDLCGVKFTRGPENYFSPSKAFEGAASEVAVLSRAELEREECQERNSESYEQHIHLEHHQRQQVAYQKYSEFFHEKVDPAIDEGKLVVQDIEQSVWIHSHVGSKEHSHMLQKVQEHIKRVSDMVEDLYRRKAWAGAEEAMTRLVNILILSVRDARDWLMKTETRLKKEGIVQEDDYENEVEDFGELRPRRRSRKCGKQRKY

SEQ ID NO: 29974 - protein, 29 aa, Artificial Sequence
  Synthetic polypeptide
WTRAPISHFCFCQQKKTDYQEIFMSQSYH

SEQ ID NO: 29975 - protein, 17 aa, Artificial Sequence
  Synthetic polypeptide
SQHFGRPSHQLSTFFQR

SEQ ID NO: 29976 - protein, 19 aa, Artificial Sequence
  Synthetic polypeptide
PGAVVHAYNPSTLGGQATS

SEQ ID NO: 29977 - protein, 203 aa, Artificial Sequence
  Synthetic polypeptide
QARWFTPIIPALWEAKPPAKYLLPEVTVLDYGKKCVVIDLDETLVHSSFKPISNADFIVPVEIDGTIHQVYVLKRPHVDEFLQRMGQLFECVLFTASLAKYADPVADLLDRWGVFRARLFRESCVFHRGNYVKDLSRLGRELSKVIIVDNSPASYIFHPENAVPVQSWFDDMTDTELLDLIPFFEGLSREDDVYSMLHRLCNR

SEQ ID NO: 29978 - protein, 10 aa, Artificial Sequence
  Synthetic polypeptide
TGRECLLASG

SEQ ID NO: 29979 - protein, 213 aa, Artificial Sequence
  Synthetic polypeptide
RLIVTRRGESVCWHLGDQRQVIPIPSPPAKYLLPEVTVLDYGKKCVVIDLDETLVHSSFKPISNADFIVPVEIDGTIHQVYVLKRPHVDEFLQRMGQLFECVLFTASLAKYADPVADLLDRWGVFRARLFRESCVFHRGNYVKDLSRLGRELSKVIIVDNSPASYIFHPENAVPVQSWFDDMTDTELLDLIPFFEGLSREDDVYSMLHRLCNR

SEQ ID NO: 29980 - protein, 33 aa, Artificial Sequence
  Synthetic polypeptide
LSLDGERVSAGIWVTRGRSFPYQVHQLSTFFQR

SEQ ID NO: 29981 - protein, 26 aa, Artificial Sequence
  Synthetic polypeptide
KWHTEWCPCASGLEWEPLPSLNTLGT

SEQ ID NO: 29982 - protein, 21 aa, Artificial Sequence
  Synthetic polypeptide
KNGIRSGVHVHRDWNGSRCRL

SEQ ID NO: 29983 - protein, 26 aa, Artificial Sequence
  Synthetic polypeptide
KMAYGVVSMCIGTGMGAAAVFEYPGN

SEQ ID NO: 29984 - protein, 19 aa, Artificial Sequence
  Synthetic polypeptide
EDNLGEHLHVRETLGLVLF

SEQ ID NO: 29985 - protein, 11 aa, Artificial Sequence
  Synthetic polypeptide
ANIFMSVRLWG

SEQ ID NO: 29986 - protein, 13 aa, Artificial Sequence
  Synthetic polypeptide
KRSESTRFQWASS

SEQ ID NO: 29987 - protein, 171 aa, Artificial Sequence
  Synthetic polypeptide
TKSPGDPAVLLLGTRQRIENVRRVPGSSGRLHKTEDGGWEWSDDEFDEESEEGKAAISQLRSPRVKESISNSELFPTTDPVGTLLQVPEQISAHLPQPAGQIATQPTQVSLPPTAEPAKTAQALSSGSGSQETKIPISLVLRLRNSKKELNDIRFEFTPGRGEASNGLKTK

SEQ ID NO: 29988 - protein, 52 aa, Artificial Sequence
  Synthetic polypeptide
AHARELKTFGEYQVPVGVFIRQRMEAGSGVMMNLMKKVRKGKQQFHNSGLPE

SEQ ID NO: 29989 - protein, 230 aa, Artificial Sequence
  Synthetic polypeptide
TKSPGDPAVLLLGTRQRIENVRRVPGSSGRLHKTEDGGWEWSDDEFDEESEEGKAAISQLRSPRVKESISNSELFPTTDPVGTLLQVPEQISAHLPQPAGQIATQPTQVSLPPTAEPAKTAQALSSGSGSQETKIPISLVLRLRNSKKELNDIRFEFTPGRDTAEGVSQELISAGLVDGRDLVIVAANLQKIVEEPQSNRSVTFKLASGVEGSDIPDDGKLIGFAQLSIS

SEQ ID NO: 29990 - protein, 135 aa, Artificial Sequence
  Synthetic polypeptide
ICWHLNCGLLASRTDSGWCSCAQGWADGHFSSTNVGPGTGYHLGEDEGFGLRLLSSPSLVRGGPATRKYILEGWSPAGTDKLITRPPATPAAAGLFLHQRLPGVDGLQHHSPVPPAGGCCGWCSGSQLPHGVPCL

SEQ ID NO: 29991 - protein, 493 aa, Artificial Sequence
  Synthetic polypeptide
PPELTQGGVHVHKDGLTVTSPVLMWVQALDIILEKMKASGFDFSQVLALSGAGQQHGSIYWKAGAQQALTSLSPDLRLHQQLQDCFSISDCPVWMDSSTTAQCRQLEAAVGGAQALSCLTGSRAYERFTGNQIAKIYQQNPEAYSHTERISLVSSFAASLFLGSYSPIDYSDGSGMNLLQIQDKVWSQACLGACAPHLEEKLSPPVPSCSVVGAISSYYVQRYGFPPGCKVVAFTGDNPASLAGMRLEEGDIAVSLGTSDTLFLWLQEPMPALEGHIFCNPVDSQHYMALLCFKNGSLMREKIRNESVSRSWSDFSKALQSTEMGNGGNLGFYFDVMEITPEIIGRHRFNTENHKVAAFPGDVEVRALIEGQFMAKRIHAEGLGYRVMSKTKILATGGASHNREILQVLADVFDAPVYVIDTANSACVGSAYRAFHGLAGGTDVPFSEVVKLAPNPRLAATPSPGASQVYEALLPQYAKLEQRILSQTRGPPE

SEQ ID NO: 29992 - protein, 88 aa, Artificial Sequence
  Synthetic polypeptide
TEKGQKEDKKFVPEKVMQTESIVNLSLIPISLQPSVPSMKIMLEVGGHEDTWLQQEITNFQVKPWLKPFTFLTLCLRILIIILDIGTE

SEQ ID NO: 29993 - protein, 52 aa, Artificial Sequence
  Synthetic polypeptide
SCVTLELQRATSSGKSELELTSLPTLRDYMEGCLGTERRKVKRKIKSLFQRR

SEQ ID NO: 29994 - protein, 270 aa, Artificial Sequence
  Synthetic polypeptide
KVCSREGDADRKHCKFKPDPNIPPTFSAFNEDYVGSGWSRGHMAPAGNNKFSSKAMAETFYLSNIVPQDFDNNSGYWNRIEMYCRELTERFEDVWVVSGPLTLPQTRGDGKKIVSYQVIGEDNVAVPSHLYKVILARRSSVSTEPLALGAFVVPNEAIGFQPQLTEFQVSLQDLEKLSGLVFFPHLDRTSDIRNICSVDTCKLLDFQEFTLYLSTRKIEGARSVLRLEKIMENLKNAEIEPDDYFMSRYEKKLEELKAKEQSGTQIRKPS

SEQ ID NO: 29995 - protein, 80 aa, Artificial Sequence
  Synthetic polypeptide
KVCSREGDADRKHCKFKPDPNIPPTFSAFNEDYVGSGWSRGHMAPAGNNKFSSKAMAETFYLSNIVPQDFDNNSGYWNRI

SEQ ID NO: 29996 - protein, 126 aa, Artificial Sequence
  Synthetic polypeptide
KVCSREGDADRKHCKFKPDPNIPPTFSAFNEDYVGSGWSRGHMAPAGNNKFSSKAMAETFYLSNIVPQDFDNNSGYWNRIEMYCRELTERFEDVWVVSGPLTLPQTRGDGKKIVSYQSWEYPSLQF

SEQ ID NO: 29997 - protein, 53 aa, Artificial Sequence
  Synthetic polypeptide
EVTRRQECEHSVKPGQGHQRAPWSSGDEARTEKEGLTPKDHVSKETESFRLMV

SEQ ID NO: 29998 - protein, 33 aa, Artificial Sequence
  Synthetic polypeptide
PEDKSVSTLSSRDRATRGLLGLAGMRPELRRKD

SEQ ID NO: 29999 - protein, 359 aa, Artificial Sequence
  Synthetic polypeptide
EVTRRQECEHSVKPGQGHQRAPWSSGDEARTEKEGLTPKDHVSKETESFRLMVGGLPGNVSQHLDFGSSLEQPQGHWIIKTKSKRRHFTDTSARHHEAYEVKNGEKFEKLGKNISVSTQLTTNQTNPSGQISYECGQCGRYFIQMADFHRHEKCHTGEKSFECKECGKYFRYNSLLIRHQIIHTGKKPFKCKECGKGLSSDTALIQHQRIHTGEKPYECKECGKAFSSSSVFLQHQRFHTGEKLYECNECWKTFSCSSSFTVHQRMHTGEKPYECKECGKRLSSNTALTQHQRIHTGEKPFECKECGKAFNQKITLIQHQRVHTGEKPYECKVCGKTFSWCGRFILHQKLHTQKTPVQA

SEQ ID NO: 30000 - protein, 24 aa, Artificial Sequence
  Synthetic polypeptide
GFPSHVELPKSTMIPIFKMWHLRC

SEQ ID NO: 30001 - protein, 24 aa, Artificial Sequence
  Synthetic polypeptide
TGAFHHDCKFPEASPAMWNFPRVL

SEQ ID NO: 30002 - protein, 129 aa, Artificial Sequence
  Synthetic polypeptide
CFFTGLPLLLSTHSFALLPLCEQVPSTMIVSFLRLPQPCGTSQEYYDPYFQDVASEMLRRHTASRWKAFSSLEPCCSIRRHQQYAAIERLTCGKFELRCASLRKIDCLNTNIACSYSMRQDGPRLHCVD

SEQ ID NO: 30003 - protein, 35 aa, Artificial Sequence
  Synthetic polypeptide
AEIMPSHSSLGNRYHKACSTPGWGACSLWTGYFWF

SEQ ID NO: 30004 - protein, 1372 aa, Artificial Sequence
  Synthetic polypeptide
SQLLRRLRQENHLNPGGRGCIEPRSCHRTLAWATDTTKPAPHLDGVHVVFGLVISGFEVIEQIENLKTDAASRPYADVRVIDCGVLATKSIKDVFEKKRKKPTHSEGSDSSSNSSSSSESSSESELEHERSRRRKHKRRPKVKRSKKRRKEASSSEEPRNKHAMNPKGHSERSDTNEKRSVDSSAKREKPVVRPEEIPPVPENRFLLRRDMPVVTAEPEPKIPDVAPIVSDQKPSVSKSGRKIKGRGTIRYHTPPRSRSCSESDDDDSSETPPHWKEEMQRLRAYRPPSGEKWSKGDKLSDPCSSRWDERSLSQRSRSWSYNGYYSDLSTARHSGHHKKRRKEKKVKHKKKGKKQKHCRRHKQTKKRRILIPSDIESSKSSTRRMKSSCDRERSSRSSSLSSHHSSKRDWSKSDKDVQSSLTHSSRDSYRSKSHSQSYSRGSSRSRTASKSSSHSRSRSKSRSSSKSGHRKRASKSPRKTASQLSENKPVKTEPLRATMAQNENVVVQPVVAENIPVIPLSDSPPPSRWKPGQKPWKPSYERIQEMKAKTTHLLPIQSTYSLANIKETGSSSSYHKREKNSESDQSTYSKYSDRSSESSPRSRSRSSRSRSYSRSYTRSRSLASSHSRSRSPSSRSHSRNKYSDHSQCSRSSSYTSISSDDGRRAKRRLRSSGKKNSVSHKKHSSSSEKTLHSKYVKGRDRSSCVRKYSESRSSLDYSSDSEQSSVQATQSAQEKEKQGQMERTHNKQEKNRGEEKSKSERECPHSKKRTLKENLSDHLRNGSKPKRKNYAGSKWDSESNSERDVTKNSKNDSHPSSDKEEGEATSDSESEVSEIHIKVKPTTKSSTNTSLPDDNGAWKSSKQRTSTSDSEGSCSNSENNRGKPQKHKHGSKENLKREHTKKVKEKLKGKKDKKHKAPKRKQAFHWQPPLEFGEEEEEEIDDKQVTQESKEKKVSENNETIKDNILKTEKSSEEDLSGKHDTVTVSSDLDQFTKDDSKLSISPTALNTEENVACLQNIQHVEESVPNGVEDVLQTDDNMEICTPDRSSPAKVEETSPLGNARLDTPDINIVLKQDMATEHPQAEVVKQESSMSESKVLGEVGKQDSSSASLASAGESTGKKEVAEKSQINLIDKKWKPLQGVGNLAAPNAATSSAVEVKVLTTVPEMKPQGLRIEIKSKNKVRPGSLFDEVRKTARLNRRPRNQESSSDEQTPSRDDDSQSRSPSRSRSKSETKSRHRTRSVSYSHSRSRSRSSTSSYRSRSYSRSRSRGWYSRGRTRSRSSSYRSYKSHRTSSRSRSRSSSYDPHSRSRSYTYDSYYSRSRSRSRSQRSDSYHRGRSYNRRSRSCRSYGSDSESDRSYSHHRSPSESSRYS

SEQ ID NO: 30005 - protein, 17 aa, Artificial Sequence
  Synthetic polypeptide
PGQQIPQSLLHTWMGCM

SEQ ID NO: 30006 - protein, 34 aa, Artificial Sequence
  Synthetic polypeptide
AQWLTPVIPAVWEAEGDSSSNHYVNRHRCFPSFI

SEQ ID NO: 30007 - protein, 108 aa, Artificial Sequence
  Synthetic polypeptide
SQQFGRLREILQAITMSTDTGVSLPSYEEDQGSKLIRKAKEAPFVPVGIAGFAAIVAYGLYKLKSRGNTKMSIHLIHMRVAAQGFVVGAMTVGMGYSMYREFWAKPKP

SEQ ID NO: 30008 - protein, 90 aa, Artificial Sequence
  Synthetic polypeptide
QLSSPITPLSHFLHTWTCLQVAHGAPFLGADGQFKPHKLQPVGEGSFILDAPALCPATIKTRATCPFFCLSVGPAVPRKPHYHFHFPNRL

SEQ ID NO: 30009 - protein, 62 aa, Artificial Sequence
  Synthetic polypeptide
VWALLSPESLITISISQTGSDFPAGARGNTLVLGSSGSSGWRGPKGHLLRISISKACWDFPS

SEQ ID NO: 30010 - protein, 500 aa, Artificial Sequence
  Synthetic polypeptide
CFTMTAFKPHHSPFSFSPHLDMPTGSSWCSLPWCRRAVQTTQTPACGRGILHPGRTCPLPSHYKNQSHVPLLLLECGPCCPQKASLPFPFPKPALISQLERGETPWCSVPRGALDGEAPRGISSGYPFLKPAGISHPEQVEEPLNLKLQGEGPSLICPEGVLKRKKEDFILKEEIIEEAQDLMVLSSGPQWCGSQELWFGKTCEEKSRLGRWPGYLNGGRMESSTNDIIEVIVKDEMISVEESSGNTDVNNLLGIHHKILNEQIFYICEECGKCFDQNEDFDQHQKTHNGEKVYGCKECGKAFSFRSHCIAHQRIHSGVKPYECQECAKAFVWKSNLIRHQRIHTGEKPFECKECGKGFSQNTSLTQHQRIHTGEKPYTCKECGKSFTRNPALLRHQRMHTGEKPYECKDCGKGFMWNSDLSQHQRVHTGDKPHECTDCGKSFFCKAHLIRHQRIHTGERPYKCNDCGKAFSQNSVLIKHQRRHARDKPYNCQISHLLEH

SEQ ID NO: 30011 - protein, 67 aa, Artificial Sequence
  Synthetic polypeptide
VWALLSPESLITISISQTGSDFPAGARGNTLVLGSSGSSGWRGPKGHLLRGCVEEEERRFYSEGGNY

SEQ ID NO: 30012 - protein, 466 aa, Artificial Sequence
  Synthetic polypeptide
CFTMTAFKPHHSPFSFSPHLDMPTGSSWCSLPWCRRAVQTTQTPACGRGILHPGRTCPLPSHYKNQSHVPLLLLECGPCCPQKASLPFPFPKPALISQLERGETPWCSVPRGALDGEAPRGISSEGVLKRKKEDFILKEEIIEEAQDLMVLSSGPQWCGSQELWFGKTCEEKSRLGRWPGYLNGGRMESSTNDIIEVIVKDEMISVEESSGNTDVNNLLGIHHKILNEQIFYICEECGKCFDQNEDFDQHQKTHNGEKVYGCKECGKAFSFRSHCIAHQRIHSGVKPYECQECAKAFVWKSNLIRHQRIHTGEKPFECKECGKGFSQNTSLTQHQRIHTGEKPYTCKECGKSFTRNPALLRHQRMHTGEKPYECKDCGKGFMWNSDLSQHQRVHTGDKPHECTDCGKSFFCKAHLIRHQRIHTGERPYKCNDCGKAFSQNSVLIKHQRRHARDKPYNCQISHLLEH

SEQ ID NO: 30013 - protein, 74 aa, Artificial Sequence
  Synthetic polypeptide
VWALLSPESLITISISQTGSDFPAGARGNTLVLGSSGSSGWRGPKGHLLRGDSQASRCYHMEPKDKANTKENSD

SEQ ID NO: 30014 - protein, 180 aa, Artificial Sequence
  Synthetic polypeptide
CFTMTAFKPHHSPFSFSPHLDMPTGSSWCSLPWCRRAVQTTQTPACGRGILHPGRTCPLPSHYKNQSHVPLLLLECGPCCPQKASLPFPFPKPALISQLERGETPWCSVPRGALDGEAPRGISSGEILKLPGATIWSLRIKPIPKKTVTKQRETRSLVTSFEPLDQALPEAELPQNFSAM

SEQ ID NO: 30015 - protein, 30 aa, Artificial Sequence
  Synthetic polypeptide
LFWNSGINLNTCSFQRKGVSDLRGCGRLLL

SEQ ID NO: 30016 - protein, 430 aa, Artificial Sequence
  Synthetic polypeptide
ILAASKGKESVTFEDVAVYFSENEWIGLGPAQRALYRDVMLENYGAVASLAFPFPKPALISQLERGETPWCSVPRGALDGEAPRGISSEGVLKRKKEDFILKEEIIEEAQDLMVLSSGPQWCGSQELWFGKTCEEKSRLGRWPGYLNGGRMESSTNDIIEVIVKDEMISVEESSGNTDVNNLLGIHHKILNEQIFYICEECGKCFDQNEDFDQHQKTHNGEKVYGCKECGKAFSFRSHCIAHQRIHSGVKPYECQECAKAFVWKSNLIRHQRIHTGEKPFECKECGKGFSQNTSLTQHQRIHTGEKPYTCKECGKSFTRNPALLRHQRMHTGEKPYECKDCGKGFMWNSDLSQHQRVHTGDKPHECTDCGKSFFCKAHLIRHQRIHTGERPYKCNDCGKAFSQNSVLIKHQRRHARDKPYNCQISHLLEH

SEQ ID NO: 30017 - protein, 51 aa, Artificial Sequence
  Synthetic polypeptide
GLLSREVGGRGSTKNPSHHLESIVLAELSKVTILELWDQFEYLQLPKERSQ

SEQ ID NO: 30018 - protein, 432 aa, Artificial Sequence
  Synthetic polypeptide
LFWNSGINLNTCSFQRKAAFPFPKPALISQLERGETPWCSVPRGALDGEAPRGISSGYPFLKPAGISHPEQVEEPLNLKLQGEGPSLICPEGVLKRKKEDFILKEEIIEEAQDLMVLSSGPQWCGSQELWFGKTCEEKSRLGRWPGYLNGGRMESSTNDIIEVIVKDEMISVEESSGNTDVNNLLGIHHKILNEQIFYICEECGKCFDQNEDFDQHQKTHNGEKVYGCKECGKAFSFRSHCIAHQRIHSGVKPYECQECAKAFVWKSNLIRHQRIHTGEKPFECKECGKGFSQNTSLTQHQRIHTGEKPYTCKECGKSFTRNPALLRHQRMHTGEKPYECKDCGKGFMWNSDLSQHQRVHTGDKPHECTDCGKSFFCKAHLIRHQRIHTGERPYKCNDCGKAFSQNSVLIKHQRRHARDKPYNCQISHLLEH

SEQ ID NO: 30019 - protein, 17 aa, Artificial Sequence
  Synthetic polypeptide
ILAASKGKQHFHFPNRL

SEQ ID NO: 30020 - protein, 100 aa, Artificial Sequence
  Synthetic polypeptide
GLLSREVGGRGSTKNPSHHLESIVLAELSKVTILELWDQFEYLQLPKESSISISQTGSDFPAGARGNTLVLGSSGSSGWRGPKGHLLRISISKACWDFPS

SEQ ID NO: 30021 - protein, 112 aa, Artificial Sequence
  Synthetic polypeptide
LFWNSGINLNTCSFQRKAAFPFPKPALISQLERGETPWCSVPRGALDGEAPRGISSGEILKLPGATIWSLRIKPIPKKTVTKQRETRSLVTSFEPLDQALPEAELPQNFSAM

SEQ ID NO: 30022 - protein, 112 aa, Artificial Sequence
  Synthetic polypeptide
GLLSREVGGRGSTKNPSHHLESIVLAELSKVTILELWDQFEYLQLPKESSISISQTGSDFPAGARGNTLVLGSSGSSGWRGPKGHLLRGDSQASRCYHMEPKDKANTKENSD

SEQ ID NO: 30023 - protein, 431 aa, Artificial Sequence
  Synthetic polypeptide
LFWNSGINLNTCSFQRKAFPFPKPALISQLERGETPWCSVPRGALDGEAPRGISSGYPFLKPAGISHPEQVEEPLNLKLQGEGPSLICPEGVLKRKKEDFILKEEIIEEAQDLMVLSSGPQWCGSQELWFGKTCEEKSRLGRWPGYLNGGRMESSTNDIIEVIVKDEMISVEESSGNTDVNNLLGIHHKILNEQIFYICEECGKCFDQNEDFDQHQKTHNGEKVYGCKECGKAFSFRSHCIAHQRIHSGVKPYECQECAKAFVWKSNLIRHQRIHTGEKPFECKECGKGFSQNTSLTQHQRIHTGEKPYTCKECGKSFTRNPALLRHQRMHTGEKPYECKDCGKGFMWNSDLSQHQRVHTGDKPHECTDCGKSFFCKAHLIRHQRIHTGERPYKCNDCGKAFSQNSVLIKHQRRHARDKPYNCQISHLLEH

SEQ ID NO: 30024 - protein, 16 aa, Artificial Sequence
  Synthetic polypeptide
ILAASKGKHFHFPNRL

SEQ ID NO: 30025 - protein, 99 aa, Artificial Sequence
  Synthetic polypeptide
GLLSREVGGRGSTKNPSHHLESIVLAELSKVTILELWDQFEYLQLPKESISISQTGSDFPAGARGNTLVLGSSGSSGWRGPKGHLLRISISKACWDFPS

SEQ ID NO: 30026 - protein, 397 aa, Artificial Sequence
  Synthetic polypeptide
LFWNSGINLNTCSFQRKAFPFPKPALISQLERGETPWCSVPRGALDGEAPRGISSEGVLKRKKEDFILKEEIIEEAQDLMVLSSGPQWCGSQELWFGKTCEEKSRLGRWPGYLNGGRMESSTNDIIEVIVKDEMISVEESSGNTDVNNLLGIHHKILNEQIFYICEECGKCFDQNEDFDQHQKTHNGEKVYGCKECGKAFSFRSHCIAHQRIHSGVKPYECQECAKAFVWKSNLIRHQRIHTGEKPFECKECGKGFSQNTSLTQHQRIHTGEKPYTCKECGKSFTRNPALLRHQRMHTGEKPYECKDCGKGFMWNSDLSQHQRVHTGDKPHECTDCGKSFFCKAHLIRHQRIHTGERPYKCNDCGKAFSQNSVLIKHQRRHARDKPYNCQISHLLEH

SEQ ID NO: 30027 - protein, 104 aa, Artificial Sequence
  Synthetic polypeptide
GLLSREVGGRGSTKNPSHHLESIVLAELSKVTILELWDQFEYLQLPKESISISQTGSDFPAGARGNTLVLGSSGSSGWRGPKGHLLRGCVEEEERRFYSEGGNY

SEQ ID NO: 30028 - protein, 111 aa, Artificial Sequence
  Synthetic polypeptide
LFWNSGINLNTCSFQRKAFPFPKPALISQLERGETPWCSVPRGALDGEAPRGISSGEILKLPGATIWSLRIKPIPKKTVTKQRETRSLVTSFEPLDQALPEAELPQNFSAM

SEQ ID NO: 30029 - protein, 111 aa, Artificial Sequence
  Synthetic polypeptide
GLLSREVGGRGSTKNPSHHLESIVLAELSKVTILELWDQFEYLQLPKESISISQTGSDFPAGARGNTLVLGSSGSSGWRGPKGHLLRGDSQASRCYHMEPKDKANTKENSD

SEQ ID NO: 30030 - protein, 28 aa, Artificial Sequence
  Synthetic polypeptide
SIFKLRYLESGSDPFHVGVWAAALSRSQ

SEQ ID NO: 30031 - protein, 8 aa, Artificial Sequence
  Synthetic polypeptide
IKIFGVWE

SEQ ID NO: 30032 - protein, 54 aa, Artificial Sequence
  Synthetic polypeptide
VLMRSGGFYKCFNSSSLAPFSLLLPSEKGACFLFTFCHDSRTPGFKVYTCICHT

SEQ ID NO: 30033 - protein, 97 aa, Artificial Sequence
  Synthetic polypeptide
DLVVFISVSIVPLLLPSLSCCLLKKVLASSSPSATIHALLALKFILAFAIPDKPRHIQMKLARLEFESLEALKQQQMKLVTENLKEEPMESGKEKAT

SEQ ID NO: 30034 - protein, 18 aa, Artificial Sequence
  Synthetic polypeptide
KRCLLPLHLLPRFTHSWL

SEQ ID NO: 30035 - protein, 64 aa, Artificial Sequence
  Synthetic polypeptide
QLCAGVDLYQQAIAKFSGILPTVGSLKLAMVGVFTPRKSSNAINKVRMANWLAPHMVPYVYITP

SEQ ID NO: 30036 - protein, 335 aa, Artificial Sequence
  Synthetic polypeptide
IRSGWLTGWLPTWCPTSISHLKEAEEKMLKCVPCTYKKEPVRISNGNKIWTLKFSHNISNKTPLVLLHGFGGGLGLWALNFGDLCTNRPVYAFDLLGFGRSSRPRFDSDAEEVENQFVESIEEWRCALGLDKMILLGHNLGGFLAAAYSLKYPSRVNHLILVEPWGFPERPDLADQDRPIPVWIRALGAALTPFNPLAGLRIAGPFGLSLVQRLRPDFKRKYSSMFEDDTVTEYIYHCNVQTPSGETAFKNMTIPYGWAKRPMLQRIGKMHPDIPVSVIFGARSCIDGNSGTSIQSLRPHSYVKTIAILGAGHYVYADQPEEFNQKVKEICDTVD

SEQ ID NO: 30037 - protein, 30 aa, Artificial Sequence
  Synthetic polypeptide
IRSGWLTGWLPTWCPTSISHLKEAEEKMLK

SEQ ID NO: 30038 - protein, 472 aa, Artificial Sequence
  Synthetic polypeptide
AGHGGTPVVPATREAEAGGLLEPRNSSLGNIEINENSLKRLSVYLENLQKPGFKSLKPTQLTFYVRETDQSSSDGQEPFSTSGFRAVKFTLHTRDLLSTVLYILNSCSLSVEHIQSLNTNMHTQPLKEAKRMPDRPIKWDKSYYSFTGFKDPDEDLEQVSRVETTLTSWLDNNGKSAVKKLKNSLPLRKELDRLKDELSHQLQLSDIRWQRSWGIAHRCSQLHSLSRLAQQNLETLKKAKGCTIIFTDRSGMSAVGHVMLGTMDVHHHWTKLFERLPSYFDLQRRLMILEDQISYLLGGIQVVYIEELQPVLTLEEYYSLLDVFYNRLLKSRILFHPRSLRGLQMILNSDRYAPSLHELGHFNIPTLCDPANLQWFILTKAQQARENMKRKEELKVIENELIQASTKKFSLEKLYKEPSISSIQMVDCCKRLLEQSLPYLHGMHLCISHFYSVMQDGDLCIPWNWKNGEAIK

SEQ ID NO: 30039 - protein, 12 aa, Artificial Sequence
  Synthetic polypeptide
AQEFKPGQHRNQ

SEQ ID NO: 30040 - protein, 91 aa, Artificial Sequence
  Synthetic polypeptide
AGHGGTPVVPATREAEAGGLLEPRNSSLGNIEINENSLKRLSVYLENLQKPGFKSLKPTQLTFYVRETDQSSSDGQEPFSTSVYLLNISKA

SEQ ID NO: 30041 - protein, 32 aa, Artificial Sequence
  Synthetic polypeptide
SQHFGKSRQVDCLSPGVQDQPGQHENSASAPR

SEQ ID NO: 30042 - protein, 129 aa, Artificial Sequence
  Synthetic polypeptide
AQEFKTSLANMRIQPQPPDEDGDHSDKEDEQPQVVVLKKGDLSVEEVMKIKAEIKAAKADEEPTPADGRIIYRKPVKHPSDEKYSGLTASSKKKKPNEDEVNQDSVKKNSQKQIKNSSLLSFDNEDENE

SEQ ID NO: 30043 - protein, 32 aa, Artificial Sequence
  Synthetic polypeptide
SRICDCPFECRTRTVLSSFFAILAHSACHIEV

SEQ ID NO: 30044 - protein, 470 aa, Artificial Sequence
  Synthetic polypeptide
KFEEDKENSSKEILKVLEAVRQEKQKETAKCEQQMAKVQKLEESLLATEKVISSLEKSRDSDKKVVADLMNQIQELRTSVCEKTETIDTLKQELKDINCKYNSALVDREESRVLIKKQEVDILDLKETLRLRILSEDIERDMLCEDLAHATEQLNMLTEASKKHSGLLQSAQEELTKKEALIQELQHKLNQKKEEVEQKKNEYNFKMRQLEHVMDSAAEDPQSPKTPPHFQTHLAKLLETQEQEIEDGRASKTSLEHLVTKLNEDREVKNAEILRMKEQLREMENLRLESQQLIEKNWLLQGQLDDIKRQKENSDQNHPDNQQLKNEQEESIKERLAKSKIVEEMLKMKADLEEVQSALYNKEMECLRMTDEVERTQTLESKAFQEKEQLRSKLEEMYEERERTSQEMEMLRKQVECLAEENGKLVGHQNLHQKIQYVVRLKKENVRLAEETEKLRAENVFLKEKKRSES

SEQ ID NO: 30045 - protein, 33 aa, Artificial Sequence
  Synthetic polypeptide
DKDCPFLLLCYTCPQCLPHRSLKKIKKTVLKKS

SEQ ID NO: 30046 - protein, 21 aa, Artificial Sequence
  Synthetic polypeptide
KFEEDKENSSKEILKVLEAVR

SEQ ID NO: 30047 - protein, 24 aa, Artificial Sequence
  Synthetic polypeptide
KFEEDKENSSKPWYTVVNVELTSS

SEQ ID NO: 30048 - protein, 36 aa, Artificial Sequence
  Synthetic polypeptide
DKDCPFLLLCYTCPQCLPHRSLKKIKKTVLSPGIQW

SEQ ID NO: 30049 - protein, 14 aa, Artificial Sequence
  Synthetic polypeptide
PGCSCSLVVTCERR

SEQ ID NO: 30050 - protein, 302 aa, Artificial Sequence
  Synthetic polypeptide
ARHGGSCPQSQHFGKPKQDVHLRPGVQDQPGQERERETPSLQKIQKISQVAAAPWWLPVKGANWRHPEGPDSTILHRPDHPVLHVSWNDAVAYCTWAGKRLPTEAEWEYSCRGGLHNRLFPWGNKLQPKGQHYANIWQGEFPVTNTGEDGFQGTAPVDAFPPNGYGLYNIVGNAWEWTSDWWTVHHSVEETLNPKGPPSGKDRVKKGGSYMCHRSQEYYDPYFQDVASEMLRRHTASRWKAFSSLEPCCSIRRHQQYAAIERLTCGKFELRCASLRKIDCLNTNIACSYSMRQDGPRLHCVD

SEQ ID NO: 30051 - protein, 36 aa, Artificial Sequence
  Synthetic polypeptide
GQEFKTSLGKRERERPHLYKKYKKLARLQLLPGGYL

SEQ ID NO: 30052 - protein, 250 aa, Artificial Sequence
  Synthetic polypeptide
ARHGGSCPQSQHFGKPKQDVHLRPGVQDQPGQERERETPSLQKIQKISQVAAAPWWLPVKGANWRHPEGPDSTILHRPDHPVLHVSWNDAVAYCTWAGKRLPTEAEWEYSCRGGLHNRLFPWGNKLQPKGQHYANIWQGEFPVTNTGEDGFQGTAPVDAFPPNGYGLYNIVGNAWEWTSDWWTVHHSVEETLNPKGPPSGKDRVKKGGSYMCHRSYCYRYRCAARSQNTPDSSASNLGFRCAADRLPTMD

SEQ ID NO: 30053 - protein, 230 aa, Artificial Sequence
  Synthetic polypeptide
ARHGGSCPQSQHFGKPKQDVHLRPGVQDQPGQERERETPSLQKIQKISQVAAAPWWLPVKGANWRHPEGPDSTILHRPDHPVLHVSWNDAVAYCTWAGKRLPTEAEWEYSCRGGLHNRLFPWGNKLQPKGQHYANIWQGEFPVTNTGEDGFQGTAPVDAFPPNGYGLYNIVGNAWEWTSDWWTVHHSVEETLNPSYCYRYRCAARSQNTPDSSASNLGFRCAADRLPTMD

SEQ ID NO: 30054 - protein, 167 aa, Artificial Sequence
  Synthetic polypeptide
TPTPALSFCDPDQNHPDNQQLKNEQEESIKERLAKSKIVEEMLKMKADLEEVQSALYNKEMECLRMTDEVERTQTLESKAFQEKEQLRSKLEEMYEERERTSQEMEMLRKQVECLAEENGKLVGHQNLHQKIQYVVRLKKENVRLAEETEKLRAENVFLKEKKRSES

SEQ ID NO: 30055 - protein, 14 aa, Artificial Sequence
  Synthetic polypeptide
ASVTLIRIIQIINS

SEQ ID NO: 30056 - protein, 6 aa, Artificial Sequence
  Synthetic polypeptide
SDQCYP

SEQ ID NO: 30057 - protein, 216 aa, Artificial Sequence
  Synthetic polypeptide
YHGDEEEMNRVTSATPEFEGRGGDDLGTEIANTLYRIFNNKSSVDLKTLCISPREHCWVLYVDVLLLECGGNLFDAISIAVKAALFNTRIPRVRVLEDEEGSKDIELSDDPYDCIRLSVENVPCIVTLCKIGYRHVVDATLQEEACSLASLLVSVTSKGVVTCMRKVGKGSLDPESIFEMMETGKRVGKVLHASLQSVVHKEESLGPKRQKVGFLG

SEQ ID NO: 30058 - protein, 33 aa, Artificial Sequence
  Synthetic polypeptide
QYLTHRYQGFEFWRMKRGRRTLNCQMTLMTAYD

SEQ ID NO: 30059 - protein, 11 aa, Artificial Sequence
  Synthetic polypeptide
HIDTKGSSFGG

SEQ ID NO: 30060 - protein, 51 aa, Artificial Sequence
  Synthetic polypeptide
GRAWWFTPVIPALRRLRLYVRPMSFWGGSASALDIVVAYPQQNFHLGCQSS

SEQ ID NO: 30061 - protein, 55 aa, Artificial Sequence
  Synthetic polypeptide
PGVVVHTCNPSTEEAETVCQAHVLLGRFSFSPRHRCCLPSTELSSGMSKLIRASV

SEQ ID NO: 30062 - protein, 45 aa, Artificial Sequence
  Synthetic polypeptide
ILSCVRSKNPLFGNRSQNFTCFPCSLILLVSCTWAMCVSTPSATP

SEQ ID NO: 30063 - protein, 24 aa, Artificial Sequence
  Synthetic polypeptide
DPRTLSSEIEAKILRAFHVPLSFW

SEQ ID NO: 30064 - protein, 862 aa, Artificial Sequence
  Synthetic polypeptide
GVAILLSLYFPNNLAFAFFYRLALNSFLREIQEPSLRKSKPKFYVLSMFPYPSGKLHMGHVRVYTISDTIARFQKMRGMQVINPMGWDAFGLPAENAAVERNLHPQSWTQSNIKHMRKQLDRLGLCFSWDREITTCLPDYYKWTQYLFIKLYEAGLAYQKEALVNWDPVDQTVLANEQVDEHGCSWRSGAKVEQKYLRQWFIKTTAYAKAMQDALADLPEWYGIKGMQAHWIGDCVGCHLDFTLKVHGQATGEKLTAYTATPEAIYGTSHVAISPSHRLLHGHSSLKEALRMALVPGKDCLTPVMAVNMLTQQEVPVVILAKADLEGSLDSKIGIPSTSSEDTILAQTLGLAYSEVIETLPDGTERLSSSAEFTGMTRQDAFLALTQKARGKRVGGDVTSDKLKDWLISRQRYWGTPIPIVHCPVCGPTPVPLEDLPVTLPNIASFTGKGGPPLAMASEWVNCSCPRCKGAAKRETDTMDTFVDSAWYYFRYTDPHNPHSPFNTAVADYWMPVDLYIGGKEHAVMHLFYARFFSHFCHDQKMVKHREPFHKLLAQGLIKGQTFRLPSGQYLQREEVDLTGSVPVHAKTKEKLEVTWEKMSKSKHNGVDPEEVVEQYGIDTIRLYILFAAPPEKDILWDVKTDALPGVLRWQQRLWTLTTRFIEARASGKSPQPQLLSNKEKAEARKLWEYKNSVISQVTTHFTEDFSLNSAISQLMGLSNALSQASQSVILHSPEFEDALCALMVMAAPLAPHVTSEIWAGLALVPRKLCAHYTWDASVLLQAWPAVDPEFLQQPEVVQMAVLINNKACGKIPVPQQVARDQDKVHEFVLQSELGVRLLQGRSIKKSFLSPRTALINFLVQD

SEQ ID NO: 30065 - protein, 73 aa, Artificial Sequence
  Synthetic polypeptide
GVAILLSLYFPNNLAFAFFYRLALNSFLREIQEPSLRKSKPKFYVLSMFPYPSGKLHMGHVRVYTISDTIARF

SEQ ID NO: 30066 - protein, 86 aa, Artificial Sequence
  Synthetic polypeptide
AQEFEAAASYDGATAFQQGSDETIRVVSMDRDYHVECYHCEDCGLELNDEDGHRCYPLEDHLFCHSCHVKRLEKRPSSTALHQHHF

SEQ ID NO: 30067 - protein, 71 aa, Artificial Sequence
  Synthetic polypeptide
LLEPKSLRLQRAMMVLLHSSRAQMRPSVSCPWTETTTWSVTTARTVVWSSMMKMATAVIRWRTTCSVTPAT

SEQ ID NO: 30068 - protein, 10 aa, Artificial Sequence
  Synthetic polypeptide
WCYCIPAGLR

SEQ ID NO: 30069 - protein, 23 aa, Artificial Sequence
  Synthetic polypeptide
GSGWGQESWSPALGVPLMAACCR

SEQ ID NO: 30070 - protein, 40 aa, Artificial Sequence
  Synthetic polypeptide
WLRAVDRAAGQPQGLDQCSHPDLLLTWPGLRQPDRLRQLQ

SEQ ID NO: 30071 - protein, 43 aa, Artificial Sequence
  Synthetic polypeptide
GPKGSPAWWSLSSSPCTTTSSTPGPSGTSSTPSRIPCRGLSAH

SEQ ID NO: 30072 - protein, 49 aa, Artificial Sequence
  Synthetic polypeptide
YCCKDQRGRQRGGLFLPLHVLQRHQRLGLLVPLPLLPGSPAVVCLPTEW

SEQ ID NO: 30073 - protein, 491 aa, Artificial Sequence
  Synthetic polypeptide
SWAGSRPQFSLLRYEDNTVVRTKGVASVVVSFFLSMYYNVINAWAFWYLFHSFQDPLPWSVCPLNGNHTGYDEECEKASSTQYFWYRKTLNISPSLQENGGVQWEPALCLLLAWLVVYLCILRGTESTGKIEQLANPKAWINAATQIFFSLGLGFGSLIAFASYNEPSNNCQKHAIIVSLINSFTSIFASIVTFSIYGFKATFNYENCLKKVSLLLTNTFDLEDGFLTASNLEQVKGYLASAYPSKYSEMFPQIKNCSLESELDTAVQGTGLAFIVYTEAIKNMEVSQLWSVLYFFMLLMLGIGSMLGNTAAILTPLTDSKIISSHLPKEAISGLVCLVNCAIGMVFTMEAGNYWFDIFNDYAATLSLLLIVLVETIAVCYVYGLRRFESDLKAMTGRAVSWYWKVMWAGVSPLLIVSLFVFYLSDYILTGTLKYQAWDASQGQLVTKDYPAYALAVIGLLVASSTMCIPLAALGTFVQRRLKRGDADPVA

SEQ ID NO: 30074 - protein, 528 aa, Artificial Sequence
  Synthetic polypeptide
SWAGSRPQFSLLRYEDNTVVRTKGVASVVVSFFLSMYYNVINAWAFWYLFHSFQDPLPWSVCPLNGNHTGYDEECEKASSTQYFWYRKTLNISPSLQENGGVQWEPALCLLLAWLVVYLCILRGTESTGKVVYFTASLPYCVLIIYLIRGLTLHGATNGLMYMFTPKIEQLANPKAWINAATQIFFSLGLGFGSLIAFASYNEPSNNCQKHAIIVSLINSFTSIFASIVTFSIYGFKATFNYENCLKKVSLLLTNTFDLEDGFLTASNLEQVKGYLASAYPSKYSEMFPQIKNCSLESELDTAVQGTGLAFIVYTEAIKNMEVSQLWSVLYFFMLLMLGIGSMLGNTAAILTPLTDSKIISSHLPKEAISGLVCLVNCAIGMVFTMEAGNYWFDIFNDYAATLSLLLIVLVETIAVCYVYGLRRFESDLKAMTGRAVSWYWKVMWAGVSPLLIVSLFVFYLSDYILTGTLKYQAWDASQGQLVTKDYPAYALAVIGLLVASSTMCIPLAALGTFVQRRLKRGDADPVA

SEQ ID NO: 30075 - protein, 483 aa, Artificial Sequence
  Synthetic polypeptide
SWAGSRPQFSLLRYEDNTVVRTKGVASVVVSFFLSMYYNVINAWAFWYLFHSFQDPLPWSVCPLNGNHTGYDEECEKASSTQYFWYRKTLNISPSLQENGGVQWEPALCLLLAWLVVYLCILRGTESTGKVVYFTASLPYCVLIIYLIRGLTLHGATNGLMYMFTPKIEQLANPKAWINAATQIFFSLGLGFGSLIAFASYNEPSNNCQKHAIIVSLINSFTSIFASIVTFSIYGFKATFNYENCLKKVSLLLTNTFDLEDGFLTASNLEQVKGYLASAYPSKYSEMFPQIKNCSLESELDTAVQGTGLAFIVYTEAIKNMEVSQLWSVLYFFMLLMLGIGSMLGNTAAILTPLTDSKIISSHLPKEAISGLVCLVNCAIGMVFTMEAGNYWFDIFNDYAATLSLLLIVLVETIAVCYVYGLRRFESDLKAMTGRAVSWYWKVMWAGVSPLLIVSLFVFYLSDYILTGTLKYQAWDASQDDKL

SEQ ID NO: 30076 - protein, 247 aa, Artificial Sequence
  Synthetic polypeptide
SWAGSRPQFSLLRYEDNTVVRTKGVASVVVSFFLSMYYNVINAWAFWYLFHSFQDPLPWSVCPLNGNHTGYDEECEKASSTQYFWYRKTLNISPSLQENGGVQWEPALCLLLAWLVVYLCILRGTESTGKVVYFTASLPYCVLIIYLIRGLTLHGATNGLMYMFTPKIEQLANPKAWINAATQIFFSLGLGFGSLIAFASYNEPSNNCQKHAIIVSLINSFTSIFASIVTFSIYGFKATFNYENCLK

SEQ ID NO: 30077 - protein, 350 aa, Artificial Sequence
  Synthetic polypeptide
KKGSLKMANYTLAPEDEYDVLIEGELESDEAEQCDKYDAQALSAQLVPSLCSAVFVIGVLDNLLVVLILVKYKGLKRVENIYLLNLAVSNLCFLLTLPFWAHAGGDPMCKILIGLYFVGLYSETFFNCLLTVQRYLVFLHKGNFFSARRRVPCGIITSVLAWVTAILATLPEFVVYKPQMEDQKYKCAFSRTPFLPADETFWKHFLTLKMNISVLVLPLFIFTFLYVQMRKTLRFREQRYSLFKLVFAIMVVFLLMWAPYNIAFFLSTFKEHFSLSDCKSSYNLDKSVHITKLIATTHCCINPLLYAFLDGTFSKYLCRCFHLRSNTPLQPRGQSAQGTSREEPDHSTEV

SEQ ID NO: 30078 - protein, 11 aa, Artificial Sequence
  Synthetic polypeptide
ASPVSAKRRAV

SEQ ID NO: 30079 - protein, 33 aa, Artificial Sequence
  Synthetic polypeptide
YIFSYILCSCRQVLFLLKEGQSEDGQLHAGTRG

SEQ ID NO: 30080 - protein, 17 aa, Artificial Sequence
  Synthetic polypeptide
GSSSVQSSILWTVSGWP

SEQ ID NO: 30081 - protein, 721 aa, Artificial Sequence
  Synthetic polypeptide
DGDYGHRTYLTEMAEDQAVFRAASYGLCLAGRRRSVQWCAVSQPEATKCFQWQRNMRKVRGPPVSCIKRDSPIQCIQAIAENRADAVTLDGGFIYEAGLAPYKLRPVAAEVYGTERQPRTHYYAVAVVKKGGSFQLNELQGLKSCHTGLRRTAGWNVPIGTLRPFLNWTGPPEPIEAAVARFFSASCVPGADKGQFPNLCRLCAGTGENKCAFSSQEPYFSYSGAFKCLRDGAGDVAFIRESTVFEDLSDEAERDEYELLCPDNTRKPVDKFKDCHLARVPSHAVVARSVNGKEDAIWNLLRQAQEKFGKDKSPKFQLFGSPSGQKDLLFKDSAIGFSRVPPRIDSGLYLGSGYFTAIQNLRKSEEEVAARRARVVWCAVGEQELRKCNQWSGLSEGSVTCSSASTTEDCIALVLKGEADAMSLDGGYVYTAGKCGLVPVLAENYKSQQSSDPDPNCVDRPVEGYLAVAVVRRSDTSLTWNSVKGKKSCHTAVDRTAGWNIPMGLLFNQTGSCKFDEYFSQSCAPGSDPRSNLCALCIGDEQGENKCVPNSNERYYGYTGAFRCLAENAGDVAFVKDVTVLQNTDGNNNEAWAKDLKLADFALLCLDGKRKPVTEARSCHLAMAPNHAVVSRMDKVERLKQVLLHQQAKFGRNGSDCPDKFCLFQSETKNLLFNDNTECLARLHGKTTYEKYLGPQYVAGITNLKKCSTSPLLEACEFLRK

SEQ ID NO: 30082 - protein, 67 aa, Artificial Sequence
  Synthetic polypeptide
HLAPSLSVLICEMGIMVTGPTSRRWLRIKQCSEQHPMDCVWLAVGGVFSGAPYPNPRPQNASNGKGI

SEQ ID NO: 30083 - protein, 719 aa, Artificial Sequence
  Synthetic polypeptide
DGDYGHRTYLTEMAEDQAVFRAASYGLCLAGRRRSVQWCAVSQPEATKCFQWQRNMRKVRGPPVSCIKRDSPIQCIQAIAENRADAVTLDGGFIYEAGLAPYKLRPVAAEVYGTERQPRTHYYAVAVVKKGGSFQLNELQGLKSCHTGLRRTAGWNVPIGTLRPFLNWTGPPEPIEAAVARFFSASCVPGADKGQFPNLCRLCAGTGENKCAFSSQEPYFSYSGAFKCLRDGAGDVAFIRESTVFEDLSDEAERDEYELLCPDNTRKPVDKFKDCHLARVPSHAVVARSVNGKEDAIWNLLRQAQEKFGKDKSPKFQLFGSPSGQKDLLFKDSAIGFSRVPPRIDSGLYLGSGYFTAIQNLRKSEEEVAARRARVVWCAVGEQELRKCNQWSGLSEGSVTCSSASTTEDCIALKGEADAMSLDGGYVYTAGKCGLVPVLAENYKSQQSSDPDPNCVDRPVEGYLAVAVVRRSDTSLTWNSVKGKKSCHTAVDRTAGWNIPMGLLFNQTGSCKFDEYFSQSCAPGSDPRSNLCALCIGDEQGENKCVPNSNERYYGYTGAFRCLAENAGDVAFVKDVTVLQNTDGNNNEAWAKDLKLADFALLCLDGKRKPVTEARSCHLAMAPNHAVVSRMDKVERLKQVLLHQQAKFGRNGSDCPDKFCLFQSETKNLLFNDNTECLARLHGKTTYEKYLGPQYVAGITNLKKCSTSPLLEACEFLRK

SEQ ID NO: 30084 - protein, 720 aa, Artificial Sequence
  Synthetic polypeptide
DGDYGHRTYLTEMAEDQAVFRAASYGLCLAGRRRSVQWCAVSQPEATKCFQWQRNMRKVRGPPVSCIKRDSPIQCIQAIAENRADAVTLDGGFIYEAGLAPYKLRPVAAEVYGTERQPRTHYYAVAVVKKGGSFQLNELQGLKSCHTGLRRTAGWNVPIGTLRPFLNWTGPPEPIEAAVARFFSASCVPGADKGQFPNLCRLCAGTGENKCAFSSQEPYFSYSGAFKCLRDGAGDVAFIRESTVFEDLSDEAERDEYELLCPDNTRKPVDKFKDCHLARVPSHAVVARSVNGKEDAIWNLLRQAQEKFGKDKSPKFQLFGSPSGQKDLLFKDSAIGFSRVPPRIDSGLYLGSGYFTAIQNLRKSEEEVAARRARVVWCAVGEQELRKCNQWSGLSEGSVTCSSASTTEDCIALVLKGEADAMSLDGGYVYTAGKCGLVPVLAENYKSQQSSDPDPNCVDRPVEGYLAVAVVRRSDTSLTWNSVKGKKSCHTAVDRTAGWNIPMGLLFNQTGSCKFDEYFSQSCAPGSDPRSNLCALCIGDEQGENKCVPNSNERYYGYTGAFRCLAENAGDVAFVKDVTVLQNTDGNNNEAWAKDLKLADFALLCLDGKRKPVTEARSCHLAMAPNHAVVSRMDKVERLKQVLLHQQAKFGRNGSDCPDKFCLFQSETKNLLFNDNTECLARLHGKTTYEKYLGPQYVAGITNLKKCSTSPLLEACEFLR

SEQ ID NO: 30085 - protein, 182 aa, Artificial Sequence
  Synthetic polypeptide
DGDYGHRTYLTEMAEDQAVFRAASYGLCLAGRRRSVQWCAVSQPEATKCFQWQRNMRKVRGPPVSCIKRDSPIQCIQAIAENRADAVTLDGGFIYEAGLAPYKLRPVAAEVYGTERQPRTHYYAVAVVKKGGSFQLNELQGLKSCHTGLRRTAGWNVPIGTLRPFLNWTGPPEPIEAAVARF

SEQ ID NO: 30086 - protein, 76 aa, Artificial Sequence
  Synthetic polypeptide
WVLTRSDGFIRDFPRFAWHSFSLLPLCEEVPSAMIVFLRPLQPCGTDCVWLAVGGVFSGAPYPNPRPQNASNGKGI

SEQ ID NO: 30087 - protein, 14 aa, Artificial Sequence
  Synthetic polypeptide
GLSSHVELTVSGWP

SEQ ID NO: 30088 - protein, 2398 aa, Artificial Sequence
  Synthetic polypeptide
PESSPSPTLPPLPGILQNADHLPPILLLRLIHLFCAVLAGGKENGQMAVSDGSVKGLLSVVRGWSRGPAPDPCLVPLALEALVGAVHVLHASRAPPRGPELRALLESYFHVLNADWPAGLSSGPEEALVTLRVSMLDAIPMMLACEDRPVLQATFLSNNCFEHLTRLIQNSKLYLQSRAPPEGDSDLATRLLTEPDVQKVLDQDTDAIAVHVVRVLTCIMSDSPSAKEVFKERIGYPHLQEVLQSHGPPTHRLLQELLNMAVEGDHSMCPPPPIRNEQPVLVLAQWLPSLPTAELRLFLAQRLRWLCDSCPASRATCVQAGLVGCLLETLSTGLALEARCQEQLLALLQALGRVSIRPMELRHLLRPRPGLDSEPGGAEAGKARHAGAVIRTLSGMARHQGPARALRYFDLTPSMAGIMVPPVQRWPGPGFTFHAWLCLHPMDTAPTPAPTRPLQRKQLYSFFTSSGSGFEAFFTAAGTLVVAVCTRKEYLTMSLPEVSFADSAWHCVAIVHVPGRRPFSQNLVHVYKDGHLVKTAPLRCPSLSEPFSSCCIGSAGYRTTTTTTGLPTPPVPATLAYTHPALTRSQSVPASTGLGWGSGLVAPLQEGSIDSTLAGTQDTRWGSPTSLEGELGAVAIFHEALQATALRTLCTLGPNETAPFKPEGELHELSTRLLLHYSPQACKNNICLDLSPSHGLDGRLTGHRVETWDVKDVVNCVGGMGALLPLLERVAAQPKEAEAGPAETHDLVGPELTSGHNTQGLVLPLGKSSEERMERNAVAAFLLMLRNFLQGHMVNQESLVQCQGPAIIGALLRKVPSWAMDMNVLMSAQLLMEQVAAEGSGPLLYLLYQHLLFNFHLWTLSDFAVRLGHIQYMSSIVREHRQKLRKKYGVQFILDALRTHYSPQRERPLAADDLRTVQTSLLGLAREFLVRSLSADDVQVTQTMLSFLAATGDDGQILRRLQQNERLPERSRQRLRLRECGLQGLVACLPEGTVSPQLCQGLYKLFLGAGSGNTAGGGGSSGTLTPASQPGTPSPLDGPRPFPAAPGRHSSSLSNVLEDGSLPEPTISGDDTSNTSNPQQTSEEELCNLLTNVLFSVTWRGVEGSDEAAWRERGQVFSVLTQLGASATLVRPPDCIKRSLLEMMLESALTDIKEAPVGVLASLTQQALWLLRLLQDFLCAEGHGNQELWSEKLFEGVCSLLDRLGAWPHLANGTADLREMAQIGLRLVLGYILLEDPQLHAQAYVRLHMLLQTAVPARREEACYVLSKLEAALGRVLNTSSLESATDEAGSPLAAAAAAAAAERCSWLVPLVRTLLDRAYEPLGLQWGLPSLPPTNGSPTFFEDFQAFCATPEWRHFIDKQVQPTMSQFEMDTYAKSHDLMSGFWNACYDMLMSSGQRRQWERAQSRRAFQELVLEPAQRRARLEGLRYTAVLKQQATQHSMALLHWGALWRQLASPCGAWALRDTPIPRWKLSSAETYSRMRLKLVPNHHFDPHLEASALRDNLGEVPLTPTEEASLPLAVTKEAKVSTPPELLQEDQLGEDELAELETPMEAAELDEQREKLVLSAECQLVTVVAVVPGLLEVTTQNVYFYDGSTERVETEEGIGYDFRRPLAQLREVHLRRFNLRRSALELFFIDQANYFLNFPCKVGTTPVSSPSQTPRPQPGPIPPHTQVRNQVYSWLLRLRPPSQGYLSSRSPQEMLRASGLTQKWVQREISNFEYLMQLNTIAGRTYNDLSQYPVFPWVLQDYVSPTLDLSNPAVFRDLSKPIGVVNPKHAQLVREKYESFEDPAGTIDKFHYGTHYSNAAGVMHYLIRVEPFTSLHVQLQSGRFDCSDRQFHSVAAAWQARLESPADVKELIPEFFYFPDFLENQNGFDLGCLQLTNEKVGDVVLPPWASSPEDFIQQHRQALESEYVSAHLHEWIDLIFGYKQRGPAAEEALNVFYYCTYEGAVDLDHVTDERERKALEGIISNFGQTPCQLLKEPHPTRLSAEEAAHRLARLDTNSPSIFQHLDELKAFFAEVVSDGVPLVLALVPHRQPHSFITQGSPDLLVTVSASGLLGTHSWLPYDRNISNYFSFSKDPTMGSHKTQRLLSGPWVPGSGVSGQALAVAPDGKLLFSGGHWDGSLRVTALPRGKLLSQLSCHLDVVTCLALDTCGIYLISGSRDTTCMVWRLLHQGGLSVGLAPKPVQVLYGHGAAVSCVAISTELDMAVSGSEDGTVIIHTVRRGQFVAALRPLGATFPGPIFHLALGSEGQIVVQSSAWERPGAQVTYSLHLYSVNGKLRASLPLAEQPTALTVTEDFVLLGTAQCALHILQLNTLLPAAPPLPMKVAIRSVAVTKERSHVLVGLEDGKLIVVVAGQPSEVRSSQFARKLWRSSRRISQVSSGETEYNPTEAR

SEQ ID NO: 30089 - protein, 48 aa, Artificial Sequence
  Synthetic polypeptide
RNQAPALLFLLCQASYRMQTTCLPYCCYVSSTSSAPSSLEERRTGRWL

SEQ ID NO: 30090 - protein, 49 aa, Artificial Sequence
  Synthetic polypeptide
GIKPQPYSSSSARHPTECRPLASHTAVTSHPPLLRRPRWRKGERADGCK

SEQ ID NO: 30091 - protein, 2582 aa, Artificial Sequence
  Synthetic polypeptide
PESSPSPTLPPLPGILQNADHLPPILLLRLIHLFCAVLAGGKENGQMAVSDGSVKGLLSVVRGWSRGPAPDPCLVPLALEALVGAVHVLHASRAPPRGPELRALLESYFHVLNADWPAGLSSGPEEALVTLRVSMLDAIPMMLACEDRPVLQATFLSNNCFEHLTRLIQNSKLYLQSRAPPEGDSDLATRLLTEPDVQKVLDQDTDAIAVHVVRVLTCIMSDSPSAKEVFKERIGYPHLQEVLQSHGPPTHRLLQELLNMAVEGDHSMCPPPPIRNEQPVLVLAQWLPSLPTAELRLFLAQRLRWLCDSCPASRATCVQAGLVGCLLETLSTGLALEARCQEQLLALLQALGRVSIRPMELRHLLRPRPGLDSEPGGAEAGKARHAGAVIRTLSGMARHQGPARALRYFDLTPSMAGIMVPPVQRWPGPGFTFHAWLCLHPMDTAPTPAPTRPLQRKQLYSFFTSSGSGFEAFFTAAGTLVVAVCTRKEYLTMSLPEVSFADSAWHCVAIVHVPGRRPFSQNLVHVYKDGHLVKTAPLRCPSLSEPFSSCCIGSAGYRTTTTTTGLPTPPVPATLAYTHPALTRSQSVPASTGLGWGSGLVAPLQEGSIDSTLAGTQDTRWGSPTSLEGELGAVAIFHEALQATALRTLCTLGPNETAPFKPEGELHELSTRLLLHYSPQACKNNICLDLSPSHGLDGRLTGHRVETWDVKDVVNCVGGMGALLPLLERVAAQPKEAEAGPAETHDLVGPELTSGHNTQGLVLPLGKSSEERMERNAVAAFLLMLRNFLQGHMVNQESLVQCQGPAIIGALLRKVPSWAMDMNVLMSAQLLMEQVAAEGSGPLLYLLYQHLLFNFHLWTLSDFAVRLGHIQYMSSIVREHRQKLRKKYGVQFILDALRTHYSPQRERPLAADDLRTVQTSLLGLAREFLVRSLSADDVQVTQTMLSFLAATGDDGQAVGALDLLLALLHGSLVQESLAVFLLEPGNLEVLLALLVRPGSLPLLPDRVCKILRRLQQNERLPERSRQRLRLRECGLQGLVACLPEGTVSPQLCQGLYKLFLGADCLNLSDLLAVVQLSLQADLSVRLDICRQLFHLIYGQPDVVRLLARQAGWQDVLTRLYVLEAATAGSPPPSSPESPTSPKPAPPKPPTESPAEPSDVFLPSEAPCPDPDGFYHALSPFCTPFDLGLERSSVGSGNTAGGGGSSGTLTPASQPGTPSPLDGPRPFPAAPGRHSSSLSNVLEDGSLPEPTISGDDTSNTSNPQQTSEEELCNLLTNVLFSVTWRGVEGSDEAAWRERGQVFSVLTQLGASATLVRPPDCIKRSLLEMMLESALTDIKEAPVGVLASLTQQALWLLRLLQDFLCAEGHGNQELWSEKLFEGVCSLLDRLGAWPHLANGTADLREMAQIGLRLVLGYILLEDPQLHAQAYVRLHMLLQTAVPARREEACYVLSKLEAALGRVLNTSSLESATDEAGSPLAAAAAAAAAERCSWLVPLVRTLLDRAYEPLGLQWGLPSLPPTNGSPTFFEDFQAFCATPEWRHFIDKQVQPTMSQFEMDTYAKSHDLMSGFWNACYDMLMSSGQRRQWERAQSRRAFQELVLEPAQRRARLEGLRYTAVLKQQATQHSMALLHWGALWRQLASPCGAWALRDTPIPRWKLSSAETYSRMRLKLVPNHHFDPHLEASALRDNLGEVPLTPTEEASLPLAVTKEAKVSTPPELLQEDQLGEDELAELETPMEAAELDEQREKLVLSAECQLVTVVAVVPGLLEVTTQNVYFYDGSTERVETEEGIGYDFRRPLAQLREVHLRRFNLRRSALELFFIDQANYFLNFPCKVGTTPVSSPSQTPRPQPGPIPPHTQVRNQVYSWLLRLRPPSQGYLSSRSPQEMLRASGLTQKWVQREISNFEYLMQLNTIAGRTYNDLSQYPVFPWVLQDYVSPTLDLSNPAVFRDLSKPIGVVNPKHAQLVREKYESFEDPAGTIDKFHYGTHYSNAAGVMHYLIRVEPFTSLHVQLQSGRFDCSDRQFHSVAAAWQARLESPADVKELIPEFFYFPDFLENQNGFDLGCLQLTNEKVGDVVLPPWASSPEDFIQQHRQALESEYVSAHLHEWIDLIFGYKQRGPAAEEALNVFYYCTYEGAVDLDHVTDERERKALEGIISNFGQTPCQLLKEPHPTRLSAEEAAHRLARLDTNSPSIFQHLDELKAFFAEVVSDGVPLVLALVPHRQPHSFITQGSPDLLVTVSASGLLGTHSWLPYDRNISNYFSFSKDPTMGSHKTQRLLSGPWVPGSGVSGQALAVAPDGKLLFSGGHWDGSLRVTALPRGKLLSQLSCHLDVVTCLALDTCGIYLISGSRDTTCMVWRLLHQGGLSVGLAPKPVQVLYGHGAAVSCVAISTELDMAVSGSEDGTVIIHTVRRGQFVAALRPLGATFPGPIFHLALGSEGQIVVQSSAWERPGAQVTYSLHLYSVNGKLRASLPLAEQPTALTVTEDFVLLGTAQCALHILQLNTLLPAAPPLPMKVAIRSVAVTKERSHVLVGLEDGKLIVVVAGQPSEVRSSQFARKLWRSSRRISQVSSGETEYNPTEAR

SEQ ID NO: 30092 - protein, 35 aa, Artificial Sequence
  Synthetic polypeptide
ERGHTGGEHTLTVLPEVLSGTSWAVFVVDLDGRAR

SEQ ID NO: 30093 - protein, 301 aa, Artificial Sequence
  Synthetic polypeptide
RDPQSPGHGLIRNGATQEENTHSQSCLKSFLERHGLSLLWIWMAELGDGRESNQKLQEEIIKTLEHLPIPTKNMLEESKVLPIIQRWSQTKTAVPPLSEGDGYSSENTSRAHTPLNTPDPSTKLSTEADTDTPKKLMFRRLKIISENSMDSAISDATSELEGKDGKEDLDQLENVPVEEEEELQSQQLLPQQLPECKVDSETNIEASKLPTSEPEADAEIEPKESNGTKLEEPINEETPSQDEEEGVSDVESERSQEQPDKTVDISDLATKLLDSWKDLKEVYRIPKKSQTEKENTRNQPE

SEQ ID NO: 30094 - protein, 16 aa, Artificial Sequence
  Synthetic polypeptide
LGTGPHRRRTHTHSPA

SEQ ID NO: 30095 - protein, 824 aa, Artificial Sequence
  Synthetic polypeptide
RDPQSPGHGLIRNGATQEENTHSQSCLKSFLERHGLSLLWIWMAELGDGRESNQKLQEEIIKTLEHLPIPTKNMLEESKVLPIIQRWSQTKTAVPPLSEGDGYSSENTSRAHTPLNTPDPSTKLSTEADTDTPKKLMFRRLKIISENSMDSAISDATSELEGKDGKEDLDQLENVPVEEEEELQSQQLLPQQLPECKVDSETNIEASKLPTSEPEADAEIEPKESNGTKLEEPINEETPSQDEEEGVSDVESERSQEQPDKTVDISDLATKLLDSWKDLKEVYRIPKKSQTEKENTTTERGRDAVGFRDQTPAPKTPNRSRERDPDKQTQNKEKRKRRSSLSPPSSAYERGTKRPDDRYDTPTSKKKVRIKDRNKLSTEERRKLFEQEVAQREAQKQQQQMQNLGMTSPLPYDSLGYNAPHHPFAGYPPGYPMQAYVDPSNPNAGKVLLPTPSMDPVCSPAPYDHAQPLVGHSTEPLSAPPPVPVVPHVAAPVEVSSSQYVAQSDGVVHQDSSVAVLPVPAPGPVQGQNYSVWDSNQQSVSVQQQYSPAQSQATIYYQGQTCPTVYGVTSPYSQTTPPIVQSYAQPSLQYIQGQQIFTAHPQGVVVQPAAAVTTIVAPGQPQPLQPSEMVVTNNLLDLPPPSPPKPKTIVLPPNWKTARDPEGKIYYYHVITRQTQWDPPTWESPGDDASLEHEAEMDLGTPTYDENPMKASKKPKTAEADTSSELAKKSKEVFRKEMSQFIVQCLNPYRKPDCKVGRITTTEDFKHLARKLTHGVMNKELKYCKNPEDLECNENVKHKTKEYIKKYMQKFGAVYKPKEDTELE

SEQ ID NO: 30096 - protein, 20 aa, Artificial Sequence
  Synthetic polypeptide
GQGCCFIQIWSPALSTRRRK

SEQ ID NO: 30097 - protein, 2594 aa, Artificial Sequence
  Synthetic polypeptide
PLCCLTIYISILIFTPLCWYYFCYKFLFCDLQEAELFEGRDAALFKFGLQPLAQEEENEAKIENVQKTGFIKGPMFKGVASSRFLPKGTKTKVNLEEQGRQKVSFSFSLTKKTLQNRFLTALGNEKQSDTPNPPAVPLQVDSTPKMKMEIGDTLSTAEESSPPKSRVELGKIHFKKHLLHVTSRPLLATTTAVASPPTHAAPLPAVIAESTTVDSPPSSPPPPPPPAQATTLSSPAPVTEPVALPHTPITVLMAAPVPLPVDVAVRSLKEPPIIIVPESLEADTKQDTISNSLEEHVTQILNEQADISSKKEDSHIGKDEEIPDSSKISLSCKKTGSKKKSSQSEGIFLGSESDEDSVRTSSSQRSHDLKFSASIEKERDFKKSSAPLKSEDLGKPSRSKTDRDDKYFSYSKLERDTRYVSSRCRSERERRRSRSHSRSERGSRTNLSYSRSERSHYYDSDRRYHRSSPYRERTRYSRPYTDNRARESSDSEEEYKKTYSRRTSSHSSSYRDLRTSSYSKSDRDCKTETSYLEMERRGKYSSKLERESKRTSENEAIKRCCSPPNELGFRRGSSYSKHDSSASRYKSTLSKPIPKSDKFKNSFCCTELNEEIKQSHSFSLQTPCSKGSELRMINKNPEREKAGSPAPSNRLNDSPTLKKLDELPIFKSEFITHDSHDSIKELDSLSKVKNDQLRSFCPIELNINGSPGAESDLATFCTSKTDAVLMTSDDSVTGSELSPLVKACMLSSNGFQNISRCKEKDLDDTCMLHKKSESPFRETEPLVSPHQDKLMSMPVMTVDYSKTVVKEPVDTRVSCCKTKDSDIYCTLNDSNPSLCNSEAENIEPSVMKISSNSFMNVHLESKPVICDSRNLTDHSKFACEEYKQSIGSTSSASVNHFDDLYQPIGSSGIASSLQSLPPGIKVDSLTLLKCGENTSPVLDAVLKSKKSSEFLKHAGKETIVEVGSDLPDSGKGFASRENRRNNGLSGKCLQEAQEEGNSILPERRGRPEISLDERGEGGHVHTSDDSEVVFSSCDLNLTMEDSDGVTYALKCDSSGHAPEIVSTVHEDYSGSSESSNDESDSEDTDSDDSSIPRNRLQSVVVVPKNSTLPMEETSPCSSRSSQSYRHYSDHWEDERLESRRHLYEEKFESIASKACPQTDKFFLHKGTEKNPEISFTQSSRKQIDNRLPELSHPQSDGVDSTSHTDVKSDPLGHPNSEETVKAKIPSRQQEELPIYSSDFEDVPNKSWQQTTFQNRPDSRLGKTELSFSSSCEIPHVDGLHSSEELRNLGWDFSQEKPSTTYQQPDSSYGACGGHKYQQNAEQYGGTRDYWQGNGYWDPRSGRPPGTGVVYDRTQGQVPDSLTDDREEEENWDQQDGSHFSDQSDKFLLSLQKDKGSVQAPEISSNSIKDTLAVNEKKDFSKNLEKNDIKDRGPLKKRRQEIESDSESDGELQDRKKVRVEVEQGETSVPPGSALVGPSCVMDDFRDPQRWKECAKQGKMPCYFDLIEENVYLTERKKNKSHRDIKRMQCECTPLSKDERAQGEIACGEDCLNRLLMIECSSRCPNGDYCSNRRFQRKQHADVEVILTEKKGWGLRAAKDLPSNTFVLEYCGEVLDHKEFKARVKEYARNKNIHYYFMALKNDEIIDATQKGNCSRFMNHSCEPNCETQKWTVNGQLRVGFFTTKLVPSGSELTFDYQFQRYGKEAQKCFCGSANCRGYLGGENRVSIRAAGGKMKKERSRKKDSVDGELEALMENGEGLSDKNQVLSLSRLMVRIETLEQKLTCLELIQNTHSQSCLKSFLERHGLSLLWIWMAELGDGRESNQKLQEEIIKTLEHLPIPTKNMLEESKVLPIIQRWSQTKTAVPPLSEGDGYSSENTSRAHTPLNTPDPSTKLSTEADTDTPKKLMFRRLKIISENSMDSAISDATSELEGKDGKEDLDQLENVPVEEEEELQSQQLLPQQLPECKVDSETNIEASKLPTSEPEADAEIEPKESNGTKLEEPINEETPSQDEEEGVSDVESERSQEQPDKTVDISDLATKLLDSWKDLKEVYRIPKKSQTEKENTTTERGRDAVGFRDQTPAPKTPNRSRERDPDKQTQNKEKRKRRSSLSPPSSAYERGTKRPDDRYDTPTSKKKVRIKDRNKLSTEERRKLFEQEVAQREAQKQQQQMQNLGMTSPLPYDSLGYNAPHHPFAGYPPGYPMQAYVDPSNPNAGKVLLPTPSMDPVCSPAPYDHAQPLVGHSTEPLSAPPPVPVVPHVAAPVEVSSSQYVAQSDGVVHQDSSVAVLPVPAPGPVQGQNYSVWDSNQQSVSVQQQYSPAQSQATIYYQGQTCPTVYGVTSPYSQTTPPIVQSYAQPSLQYIQGQQIFTAHPQGVVVQPAAAVTTIVAPGQPQPLQPSEMVVTNNLLDLPPPSPPKPKTIVLPPNWKTARDPEGKIYYYHVITRQTQWDPPTWESPGDDASLEHEAEMDLGTPTYDENPMKASKKPKTAEADTSSELAKKSKEVFRKEMSQFIVQCLNPYRKPDCKVGRITTTEDFKHLARKLTHGVMNKELKYCKNPEDLECNENVKHKTKEYIKKYMQKFGAVYKPKEDTELE

SEQ ID NO: 30098 - protein, 87 aa, Artificial Sequence
  Synthetic polypeptide
HKKKKMRQRLKMCRKQVSSKDQCSKVLLLVDFCPKAPKQKLIWKNRDDRRCHSASALQRKLCRIGFSLHLAMKSKVILQTLQLYLFR

SEQ ID NO: 30099 - protein, 93 aa, Artificial Sequence
  Synthetic polypeptide
TLIGDHKFSAHRIVLAASIPYFHAMFTNDMMECKQDEIVMQGMDPSALEALINFAYNGNLAIDQQNVQSLLMGASFLQLQSIKDACCTFLRER

SEQ ID NO: 30100 - protein, 32 aa, Artificial Sequence
  Synthetic polypeptide
AASLNTDWGPQIQCPPDCLSSLDPVFPCYVYK

SEQ ID NO: 30101 - protein, 533 aa, Artificial Sequence
  Synthetic polypeptide
TLIGDHKFSAHRIVLAASIPYFHAMFTNDMMECKQDEIVMQGMDPSALEALINFAYNGNLAIDQQNVQSLLMGASFLQLQSIKDACCTFLRERLHPKNCLGVRQFAETMMCAVLYDAANSFIHQHFVEVSMSEEFLALPLEDVLELVSRDELNVKSEEQVFEAALAWVRYDREQRGPYLPELLSNIRLPLCRPQFLSDRVQQDDLVRCCHKCRDLVDEAKDYHLMPERRPHLPAFRTRPRCCTSIAGLIYAVGGLNSAGDSLNVVEVFDPIANCWERCRPMTTARSRVGVAVVNGLLYAIGGYDGQLRLSTVEAYNPETDTWTRVGSMNSKRSAMGTVVLDGQIYVCGGYDGNSSLSSVETYSPETDKWTVVTSMSSNRSAAGVTVFEGRIYVSGGHDGLQIFSSVEHYNHHTATWHPAAGMLNKRCRHGAASLGSKMFVCGGYDGSGFLSIAEMYSSVADQWCLIVPMHTRRSRVSLVASCGRLYAVGGYDGQSNLSSVEMYDPETDCWTFMAPMACHEGGVGVGCIPLLTI

SEQ ID NO: 30102 - protein, 25 aa, Artificial Sequence
  Synthetic polypeptide
GRARWLTPVIPAVWEAEAGETDSTL

SEQ ID NO: 30103 - protein, 257 aa, Artificial Sequence
  Synthetic polypeptide
SQQFGRPRRGKLTLLCDAKTDGSFLVHHFLSFYLKANCKVCFVALIQSFSHYSIVGQKLGVSLTMARERGQLVFLEGLKSAVDVVFQAQKEPHPLQFLREANAGNLKPLFEFVREALKPVDSGEARWTYPVLLVDDLSVLLSLGMGAVAVLDFIHYCRATVCWELKGNMVVLVHDSGDAEDEENDILLNGLSHQSHLILRAEGLATGFCRDVHGQLRILWRRPSQPAVHRDQSFTYQYKIQDKSVSFFAKGMSPAVL

SEQ ID NO: 30104 - protein, 20 aa, Artificial Sequence
  Synthetic polypeptide
PGAVAHPCNPSSLGGRGGGN

SEQ ID NO: 30105 - protein, 51 aa, Artificial Sequence
  Synthetic polypeptide
SQQFGRPRRGKLTLLCDAKTDGSFLVHHFLSFYLKGCQPDHGAGAWAACVP

SEQ ID NO: 30106 - protein, 396 aa, Artificial Sequence
  Synthetic polypeptide
SKTPSQKKKKKEFSRVREEVPLELVEAHVKKVQEAARASGKVDPTYGLESSCIAGTGPDEPEKLEGAEEEKMEADPDGQQPEKAENKVENETDEGDKAQDGENEKNSEKEQDSEVSEDTKSEEKETEENKELTDTCKERESDTGKKKVEHEISEGNVATAAAAALASAATKAKHLAAVEERKIKSLVALLVETQMKKLEIKLRHFEELETIMDREKEALEQQRQQLLTERQNFHMEQLKYAELRARQQMEQQQHGQNPQQAHQHSGGPGLAPLGAAGHPGMMPHQQPPPYPLMHHQMPPPHPPQPGQIPGPGSMMPGQHMPGRMIPTVAANIHPSGSGPTPPGMPPMPGNILGPRVPLTAPNGMYPPPPQQQPPPPPPADGVPPPPAPGPPASAAP

SEQ ID NO: 30107 - protein, 136 aa, Artificial Sequence
  Synthetic polypeptide
TQEAEVAVSRDRATALHPLGNRARLRLKKKKKRSFLGSGRRYHWNWLKLMSRKYKKQHEPLGKWIPPTVWRAAALQAQGPMSQRSLKELKRKKWKPTLMVSSLKRQKIKWKMKRMKVIKHKMEKMKKIVKRNRIVK

SEQ ID NO: 30108 - protein, 38 aa, Artificial Sequence
  Synthetic polypeptide
AEIVPLHSIPWAIEQDSVSKKKKKGVFSGPGGGTTGIG

SEQ ID NO: 30109 - protein, 911 aa, Artificial Sequence
  Synthetic polypeptide
ASPCSCLLPLDYCDASAVALHEEWLRPVMRKEKQVLVHWGFYPDSYDTWVHSNDVDAEIEDPPIPEKPWKVHVKWILDTDIFNEWMNEEDYEVDENRKPVSFRQRISTKNEEPVRSPERRDRKASANARKRKHSPSPPPPTPTESRKKSGKKGQASLYGKRRSQKEEDEQEDLTKDMEDPTPVPNIEEVVLPKNVNLKKDSENTPVKGGTVADLDEQDEETVTAGGKEDEDPAKGDQSRSVDLGEDNVTEQTNHIIIPSYASWFDYNCIHVIERRALPEFFNGKNKSKTPEIYLAYRNFMIDTYRLNPQEYLTSTACRRNLTGDVCAVMRVHAFLEQWGLVNYQVDPESRPMAMGPPPTPHFNVLADTPSGLVPLHLRSPQVPAAQQMLNFPEKNKEKPVDLQNFGLRTDIYSKKTLAKSKGASAGREWTEQETLLLLEALEMYKDDWNKVSEHVGSRTQDECILHFLRLPIEDPYLENSDASLGPLAYQPVPFSQSGNPVMSTVAFLASVVDPRVASAAAKAALEEFSRVREEVPLELVEAHVKKVQEAARASGKVDPTYGLESSCIAGTGPDEPEKLEGAEEEKMEADPDGQQPEKAENKVENETDEGDKAQDGENEKNSEKEQDSEVSEDTKSEEKETEENKELTDTCKERESDTGKKKVEHEISEGNVATAAAAALASAATKAKHLAAVEERKIKSLVALLVETQMKKLEIKLRHFEELETIMDREKEALEQQRQQLLTERQNFHMEQLKYAELRARQQMEQQQHGQNPQQAHQHSGGPGLAPLGAAGHPGMMPHQQPPPYPLMHHQMPPPHPPQPGQIPGPGSMMPGQHMPGRMIPTVAANIHPSGSGPTPPGMPPMPGNILGPRVPLTAPNGMYPPPPQQQPPPPPPADGVPPPPAPGPPASAAP

SEQ ID NO: 30110 - protein, 73 aa, Artificial Sequence
  Synthetic polypeptide
IIPGRGTRQLETTSVPQCFLQLFSHPHLKLLLCPVLPFLWKPQCRLWLRLPLVPVFYLLTIVMPLQWLCMKNG

SEQ ID NO: 30111 - protein, 106 aa, Artificial Sequence
  Synthetic polypeptide
TQEAEAAVSRDCTIALQPSMFMRMLLPIKHWLGWWCSFFSSRKMPLGSMSPTRPSPNSLQSVSWISKLEAPYVTFLGLLTSIKMNRDGGGLTYRTHLEWIVMWKCL

SEQ ID NO: 30112 - protein, 19 aa, Artificial Sequence
  Synthetic polypeptide
AEIAPLHSSLVCSCGCSYQ

SEQ ID NO: 30113 - protein, 87 aa, Artificial Sequence
  Synthetic polypeptide
TQEAEAAVSRDCTIALQPSMFMRMLLPIKHWLGWWCSFFSSRKMPLGSMSPTRPSPNSLQSVSWISKLEAPYVTFLGLLTSIKMNRD

SEQ ID NO: 30114 - protein, 43 aa, Artificial Sequence
  Synthetic polypeptide
THHTQVKKAPPSLKLWVIIQGKKPLKPKFWNWEVQDQGSCPWT

SEQ ID NO: 30115 - protein, 37 aa, Artificial Sequence
  Synthetic polypeptide
SCGSLSKGKNPSNLSSGTGKSKIRAPAPGPEPGSLAL

SEQ ID NO: 30116 - protein, 16 aa, Artificial Sequence
  Synthetic polypeptide
AQEFKPQVELRNLAKS

SEQ ID NO: 30117 - protein, 17 aa, Artificial Sequence
  Synthetic polypeptide
KAEAASLKPRSSSHRWN

SEQ ID NO: 30118 - protein, 28 aa, Artificial Sequence
  Synthetic polypeptide
SQLFKRLRQPRLSPGVQATGGIKKSGKK

SEQ ID NO: 30119 - protein, 4 aa, Artificial Sequence
  Synthetic polypeptide
QRRL

SEQ ID NO: 30120 - protein, 153 aa, Artificial Sequence
  Synthetic polypeptide
AKITPLDSSLCDRGVCEEMTYEEIQDNYPLEFALRDQDKYRYRYPKGESYEDLVQRLEPVIMELERQENVLVICHQAVMRCLLAYFLDKAAEQLPYLKCPLHTVLKLTPVAYGCKVESIFLNVAAVNTHRDRPQNVDISRPPEEALVTVPAHQ

SEQ ID NO: 30121 - protein, 22 aa, Artificial Sequence
  Synthetic polypeptide
GCSEPRSHHWTPACVTEASVRK

SEQ ID NO: 30122 - protein, 70 aa, Artificial Sequence
  Synthetic polypeptide
SQHFGRTRQADHLSVHDQLPNSHCHGGPARQGQDLHLQEADSIPELDWCAHSGVQCWPVSPGRGQDLQIF

SEQ ID NO: 30123 - protein, 20 aa, Artificial Sequence
  Synthetic polypeptide
LTPVIPALWEDEAGRSPECA

SEQ ID NO: 30124 - protein, 16 aa, Artificial Sequence
  Synthetic polypeptide
SQHFGRTRQADHLSVH

SEQ ID NO: 30125 - protein, 72 aa, Artificial Sequence
  Synthetic polypeptide
SGLHGTVRGGPEALARSSSPVRTRIHPIAGAAPCGAFWGPGPDLFLGFGMPASSAPGAAARYRFRLWRPVRI

SEQ ID NO: 30126 - protein, 78 aa, Artificial Sequence
  Synthetic polypeptide
AQEFKTNLAYMGPFGAGQRPWPGVPRLLEPGSTPSREPHPVERSGVPALTSSWASGCPRPLHPALQLVIDSAFGGRSV

SEQ ID NO: 30127 - protein, 49 aa, Artificial Sequence
  Synthetic polypeptide
RARWLTPIIPALWEAKMGGLLEPRSSRLIWPTWDRSGRARGLGQEFLAC

SEQ ID NO: 30128 - protein, 44 aa, Artificial Sequence
  Synthetic polypeptide
HEHPGQNKPRSQDERDTRTNNRQKTYWPLDSAASPISPPSAPGG

SEQ ID NO: 30129 - protein, 110 aa, Artificial Sequence
  Synthetic polypeptide
PGAVAHACNPALWDAEVGGSRGQEIKTILANMSILARTSQGAKTRGTHGQTTDRRRTGRWTPLPPPSPRHLRPEDEPSLQGHGCGAPRQRRPSGALCPPGRGALMRAPLQ

SEQ ID NO: 30130 - protein, 206 aa, Artificial Sequence
  Synthetic polypeptide
GRARWLTPVIQHFGMLRWADHEVRRSRPSWLTCRASWPEQAKEPRREGHTDKQQTEDVLAAGLRCLPHLPAICARRMSPAFRAMDVEPRAKGVLLEPFVHQVGGHSCVLRFNETTLCKPLVPREHQFYETLPAEMRKFTPQYKGKSQLLEGLPHWRGDVRDRGHGRPWQPSLEPSLPPTLCFPSLSSFSSSWPSAQHLTPSVFNPW

SEQ ID NO: 30131 - protein, 45 aa, Artificial Sequence
  Synthetic polypeptide
HAEHPGQNKPRSQDERDTRTNNRQKTYWPLDSAASPISPPSAPGG

SEQ ID NO: 30132 - protein, 111 aa, Artificial Sequence
  Synthetic polypeptide
PGAVAHACNPALWDAEVGGSRGQEIKTILANMQSILARTSQGAKTRGTHGQTTDRRRTGRWTPLPPPSPRHLRPEDEPSLQGHGCGAPRQRRPSGALCPPGRGALMRAPLQ

SEQ ID NO: 30133 - protein, 100 aa, Artificial Sequence
  Synthetic polypeptide
GRARWLTPVIQHFGMLRWADHESILARTSQGAKTRGTHGQTTDRRRTGRWTPLPPPSPRHLRPEDEPSLQGHGCGAPRQRRPSGALCPPGRGALMRAPLQ

SEQ ID NO: 30134 - protein, 134 aa, Artificial Sequence
  Synthetic polypeptide
GGRITRASWPEQAKEPRREGHTDKQQTEDVLAAGLRCLPHLPAICARRMSPAFRAMDVEPRAKGVLLEPFVHQVGGHSCVLRFNETTLCKPLVPREHQFYETLPAEMRKFTPQYKGVVSVRFEEDEDRNLCLIA

SEQ ID NO: 30135 - protein, 64 aa, Artificial Sequence
  Synthetic polypeptide
PGAVAHACNPALWDAEVGGSREHPGQNKPRSQDERDTRTNNRQKTYWPLDSAASPISPPSAPGG

SEQ ID NO: 30136 - protein, 178 aa, Artificial Sequence
  Synthetic polypeptide
GGRITRASWPEQAKEPRREGHTDKQQTEDVLAAGLRCLPHLPAICARRMSPAFRAMDVEPRAKGVLLEPFVHQVGGHSCVLRFNETTLCKPLVPREHQFYETLPAEMRKFTPQYKGKSQLLEGLPHWRGDVRDRGHGRPWQPSLEPSLPPTLCFPSLSSFSSSWPSAQHLTPSVFNPW

SEQ ID NO: 30137 - protein, 145 aa, Artificial Sequence
  Synthetic polypeptide
GGRITRASWPEQAKEPRREGHTDKQQTEDVLAAGLRCLPHLPAICARRMSPAFRAMDVEPRAKGVLLEPFVHQVGGHSCVLRFNETTLCKPLVPREHQFYETLPAEMRKFTPQYKGQSQRPLVSWPSLPHFFPWSFPLWPQGSVA

SEQ ID NO: 30138 - protein, 138 aa, Artificial Sequence
  Synthetic polypeptide
GGRITRASWPEQAKEPRREGHTDKQQTEDVLAAGLRCLPHLPAICARRMSPAFRAMDVEPRAKGVLLEPFVHQVGGHSCVLRFNETTLCKPLVPREHQFYETLPAEMRKFTPQYKGQSQRPLVSWPSLPHFFPWSFPL

SEQ ID NO: 30139 - protein, 118 aa, Artificial Sequence
  Synthetic polypeptide
GGRITRASWPEQAKEPRREGHTDKQQTEDVLAAGLRCLPHLPAICARRMSPAFRAMDVEPRAKGVLLEPFVHQVGGHSCVLRFNETTLCKPLVPREHQFYETLPAEMRKFTPQYKGVS

SEQ ID NO: 30140 - protein, 89 aa, Artificial Sequence
  Synthetic polypeptide
GGRITRASWPEQAKEPRREGHTDKQQTEDVLAAGLRCLPHLPAICARRMSPAFRAMDVEPRAKGVLLEPFVHQVGGHSCVLRFNETTLC

SEQ ID NO: 30141 - protein, 47 aa, Artificial Sequence
  Synthetic polypeptide
GQARWFTPVIPALWEAKFQFLADLIDEYQSVLRPITLMRKRKIQIQG

SEQ ID NO: 30142 - protein, 11 aa, Artificial Sequence
  Synthetic polypeptide
SQHFGRPSSSS

SEQ ID NO: 30143 - protein, 333 aa, Artificial Sequence
  Synthetic polypeptide
PGAVVHTCNPSTLGGQVPVPSRFNRRVSVCAETYNPDEEEEDTDPRVIHPKTDEQRCRLQEACKDILLFKNLDQEQLSQVLDAMFERIVKADEHVIDQGDDGDNFYVIERGTYDILVTKDNQTRSVGQYDNRGSFGELALMYNTPRAATIVATSEGSLWGLDRVTFRRIIVKNNAKKRKMFESFIESVPLLKSLEVSERMKIVDVIGEKIYKDGERIITQGEKADSFYIIESGEVSILIRSRTKSNKDGGNQEVEIARCHKGQYFGELALVTNKPRAASAYAVGDVKCLVMDVQAFERLLGPCMDIMKRNISHYEEQLVKMFGSSVDLGNLGQ

SEQ ID NO: 30144 - protein, 311 aa, Artificial Sequence
  Synthetic polypeptide
PGAVVHTCNPSTLGGQVPVPSRFNRRVSVCAETYNPDEEEEDTDPRVIHPKTDEQRCRLQEACKDILLFKNLDQEQLSQVLDAMFERIVKADEHVIDQGDDGDNFYVIERGTYDILVTKDNQTRSVGQYDNRGSFGELALMYNTPRAATIVATSEGSLWGLDRVTFRRIIVKNNAKKRKMFESFIESVPLLKSLEVSERMKIVDVIGEKIYKDGERIITQTKSNKDGGNQEVEIARCHKGQYFGELALVTNKPRAASAYAVGDVKCLVMDVQAFERLLGPCMDIMKRNISHYEEQLVKMFGSSVDLGNLGQ

SEQ ID NO: 30145 - protein, 37 aa, Artificial Sequence
  Synthetic polypeptide
GQAQWLTPVIPALQEAEAGDCFEPRSSRPAWTTCSSS

SEQ ID NO: 30146 - protein, 341 aa, Artificial Sequence
  Synthetic polypeptide
SQHFRRLRRAIALSPGVQDQPGQHVPVPSRFNRRVSVCAETYNPDEEEEDTDPRVIHPKTDEQRCRLQEACKDILLFKNLDQEQLSQVLDAMFERIVKADEHVIDQGDDGDNFYVIERGTYDILVTKDNQTRSVGQYDNRGSFGELALMYNTPRAATIVATSEGSLWGLDRVTFRRIIVKNNAKKRKMFESFIESVPLLKSLEVSERMKIVDVIGEKIYKDGERIITQGEKADSFYIIESGEVSILIRSRTKSNKDGGNQEVEIARCHKGQYFGELALVTNKPRAASAYAVGDVKCLVMDVQAFERLLGPCMDIMKRNISHYEEQLVKMFGSSVDLGNLGQ

SEQ ID NO: 30147 - protein, 41 aa, Artificial Sequence
  Synthetic polypeptide
AQEFKTSLDNMFQFLADLIDEYQSVLRPITLMRKRKIQIQG

SEQ ID NO: 30148 - protein, 319 aa, Artificial Sequence
  Synthetic polypeptide
SQHFRRLRRAIALSPGVQDQPGQHVPVPSRFNRRVSVCAETYNPDEEEEDTDPRVIHPKTDEQRCRLQEACKDILLFKNLDQEQLSQVLDAMFERIVKADEHVIDQGDDGDNFYVIERGTYDILVTKDNQTRSVGQYDNRGSFGELALMYNTPRAATIVATSEGSLWGLDRVTFRRIIVKNNAKKRKMFESFIESVPLLKSLEVSERMKIVDVIGEKIYKDGERIITQTKSNKDGGNQEVEIARCHKGQYFGELALVTNKPRAASAYAVGDVKCLVMDVQAFERLLGPCMDIMKRNISHYEEQLVKMFGSSVDLGNLGQ

SEQ ID NO: 30149 - protein, 20 aa, Artificial Sequence
  Synthetic polypeptide
WCTPVIPATREAEAMSCPAT

SEQ ID NO: 30150 - protein, 16 aa, Artificial Sequence
  Synthetic polypeptide
SQLLGRLRLCLAQPRD

SEQ ID NO: 30151 - protein, 34 aa, Artificial Sequence
  Synthetic polypeptide
NPISTKNTKISQVCWQVPVIPATREAEAMSCPAT

SEQ ID NO: 30152 - protein, 16 aa, Artificial Sequence
  Synthetic polypeptide
SQLHGRLRLCLAQPRD

SEQ ID NO: 30153 - protein, 19 aa, Artificial Sequence
  Synthetic polypeptide
NPISTKNTKISQAMSCPAT

SEQ ID NO: 30154 - protein, 23 aa, Artificial Sequence
  Synthetic polypeptide
HGETPSLLKIQKLARLCLAQPRD

SEQ ID NO: 30155 - protein, 182 aa, Artificial Sequence
  Synthetic polypeptide
PGYVLPSHVTEEMLWECKQLGAHSPSTLLTTLMFFNTKYFLLKTVDQHMKLAFSKVLRQTKKNPSNPKDKSTSIRYLKALGIHQTGQKVTDDMYAEQTENPENPLRCPIKLYDFYLFKCPQSVKGRNDTFYLTPEPVVAPNSPIWYSVQPISREQMGQMLTRILVIREIQEAIAVANASTMH

SEQ ID NO: 30156 - protein, 337 aa, Artificial Sequence
  Synthetic polypeptide
TRETEVEAQTVQVAEVEPQSQPQPSPELLLPNSLKPEEGLEVWKNWAQTKNAELEKDAQNRLAPIGRRQLLRFQEDLISSAVAELNYGLCLMTREARNGEGEPYDPDVLYYIFLCIQKYLFENGRVDDIFSDLYYVRFTEWLHEVLKDVQPRVTPLGYVLPSHVTEEMLWECKQLGAHSPSTLLTTLMFFNTKYFLLKTVDQHMKLAFSKVLRQTKKNPSNPKDKSTSIRYLKALGIHQTGQKVTDDMYAEQTENPENPLRCPIKLYDFYLFKCPQSVKGRNDTFYLTPEPVVAPNSPIWYSVQPISREQMGQMLTRILVIREIQEAIAVANASTMH

SEQ ID NO: 30157 - protein, 35 aa, Artificial Sequence
  Synthetic polypeptide
LEPGRQRLRLKLSRLLKLNHSHSHSLPQNFCFQIL

SEQ ID NO: 30158 - protein, 53 aa, Artificial Sequence
  Synthetic polypeptide
VLLSNPCGTRSHPTGIIIKMIIPVSVIPSSSLDLSSVQKIQKPYQHPWTLVPT

SEQ ID NO: 30159 - protein, 12 aa, Artificial Sequence
  Synthetic polypeptide
AIPVEQEVIQLE

SEQ ID NO: 30160 - protein, 588 aa, Artificial Sequence
  Synthetic polypeptide
AGGHLSTLKQSLWNKKSSNWNNNQNDYSSLSDSQFLFGSQFCPENSETLSAPLDFGAHLRHSKQSQQNYLEGEPSIFTKYQTKPQLFGGDIKDGGLFPPPLSVGKSKGLLEQFEEKKKRAKDKCDSETLYNFVSNVRESILRLQTSVEKSEDHLSSRSQSILDSLETVAKTLQETIQAQNDLVFEAVQDKGNMEQAILEMKKRFEARQGEFIEMKSNLKHLEVLVAQQSQEFQQLCEQLGQLNVPSVLAELKRLISVPPVKDSASQTSPPLAQSLNLTRQEKYTSEKPVLWQAQALPAAWNPGMGSLQPGEFDVWGEGAKNDDLQEEAALPAFGSHERNRHVKDKVVQTNCKNWAVTKTGAKNHGSSVPGHKIPSDRDLVSQGASQLTSLEINFSTSIKNACQKYQAQSMFLCDPREHLVIKQKDGTVEMRGKDKKQQPRKAHRAHRGRLIASKQKQIPIQTCKFNSKYQSPQPAISVPQSPFLGQQEPRAQPLHLQCPRSPRKPVCPILGGTVMPNKTVRAVQGRLLQLSRCSSQDNWLLSSSSQGDHQMSWFSDLNLGCSETPLCKEAGKNLLYDLGFDSSDDDGF

SEQ ID NO: 30161 - protein, 197 aa, Artificial Sequence
  Synthetic polypeptide
AGGHLSTLKQSLWNKKSSNWNNNQNDYSSLSDSQFLFGSQFCPENSETLSAPLDFGAHLRHSKQSQQNYLEGEPSIFTKYQTKPQLFGGDIKDGGLFPPPLSVGKSKGLLEQFEEKKKRAKDKCDSCRRLWKSLRTISVQEANLFWILWRLWPRHVSASCLRYQQRALVNDEHELSDPSLVSSGEVPHRVSDERMGI

SEQ ID NO: 30162 - protein, 92 aa, Artificial Sequence
  Synthetic polypeptide
GDCCYGLPKKKDQALRLAEILLPLQNHQQVPIPQCLPLSLQMVIALAPVGCTVPVSAGVDLAFLLRIIVRSHHPLIYNLGSVDLETWETPAS

SEQ ID NO: 30163 - protein, 23 aa, Artificial Sequence
  Synthetic polypeptide
DQPGQHKETVAMDYQKKKIKHCA

SEQ ID NO: 30164 - protein, 754 aa, Artificial Sequence
  Synthetic polypeptide
VQEFETSLGNIRRLLLWITKKKRSSTAPSRNFTTSPKSSASPYSSVSASLIANGDSTSTCGMHSSGVSRGGSGFSASYNCQEPPSSHIQPGLCGLGNLGNTCFMNSALQCLSNTAPLTDYFLKDEYEAEINRDNPLGMKGEIAEAYAELIKQMWSGRDAHVAPRMFKTQVGRFAPQFSGYQQQDSQELLAFLLDGLHEDLNRVKKKPYLELKDANGRPDAVVAKEAWENHRLRNDSVIVDTFHGLFKSTLVCPECAKVSVTFDPFCYLTLPLPLKKDRVMEVFLVPADPHCRPTQYRVTVPLMGAVSDLCEALSRLSGIAAENMVVADVYNHRFHKIFQMDEGLNHIMPRDDIFVYEVCSTSVDGSECVTLPVYFRERKSRPSSTSSASALYGQPLLLSVPKHKLTLESLYQAVCDRISRYVKQPLPDEFGSSPLEPGACNGSRNSCEGEDEEEMEHQEEGKEQLSETEGSGEDEPGNDPSETTQKKIKGQPCPKRLFTFSLVNSYGTADINSLAADGKLLKLNSRSTLAMDWDSETRRLYYDEQESEAYEKHVSMLQPQKKKKTTVALRDCIELFTTMETLGEHDPWYCPNCKKHQQATKKFDLWSLPKILVVHLKRFSYNRYWRDKLDTVVEFPIRGLNMSEFVCNLSARPYVYDLIAVSNHYGAMGVGHYTAYAKNKLNGKWYYFDDSNVSLASEDQIVTKAAYVLFYQRRDDEFYKTPSLSSSGSSDGGTRPSSSQQGFGDDEACSMDTN

SEQ ID NO: 30165 - protein, 381 aa, Artificial Sequence
  Synthetic polypeptide
DHKNFSGIYCSLLPLGCWSADSQRVVFDSAQRSRQDLFAVDTQVGTVTSLTAGGSGGSWKLLTIDQDLMVAQFSTPSLPPTLKVGFLPSAGKEQSVLWVSLEEAEPIPDIHWGIRVLQPPPEQENVQYAGLDFEAILLQPGSPPDKTQVPMVVMPHGGPHSSFVTAWMLFPAMLCKMGFAVLLVNYRGSTGFGQDSILSLPGNVGHQDVKDVQFAVEQVLQEEHFDASHVALMGGSHGGFISCHLIGQYPETYRACVARNPVINIASMLGSTDIPDWCVVEAGFPFSSDCLPDLSVWAEMLDKSPIRYIPQVKTPLLLMLGQEDRRVPFKQGMEYYRALKTRNVPVRLLLYPKSTHALSEVEVESDSFMNAVLWLRTHLGS

SEQ ID NO: 30166 - protein, 62 aa, Artificial Sequence
  Synthetic polypeptide
APISSWRGDCVCLPHRIIRTSLGSTAAFCLWDAGQLTAREWSLTRLSAAGRTCLLWTPKWAL

SEQ ID NO: 30167 - protein, 32 aa, Artificial Sequence
  Synthetic polypeptide
DHKNFSGIYCSLLPLGCWSADSQRVVFDSAQR

SEQ ID NO: 30168 - protein, 47 aa, Artificial Sequence
  Synthetic polypeptide
APISSWRGDCVCLPHRIIRTSLGSTAAFCLWDAGQLTAREWSLTRLS

SEQ ID NO: 30169 - protein, 386 aa, Artificial Sequence
  Synthetic polypeptide
DHKNFSGIYCSLLPLGCWSADSQRVVFDSAQRSRQDLFAVDTQVGTVTSLTAGGSGGSWKLLTIDQDLMVAQFSTPSLPPTLKVGFLPSAGKEQSVLWVSLEEAEPIPDIHWGIRVLQPPPEQENVQYAGLDFEAILLQPGSPPDKTQVPMVVMPHGGPHSSFVTAWMLFPAMLCKMGFAVLLVNYRGSTGFGQDSILSLPGNVGHQDVKDVQFAVEQVLQEEHFDASHVALMGGSHGGFISCHLIGQYPETYRACVARNPVINIASMLGSTDIPDCSVSCRCVVEAGFPFSSDCLPDLSVWAEMLDKSPIRYIPQVKTPLLLMLGQEDRRVPFKQGMEYYRALKTRNVPVRLLLYPKSTHALSEVEVESDSFMNAVLWLRTHLGS

SEQ ID NO: 30170 - protein, 21 aa, Artificial Sequence
  Synthetic polypeptide
GQEIETILANTAGRVIHSQGG

SEQ ID NO: 30171 - protein, 209 aa, Artificial Sequence
  Synthetic polypeptide
SQHFGRLRKADHEVRRSRPSWLTRLDESFTVKVADFGLARDILDREYYSVQQHRHARLPVKWMALESLQTYRFTTKSDVWSFGVLLWELLTRGAPPYRHIDPFDLTHFLAQGRRLPQPEYCPDSLYQVMQQCWEADPAVRPTFRVLVGEVEQIVSALLGDHYVQLPATYMNLGPSTSHEMNVRPEQPQFSPMPGNVRRPRPLSEPPRPT

SEQ ID NO: 30172 - protein, 37 aa, Artificial Sequence
  Synthetic polypeptide
HGWTSHSQSRWLTLVWPATSWTGSTIVFNSIATLAYL

SEQ ID NO: 30173 - protein, 116 aa, Artificial Sequence
  Synthetic polypeptide
SQHFGRLRKADHEVRRSRPSWLTRLDESFTVKVADFGLARDILDREYYSVQQHRHARLPVKWMALESLQTYRFTTKSDVWSFGVLLWELLTRGAPPYRHIDPFDLTHFLAQGRRLP

SEQ ID NO: 30174 - protein, 58 aa, Artificial Sequence
  Synthetic polypeptide
SQHFGRLRKADHEVRRSRPSWLTRLDESFTVKVADFGLARDILDREYYSVQQHRHARL

SEQ ID NO: 30175 - protein, 36 aa, Artificial Sequence
  Synthetic polypeptide
HGWTSHSQSRWLTLVWPATSWTGSTIVFNSIATLAY

SEQ ID NO: 30176 - protein, 23 aa, Artificial Sequence
  Synthetic polypeptide
SQHFGRLRKADHEAGRVIHSQGG

SEQ ID NO: 30177 - protein, 191 aa, Artificial Sequence
  Synthetic polypeptide
GRRIMRLDESFTVKVADFGLARDILDREYYSVQQHRHARLPVKWMALESLQTYRFTTKSDVWSFGVLLWELLTRGAPPYRHIDPFDLTHFLAQGRRLPQPEYCPDSLYQVMQQCWEADPAVRPTFRVLVGEVEQIVSALLGDHYVQLPATYMNLGPSTSHEMNVRPEQPQFSPMPGNVRRPRPLSEPPRPT

SEQ ID NO: 30178 - protein, 98 aa, Artificial Sequence
  Synthetic polypeptide
GRRIMRLDESFTVKVADFGLARDILDREYYSVQQHRHARLPVKWMALESLQTYRFTTKSDVWSFGVLLWELLTRGAPPYRHIDPFDLTHFLAQGRRLP

SEQ ID NO: 30179 - protein, 40 aa, Artificial Sequence
  Synthetic polypeptide
GRRIMRLDESFTVKVADFGLARDILDREYYSVQQHRHARL

SEQ ID NO: 30180 - protein, 28 aa, Artificial Sequence
  Synthetic polypeptide
PRWNSNDPGQRSYPGVCIKPGFLVLQTM

SEQ ID NO: 30181 - protein, 606 aa, Artificial Sequence
  Synthetic polypeptide
PDGTLMIQDKEVTLEYVSSLDFWYCKRCKANIGGHRSSCSFCKNPREVTEAKQELITYPQPQKTSIPAPLEKQPNQPLRPADKEPEPRKREEGQESRLGHQKREAERYLPPSRREGPTFRRDRERESWSGETRQDGESKTIMLKRIYRSTPPEVIVEVLEPYVRLTTANVRIIKNRTGPMGHTYGFIDLDSHAEALRVVKILQNLDPPFSIDGKMVAVNLATGKRRNDSGDHSDHMHYYQGKKYFRDRRGGGRNSDWSSDTNRQGQQSSSDCYIYDSATGYYYDPLAGTYYDPNTQQEVYVPQDPGLPEEEEIKEKKPTSQGKSSSKKEMSKRDGKEKKDRGVTRFQENASEGKAPAEDVFKKPLPPTVKKEESPPPPKVVNPLIGLLGEYGGDSDYEEEEEEEQTPPPQPRTAQPQKREEQTKKENEEDKLTDWNKLACLLCRRQFPNKEVLIKHQQLSDLHKQNLEIHRKIKQSEQELAYLERREREGKFKGRGNDRREKLQSFDSPERKRIKYSRETDSDRKLVDKEDIDTSSKGGCVQQATGWRKGTGLGYGHPGLASSEEAEGRMRGPSVGASGRTSKRQSNETYRDAVRRVMFARYKELD

SEQ ID NO: 30182 - protein, 4 aa, Artificial Sequence
  Synthetic polypeptide
QMEL

SEQ ID NO: 30183 - protein, 312 aa, Artificial Sequence
  Synthetic polypeptide
PDGTLMIQDKEVTLEYVSSLDFWYCKRCKANIGGHRSSCSFCKNPREVTEAKQELITYPQPQKTSIPAPLEKQPNQPLRPADKEPEPRKREEGQESRLGHQKREAERYLPPSRREGPTFRRDRERESWSGETRQDGESKTIMLKRIYRSTPPEVIVEVLEPYVRLTTANVRIIKNRTGPMGHTYGFIDLDSHAEALRVVKILQNLDPPFSIDGKMVAVNLATGKRRNDSGDHSDHMHYYQGKKYFRDRRGGGRNSDWSSDTNRQGQQSSSDCYIYDSATGYYYDPLAGTYYDPNTQVSLGLFFFFFFFYLCQ

SEQ ID NO: 30184 - protein, 28 aa, Artificial Sequence
  Synthetic polypeptide
PDGTLMIQDKEVTLEYVSSLDFWYCKRC

SEQ ID NO: 30185 - protein, 19 aa, Artificial Sequence
  Synthetic polypeptide
KYYARHRRPYIAQFHVPRV

SEQ ID NO: 30186 - protein, 601 aa, Artificial Sequence
  Synthetic polypeptide
MNLENTMPDTEDHTLHNSMSLGCKANIGGHRSSCSFCKNPREVTEAKQELITYPQPQKTSIPAPLEKQPNQPLRPADKEPEPRKREEGQESRLGHQKREAERYLPPSRREGPTFRRDRERESWSGETRQDGESKTIMLKRIYRSTPPEVIVEVLEPYVRLTTANVRIIKNRTGPMGHTYGFIDLDSHAEALRVVKILQNLDPPFSIDGKMVAVNLATGKRRNDSGDHSDHMHYYQGKKYFRDRRGGGRNSDWSSDTNRQGQQSSSDCYIYDSATGYYYDPLAGTYYDPNTQQEVYVPQDPGLPEEEEIKEKKPTSQGKSSSKKEMSKRDGKEKKDRGVTRFQENASEGKAPAEDVFKKPLPPTVKKEESPPPPKVVNPLIGLLGEYGGDSDYEEEEEEEQTPPPQPRTAQPQKREEQTKKENEEDKLTDWNKLACLLCRRQFPNKEVLIKHQQLSDLHKQNLEIHRKIKQSEQELAYLERREREGKFKGRGNDRREKLQSFDSPERKRIKYSRETDSDRKLVDKEDIDTSSKGGCVQQATGWRKGTGLGYGHPGLASSEEAEGRMRGPSVGASGRTSKRQSNETYRDAVRRVMFARYKELD

SEQ ID NO: 30187 - protein, 43 aa, Artificial Sequence
  Synthetic polypeptide
MNLENTMPDTEDHTLHNSMSLGCKANIGGHRSSCSFCKNPREV

SEQ ID NO: 30188 - protein, 307 aa, Artificial Sequence
  Synthetic polypeptide
MNLENTMPDTEDHTLHNSMSLGCKANIGGHRSSCSFCKNPREVTEAKQELITYPQPQKTSIPAPLEKQPNQPLRPADKEPEPRKREEGQESRLGHQKREAERYLPPSRREGPTFRRDRERESWSGETRQDGESKTIMLKRIYRSTPPEVIVEVLEPYVRLTTANVRIIKNRTGPMGHTYGFIDLDSHAEALRVVKILQNLDPPFSIDGKMVAVNLATGKRRNDSGDHSDHMHYYQGKKYFRDRRGGGRNSDWSSDTNRQGQQSSSDCYIYDSATGYYYDPLAGTYYDPNTQVSLGLFFFFFFFYLCQ

SEQ ID NO: 30189 - protein, 23 aa, Artificial Sequence
  Synthetic polypeptide
MNLENTMPDTEDHTLHNSMSLGC

SEQ ID NO: 30190 - protein, 199 aa, Artificial Sequence
  Synthetic polypeptide
MNLENTMPDTEDHTLHNSMSLGCKANIGGHRSSCSFCKNPREVTEAKQELITYPQPQKTSIPAPLEKQPNQPLRPADKEPEPRKREEGQESRLGHQKREAERYLPPSRREGPTFRRDRERESWSGETRQDGESKTIMLKRIYRSTPPEVIVEVLEPYVRLTTANVRIIKNRTGPMGHTYGFIDLDSHACVWFYRKLFVW

SEQ ID NO: 30191 - protein, 156 aa, Artificial Sequence
  Synthetic polypeptide
MNLENTMPDTEDHTLHNSMSLGCKANIGGHRSSCSFCKNPREVTEAKQELITYPQPQKTSIPAPLEKQPNQPLRPADKEPEPRKREEGQESRLGHQKREAERYLPPSRREGPTFRRDRERESWSGETRQDGESKTIMLKRIYRSTPPEVIVEVLEP

SEQ ID NO: 30192 - protein, 430 aa, Artificial Sequence
  Synthetic polypeptide
GRAWWLTPVIPALWEAEEALRVVKILQNLDPPFSIDGKMVAVNLATGKRRNDSGDHSDHMHYYQGKKYFRDRRGGGRNSDWSSDTNRQGQQSSSDCYIYDSATGYYYDPLAGTYYDPNTQQEVYVPQDPGLPEEEEIKEKKPTSQGKSSSKKEMSKRDGKEKKDRGVTRFQENASEGKAPAEDVFKKPLPPTVKKEESPPPPKVVNPLIGLLGEYGGDSDYEEEEEEEQTPPPQPRTAQPQKREEQTKKENEEDKLTDWNKLACLLCRRQFPNKEVLIKHQQLSDLHKQNLEIHRKIKQSEQELAYLERREREGKFKGRGNDRREKLQSFDSPERKRIKYSRETDSDRKLVDKEDIDTSSKGGCVQQATGWRKGTGLGYGHPGLASSEEAEGRMRGPSVGASGRTSKRQSNETYRDAVRRVMFARYKELD

SEQ ID NO: 30193 - protein, 13 aa, Artificial Sequence
  Synthetic polypeptide
SQHFGRPRKLFVW

SEQ ID NO: 30194 - protein, 28 aa, Artificial Sequence
  Synthetic polypeptide
PGLVAYACNPSTLGGRGSSSCGEDLTEP

SEQ ID NO: 30195 - protein, 136 aa, Artificial Sequence
  Synthetic polypeptide
GRAWWLTPVIPALWEAEEALRVVKILQNLDPPFSIDGKMVAVNLATGKRRNDSGDHSDHMHYYQGKKYFRDRRGGGRNSDWSSDTNRQGQQSSSDCYIYDSATGYYYDPLAGTYYDPNTQVSLGLFFFFFFFYLCQ

SEQ ID NO: 30196 - protein, 23 aa, Artificial Sequence
  Synthetic polypeptide
GRAWWLTPVIPALWEAEEALRVV

SEQ ID NO: 30197 - protein, 22 aa, Artificial Sequence
  Synthetic polypeptide
PGLVAYACNPSTLGGRGSSSCG

SEQ ID NO: 30198 - protein, 761 aa, Artificial Sequence
  Synthetic polypeptide
SATQEAERERERRNSDRSEDGYHSDGDYGEHDYRHDISDERESKTIMLRGLPITITESDIREMMESFEGPQPADVRLMKRKTGVSRGFAFVEFYHLQDATSWMEANQKKLVIQGKHIAMHYSNPRPKFEDWLCNKCCLNNFRKRLKCFRCGADKFDSEQEVPPGTTESVQSVDYYCDTIILRNIAPHTVVDSIMTALSPYASLAVNNIRLIKDKQTQQNRGFAFVQLSSAMDASQLLQILQSLHPPLKIDGKTIGVDFAKSARKDLVLSDGNRVSAFSVASTAIAAAQWSSTQSQSGEGGSVDYSYLQPGQDGYAQYAQYSQDYQQFYQQQAGGLESDASSASGTAVTTTSAAVVSQSPQLYNQTSNPPGSPTEEAQPSTSTSTQAPAASPTGVVPGTKYAVPDTSTYQYDESSGYYYDPTTGLYYDPNSQYYYNSLTQQYLYWDGEKETYVPAAESSSHQQSGLPPAKEGKEKKEKPKSKTAQQIAKDMERWAKSLNKQKENFKNSFQPVNSLREEERRESAAADAGFALFEKKGALAERQQLIPELVRNGDEENPLKRGLVAAYSGDSDNEEELVERLESEEEKLADWKKMACLLCRRQFPNKDALVRHQQLSDLHKQNMDIYRRSRLSEQELEALELREREMKYRDRAAERREKYGIPEPPEPKRKKQFDAGTVNYEQPTKDGIDHSNIGNKMLQAMGWREGSGLGRKCQGITAPIEAQVRLKGAGLGAKGSAYGLSGADSYKDAVRKAMFARFTEME

SEQ ID NO: 30199 - protein, 62 aa, Artificial Sequence
  Synthetic polypeptide
QLLRRLRESVKEGTVTDPKMATIQMVTMVSTTIGMTSVTRGRARPSCCAAFPSPSQRAIFEK

SEQ ID NO: 30200 - protein, 89 aa, Artificial Sequence
  Synthetic polypeptide
SATQEAERERERRNSDRSEDGYHSDGDYGEHDYRHDISDERESKTIMLRGLPITITESDIREMMESFEGPQPADVRLMKRKTGESLLSS

SEQ ID NO: 30201 - protein, 84 aa, Artificial Sequence
  Synthetic polypeptide
SATQEAERERERRNSDRSEDGYHSDGDYDSRNDGVLRRPSACGCEADEEENRCKPWFRLRGVLSLARCYQLDGSQSEKVGDSRK

SEQ ID NO: 30202 - protein, 84 aa, Artificial Sequence
  Synthetic polypeptide
QLLRRLRESVKEGTVTDPKMATIQMVTMIREMMESFEGPQPADVRLMKRKTGVSRGFAFVEFYHLQDATSWMEANQKKLVIQGK

SEQ ID NO: 30203 - protein, 83 aa, Artificial Sequence
  Synthetic polypeptide
SATQEAERERERRNSDRSEDGYHSDGDYGEHDYRHDISDERESKTIMLRGLPITITESDIREMMESFEGPQPADVRLMKRKTG

SEQ ID NO: 30204 - protein, 51 aa, Artificial Sequence
  Synthetic polypeptide
SATQEAERERERRNSDRSEDGYHSDGDYGEHDYRHDISDERESKTIMLRGL

SEQ ID NO: 30205 - protein, 50 aa, Artificial Sequence
  Synthetic polypeptide
QLLRRLRESVKEGTVTDPKMATIQMVTMVSTTIGMTSVTRGRARPSCCAA

SEQ ID NO: 30206 - protein, 66 aa, Artificial Sequence
  Synthetic polypeptide
SATQEAERERERRNSDRSEDGYHSDGDYGEHDYRHDISDERESKTIMLRGLPITITESDIREMMES

SEQ ID NO: 30207 - protein, 63 aa, Artificial Sequence
  Synthetic polypeptide
SATQEAERERERRNSDRSEDGYHSDGDYGEHDYRHDISDERESKTIMLRGLPITITESDIREM

SEQ ID NO: 30208 - protein, 419 aa, Artificial Sequence
  Synthetic polypeptide
PGTAVTTTSAAVVSQSPQLYNQTSNPPGSPTEEAQPSTSTSTQAPAASPTGVVPGTKYAVPDTSTYQYDESSGYYYDPTTGLYYDPNSQYYYNSLTQQYLYWDGEKETYVPAAESSSHQQSGLPPAKEGKEKKEKPKSKTAQQIAKDMERWAKSLNKQKENFKNSFQPVNSLREEERRESAAADAGFALFEKKGALAERQQLIPELVRNGDEENPLKRGLVAAYSGDSDNEEELVERLESEEEKLADWKKMACLLCRRQFPNKDALVRHQQLSDLHKQNMDIYRRSRLSEQELEALELREREMKYRDRAAERREKYGIPEPPEPKRKKQFDAGTVNYEQPTKDGIDHSNIGNKMLQAMGWREGSGLGRKCQGITAPIEAQVRLKGAGLGAKGSAYGLSGADSYKDAVRKAMFARFTEME

SEQ ID NO: 30209 - protein, 15 aa, Artificial Sequence
  Synthetic polypeptide
NPISAKTTEISQAQQ

SEQ ID NO: 30210 - protein, 64 aa, Artificial Sequence
  Synthetic polypeptide
PGTVAHACNPSTLGGQGRWITRSGVQDQPGQHGETPSQLKLQKLARHSSDHHLSGCSVPESSAV

SEQ ID NO: 30211 - protein, 249 aa, Artificial Sequence
  Synthetic polypeptide
GWAQWLMPVIPALWEAETGGSRELKATGTAHFFNFLLNTTDYRILLKDEDHDRMYVGSKDYVLSLDLHDINREPLIIHWAASPQRIEECVLSGKDVNGECGNFVRLIQPWNRTHLYVCGTGAYNPMCTYVNRGRRAQDYIFYLEPERLESGKGKCPYDPKLDTASALINEELYAGVYIDFMGTDAAIFRTLGKQTAMRTDQYNSRWLNDPSFIHAELIPDSAERNDDKLYFFFRERSAEAPQSPAVYAR

SEQ ID NO: 30212 - protein, 14 aa, Artificial Sequence
  Synthetic polypeptide
SQHFGRLRQVDHES

SEQ ID NO: 30213 - protein, 128 aa, Artificial Sequence
  Synthetic polypeptide
DRWITRAEGHRHRPLLQLPAQHNRLPNLAQGRGPRPHVRGQQGLRAVPGPARHQPRAPHYTLGSLPTAHRGMRALRQGCQRRVWELRQAHPALEPNTPVCVRDRCLQPHVHLCEPRTPRPGLHLLPGA

SEQ ID NO: 30214 - protein, 364 aa, Artificial Sequence
  Synthetic polypeptide
GWAQWLMPVIPALWEAETGGSRELKATGTAHFFNFLLNTTDYRILLKDEDHDRMYVGSKDYVLSLDLHDINREPLIIHWAASPQRIEECVLSGKDVNGECGNFVRLIQPWNRTHLYVCGTGAYNPMCTYVNRGRRAQDYIFYLEPERLESGKGKCPYDPKLDTASALINEELYAGVYIDFMGTDAAIFRTLGKQTAMRTDQYNSRWLNDPSFIHAELIPDSAERNDDKLYFFFRERSAEAPQSPAVYARIGRICLNDDGGHCCLVNKWSTFLKARLVCSVPGEDGIETHFDELQDVFVQQTQDVRNPVIYAVFTSSGSVFRGSAVCVYSMADIRMVFNGPFAHKEGPNYQWMPFSGKMPYPRPG

SEQ ID NO: 30215 - protein, 770 aa, Artificial Sequence
  Synthetic polypeptide
GWAQWLMPVIPALWEAETGGSRELKATGTAHFFNFLLNTTDYRILLKDEDHDRMYVGSKDYVLSLDLHDINREPLIIHWAASPQRIEECVLSGKDVNGECGNFVRLIQPWNRTHLYVCGTGAYNPMCTYVNRGRRAQATPWTQTQAVRGRGSRATDGALRPMPTAPRQDYIFYLEPERLESGKGKCPYDPKLDTASALINEELYAGVYIDFMGTDAAIFRTLGKQTAMRTDQYNSRWLNDPSFIHAELIPDSAERNDDKLYFFFRERSAEAPQSPAVYARIGRICLNDDGGHCCLVNKWSTFLKARLVCSVPGEDGIETHFDELQDVFVQQTQDVRNPVIYAVFTSSGSVFRGSAVCVYSMADIRMVFNGPFAHKEGPNYQWMPFSGKMPYPRPGTCPGGTFTPSMKSTKDYPDEVINFMRSHPLMYQAVYPLQRRPLVVRTGAPYRLTTIAVDQVDAADGRYEVLFLGTDRGTVQKVIVLPKDDQELEELMLEEVEVFKDPAPVKTMTISSKRQQLYVASAVGVTHLSLHRCQAYGAACADCCLARDPYCAWDGQACSRYTASSKRRSRRQDVRHGNPIRQCRGFNSNANKNAVESVQYGVAGSAAFLECQPRSPQATVKWLFQRDPGDRRREIRAEDRFLRTEQGLLLRALQLSDRGLYSCTATENNFKHVVTRVQLHVLGRDAVHAALFPPLSMSAPPPPGAGPPTPPYQELAQLLAQPEVGLIHQYCQGYWRHVPPSPREAPGAPRSPEPQDQKKPRNRRHHPPDT

SEQ ID NO: 30216 - protein, 159 aa, Artificial Sequence
  Synthetic polypeptide
DRWITRAEGHRHRPLLQLPAQHNRLPNLAQGRGPRPHVRGQQGLRAVPGPARHQPRAPHYTLGSLPTAHRGMRALRQGCQRRVWELRQAHPALEPNTPVCVRDRCLQPHVHLCEPRTPRPGHTMDPDSGGQRPRQQSHGWCPPPDAHSPTPGLHLLPGA

SEQ ID NO: 30217 - protein, 77 aa, Artificial Sequence
  Synthetic polypeptide
GWAQWLMPVIPALWEAETGGSRELKATGTAHFFNFLLNTTDYRILLKDEDHDRMYVGSKDYVLSLDLHDINREPLIV

SEQ ID NO: 30218 - protein, 60 aa, Artificial Sequence
  Synthetic polypeptide
DRWITRAEGHRHRPLLQLPAQHNRLPNLAQGRGPRPHVRGQQGLRAVPGPARHQPRAPHC

SEQ ID NO: 30219 - protein, 739 aa, Artificial Sequence
  Synthetic polypeptide
GWAQWLMPVIPALWEAETGGSRELKATGTAHFFNFLLNTTDYRILLKDEDHDRMYVGSKDYVLSLDLHDINREPLIIHWAASPQRIEECVLSGKDVNGECGNFVRLIQPWNRTHLYVCGTGAYNPMCTYVNRGRRAQDYIFYLEPERLESGKGKCPYDPKLDTASALINEELYAGVYIDFMGTDAAIFRTLGKQTAMRTDQYNSRWLNDPSFIHAELIPDSAERNDDKLYFFFRERSAEAPQSPAVYARIGRICLNDDGGHCCLVNKWSTFLKARLVCSVPGEDGIETHFDELQDVFVQQTQDVRNPVIYAVFTSSGSVFRGSAVCVYSMADIRMVFNGPFAHKEGPNYQWMPFSGKMPYPRPGTCPGGTFTPSMKSTKDYPDEVINFMRSHPLMYQAVYPLQRRPLVVRTGAPYRLTTIAVDQVDAADGRYEVLFLGTDRGTVQKVIVLPKDDQELEELMLEEVEVFKDPAPVKTMTISSKRQQLYVASAVGVTHLSLHRCQAYGAACADCCLARDPYCAWDGQACSRYTASSKRRSRRQDVRHGNPIRQCRGFNSNANKNAVESVQYGVAGSAAFLECQPRSPQATVKWLFQRDPGDRRREIRAEDRFLRTEQGLLLRALQLSDRGLYSCTATENNFKHVVTRVQLHVLGRDAVHAALFPPLSMSAPPPPGAGPPTPPYQELAQLLAQPEVGLIHQYCQGYWRHVPPSPREAPGAPRSPEPQDQKKPRNRRHHPPDT

SEQ ID NO: 30220 - protein, 228 aa, Artificial Sequence
  Synthetic polypeptide
QKLKATGTAHFFNFLLNTTDYRILLKDEDHDRMYVGSKDYVLSLDLHDINREPLIIHWAASPQRIEECVLSGKDVNGECGNFVRLIQPWNRTHLYVCGTGAYNPMCTYVNRGRRAQDYIFYLEPERLESGKGKCPYDPKLDTASALINEELYAGVYIDFMGTDAAIFRTLGKQTAMRTDQYNSRWLNDPSFIHAELIPDSAERNDDKLYFFFRERSAEAPQSPAVYAR

SEQ ID NO: 30221 - protein, 14 aa, Artificial Sequence
  Synthetic polypeptide
AKIAPLHSSLGDRS

SEQ ID NO: 30222 - protein, 157 aa, Artificial Sequence
  Synthetic polypeptide
SQLLRRLGQQNRLNPGGEGCSEPRSRHCTPAWVTEAEGHRHRPLLQLPAQHNRLPNLAQGRGPRPHVRGQQGLRAVPGPARHQPRAPHYTLGSLPTAHRGMRALRQGCQRRVWELRQAHPALEPNTPVCVRDRCLQPHVHLCEPRTPRPGLHLLPGA

SEQ ID NO: 30223 - protein, 343 aa, Artificial Sequence
  Synthetic polypeptide
QKLKATGTAHFFNFLLNTTDYRILLKDEDHDRMYVGSKDYVLSLDLHDINREPLIIHWAASPQRIEECVLSGKDVNGECGNFVRLIQPWNRTHLYVCGTGAYNPMCTYVNRGRRAQDYIFYLEPERLESGKGKCPYDPKLDTASALINEELYAGVYIDFMGTDAAIFRTLGKQTAMRTDQYNSRWLNDPSFIHAELIPDSAERNDDKLYFFFRERSAEAPQSPAVYARIGRICLNDDGGHCCLVNKWSTFLKARLVCSVPGEDGIETHFDELQDVFVQQTQDVRNPVIYAVFTSSGSVFRGSAVCVYSMADIRMVFNGPFAHKEGPNYQWMPFSGKMPYPRPG

SEQ ID NO: 30224 - protein, 749 aa, Artificial Sequence
  Synthetic polypeptide
QKLKATGTAHFFNFLLNTTDYRILLKDEDHDRMYVGSKDYVLSLDLHDINREPLIIHWAASPQRIEECVLSGKDVNGECGNFVRLIQPWNRTHLYVCGTGAYNPMCTYVNRGRRAQATPWTQTQAVRGRGSRATDGALRPMPTAPRQDYIFYLEPERLESGKGKCPYDPKLDTASALINEELYAGVYIDFMGTDAAIFRTLGKQTAMRTDQYNSRWLNDPSFIHAELIPDSAERNDDKLYFFFRERSAEAPQSPAVYARIGRICLNDDGGHCCLVNKWSTFLKARLVCSVPGEDGIETHFDELQDVFVQQTQDVRNPVIYAVFTSSGSVFRGSAVCVYSMADIRMVFNGPFAHKEGPNYQWMPFSGKMPYPRPGTCPGGTFTPSMKSTKDYPDEVINFMRSHPLMYQAVYPLQRRPLVVRTGAPYRLTTIAVDQVDAADGRYEVLFLGTDRGTVQKVIVLPKDDQELEELMLEEVEVFKDPAPVKTMTISSKRQQLYVASAVGVTHLSLHRCQAYGAACADCCLARDPYCAWDGQACSRYTASSKRRSRRQDVRHGNPIRQCRGFNSNANKNAVESVQYGVAGSAAFLECQPRSPQATVKWLFQRDPGDRRREIRAEDRFLRTEQGLLLRALQLSDRGLYSCTATENNFKHVVTRVQLHVLGRDAVHAALFPPLSMSAPPPPGAGPPTPPYQELAQLLAQPEVGLIHQYCQGYWRHVPPSPREAPGAPRSPEPQDQKKPRNRRHHPPDT

SEQ ID NO: 30225 - protein, 188 aa, Artificial Sequence
  Synthetic polypeptide
SQLLRRLGQQNRLNPGGEGCSEPRSRHCTPAWVTEAEGHRHRPLLQLPAQHNRLPNLAQGRGPRPHVRGQQGLRAVPGPARHQPRAPHYTLGSLPTAHRGMRALRQGCQRRVWELRQAHPALEPNTPVCVRDRCLQPHVHLCEPRTPRPGHTMDPDSGGQRPRQQSHGWCPPPDAHSPTPGLHLLPGA

SEQ ID NO: 30226 - protein, 56 aa, Artificial Sequence
  Synthetic polypeptide
QKLKATGTAHFFNFLLNTTDYRILLKDEDHDRMYVGSKDYVLSLDLHDINREPLIV

SEQ ID NO: 30227 - protein, 89 aa, Artificial Sequence
  Synthetic polypeptide
SQLLRRLGQQNRLNPGGEGCSEPRSRHCTPAWVTEAEGHRHRPLLQLPAQHNRLPNLAQGRGPRPHVRGQQGLRAVPGPARHQPRAPHC

SEQ ID NO: 30228 - protein, 718 aa, Artificial Sequence
  Synthetic polypeptide
QKLKATGTAHFFNFLLNTTDYRILLKDEDHDRMYVGSKDYVLSLDLHDINREPLIIHWAASPQRIEECVLSGKDVNGECGNFVRLIQPWNRTHLYVCGTGAYNPMCTYVNRGRRAQDYIFYLEPERLESGKGKCPYDPKLDTASALINEELYAGVYIDFMGTDAAIFRTLGKQTAMRTDQYNSRWLNDPSFIHAELIPDSAERNDDKLYFFFRERSAEAPQSPAVYARIGRICLNDDGGHCCLVNKWSTFLKARLVCSVPGEDGIETHFDELQDVFVQQTQDVRNPVIYAVFTSSGSVFRGSAVCVYSMADIRMVFNGPFAHKEGPNYQWMPFSGKMPYPRPGTCPGGTFTPSMKSTKDYPDEVINFMRSHPLMYQAVYPLQRRPLVVRTGAPYRLTTIAVDQVDAADGRYEVLFLGTDRGTVQKVIVLPKDDQELEELMLEEVEVFKDPAPVKTMTISSKRQQLYVASAVGVTHLSLHRCQAYGAACADCCLARDPYCAWDGQACSRYTASSKRRSRRQDVRHGNPIRQCRGFNSNANKNAVESVQYGVAGSAAFLECQPRSPQATVKWLFQRDPGDRRREIRAEDRFLRTEQGLLLRALQLSDRGLYSCTATENNFKHVVTRVQLHVLGRDAVHAALFPPLSMSAPPPPGAGPPTPPYQELAQLLAQPEVGLIHQYCQGYWRHVPPSPREAPGAPRSPEPQDQKKPRNRRHHPPDT

SEQ ID NO: 30229 - protein, 114 aa, Artificial Sequence
  Synthetic polypeptide
PWDYIFYLEPERLESGKGKCPYDPKLDTASALINEELYAGVYIDFMGTDAAIFRTLGKQTAMRTDQYNSRWLNDPSFIHAELIPDSAERNDDKLYFFFRERSAEAPQSPAVYAR

SEQ ID NO: 30230 - protein, 84 aa, Artificial Sequence
  Synthetic polypeptide
GFSPSPATSEPFDLGITSSTWSLSDSSQGRASVRTIPSWTQHRPSSMRSSMLVCTSILWALMQPSSAHLESRQPCARISTTPGG

SEQ ID NO: 30231 - protein, 22 aa, Artificial Sequence
  Synthetic polypeptide
ASAPALPLPSLLTLGLHLLPGA

SEQ ID NO: 30232 - protein, 229 aa, Artificial Sequence
  Synthetic polypeptide
PWDYIFYLEPERLESGKGKCPYDPKLDTASALINEELYAGVYIDFMGTDAAIFRTLGKQTAMRTDQYNSRWLNDPSFIHAELIPDSAERNDDKLYFFFRERSAEAPQSPAVYARIGRICLNDDGGHCCLVNKWSTFLKARLVCSVPGEDGIETHFDELQDVFVQQTQDVRNPVIYAVFTSSGSVFRGSAVCVYSMADIRMVFNGPFAHKEGPNYQWMPFSGKMPYPRPG

SEQ ID NO: 30233 - protein, 604 aa, Artificial Sequence
  Synthetic polypeptide
PWDYIFYLEPERLESGKGKCPYDPKLDTASALINEELYAGVYIDFMGTDAAIFRTLGKQTAMRTDQYNSRWLNDPSFIHAELIPDSAERNDDKLYFFFRERSAEAPQSPAVYARIGRICLNDDGGHCCLVNKWSTFLKARLVCSVPGEDGIETHFDELQDVFVQQTQDVRNPVIYAVFTSSGSVFRGSAVCVYSMADIRMVFNGPFAHKEGPNYQWMPFSGKMPYPRPGTCPGGTFTPSMKSTKDYPDEVINFMRSHPLMYQAVYPLQRRPLVVRTGAPYRLTTIAVDQVDAADGRYEVLFLGTDRGTVQKVIVLPKDDQELEELMLEEVEVFKDPAPVKTMTISSKRQQLYVASAVGVTHLSLHRCQAYGAACADCCLARDPYCAWDGQACSRYTASSKRRSRRQDVRHGNPIRQCRGFNSNANKNAVESVQYGVAGSAAFLECQPRSPQATVKWLFQRDPGDRRREIRAEDRFLRTEQGLLLRALQLSDRGLYSCTATENNFKHVVTRVQLHVLGRDAVHAALFPPLSMSAPPPPGAGPPTPPYQELAQLLAQPEVGLIHQYCQGYWRHVPPSPREAPGAPRSPEPQDQKKPRNRRHHPPDT

SEQ ID NO: 30234 - protein, 33 aa, Artificial Sequence
  Synthetic polypeptide
PWDYIFYLEPERLESGKGKCPYDPKLDTASALI

SEQ ID NO: 30235 - protein, 46 aa, Artificial Sequence
  Synthetic polypeptide
GFSPSPATSEPFDLGITSSTWSLSDSSQGRASVRTIPSWTQHRPSS

SEQ ID NO: 30236 - protein, 45 aa, Artificial Sequence
  Synthetic polypeptide
GWVRWLVPVIPALWEAEAGGSFESRSLRPVLATCSCMTAPRPGRR

SEQ ID NO: 30237 - protein, 9 aa, Artificial Sequence
  Synthetic polypeptide
DQSWQHAPV

SEQ ID NO: 30238 - protein, 320 aa, Artificial Sequence
  Synthetic polypeptide
VQEFKTSLGNMLLYDSPKARQEVDHHWQASGGPHIVCILDVYENMHHGKRCLLIIMECMEGGELFSRIQERGDQAFTEREAAEIMRDIGTAIQFLHSHNIAHRDVKPENLLYTSKEKDAVLKLTDFGFAKETTQNALQTPCYTPYYVAPEVLGPEKYDKSCDMWSLGVIMYILLCGFPPFYSNTGQAISPGMKRRIRLGQYGFPNPEWSEVSEDAKQLIRLLLKTDPTERLTITQFMNHPWINQSMVVPQTPLHTARVLQEDKDHWDEVKEEMTSALATMRVDYDQVKIKDLKTSNNRLLNKRRKKQAGSSSASQGCNNQ

SEQ ID NO: 30239 - protein, 270 aa, Artificial Sequence
  Synthetic polypeptide
VQEFKTSLGNMLLYDSPKARQEVDHHWQASGGPHIVCILDVYENMHHGKRCLLIIMECMEGGELFSRIQERGDQAFTEREAAEIMRDIGTAIQFLHSHNIAHRDVKPENLLYTSKEKDAVLKLTDFGFAKETTQNALQTPCYTPYYVAPEVLGPEKYDKSCDMWSLGVIMYILLCGFPPFYSNTGQAISPGMKRRIRLGQYGFPNPEWSEVSEDAKQLIRLLLKTDPTERLTITQFMNHPWINQSMVVPQTPLHTARVLQEDKDHWDEVK

SEQ ID NO: 30240 - protein, 57 aa, Artificial Sequence
  Synthetic polypeptide
VQEFKTSLGNMLLYDSPKARQEVDHHWQASGGPHIVCILDVYENMHHGKRCLLIIME

SEQ ID NO: 30241 - protein, 37 aa, Artificial Sequence
  Synthetic polypeptide
GRSRDGRVGTPPVYSSQRQRHRRRVISAFPSEVQQRE

SEQ ID NO: 30242 - protein, 1691 aa, Artificial Sequence
  Synthetic polypeptide
FLHFHLRCNNESEWSQIHENIIRKSSAKYSAPSASHGLIISLQLLRGDMEQIRRENPMIFNRGLAITRKLGFPDVIMPGDIRNDLYLTLEKGDFERGGKSVQKNIEVTMYVLYADGEILKDCISLGSGEPNRSSYHSFVLYHSNSPRWGEIIKLPIPIDRFRGSHLRFEFRHCSTKDKGEKKLFGFAFSTLMRDDGTTLSDDIHELYVYKCDENSTFNNHALYLGLPCCKEDYNGCPNIPSSLIFQRSTKESFFISTQLSSTKLTQNVDLLALLKWKAFPDRIMDVLGRLRHVSGEEIVKFLQDILDTLFVILDDNTEKYGLLVFQSLVFIINLLRDIKYFHFRPVMDTYIQKHFAGALAYKELIRCLKWYMDCSAELIRQDHIQEAMRALEYLFKFIVQSRILYSRATCGMEEEQFRSSIQELFQSIRFVLSLDSRNSETLLFTQAALLNSFPTIFDELLQMFTVQEVAEFVRGTLGSMPSTVHIGQSMDVVKLQSIARTVDSRLFSFSESRRILLPVVLHHIHLHLRQQKELLICSGILGSIFSIVKTSSLEADVMEEVEMMVESLLDVLLQTLLTIMSKSHAQEAVRGQRCPQCTAEITGEYVSCLLSLLRQMCDTHFQHLLDNFQSKDELKEFLLKIFCVFRNLMKMSVFPRDWMVMRLLTSNIIVTTVQYLSSALHKNFTETDFDFKVWNSYFSLAVLFINQPSLQLEIITSAKRKKILDKYGDMRVMMAYELFSMWQNLGEHKIHFIPGMIGPFLGVTLVPQPEVRNIMIPIFHDMMDWEQRKNGNFKQVEAELIDKLDSMVSEGKGDESYRELFSLLTQLFGPYPSLLEKVEQETWRETGISFVTSVTRLMERLLDYRDCMKGEETENKKIGCTVNLMNFYKSEINKEEMYIRYIHKLCDMHLQAENYTEAAFTLLLYCELLQWEDRPLREFLHYPSQTEWQRKEGLCRKIIHYFNKGKSWEFGIPLCRELACQYESLYDYQSLSWIRKMEASYYDNIMEQQRLEPEFFRVGFYGRKFPFFLRNKEYVCRGHDYERLEAFQQRMLSEFPQAVAMQHPNHPDDAILQCDAQYLQIYAVTPIPDYVDVLQMDRVPDRVKSFYRVNNVRKFRYDRPFHKGPKDKENEFKSLWIERTTLTLTHSLPGISRWFEVERRELVEVSPLENAIQVVENKNQELRSLISQYQHKQVHGNINLLSMCLNGVIDAAVNGGIARYQEAFFDKDYINKHPGDAEKITQLKELMQEQVHVLGVGLAVHEKFVHPEMRPLHKKLIDQFQMMRASLYHEFPGLDKLSPACSGTSTPRGNVLASHSPMSPESIKMTHRHSPMNLMGTGRHSSSSLSSHASSEAGNMVMLGDGSMGDAPEDLYHHMQLAYPNPRYQGSVTNVSVLSSSQASPSSSSLSSTHSAPSQMITSAPSSARGSPSLPDKYRHAREMMLLLPTYRDRPSSAMYPAAILENGQPPNFQRALFQQVVGACKPCSDPNLSVAEKGHYSLHFDAFHHPLGDTPPALPARTLRKSPLHPIPASPTSPQSGLDGSNSTLSGSASSGVSSLSESNFGHSSEAPPRTDTMDSMPSQAWNADEDLEPPYLPVHYSLSESAVLDSIKAQPCRSHSAPGCVIPQDPMDPPALPPKPYHPRLPALEHDEGVLLREETERPRGLHRKAPLPPGSAKEEQARMAWEHGRGEQ

SEQ ID NO: 30243 - protein, 20 aa, Artificial Sequence
  Synthetic polypeptide
GTGFISLGSARQWAQVQQRE

SEQ ID NO: 30244 - protein, 1692 aa, Artificial Sequence
  Synthetic polypeptide
GVPDNGRRCNNESEWSQIHENIIRKSSAKYSAPSASHGLIISLQLLRGDMEQIRRENPMIFNRGLAITRKLGFPDVIMPGDIRNDLYLTLEKGDFERGGKSVQKNIEVTMYVLYADGEILKDCISLGSGEPNRSSYHSFVLYHSNSPRWGEIIKLPIPIDRFRGSHLRFEFRHCSTKDKGEKKLFGFAFSTLMRDDGTTLSDDIHELYVYKCDENSTFNNHALYLGLPCCKEDYNGCPNIPSSLIFQRSTKESFFISTQLSSTKLTQNVDLLALLKWKAFPDRIMDVLGRLRHVSGEEIVKFLQDILDTLFVILDDNTEKYGLLVFQSLVFIINLLRDIKYFHFRPVMDTYIQKHFAGALAYKELIRCLKWYMDCSAELIRQDHIQEAMRALEYLFKFIVQSRILYSRATCGMEEEQFRSSIQELFQSIRFVLSLDSRNSETLLFTQAALLNSFPTIFDELLQMFTVQEVAEFVRGTLGSMPSTVHIGQSMDVVKLQSIARTVDSRLFSFSESRRILLPVVLHHIHLHLRQQKELLICSGILGSIFSIVKTSSLEADVMEEVEMMVESLLDVLLQTLLTIMSKSHAQEAVRGQRCPQCTAEITGEYVSCLLSLLRQMCDTHFQHLLDNFQSKDELKEFLLKIFCVFRNLMKMSVFPRDWMVMRLLTSNIIVTTVQYLSSALHKNFTETDFDFKVWNSYFSLAVLFINQPSLQLEIITSAKRKKILDKYGDMRVMMAYELFSMWQNLGEHKIHFIPGMIGPFLGVTLVPQPEVRNIMIPIFHDMMDWEQRKNGNFKQVEAELIDKLDSMVSEGKGDESYRELFSLLTQLFGPYPSLLEKVEQETWRETGISFVTSVTRLMERLLDYRDCMKGEETENKKIGCTVNLMNFYKSEINKEEMYIRYIHKLCDMHLQAENYTEAAFTLLLYCELLQWEDRPLREFLHYPSQTEWQRKEGLCRKIIHYFNKGKSWEFGIPLCRELACQYESLYDYQSLSWIRKMEASYYDNIMEQQRLEPEFFRVGFYGRKFPFFLRNKEYVCRGHDYERLEAFQQRMLSEFPQAVAMQHPNHPDDAILQCDAQYLQIYAVTPIPDYVDVLQMDRVPDRVKSFYRVNNVRKFRYDRPFHKGPKDKENEFKSLWIERTTLTLTHSLPGISRWFEVERRELVEVSPLENAIQVVENKNQELRSLISQYQHKQVHGNINLLSMCLNGVIDAAVNGGIARYQEAFFDKDYINKHPGDAEKITQLKELMQEQVHVLGVGLAVHEKFVHPEMRPLHKKLIDQFQMMRASLYHEFPGLDKLSPACSGTSTPRGNVLASHSPMSPESIKMTHRHSPMNLMGTGRHSSSSLSSHASSEAGNMVMLGDGSMGDAPEDLYHHMQLAYPNPRYQGSVTNVSVLSSSQASPSSSSLSSTHSAPSQMITSAPSSARGSPSLPDKYRHAREMMLLLPTYRDRPSSAMYPAAILENGQPPNFQRALFQQVVGACKPCSDPNLSVAEKGHYSLHFDAFHHPLGDTPPALPARTLRKSPLHPIPASPTSPQSGLDGSNSTLSGSASSGVSSLSESNFGHSSEAPPRTDTMDSMPSQAWNADEDLEPPYLPVHYSLSESAVLDSIKAQPCRSHSAPGCVIPQDPMDPPALPPKPYHPRLPALEHDEGVLLREETERPRGLHRKAPLPPGSAKEEQARMAWEHGRGEQ

SEQ ID NO: 30245 - protein, 72 aa, Artificial Sequence
  Synthetic polypeptide
FLHFHLRYRVHLTRECQTMGAGATTRVSGPRSTRTSSESPVPSTLPPAPAMVLSFLCSFFVETWNRFGEKIP

SEQ ID NO: 30246 - protein, 22 aa, Artificial Sequence
  Synthetic polypeptide
EHNESAAPSVTDTEDRLSLSAR

SEQ ID NO: 30247 - protein, 271 aa, Artificial Sequence
  Synthetic polypeptide
LTQKTGSPSLPDKYRHAREMMLLLPTYRDRPSSAMYPAAILENGQPPNFQRALFQQVVGACKPCSDPNLSVAEKGHYSLHFDAFHHPLGDTPPALPARTLRKSPLHPIPASPTSPQSGLDGSNSTLSGSASSGVSSLSESNFGHSSEAPPRTDTMDSMPSQAWNADEDLEPPYLPVHYSLSESAVLDSIKAQPCRSHSAPGCVIPQDPMDPPALPPKPYHPRLPALEHDEGVLLREETERPRGLHRKAPLPPGSAKEEQARMAWEHGRGEQ

SEQ ID NO: 30248 - protein, 18 aa, Artificial Sequence
  Synthetic polypeptide
HRRQALPLCQISTAMPVK

SEQ ID NO: 30249 - protein, 16 aa, Artificial Sequence
  Synthetic polypeptide
EHNESAAPSVTDTEDR

SEQ ID NO: 30250 - protein, 265 aa, Artificial Sequence
  Synthetic polypeptide
LTQKTDKYRHAREMMLLLPTYRDRPSSAMYPAAILENGQPPNFQRALFQQVVGACKPCSDPNLSVAEKGHYSLHFDAFHHPLGDTPPALPARTLRKSPLHPIPASPTSPQSGLDGSNSTLSGSASSGVSSLSESNFGHSSEAPPRTDTMDSMPSQAWNADEDLEPPYLPVHYSLSESAVLDSIKAQPCRSHSAPGCVIPQDPMDPPALPPKPYHPRLPALEHDEGVLLREETERPRGLHRKAPLPPGSAKEEQARMAWEHGRGEQ

SEQ ID NO: 30251 - protein, 12 aa, Artificial Sequence
  Synthetic polypeptide
HRRQISTAMPVK

SEQ ID NO: 30252 - protein, 13 aa, Artificial Sequence
  Synthetic polypeptide
FLHFQLRLSLSAR

SEQ ID NO: 30253 - protein, 26 aa, Artificial Sequence
  Synthetic polypeptide
HRRQVISAFPTEALPLCQISTAMPVK

SEQ ID NO: 30254 - protein, 7 aa, Artificial Sequence
  Synthetic polypeptide
FLHFQLR

SEQ ID NO: 30255 - protein, 20 aa, Artificial Sequence
  Synthetic polypeptide
HRRQVISAFPTEISTAMPVK

SEQ ID NO: 30256 - protein, 24 aa, Artificial Sequence
  Synthetic polypeptide
GRVRRLKSVIPSLSEAEGDAAEAT

SEQ ID NO: 30257 - protein, 249 aa, Artificial Sequence
  Synthetic polypeptide
SHHFRRLREMLLKPHSRVQVFEGAEDNLPDRDALRAALAIQQLAEGLTADDLLLVLISGGGSALLPAPIPPVTLEEKQTLTRLLAARGATIQELNTIRKALSQLKGGGLAQAAYPAQVVSLILSDVVGDPVEVIASGPTVASSHNVQDCLHILNRYGLRAALPRSVKTVLSRADSDPHGPHTCGHVLNVIIGSNVLALAEAQRQAEALGYQAVVLSAAMQGWGTPAAHRDDRYQCHGHPPLVPAASVMA

SEQ ID NO: 30258 - protein, 87 aa, Artificial Sequence
  Synthetic polypeptide
SHHFRRLREMLLKPHSRVQVFEGAEDNLPDRDALRAALAIQQLAEGLTADDLLLVLISGWGTPAAHRDDRYQCHGHPPLVPAASVMA

SEQ ID NO: 30259 - protein, 94 aa, Artificial Sequence
  Synthetic polypeptide
SHHFRRLREMLLKPHSRVQVFEGAEDNLPDRDALRAALAIQQLAEGLTADDLLLVLISEVGVQLCCLPPSHLSHWRRSRHSLDCWQPVEPPSRS

SEQ ID NO: 30260 - protein, 116 aa, Artificial Sequence
  Synthetic polypeptide
SHHFRRLREMLLKPHSRVQVFEGAEDNLPDRDALRAALAIQQLAEGLTADDLLLVLISGGEPHPVRCGGGPCGGDCQWPHRGQFPQCARLPAYPQSLRPPCSPATFCEDCAVSGRL

SEQ ID NO: 30261 - protein, 405 aa, Artificial Sequence
  Synthetic polypeptide
SHHFRRLREMLLKPHSRVQVFEGAEDNLPDRDALRAALAIQQLAEGLTADDLLLVLISGGGSALLPAPIPPVTLEEKQTLTRLLAARGATIQELNTIRKALSQLKGGGLAQAAYPAQVVSLILSDVVGDPVEVIASGPTVASSHNVQDCLHILNRYGLRAALPRSVKTVLSRADSDPHGPHTCGHVLNVIIGSNVLALAEAQRQAEALGYQAVVLSAAMQGDVKSMAQFYGLLAHVARTRLTPSMAGASVEEDAQLHELAAELQIPDLQLEEALETMAWGRGPVCLLAGGEPTVQLQGSGRGGRNQELALRVGAELRRWPLGPIDVLFLSGGTDGQDGPTEAAGAWVTPELASQAAAEGLDIATFLAHNDSHTFFCCLQGGAHLLHTGMTGTNVMDTHLLFLRPR

SEQ ID NO: 30262 - protein, 67 aa, Artificial Sequence
  Synthetic polypeptide
ISLSLFLHLYLPFQMDSLEKKATGSVCLGPPTLPTSRSPLWKPPSWCMQPSPPSCCPLQPSPTTPST

SEQ ID NO: 30263 - protein, 77 aa, Artificial Sequence
  Synthetic polypeptide
ACFFICTYHSRWTPWRKKLPGACAWGPPHCPLHGAPCGSHHHGVCNHHLPAAAHSSQVPLHLQPEGPLQGLPRHAHG

SEQ ID NO: 30264 - protein, 1926 aa, Artificial Sequence
  Synthetic polypeptide
GQLGGHQKGWSGQTMTATLGSPLTQLCDLWQLMNLSEPVSSSVPTIPDGLLGEKSYRERVPGAPHIAHFTEPLVEATIMVYATITSQLLPTPAKSHYTFNLRDLSKVFQGMLMADPAKVEDQVQLLRLWYHENCRVFRDRLVNEEDRSWFDQLLKRCMEQWEVTFNKVCPFQPILYGDFMSPGSDVKSYELITSESKMMQVIEEYIEDYNQINTAKLKLVLFMDAMSHICRISRTLRQALGNALLLGVGGSGRSSLTRLASHMAEYECFQIELSKNYGMSEWRDDVKKVLLKAGLQNLPITFLFSDTQIKNESFLEDINNVLNSGDIPNLYTADEQDQIVSTMRPYIQEQGLQPTKANLMAAYTGRVRSNIHMVLCMSPIGEVFRARLRQFPSLVNCCTIDWFNEWPAEALKSVATVFLNEIPELESSQEEIQGLIQVCVYIHQSVSKKCIEYLAELTRHNYVTPKSYLELLHIFSILIGQKKLELKTAKNRMKSGLDKLLRTSEDVAKMQEDLESMHPLLEEAAKDTMLTMEQIKVDTAIAEETRNSVQTEEIKANEKAKKAQAIADDAQKDLDEALPALDAALASLRNLNKNDVTEVRAMQRPPPGVKLVIEAVCIMKGIKPKKVPGEKPGTKVDDYWEPGKGLLQDPGHFLESLFKFDKDNIGDVVIKAIQPYIDNEEFQPATIAKVSKACTSICQWVRAMHKYHFVAKAVEPKRQALLEAQDDLGVTQRILDEAKQRLREVEDGIATMQAKYRECITKKEELELKCEQCEQRLGRAGKLINGLSDEKVRWQETVENLQYMLNNISGDVLVAAGFVAYLGPFTGQYRTVLYDSWVKQLRSHNVPHTSEPTLIGTLGNPVKIRSWQIAGLPNDTLSVENGVINQFSQRWTHFIDPQSQANKWIKNMEKDNGLDVFKLSDRDFLRSMENAIRFGKPCLLENVGEELDPALEPVLLKQTYKQQGNTVLKLGDTVIPYHEDFRMYITTKLPNPHYTPEISTKLTLINFTLSPSGLEDQLLGQVVAEERPDLEEAKNQLIISNAKMRQELKDIEDQILYRLSSSEGNPVDDMELIKVLEASKMKAAEIQAKVRIAEQTEKDIDLTRMEYIPVAIRTQILFFCVSDLANVDPMYQYSLEWFLNIFLSGIANSERADNLKKRISNINRYLTYSLYSNVCRSLFEKHKLMFAFLLCVRIMMNEGKINQSEWRYLLSGGSISIMTENPAPDWLSDRAWRDILALSNLPTFSSFSSDFVKHLSEFRVIFDSLEPHREPLPGIWDQYLDQFQKLLVLRCLRGDKVTNAMQDFVATNLEPRFIEPQTANLSVVFKDSNSTTPLIFVLSPGTDPAADLYKFAEEMKFSKKLSAISLGQGQGPRAEAMMRSSIERGKWVFFQNCHLAPSWMPALERLIEHINPDKVHRDFRLWLTSLPSNKFPVSILQNGSKMTIEPPRGVRANLLKSYSSLGEDFLNSCHKVMEFKSLLLSLCLFHGNALERHKFGPLGFNIPYEFTDGDLRICISQLKMFLDEYDDIPYKVLKYTAGEINYGGRVTDDWDRRCIMNILEDFYNPDVLSPEHSYSASGIYHQIPPTYDLHGYLSYIKSLPLNDMPEIFGLHDNANITFAQNETFALLGTIIQLQPKSSSAGSQGREEIVEDVTQNILLKVPEPINLQWVMAKYPVLYEESMNTVLVQEVIRYNRLLQVITQTLQDLLKALKGLVVMSSQLELMAASLYNNTVPELWSAKAYPSLKPLSSWVMDLLQRLDFLQAWIQDGIPAVFWISGFFFPQAFLTGTLQNFARKFVISIDTISFDFKVMFEAPSELTQRPQVGCYIHGLFLEGARWDPEAFQLAESQPKELYTEMAVIWLLPTPNRKAQDQDFYLCPIYKTLTRAGTLSTTGHSTNYVIAVEIPTHQPQRHWIKRGVALICALDY

SEQ ID NO: 30265 - protein, 70 aa, Artificial Sequence
  Synthetic polypeptide
ISLSLFLHLYLPFQVVRMDSLEKKATGSVCLGPPTLPTSRSPLWKPPSWCMQPSPPSCCPLQPSPTTPST

SEQ ID NO: 30266 - protein, 1929 aa, Artificial Sequence
  Synthetic polypeptide
GQLGGHQKGWSGQTMTATLGSPLTQLCDLWQLMNLSEPVSSSVPTIPGREDGLLGEKSYRERVPGAPHIAHFTEPLVEATIMVYATITSQLLPTPAKSHYTFNLRDLSKVFQGMLMADPAKVEDQVQLLRLWYHENCRVFRDRLVNEEDRSWFDQLLKRCMEQWEVTFNKVCPFQPILYGDFMSPGSDVKSYELITSESKMMQVIEEYIEDYNQINTAKLKLVLFMDAMSHICRISRTLRQALGNALLLGVGGSGRSSLTRLASHMAEYECFQIELSKNYGMSEWRDDVKKVLLKAGLQNLPITFLFSDTQIKNESFLEDINNVLNSGDIPNLYTADEQDQIVSTMRPYIQEQGLQPTKANLMAAYTGRVRSNIHMVLCMSPIGEVFRARLRQFPSLVNCCTIDWFNEWPAEALKSVATVFLNEIPELESSQEEIQGLIQVCVYIHQSVSKKCIEYLAELTRHNYVTPKSYLELLHIFSILIGQKKLELKTAKNRMKSGLDKLLRTSEDVAKMQEDLESMHPLLEEAAKDTMLTMEQIKVDTAIAEETRNSVQTEEIKANEKAKKAQAIADDAQKDLDEALPALDAALASLRNLNKNDVTEVRAMQRPPPGVKLVIEAVCIMKGIKPKKVPGEKPGTKVDDYWEPGKGLLQDPGHFLESLFKFDKDNIGDVVIKAIQPYIDNEEFQPATIAKVSKACTSICQWVRAMHKYHFVAKAVEPKRQALLEAQDDLGVTQRILDEAKQRLREVEDGIATMQAKYRECITKKEELELKCEQCEQRLGRAGKLINGLSDEKVRWQETVENLQYMLNNISGDVLVAAGFVAYLGPFTGQYRTVLYDSWVKQLRSHNVPHTSEPTLIGTLGNPVKIRSWQIAGLPNDTLSVENGVINQFSQRWTHFIDPQSQANKWIKNMEKDNGLDVFKLSDRDFLRSMENAIRFGKPCLLENVGEELDPALEPVLLKQTYKQQGNTVLKLGDTVIPYHEDFRMYITTKLPNPHYTPEISTKLTLINFTLSPSGLEDQLLGQVVAEERPDLEEAKNQLIISNAKMRQELKDIEDQILYRLSSSEGNPVDDMELIKVLEASKMKAAEIQAKVRIAEQTEKDIDLTRMEYIPVAIRTQILFFCVSDLANVDPMYQYSLEWFLNIFLSGIANSERADNLKKRISNINRYLTYSLYSNVCRSLFEKHKLMFAFLLCVRIMMNEGKINQSEWRYLLSGGSISIMTENPAPDWLSDRAWRDILALSNLPTFSSFSSDFVKHLSEFRVIFDSLEPHREPLPGIWDQYLDQFQKLLVLRCLRGDKVTNAMQDFVATNLEPRFIEPQTANLSVVFKDSNSTTPLIFVLSPGTDPAADLYKFAEEMKFSKKLSAISLGQGQGPRAEAMMRSSIERGKWVFFQNCHLAPSWMPALERLIEHINPDKVHRDFRLWLTSLPSNKFPVSILQNGSKMTIEPPRGVRANLLKSYSSLGEDFLNSCHKVMEFKSLLLSLCLFHGNALERHKFGPLGFNIPYEFTDGDLRICISQLKMFLDEYDDIPYKVLKYTAGEINYGGRVTDDWDRRCIMNILEDFYNPDVLSPEHSYSASGIYHQIPPTYDLHGYLSYIKSLPLNDMPEIFGLHDNANITFAQNETFALLGTIIQLQPKSSSAGSQGREEIVEDVTQNILLKVPEPINLQWVMAKYPVLYEESMNTVLVQEVIRYNRLLQVITQTLQDLLKALKGLVVMSSQLELMAASLYNNTVPELWSAKAYPSLKPLSSWVMDLLQRLDFLQAWIQDGIPAVFWISGFFFPQAFLTGTLQNFARKFVISIDTISFDFKVMFEAPSELTQRPQVGCYIHGLFLEGARWDPEAFQLAESQPKELYTEMAVIWLLPTPNRKAQDQDFYLCPIYKTLTRAGTLSTTGHSTNYVIAVEIPTHQPQRHWIKRGVALICALDY

SEQ ID NO: 30267 - protein, 428 aa, Artificial Sequence
  Synthetic polypeptide
SQHFGRLRQVDHLRSGVQDQPGQHGKCAVLSFKDFLSCRPTEIPENDILLCESRYNESDKQMKKFKGLKRFSLSAKVVDDEIYYFRKPIVPQKEPSPLLEKKIQLLEAKFAELEGGDDDIEEMGEEDSEVIEPPSLPQLQTPLASELDLMPYTPPQSTPKSAKGSAKKEGSKRKINMSGYILFSSEMRAVIKAQHPDYSFGELSRLVGTEWRNLETAKKAEYEGMMGGYPPGLPPLQGPVDGLVSMGSMQPLHPGGPPPHHLPPGVPGLPGIPPPGVMNQGVAPMVGTPAPGGSPYGQQVGVLGPPGQQAPPPYPGPHPAGPPVIQQPTTPMFVAPPPKTQRLLHSEAYLKYIEGLSAESNSISKWDQTLAARRRDVHLSKEQESRLPSHWLKSKGAHTTMADALWRLRDLMLRDTLNIRQAYNLENV

SEQ ID NO: 30268 - protein, 48 aa, Artificial Sequence
  Synthetic polypeptide
DQEFKTSLANMESVLCCHSRTSSPAGQLKYQKMTFCFVRAATMRATSR

SEQ ID NO: 30269 - protein, 49 aa, Artificial Sequence
  Synthetic polypeptide
WAQWLTPIIPALWEAEAGGSLEIRSSRPAWPTWKVCCVVIQGLPLLQAN

SEQ ID NO: 30270 - protein, 401 aa, Artificial Sequence
  Synthetic polypeptide
SQHFGRLRQVDHLRSGVQDQPGQHGKCAVLSFKDFLSCRPTEIPENDILLCESRYNESDKQMKKFKGLKRFSLSAKVVDDEIYYFRKPIVPQKEPSPLLEKKIQLLEAKFAELEGGDDDIEEMGEEDSESTPKSAKGSAKKEGSKRKINMSGYILFSSEMRAVIKAQHPDYSFGELSRLVGTEWRNLETAKKAEYEGMMGGYPPGLPPLQGPVDGLVSMGSMQPLHPGGPPPHHLPPGVPGLPGIPPPGVMNQGVAPMVGTPAPGGSPYGQQVGVLGPPGQQAPPPYPGPHPAGPPVIQQPTTPMFVAPPPKTQRLLHSEAYLKYIEGLSAESNSISKWDQTLAARRRDVHLSKEQESRLPSHWLKSKGAHTTMADALWRLRDLMLRDTLNIRQAYNLENV

SEQ ID NO: 30271 - protein, 483 aa, Artificial Sequence
  Synthetic polypeptide
SQHFGRLRQVDHLRSGVQDQPGQHGKCAVLSFKDFLSCRPTEIPENDILLCESRYNESDKQMKKFKGLKRFSLSAKVVDDEIYYFRKPIVPQKEPSPLLEKKIQLLEAKFAELEGGDDDIEEMGEEDSEVIEPPSLPQLQTPLASELDLMPYTPPQSTPKSAKGSAKKEGSKRKINMSGYILFSSEMRAVIKAQHPDYSFGELSRLVGTEWRNLETAKKAEYEERAAKVAEQQERERAAQQQQPSASPRAGTPVGALMGVVPPPTPMGMLNQQLTPVAGMMGGYPPGLPPLQGPVDGLVSMGSMQPLHPGGPPPHHLPPGVPGLPGIPPPGVMNQGVAPMVGTPAPGGSPYGQQVGVLGPPGQQAPPPYPGPHPAGPPVIQQPTTPMFVAPPPKTQRLLHSEAYLKYIEGLSAESNSISKWDQTLAARRRDVHLSKEQESRLPSHWLKSKGAHTTMADALWRLRDLMLRDTLNIRQAYNLENV

SEQ ID NO: 30272 - protein, 376 aa, Artificial Sequence
  Synthetic polypeptide
SQHFGRLRQVDHLRSGVQDQPGQHGKCAVLSFKDFLSCRPTEIPENDILLCESRYNESDKQMKKFKGLKRFSLSAKVVDDEIYYFRKPIVPQKEPSPLLEKKIQLLEAKFAELEGGDDDIEEMGEEDSEVIEPPSLPQLQTPLASELDLMPYTPPQSTPKSAKGSAKKEGSKRKINMSGYILFSSEMRAVIKAQHPDYSFGELSRLVGTEWRNLETAKKAEYEGVMNQGVAPMVGTPAPGGSPYGQQVGVLGPPGQQAPPPYPGPHPAGPPVIQQPTTPMFVAPPPKTQRLLHSEAYLKYIEGLSAESNSISKWDQTLAARRRDVHLSKEQESRLPSHWLKSKGAHTTMADALWRLRDLMLRDTLNIRQAYNLENV

SEQ ID NO: 30273 - protein, 431 aa, Artificial Sequence
  Synthetic polypeptide
SQHFGRLRQVDHLRSGVQDQPGQHGKCAVLSFKDFLSCRPTEIPENDILLCESRYNESDKQMKKFKGLKRFSLSAKVVDDEIYYFRKPIVPQKEPSPLLEKKIQLLEAKFAELEGGDDDIEEMGEEDSEVIEPPSLPQLQTPLASELDLMPYTPPQSTPKSAKGSAKKEGSKRKINMSGYILFSSEMRAVIKAQHPDYSFGELSRLVGTEWRNLETAKKAEYEERAAKVAEQQERERAAQQQQPSASPRAGTPVGALMGVVPPPTPMGMLNQQLTPVAGVMNQGVAPMVGTPAPGGSPYGQQVGVLGPPGQQAPPPYPGPHPAGPPVIQQPTTPMFVAPPPKTQRLLHSEAYLKYIEGLSAESNSISKWDQTLAARRRDVHLSKEQESRLPSHWLKSKGAHTTMADALWRLRDLMLRDTLNIRQAYNLENV

SEQ ID NO: 30274 - protein, 255 aa, Artificial Sequence
  Synthetic polypeptide
SQHFGRLRQVDHLRSGVQDQPGQHGKCAVLSFKDFLSCRPTEIPENDILLCESRYNESDKQMKKFKGLKRFSLSAKVVDDEIYYFRKPIVPQKEPSPLLEKKIQLLEAKFAELEGGDDDIEEMGEEDSEVIEPPSLPQLQTPLASELDLMPYTPPQSTPKSAKGSAKKEGSKRKINMSGYILFSSEMRAVIKAQHPDYSFGELSRLVGTEWRNLETAKKAEYEGMMGGYPPGLPPLQGPVDGLVSMGSMQPLHPG

SEQ ID NO: 30275 - protein, 190 aa, Artificial Sequence
  Synthetic polypeptide
GLMQWLTLIILALWEAKERKQIHCLSEDELSSSTSSTDKSDGDYGEGKGQTNEINALVQLMTQTLKLDSKESCEDVPVANPVSEFKLHRKYRDTLILHGKVAEEAEEIHFKELPSAIMPGSEKIRRLVEVLRTDVIRGLGVQLLEQVYDLLEEEDEFDREVRLREHMGEKYTTYSVKARQLKFFEENMNF

SEQ ID NO: 30276 - protein, 18 aa, Artificial Sequence
  Synthetic polypeptide
HFGRPRKGNRFIVCLRMS

SEQ ID NO: 30277 - protein, 25 aa, Artificial Sequence
  Synthetic polypeptide
PDAVAHAYNTSTLGGQGKETDSLSV

SEQ ID NO: 30278 - protein, 176 aa, Artificial Sequence
  Synthetic polypeptide
GLMQWLTLIILALWEAKERKQIHCLSEDELSSSTSSTDKSDGDYGEGKGQTNEINALVQLMTQTLKLDSKESCEDVPVANPVSEFKLHRKYRDTLILHGKVAEEAEEIHFKELPSAIMPGSEKIRRLVEVLRTDVIRGLGVQLLEQVYDLLEEEDEFDREVSVSLTVSRCLCYRIF

SEQ ID NO: 30279 - protein, 160 aa, Artificial Sequence
  Synthetic polypeptide
GLMQWLTLIILALWEAKERKQIHCLSEDELSSSTSSTDKSDGDYGEGKGQTNEINALVQLMTQTLKLDSKESCEDVPVANPVSEFKLHRKYRDTLILHGKVAEEAEEIHFKELPSAIMPGSEKIRRLVEVLRTDVIRGLGVQLLEQVYDLLEEEDEFDRE

SEQ ID NO: 30280 - protein, 56 aa, Artificial Sequence
  Synthetic polypeptide
FYQRFPFFHLPHFLLPPPCKKCLLPPAMILRPPQPCGTSNASENQSMKDVRGGYGF

SEQ ID NO: 30281 - protein, 16 aa, Artificial Sequence
  Synthetic polypeptide
GLPSHVELQTLQRTKA

SEQ ID NO: 30282 - protein, 337 aa, Artificial Sequence
  Synthetic polypeptide
EVPFASRHDSEASPAMWNFKRFREPKHERRPWRIWFLDTSKQAIGMLFIHFANVYLADLTEEDPCSLYLINFLLDATVGMLLIYVGVRAVSVLVEWQQWESLRFGEYGDPLQCGAWVGQCALYIVIMIFEKSVVFIVLLILQWKKVALLNPIENPDLKLAIVMLIVPFFVNALMFWVVDNFLMRKGKTKAKLEERGANQDSRNGSKVRYRRAASHEESESEILISADDEMEESDVEEDLRRLTPLKPVKKKKHRFGLPAGAQEAPIKKKRPPVKDEDLKGARGNLTKNQEIKSKTYQVMRECEQAGSAAPSVFSRTRTGTETVFEKPKAGPTKSVFG

SEQ ID NO: 30283 - protein, 259 aa, Artificial Sequence
  Synthetic polypeptide
EVPFASRHDSEASPAMWNFKRFREPKHERRPWRIWFLDTSKQAIGMLFIHFANVYLADLTEEDPCSLYLINFLLDATVGMLLIYVGVRAVSVLVEWQQWESLRFGEYGDPLQCGAWVGQCALYIVIMIFEKSVVFIVLLILQWKKVALLNPIENPDLKLAIVMLIVPFFVNALMFWVVDNFLMRKGKTKAKLEERGANQDSRNGSKVRYRRAASHEESESEILISADDEMEESDVEEDLRRLTPLKPVKKKKHRFGLPV

SEQ ID NO: 30284 - protein, 14 aa, Artificial Sequence
  Synthetic polypeptide
MNVVPGACSMASDM

SEQ ID NO: 30285 - protein, 23 aa, Artificial Sequence
  Synthetic polypeptide
MWCQEPAPWRAICDDIFECIELW

SEQ ID NO: 30286 - protein, 292 aa, Artificial Sequence
  Synthetic polypeptide
ECGARSLLHGERYVMTFLNVLNFGDQGVYDIVNNLGSLVARLIFQPIEESFYIFFAKVLERGKDATLQKQEDVAVAAAVLESLLKLALLAGLTITVFGFAYSQLALDIYGGTMLSSGSGPVLLRSYCLYVLLLAINGVTECFTFAAMSKEEVDRYNFVMLALSSSFLVLSYLLTRWCGSVGFILANCFNMGIRITQSLCFIHRYYRRSPHRPLAGLHLSPVLLGTFALSGGVTAVSEVFLCCEQGWPARLAHIAVGAFCLGATLGTAFLTETKLIHFLRTQLGVPRRTDKMT

SEQ ID NO: 30287 - protein, 88 aa, Artificial Sequence
  Synthetic polypeptide
ECGARSLLHGERYVMTFLNVLNFGDQGVYDIVNNLGSLVARLIFQPIEESFYIFFAKVLERGKDATLQKQEDVAVAAAVLESLLKLAL

SEQ ID NO: 30288 - protein, 89 aa, Artificial Sequence
  Synthetic polypeptide
NGGVVSVDHLCLECIYSSLPVKGNRWRSKCKTNAALLNHPLPGQRGLPQSMSQWGHPARLEPDPQPAVANSPPGCVLVLIPGLDLVAAA

SEQ ID NO: 30289 - protein, 541 aa, Artificial Sequence
  Synthetic polypeptide
LRDPGQVTSPAEPEFLTSKMGVLFRLITFVLNAFILRFLSKEIVGVVNVRLTLLYSTTLFLAREAFRRACLSGGTQRDWSQTLNLLWLTVPLGVFWSLFLGWIWLQLLEVPDPNVVPHYATGVVLFGLSAVVELLGEPFWVLAQAHMFVKLKVIAESLSVILKSVLTAFLVLWLPHWGLYIFSLAQLFYTTVLVLCYVIYFTKLLGSPESTKLQTLPVSRITDLLPNITRNGAFINWKEAKLTWSFFKQSFLKQILTEGERYVMTFLNVLNFGDQGVYDIVNNLGSLVARLIFQPIEESFYIFFAKVLERGKDATLQKQEDVAVAAAVLESLLKLALLAGLTITVFGFAYSQLALDIYGGTMLSSGSGPVLLRSYCLYVLLLAINGVTECFTFAAMSKEEVDRYNFVMLALSSSFLVLSYLLTRWCGSVGFILANCFNMGIRITQSLCFIHRYYRRSPHRPLAGLHLSPVLLGTFALSGGVTAVSEVFLCCEQGWPARLAHIAVGAFCLGATLGTAFLTETKLIHFLRTQLGVPRRTDKMT

SEQ ID NO: 30290 - protein, 18 aa, Artificial Sequence
  Synthetic polypeptide
LHLQSLSSSLVKWGCCFG

SEQ ID NO: 30291 - protein, 50 aa, Artificial Sequence
  Synthetic polypeptide
NGGVVSVDHLCLECIYSSLPVKGNRWRSKCKSPPGCVLVLIPGLDLVAAA

SEQ ID NO: 30292 - protein, 502 aa, Artificial Sequence
  Synthetic polypeptide
LRDPGQVTSPAEPEFLTSKMGVLFRLITFVLNAFILRFLSKEIVGVVNVRVPLGVFWSLFLGWIWLQLLEVPDPNVVPHYATGVVLFGLSAVVELLGEPFWVLAQAHMFVKLKVIAESLSVILKSVLTAFLVLWLPHWGLYIFSLAQLFYTTVLVLCYVIYFTKLLGSPESTKLQTLPVSRITDLLPNITRNGAFINWKEAKLTWSFFKQSFLKQILTEGERYVMTFLNVLNFGDQGVYDIVNNLGSLVARLIFQPIEESFYIFFAKVLERGKDATLQKQEDVAVAAAVLESLLKLALLAGLTITVFGFAYSQLALDIYGGTMLSSGSGPVLLRSYCLYVLLLAINGVTECFTFAAMSKEEVDRYNFVMLALSSSFLVLSYLLTRWCGSVGFILANCFNMGIRITQSLCFIHRYYRRSPHRPLAGLHLSPVLLGTFALSGGVTAVSEVFLCCEQGWPARLAHIAVGAFCLGATLGTAFLTETKLIHFLRTQLGVPRRTDKMT

SEQ ID NO: 30293 - protein, 291 aa, Artificial Sequence
  Synthetic polypeptide
LRDPGQVTSPAEPEFLTSKMGVLFRLITFVLNAFILRFLSKEIVGVVNVRLTLLYSTTLFLAREAFRRACLSGGTQRDWSQTLNLLWLTVPLGVFWSLFLGWIWLQLLEVPDPNVVPHYATGVVLFGLSAVVELLGEPFWVLAQAHMFVKLKVIAESLSVILKSVLTAFLVLWLPHWGLYIFSLAQAFINWKEAKLTWSFFKQSFLKQILTEGERYVMTFLNVLNFGDQGVYDIVNNLGSLVARLIFQPIEESFYIFFAKVLERGKDATLQKQEDVAVAAAVLESLLKLAL

SEQ ID NO: 30294 - protein, 188 aa, Artificial Sequence
  Synthetic polypeptide
IKRIKKTSFSTTTLLPPIKVLVVYPSEICFHHTICYFTEFLQNHCRSEVILEKWQKKKIAEMGPVQWLATQKKAADKVVFLLSNDVNSVCDGTCGKSEGSPSENSQDLFPLAFNLFCSDLRSQIHLHKYVVVYFREIDTKDDYNALSVCPKYHLMKDATAFCAELLHVKQQVSAGKRSQACHDGCCSL

SEQ ID NO: 30295 - protein, 87 aa, Artificial Sequence
  Synthetic polypeptide
PLPPLPRQPTQQDDDKNKDLSDGPLPFNELKGSRRLPFLPPHYCPPLRFLWFTHLKYVSITQFVTSLNFFKTIAEVRSSLKSGRKRK

SEQ ID NO: 30296 - protein, 50 aa, Artificial Sequence
  Synthetic polypeptide
IKRIKKTSFSTTTLLPPIKVLVVYPSEICFHHTICYFTEFLQNHCRSEVI

SEQ ID NO: 30297 - protein, 78 aa, Artificial Sequence
  Synthetic polypeptide
PLPPLPRQPTQQDDDKNKDLSDGPLPFNELKGSRRLPFLPPHYCPPLRFLWFTHLKYVSITQFVTSLNFFKTIAEVRS

SEQ ID NO: 30298 - protein, 574 aa, Artificial Sequence
  Synthetic polypeptide
NDHGSTTLRIGRATDTLPASIPHVIARRHKQQGQPLYKDSWLLREGLNKPESNEQRQNGLKMVDQAIWSKKMSNGTRRIPVSPEQARSYNKQMRPAILDHCSGNKWTNTSHHPEYLVGEEALYVNPLDCYNIHWPIRRGQLNIHPGPGGSLTAVLADIEVIWSHAIQKYLEIPLKDLKYYRCILLIPDIYNKQHVKELVNMILMKMGFSGIVVHQESVCATYGSGLSSTCIVDVGDQKTSVCCVEDGVSHRNTRLCLAYGGSDVSRCFYWLMQRAGFPYRECQLTNKMDCLLLQHLKETFCHLDQDISGLQDHEFQIRHPDSPALLYQFRLGDEKLQAPMALFYPATFGIVGQKMTTLQHRSQGDPEDPHDEHYLLATQSKQEQSAKATADRKSASKPIGFEGDLRGQSSDLPERLHSQEVDLGSAQGDGLMAGNDSEEALTALMSRKTAISLFEGKALGLDKAILHSIDCCSSDDTKKKMYSSILVVGGGLMFHKAQEFLQHRILNKMPPSFRRIIENVDVITRPKDMDPRLIAWKGGAVLACLDTTQELWIYQREWQRFGVRMLRERAAFVW

SEQ ID NO: 30299 - protein, 16 aa, Artificial Sequence
  Synthetic polypeptide
SGLSFPDHKTTTVQQL

SEQ ID NO: 30300 - protein, 56 aa, Artificial Sequence
  Synthetic polypeptide
MASASPTIKRPRFNNFKDWSSHRHSSCQHSSRHCPKTQTTRAAPIQGQLAPKGGTK

SEQ ID NO: 30301 - protein, 60 aa, Artificial Sequence
  Synthetic polypeptide
NDHANPEQLHHCHTSRFNNFKDWSSHRHSSCQHSSRHCPKTQTTRAAPIQGQLAPKGGTK

SEQ ID NO: 30302 - protein, 595 aa, Artificial Sequence
  Synthetic polypeptide
SGLSFPDHKTTTQIQSNFIIVIHPGSTTLRIGRATDTLPASIPHVIARRHKQQGQPLYKDSWLLREGLNKPESNEQRQNGLKMVDQAIWSKKMSNGTRRIPVSPEQARSYNKQMRPAILDHCSGNKWTNTSHHPEYLVGEEALYVNPLDCYNIHWPIRRGQLNIHPGPGGSLTAVLADIEVIWSHAIQKYLEIPLKDLKYYRCILLIPDIYNKQHVKELVNMILMKMGFSGIVVHQESVCATYGSGLSSTCIVDVGDQKTSVCCVEDGVSHRNTRLCLAYGGSDVSRCFYWLMQRAGFPYRECQLTNKMDCLLLQHLKETFCHLDQDISGLQDHEFQIRHPDSPALLYQFRLGDEKLQAPMALFYPATFGIVGQKMTTLQHRSQGDPEDPHDEHYLLATQSKQEQSAKATADRKSASKPIGFEGDLRGQSSDLPERLHSQEVDLGSAQGDGLMAGNDSEEALTALMSRKTAISLFEGKALGLDKAILHSIDCCSSDDTKKKMYSSILVVGGGLMFHKAQEFLQHRILNKMPPSFRRIIENVDVITRPKDMDPRLIAWKGGAVLACLDTTQELWIYQREWQRFGVRMLRERAAFVW

SEQ ID NO: 30303 - protein, 28 aa, Artificial Sequence
  Synthetic polypeptide
MASASPTIKRPRKSRATSSLSYIQVQQL

SEQ ID NO: 30304 - protein, 106 aa, Artificial Sequence
  Synthetic polypeptide
FLHFHLRYRVHLTRECQRVGAGQVLDSRSQSPWRLSLITDFFWGIAEFVVLFFKTLLQQDVKKRRSYGNSSDSRYDDGRGPPGNPPRRMGRINHLRGPSPPPMAGG

SEQ ID NO: 30305 - protein, 30 aa, Artificial Sequence
  Synthetic polypeptide
GTGFISLGSAREWAQDKCWTAGVSLHGDYL

SEQ ID NO: 30306 - protein, 32 aa, Artificial Sequence
  Synthetic polypeptide
GVPESGRRTSVGQPESVSMEIIFDNRFLLGNS

SEQ ID NO: 30307 - protein, 87 aa, Artificial Sequence
  Synthetic polypeptide
FLHFHLRYRVHLTRECQRVGAGQVLDSRSQSPWRLSLITDFFWGIAEFVVLFFKTLLQQDVKKRRSYGNSSDSRYDDGRGKPSPKNG

SEQ ID NO: 30308 - protein, 31 aa, Artificial Sequence
  Synthetic polypeptide
FLHFHLRTSVGQPESVSMEIIFDNRFLLGNS

SEQ ID NO: 30309 - protein, 47 aa, Artificial Sequence
  Synthetic polypeptide
GRSQDGRIGTAPVYSSQRERRRRRVISAFPSEDKCWTAGVSLHGDYL

SEQ ID NO: 30310 - protein, 13 aa, Artificial Sequence
  Synthetic polypeptide
GLLSHAELSPLEY

SEQ ID NO: 30311 - protein, 379 aa, Artificial Sequence
  Synthetic polypeptide
TKSIGILSPGVALGMAGSAMSSKFFLVALAIFFSFAQVVIEANSWWSLGMNNPVQMSEVYIIGAQPLCSQLAGLSQGQKKLCHLYQDHMQYIGEGAKTGIKECQYQFRHRRWNCSTVDNTSVFGRVMQIGSRETAFTYAVSAAGVVNAMSRACREGELSTCGCSRAARPKDLPRDWLWGGCGDNIDYGYRFAKEFVDARERERIHAKGSYESARILMNLHNNEAGRRTVYNLADVACKCHGVSGSCSLKTCWLQLADFRKVGDALKEKYDSAAAMRLNSRGKLVQVNSRFNSPTTQDLVYIDPSPDYCVRNESTGSLGTQGRLCNKTSEGMDGCELMCCGRGYDQFKTVQTERCHCKFHWCCYVKCKKCTEIVDQFVCK

SEQ ID NO: 30312 - protein, 68 aa, Artificial Sequence
  Synthetic polypeptide
ASGISPACTSPCCHLVKKVPCFPFAYHHDKVHWNIKPRSCFGDGWKCNVFQVLPSGFGHIFLLRPGCN

SEQ ID NO: 30313 - protein, 391 aa, Artificial Sequence
  Synthetic polypeptide
RKCLASPLPTTMIKSIGILSPGVALGMAGSAMSSKFFLVALAIFFSFAQVVIEANSWWSLGMNNPVQMSEVYIIGAQPLCSQLAGLSQGQKKLCHLYQDHMQYIGEGAKTGIKECQYQFRHRRWNCSTVDNTSVFGRVMQIGSRETAFTYAVSAAGVVNAMSRACREGELSTCGCSRAARPKDLPRDWLWGGCGDNIDYGYRFAKEFVDARERERIHAKGSYESARILMNLHNNEAGRRTVYNLADVACKCHGVSGSCSLKTCWLQLADFRKVGDALKEKYDSAAAMRLNSRGKLVQVNSRFNSPTTQDLVYIDPSPDYCVRNESTGSLGTQGRLCNKTSEGMDGCELMCCGRGYDQFKTVQTERCHCKFHWCCYVKCKKCTEIVDQFVCK

SEQ ID NO: 30314 - protein, 1201 aa, Artificial Sequence
  Synthetic polypeptide
CCITMSMSSASLPSHHIGISSSHVIIRRVLVKPLGDRGYLFLLSPYQMVPPYEYQTAKSRVLHALFLFQEPRSIVTSQKGSTNAAPQERHESMPDVLKIAQFLQFSLIQCRKEFKNISAINFHSVVEKYVSEFFKRGFGSGKREFIMFPYDSRLDDKKFLYSAPRNKSHIDTCLHAYIFRPEVYQLPICKLKELFEENRKLQQFSPLSDYEGQEEEMNGTKMKFGKRNNSRGEAIISGKQRSSHSLDYDKDRVKELINLIQCRKKSVGGDSDTEDMRSKTVLKRKLEDLPENMRKLAKTSNLSENCHLYEESPQPIGSLGHDADLRRQQQDTCNSGIADIHRLFNWLSETLANARHSDASLTDTVNKALGLSTDDAYEELRQKHEYELNSTPDKKDYEQPTCAKVENAQFKGTQSLLLEVDATSKYSVAISTSEVGTDHKLHLKEDPNLISVNNFEDCSLCPSVPIEHGFRRQQSKSNNVEETEIHWKLIPITGGNARSPEDQLGKHGEKQTPDTLKGTTEDDVLTGQVEEQCVPAAEAEPPAVSETTERTVLGEYNLFSRKIEEILKQKNVSYVSTVSTPIFSTQEKMKRLSEFIYSKTSKAGVQEFVDGLHEKLNTIIIKASAKGGNLPPVSPNDSGAKIASNPLERHVIPVSSSDFNNKHLLEPLCSDPLKDTNSDEQHSTSALTEVEMNQPQHATELMVTSDHIVPGDMAREPVEETTKSPSDVNISAQPALSNFISQLEPEVFNSLVKIMKDVQKNTVKFYIHEEEESVLCKEIKEYLIKLGNTECHPEQFLERRSKLDKLLIIIQNEDIAGFIHKIPGLVTLKKLPCVSFAGVDSLDDVKNHTYNELFVSGGFIVSDESILNPEVVTVENLKNFLTFLEELSTPEGKWQWKVHCKFQKKLKELGRLNAKALSLLTLLNVYQKKHLVEILSYHNCDSQTRNAPELDCLIRLQAQNIQQRHIVFLTEKNIKMLSSYTDNGIVVATAEDFMQNFKNLVGYHNSITEENLPQLGANENLESQSALLENDEKDEEDMSLDSGDEISHIEVCSNFHSEIWEKETKGSRGTDQKKNTQIELQSSPDVQNSLLEDKTYLDSEERTSIDIVCSEGENSNSTEQDSYSNFQVYHSQLNMSHQFSHFNVLTHQTFLGTPYALSSSQSQENENYFLSAYTESLDRDKSPPPLSWGKSDSSRPYSQEK

SEQ ID NO: 30315 - protein, 47 aa, Artificial Sequence
  Synthetic polypeptide
EGFLLNLWETEDTFFFSPLIRWFLHMNIRLPSLESYMLCFYFKNLEA

SEQ ID NO: 30316 - protein, 35 aa, Artificial Sequence
  Synthetic polypeptide
SSSLMLHHNVYVISLTSISSHRHFIISRHHKKGSC

SEQ ID NO: 30317 - protein, 1084 aa, Artificial Sequence
  Synthetic polypeptide
CCITMSMSSASLPSHHIGISSSHVIIRRVLVKPLGDRGYLFLLSPYQMVPPYEYQTAKSRVLHALFLFQEPRSIVTSQKGSTNAAPQERHESMPDVLKIAQFLQFSLIQCRKEFKNISAINFHSVVEKYVSEFFKRGFGSGKREFIMFPYDSRLDDKKFLYSAPRNKSHIDTCLHAYIFRPEVYQLPICKLKELFEENRKLQQFSPLSDYEGQEEEMNGTKMKFGKRNNSRGEAIISGKQRSSHSLDYDKDRVKELINLIQCRKKSVGGDSDTEDMRSKTVLKRKLEDLPENMRKLAKTSNLSENCHLYEESPQPIGSLGHDADLRRQQQDTCNSGIADIHRLFNWLSETLANARHSDASLTDTVNKALGLSTDDAYEELRQKHEYELNSTPDKKDYEQPTCAKVENAQFKGTQSLLLEVDATSKYSVAISTSEVGTDHKLHLKEDPNLISVNNFEDCSLCPSVPIEHGFRRQQSKSNNVEETEIHWKLIPITGGNARSPEDQLGKHGEKQTPGMKSPEEQLVCVPPQEAFPNDPRVINRQRSSDYQFPSSPFTDTLKGTTEDDVLTGQVEEQCVPAAEAEPPAVSETTERTVLGEYNLFSRKIEEILKQKNVSYVSTVSTPIFSTQEKMKRLSEFIYSKTSKAGVQEFVDGLHEKLNTIIIKASAKGGNLPPVSPNDSGAKIASNPLERHVIPVSSSDFNNKHLLEPLCSDPLKDTNSDEQHSTSALTEVEMNQPQHATELMVTSDHIVPGDMAREPVEETTKSPSDVNISAQPALSNFISQLEPEVFNSLVKIMKDVQKNTVKFYIHEEEESVLCKEIKEYLIKLGNTECHPEQFLERRSKLDKLLIIIQNEDIAGFIHKIPGLVTLKKLPCVSFAGVDSLDDVKNHTYNELFVSGGFIVSDESILNPEVVTVENLKNFLTFLEELSTPEGKWQWKVHCKFQKKLKELGRLNAKALSLLTLLNVYQKKHLVEILSYHNCDSQTRNAPELDCLIRLQAQNIQQRHIVFLTEKNIKMLSSYTDNGIVVATAEDFMQNFKNLVGYHNSITEENLPQLGANENLESQSDAVLTLTPLELGVGISQH

SEQ ID NO: 30318 - protein, 1181 aa, Artificial Sequence
  Synthetic polypeptide
CCITMSMSSASLPSHHIGISSSHVIIRRVLVKPLGDRGYLFLLSPYQMVPPYEYQTAKSRVLHALFLFQEPRSIVTSQKGSTNAAPQERHESMPDVLKIAQFLQFSLIQCRKEFKNISAINFHSVVEKYVSEFFKRGFGSGKREFIMFPYDSRLDDKKFLYSAPRNKSHIDTCLHAYIFRPEVYQLPICKLKELFEENRKLQQFSPLSDYEGQEEEMNGTKMKFGKRNNSRGEAIISGKQRSSHSLDYDKDRVKELINLIQCRKKSVGGDSDTEDMRSKTVLKRKLEDLPENMRKLAKTSNLSENCHLYEESPQPIGSLGHDADLRRQQQDTCNSGIADIHRLFNWLSETLANARHSDASLTDTVNKALGLSTDDAYEELRQKHEYELNSTPDKKDYEQPTCAKVENAQFKGTQSLLLEVDATSKYSVAISTSEVGTDHKLHLKEDPNLISVNNFEDCSLCPSVPIEHGFRRQQSKSNNVEETEIHWKLIPITDTLKGTTEDDVLTGQVEEQCVPAAEAEPPAVSETTERTVLGEYNLFSRKIEEILKQKNVSYVSTVSTPIFSTQEKMKRLSEFIYSKTSKAGVQEFVDGLHEKLNTIIIKASAKGGNLPPVSPNDSGAKIASNPLERHVIPVSSSDFNNKHLLEPLCSDPLKDTNSDEQHSTSALTEVEMNQPQHATELMVTSDHIVPGDMAREPVEETTKSPSDVNISAQPALSNFISQLEPEVFNSLVKIMKDVQKNTVKFYIHEEEESVLCKEIKEYLIKLGNTECHPEQFLERRSKLDKLLIIIQNEDIAGFIHKIPGLVTLKKLPCVSFAGVDSLDDVKNHTYNELFVSGGFIVSDESILNPEVVTVENLKNFLTFLEELSTPEGKWQWKVHCKFQKKLKELGRLNAKALSLLTLLNVYQKKHLVEILSYHNCDSQTRNAPELDCLIRLQAQNIQQRHIVFLTEKNIKMLSSYTDNGIVVATAEDFMQNFKNLVGYHNSITEENLPQLGANENLESQSALLENDEKDEEDMSLDSGDEISHIEVCSNFHSEIWEKETKGSRGTDQKKNTQIELQSSPDVQNSLLEDKTYLDSEERTSIDIVCSEGENSNSTEQDSYSNFQVYHSQLNMSHQFSHFNVLTHQTFLGTPYALSSSQSQENENYFLSAYTESLDRDKSPPPLSWGKSDSSRPYSQEK

SEQ ID NO: 30319 - protein, 16 aa, Artificial Sequence
  Synthetic polypeptide
GSRGKIHAKTETEHPR

SEQ ID NO: 30320 - protein, 530 aa, Artificial Sequence
  Synthetic polypeptide
GLLWDCCEDHVGKYMRKRKQSTQDEDAVSLCSLDISEPSNKRVKPLSRVTSLANLIPPVKATPLKRFSQTLQRSISFRSESRPDILAPRPWSRNAAPSSTKRRDSKLWSETFDVCVNQMLTSKEIKRQEAIFELSQGEEDLIEDLKLAKKAYHDPMLKLSIMTEQELNQIFGTLDSLIPLHEELLSQLRDVRKPDGSTEHVGPILVGWLPCLSSYDSYCSNQVAAKALLDHKKQDHRVQDFLQRCLESPFSRKLDLWNFLDIPRSRLVKYPLLLREILRHTPNDNPDQQHLEEAINIIQGIVAEINTKTGESECRYYKERLLYLEEGQKDSLIDSSRVLCCHGELKNNRGVKLHVFLFQEVLVITRAVTHNEQLCYQLYRQPIPVKDLLLEDLQDGEVRLGGSLRGAFSNNERIKNFFRVSFKNGSQSQTHSLQANDTFNKQQWLNCIRQAKETVLCAAGQAGVLDSEGSFLNPTTGSRELQGETKLEQMDQSDSESDCSMDTSEVSLDCERMEQTDSSCGNSRHGESNV

SEQ ID NO: 30321 - protein, 43 aa, Artificial Sequence
  Synthetic polypeptide
ICKKKDNNKAYFGTVVRITWENTCENGNRAPKMKMLLAFAVST

SEQ ID NO: 30322 - protein, 187 aa, Artificial Sequence
  Synthetic polypeptide
GLLWDCCEDHVGKYMRKRKQSTQDEDAVSLCSLDISEPSNKRVKPLSRVTSLANLIPPVKATPLKRFSQTLQRSISFRSESRPDILAPRPWSRNAAPSSTKRRDSKLWSETFDVCVNQMLTSKEIKRQEAIFELSQGEEDLIEDLKLAKKAYHDPMLKLSIMTEQELNQIFGTLDSLIPLHEELLSQ

SEQ ID NO: 30323 - protein, 182 aa, Artificial Sequence
  Synthetic polypeptide
GLLWDCCEDHVGKYMRKRKQSTQDEDAVSLCSLDISEPSNKRVKPLSRVTSLANLIPPVKATPLKRFSQTLQRSISFRSESRPDILAPRPWSRNAAPSSTKRRDSKLWSETFDVCVNQMLTSKEIKRQEAIFELSQGEEDLIEDLKLAKKAYHDPMLKLSIMTEQELNQIFGTLDSLIPLHE

SEQ ID NO: 30324 - protein, 72 aa, Artificial Sequence
  Synthetic polypeptide
GLLWDCCEDHVGKYMRKRKQSTQDEDAVSLCSLDISEPSNKRVKPLSRVTSLANLIPPVKATPLKRFSQTLQ

SEQ ID NO: 30325 - protein, 1884 aa, Artificial Sequence
  Synthetic polypeptide
ASETTNPPEGRNSQHIRPSEGTNSGCATLRAIGAFYLNLGGAPEGPAGTGKTETTKDLAKALAVQCVVFNCSDGLDYLAMGKFFKGLASSGAWACFDEFNRIELEVLSVVAQQILCIQRAIQQKLVVFVFEGTELKLNPNCFVAITMNPGYAGRSELPDNLKVLFRTVAMMVPNYALIAEISLYSYGFLNARPLSVKIVMTYRLCSEQLSSQFHYDYGMRAVKAVLVAAGNLKLKYPNENEDILLLRSIKDVNEPKFLSHDIPLFNGITSDLFPGIKLPEADYHEFLECAHEACNVHNLQPVKFFLEKIIQTYEMMIVRHGFMLVGEPFAAKTKVLHVLADTLTLMNEHGYGEEEKVIYRTVNPKSITMGQLFGQFDPVSHEWTDGIVANTFREFALSETPDRKWVVFDGPIDTLWIESMNTVLDDNKKLCLMSGEIIQMSPQMSLIFETMDLSQASPATVSRCGMIYLEPSQLGWEPLVSSWLNSLKGPLCEPEYQALLRGLFAWLIPPSLNQRVELFQLNYLYTTIVSKILKILITFRISNYFKYVPLKTQCTFIKFFLHQQACFIFSLIWSIGGSCDTDGRRVFDTFIRLIILGKDDENPVPDSVGKWECPFDEKGLVYDYMYELKNKGRWVHWNELIKNTNLGDKQIKIQDIIVPTMDTIRYTFLMDLSITYAKPLLFVGPTGTGKSVYVKDKLMNHLEKDQYFPFYINLSARTSANQVQNIIMARLDKRRKGVFGPPMGKKCIIFIDDMNMPALEKYGAQPPIELLRQFFDCGHWYDLKDTSKITLVDIELIAAMGPPGGGRNPVTPRCIRHFNICSINSFSDETMVRIFSSIVAFYLRTHEFPPEYFVIGNQIVNGTMEIYKQSVENLLPTPTKSHYTFNLRDFSRVIRGCLLIERDAVANKHTMIRLFVHEVLRVFYDRLINDDDRRWLFQLTKTVIKDHFKESFHSIFSHLRKQNAPVTEEDLRNLMFGDYMNPDLEGDDRVYIEIPNIHHFSDVVDQCLDEYNQTHKTRMNLVIFRYVLEHLSRICRVLKQSGGNALLVGLGGSGRQSLTRLATSMAKMHIFQPEISKSYGMNEWREDMKSFIAVPVTNRIVDNKSKILEKRLRYLNDHFTYNLYCNICRSLFEKDKLLFSFLLCANLLLARKEIEYQELMFLLTGGVSLKSAEKNPDPTWLQDKSWEEICRASEFPAFRGLRQHFCEHIYEWREIYDSKEPHNAKFPAPMDKNLNELQKIIILRCLRPDKITPAITNYVTDKLGKKFVEPPPFDLTKSYLDSNCTIPLIFVLSPGADPMASLLKFANDKSMSGNKFQAISLGQGQGPIAAKMIKAAIEEGTWVCLQNCHLAVSWMPMLEKICEDFTSETCNSSFRLWLTSYPSSKFPVTILQNGVKMTNEPPTGLRLNLLQSYLTDPVSDPEFFKGCRGKELAWEKLLFGVCFFHALVQERKKFGPLGWNIPYGFNESDLRISIRQLQLFINEYDTIPFEAISYLTGECNYGGRVTDDWDRRLLLTMLADFYNLYIVENPHYKFSPSGNYFAPPKGTYEDYIEFIKKLPFTQHPEIFGLHENVDISKDLQQTKTLFESLLLTQGGSKQTGASGSTDQILLEITKDILNKLPSDFDIEMALRKYPVRYEESMNTVLVQEMERFNNLIITIRNTLRDLEKAIKGVVVMDSALEALSGSLLVGKVPEIWAKRSYPSLKPLGSYITDFLARLNFLQDWYNSGKPCVFWLSGFFFTQAFLTGAMQNYARKYTTPIDLLGYEFEVIPSDTSDTSPEDGVYIHGLYLDGARWDRESGLLAEQYPKLLFDLMPIIWIKPTQKSRIIKSDAYVCPLYKTSERKGTLSTTGHSTNFVIAMLLKTDQPTRHWIKRGVALLCQLDD

SEQ ID NO: 30326 - protein, 2 aa, Artificial Sequence
  Synthetic polypeptide
EL

SEQ ID NO: 30327 - protein, 66 aa, Artificial Sequence
  Synthetic polypeptide
RSAASLLSQRDHEPTRRKKLPTHPTIRRNKLWMRHLKSYRCFLFKPWRCSRGASRHRKNRNHQGLG

SEQ ID NO: 30328 - protein, 1085 aa, Artificial Sequence
  Synthetic polypeptide
ASETTNPPEGRNSQHIRPSEGTNSGCATLRAIGAFYLNLGGAPEGPAGTGKTETTKDLAKALAVQCVVFNCSDGLDYLAMGKFFKGLASSGAWACFDEFNRIELEVLSVVAQQILCIQRAIQQKLVVFVFEGTELKLNPNCFVAITMNPGYAGRSELPDNLKVLFRTVAMMVPNYALIAEISLYSYGFLNARPLSVKIVMTYRLCSEQLSSQFHYDYGMRAVKAVLVAAGNLKLKYPNENEDILLLRSIKDVNEPKFLSHDIPLFNGITSDLFPGIKLPEADYHEFLECAHEACNVHNLQPVKFFLEKIIQTYEMMIVRHGFMLVGEPFAAKTKVLHVLADTLTLMNEHGYGEEEKVIYRTVNPKSITMGQLFGQFDPVSHEWTDGIVANTFREFALSETPDRKWVVFDGPIDTLWIESMNTVLDDNKKLCLMSGEIIQMSPQMSLIFETMDLSQASPATVSRCGMIYLEPSQLGWEPLVSSWLNSLKGPLCEPEYQALLRGLFAWLIPPSLNQRKKKCKELIPTSNSNVVVSLTRLFEVLLCNVVENDPTSKHIRVWIMACFIFSLIWSIGGSCDTDGRRVFDTFIRLIILGKDDENPVPDSVGKWECPFDEKGLVYDYMYELKNKGRWVHWNELIKNTNLGDKQIKIQDIIVPTMDTIRYTFLMDLSITYAKPLLFVGPTGTGKSVYVKDKLMNHLEKDQYFPFYINLSARTSANQVQNIIMARLDKRRKGVFGPPMGKKCIIFIDDMNMPALEKYGAQPPIELLRQFFDCGHWYDLKDTSKITLVDIELIAAMGPPGGGRNPVTPRCIRHFNICSINSFSDETMVRIFSSIVAFYLRTHEFPPEYFVIGNQIVNGTMEIYKQSVENLLPTPTKSHYTFNLRDFSRVIRGCLLIERDAVANKHTMIRLFVHEVLRVFYDRLINDDDRRWLFQLTKTVIKDHFKESFHSIFSHLRKQNAPVTEEDLRNLMFGDYMNPDLEGDDRVYIEIPNIHHFSDVVDQCLDEYNQTHKTRMNLVIFRYVLEHLSRICRVLKQSGGNALLVGLGGSGRQSLTRLATSMAKMHIFQPEISKSYGMNEWREDMK

SEQ ID NO: 30329 - protein, 545 aa, Artificial Sequence
  Synthetic polypeptide
KEYIIRVQRGISVENSWQIVRRYSDFDLLNNSLQIAGLSLPLPPKKLIGNMDREFIAERQKGLQNYLNVITTNHILSNCELVKKFLDPNNYSANYTEIALQQVSMFFRSEPKWEVVEPLKDIGWRIRKKYFLMKIKNQPKERLVLSWADLGPDKYLSDKDFQCLIKLLPSCLHPYIYRVTFATANESSALLIRMFNEKGTLKDLIYKAKPKDPFLKKYCNPKKIQGLELQQIKTYGRQILEVLKFLHDKGFPYGHLHASNVMLDGDTCRLLDLENSLLGLPSFYRSYFSQFRKINTLESVDVHCFGHLLYEMTYGRPPDSVPVDSFPPAPSMAVVAVLESTLSCEACKNGMPTISRLLQMPLFSDVLLTTSEKPQFKIPTKLKEALRIAKECIEKRLIEEQKQIHQHRRLTRAQSHHGSEEERKKRKILARKKSKRSALENSEEHSAKYSNSNNSAGSGASSPLTSPSSPTPPSTSGISALPPPPPPPPPPAAPLPPASTEAPAQLSSQAVNGMSRGALLSSIQNFQKGTLRKAKTCDHSAPKIG

SEQ ID NO: 30330 - protein, 39 aa, Artificial Sequence
  Synthetic polypeptide
HRRNILFECKEEFLWKTAGRLLEDTVTLICLTTAYRLQA

SEQ ID NO: 30331 - protein, 21 aa, Artificial Sequence
  Synthetic polypeptide
IEGIYYSSAKRNFCGKQLADC

SEQ ID NO: 30332 - protein, 482 aa, Artificial Sequence
  Synthetic polypeptide
KEYIIRVQRGISVENSWQIVRRYSDFDLLNNSLQIAGLSLPLPPKKLIGNMDREFIAERQKGLQNYLNVITTNHILSNCELVKKFLDPNNYSANYTEIALQQVSMFFRSEPKWEVVEPLKDIGWRIRKKYFLMKIKNQPKERLVLSWADLGPDKYLSDKDFQCLIKLLPSCLHPYIYRVTFATANESSALLIRMFNEKGTLKDLIYKAKPKDPFLKKYCNPKKIQGLELQQIKTYGRQILEVLKFLHDKGFPYGHLHASNVMLDGDTCRLLDLENSLLGLPSFYRSYFSQFRKINTLESVDVHCFGHLLYEMTYGRPPDSVPVDSFPPAPSMAVVAVLESTLSCEACKNGMPTISRLLQMPLFSDVLLTTSEKPQFKIPTKLKEALRIAKECIEKRLIEEQKQIHQHRRLTRAQSHHGSEEERKKRKILARKKSKRSALENSEEHSAKYSNSNNSAGSGASSPLTSPSSPTPPSTSVEHAPF

SEQ ID NO: 30333 - protein, 108 aa, Artificial Sequence
  Synthetic polypeptide
KEYIIRVQRGISVENSWQIVRRYSDFDLLNNSLQIAGLSLPLPPKKLIGNMDREFIAERQKGLQNYLNVITTNHILSNCELVKKFLDPNNYSANYTAPLHLSGYLCHS

SEQ ID NO: 30334 - protein, 89 aa, Artificial Sequence
  Synthetic polypeptide
KEYIIRVQRGISVENSWQIVRRYSDFDLLNNSLQIAGLSLPLPPKKLIGNMDREFIAERQKGLQNYLNVITTNHILSNCELVKKFLDPN

SEQ ID NO: 30335 - protein, 55 aa, Artificial Sequence
  Synthetic polypeptide
SFSCWAVERRRGSSGRSPSGRRGSHRVDGSGQLPAGALLLCHCEGFYRSSGETRK

SEQ ID NO: 30336 - protein, 181 aa, Artificial Sequence
  Synthetic polypeptide
RPPAESNINPLVAGLWREGGGLREGVHLAEGALTGLMAVDSCQLVHCYYVTVKGFTEALEKLENEPAIQQVLKRLCDLHAIHGILTNSGDFLHDAFLSGAQVDMARTAYLDLLRLIRKDAILLTDAFDFTDQCLNSALGCYDGNVYERLFQWAQKSPTNTQENPAYEEYIRPLLQSWRSKL

SEQ ID NO: 30337 - protein, 15 aa, Artificial Sequence
  Synthetic polypeptide
WQWTVASWCTATMSL

SEQ ID NO: 30338 - protein, 15 aa, Artificial Sequence
  Synthetic polypeptide
HMKKCLEVLQPFCNC

SEQ ID NO: 30339 - protein, 17 aa, Artificial Sequence
  Synthetic polypeptide
HLAHEEMSGSATAILQL

SEQ ID NO: 30340 - protein, 75 aa, Artificial Sequence
  Synthetic polypeptide
FVLSLSVCPSSRRKLKLNRSLHVHVHVLPRKAGDFHRNDSIYEELQKHDKEDFPASWRSEEEMAAEAAALRVYFQ

SEQ ID NO: 30341 - protein, 75 aa, Artificial Sequence
  Synthetic polypeptide
MFCPSVYAHHLEENSNLIGACTFTSMFFPGRLETFTGMTASMRSSRNMTRRTFLPLGDQRRKWQQKPQLCGSTFS

SEQ ID NO: 30342 - protein, 19 aa, Artificial Sequence
  Synthetic polypeptide
ELARSRPCSSQEGWRLSQE

SEQ ID NO: 30343 - protein, 193 aa, Artificial Sequence
  Synthetic polypeptide
GLQAEDEFVYWPSREESMNCEAFTVTLISKDRLCLSNEEQIIIHDFILEATQDDYVLEVRHFQCPKWPNPDAPISSTFELINVIKEEALTRDGPTIVHDEYGAVSAGMLCALTTLSQQLENENAVDVFQVAKMINLMRPGVFTDIEQYQFIYKAMLSLVSTKENGNGPMTVDKNGAVLIADESDPAESMESLV

SEQ ID NO: 30344 - protein, 24 aa, Artificial Sequence
  Synthetic polypeptide
RSHIQHEDYRQKMSLCTGQVEKNP

SEQ ID NO: 30345 - protein, 38 aa, Artificial Sequence
  Synthetic polypeptide
WGREEMGRCKINQEDTKQQMRKNKFRDLISNMRTTGRR

SEQ ID NO: 30346 - protein, 126 aa, Artificial Sequence
  Synthetic polypeptide
EQLQSTAPSVSDAEDRISISKQLASVKALRKCSDLEKAIATTALIFRNSSDSDGKLEKAIAKDLLQTQFRNFAEGQETKPKYREILSELDEHTENKLDFEDFMILLLSITVMSDLLQNIRNVKIMK

SEQ ID NO: 30347 - protein, 15 aa, Artificial Sequence
  Synthetic polypeptide
VTQKTGFQYPNNWLQ

SEQ ID NO: 30348 - protein, 38 aa, Artificial Sequence
  Synthetic polypeptide
RRRQDFNIQTTGFSESSEEVLRSGKSYCHHCSDFQKFF

SEQ ID NO: 30349 - protein, 145 aa, Artificial Sequence
  Synthetic polypeptide
EQLQSTAPSVSDAEDRISISKQLASVKALRKCSDLEKAIATTALIFRNSSDSDGKLEKAIAKDLLQTQFRNFAELPFTFYHEWKQPEVLTTCRCLILNFPAIRIGQETKPKYREILSELDEHTENKLDFEDFMILLLSITVMSDL

SEQ ID NO: 30350 - protein, 98 aa, Artificial Sequence
  Synthetic polypeptide
EQLQSTAPSVSDAEDRISISKQLASVKALRKCSDLEKAIATTALIFRNSSDSDGKLEKAIAKDLLQTQFRNFAEPCEDSRRSWPSAKLEESTLSRHWI

SEQ ID NO: 30351 - protein, 117 aa, Artificial Sequence
  Synthetic polypeptide
FLHFQLRISISKQLASVKALRKCSDLEKAIATTALIFRNSSDSDGKLEKAIAKDLLQTQFRNFAEGQETKPKYREILSELDEHTENKLDFEDFMILLLSITVMSDLLQNIRNVKIMK

SEQ ID NO: 30352 - protein, 46 aa, Artificial Sequence
  Synthetic polypeptide
RRRQVISAFPTEDFNIQTTGFSESSEEVLRSGKSYCHHCSDFQKFF

SEQ ID NO: 30353 - protein, 136 aa, Artificial Sequence
  Synthetic polypeptide
FLHFQLRISISKQLASVKALRKCSDLEKAIATTALIFRNSSDSDGKLEKAIAKDLLQTQFRNFAELPFTFYHEWKQPEVLTTCRCLILNFPAIRIGQETKPKYREILSELDEHTENKLDFEDFMILLLSITVMSDL

SEQ ID NO: 30354 - protein, 89 aa, Artificial Sequence
  Synthetic polypeptide
FLHFQLRISISKQLASVKALRKCSDLEKAIATTALIFRNSSDSDGKLEKAIAKDLLQTQFRNFAEPCEDSRRSWPSAKLEESTLSRHWI

SEQ ID NO: 30355 - protein, 79 aa, Artificial Sequence
  Synthetic polypeptide
SFWKLSQGYTTNGKTQGNLNLSKKSESLWHFNHDPLFSRYPCHILPLPQLHTHNADQCDGNSTLGRSACTASVPRRSTW

SEQ ID NO: 30356 - protein, 76 aa, Artificial Sequence
  Synthetic polypeptide
ILVRRVRVYGILTMILSSPGTPATYCPSPNYTHTTQISVMETPLWEDLPALQVSPGGAHGDSDAAGDGEDHQQTHV

SEQ ID NO: 30357 - protein, 863 aa, Artificial Sequence
  Synthetic polypeptide
WKLHSGKICLHCKCPQEEHMVTVMPLEMEKTISKLMFDFQRNSTSDDDSGCALEEYAWVPPGLKPEQVHQYYSCLPEEKVPYVNSPGEKLRIKQLLHQLPPHDNEVRYCNSLDEEEKRELKLFSSQRKRENLGRGNVRPFPVTMTGAICEQCGGQINGGDIAVFASRAGHGVCWHPPCFVCTVCNELLVDLIYFYQDGKIYCGRHHAECLKPRCAACDEIIFADECTEAEGRHWHMKHFCCFECETVLGGQRYIMKEGRPYCCHCFESLYAEYCDTCAQHIGIDQGQMTYDGQHWHATETCFCCAHCKKSLLGRPFLPKQGQIFCSRACSAGEDPNGSDSSDSAFQNARAKESRRSAKIGKNKGKTEEPMLNQHSQLQVSSNRLSADVDPLSLQMDMLSLSSQTPSLNRDPIWRSREEPYHYGNKMEQNQTQSPLQLLSQCNIRTSYSPGGQGAGAQPEMWGKHFSNPKRSSSLAMTGHAGSFIKECREDYYPGRLRSQESYSDMSSQSFSETRGSIQVPKYEEEEEEEGGLSTQQCRTRHPISSLKYTEDMTPTEQTPRGSMESLALSNATGLSADGGAKRQEHLSRFSMPDLSKDSGMNVSEKLSNMGTLNSSMQFRSAESVRSLLSAQQYQEMEGNLHQLSNPIGYRDLQSHGRMHQSFDFDGGMAGSKLPGQEGVRIQPMSERTRRRATSRDDNRRFRPHRSRRSRRSRSDNALHLASEREAISRLKDRPPLRAREDYDQFMRQRSFQESMGHGSRRDLYGQCPRTVSDLALQNAFGDRWGPYFAEYDWCSTCSSSSESDNEGYFLGEPIPQPARLRYVTSDELLHKYSSYGLPKSSTLGGRGQLHSRKRQKSKNCIIS

SEQ ID NO: 30358 - protein, 67 aa, Artificial Sequence
  Synthetic polypeptide
WKLHSGKICLHCKCPQEEHMVTVMPLEMEKTISKLMFDFQRNSTSDDDSGCALEEYAWVPPGLKPEQ

SEQ ID NO: 30359 - protein, 68 aa, Artificial Sequence
  Synthetic polypeptide
SQEDGRFSINLYGTGLSLTESARWISQGNYAVSDIKKSPDGTRVVGKCGGYCGKCTPSSGTGLEVRVL

SEQ ID NO: 30360 - protein, 22 aa, Artificial Sequence
  Synthetic polypeptide
SKDFEVRRMVVLASTFMEPACL

SEQ ID NO: 30361 - protein, 11 aa, Artificial Sequence
  Synthetic polypeptide
ARTLKSGGWSF

SEQ ID NO: 30362 - protein, 35 aa, Artificial Sequence
  Synthetic polypeptide
DQPGQHWETPSLQKITQAQPDLPEKEKCLAWTITF

SEQ ID NO: 30363 - protein, 37 aa, Artificial Sequence
  Synthetic polypeptide
AQEFETSLGNIGRPHLYKKLPRHNPISQRRRSAWRGL

SEQ ID NO: 30364 - protein, 1184 aa, Artificial Sequence
  Synthetic polypeptide
WLKPIIPTLWEAKMSRSFEPRSLRPAWATLGDPISTKNYPGTTRSPREGEVPGVDYNFLTVKEFLDLEQSGTLLEVGTYEGNYYGTPKPPSQPVSGKVITTDALHSLQSGSKQSTPKRTKSYNDMQNAGIVHAENEEEDDVPEMNSSFTADSGEQEEHTLQETALPPVNSSIIAAPITDPSQKFPQYLPLSAEDNLGPLPENWEMAYTENGEVYFIDHNTKTTSWLDPRCLNKQQKPLEECEDDEGVHTEELDSELELPAGWEKIEDPVYGIYYVDHINRKTQYENPVLEAKRKKQLEQQQQQQQQQQQQQQQQQQQQTEEWTEDHSALVPPVIPNHPPSNPEPAREVPLQGKPFFTRNPSELKGKFIHTKLRKSSRGFGFTVVGGDEPDEFLQIKSLVLDGPAALDGKMETGDVIVSVNDTCVLGHTHAQVVKIFQSIPIGASVDLELCRGYPLPFDPDDPNTSLVTSVAILDKEPIIVNGQETYDSPASHSSKTGKVNGMKDARPSSPADVASNSSHGYPNDTVSLASSIATQPELITVHIVKGPMGFGFTIADSPGGGGQRVKQIVDSPRCRGLKEGDLIVEVNKKNVQALTHNQVVDMLVECPKGSEVTLLVQRGGLPVPKKSPKSQPLERKDSQNSSQHSVSSHRSLHTASPSHSTQVLPEFPPAEAQAPDQTDSSGQKKPDPFKIWAQSRSMYENRPMSPSPASGLSKGEREREINSTNFGECPIPDYQEQDIFLWRKETGFGFRILGGNEPGEPIYIGHIVPLGAADTDGRLRSGDELICVDGTPVIGKSHQLVVQLMQQAAKQGHVNLTVRRKVVFAVPKTENEVPSPASSHHSSNQPASLTEEKRTPQGSQNSLNTVSSGSGSTSGIGSGGGGGSGVVSTVVQPYDVEIRRGENEGFGFVIVSSVSRPEAGTTFGNACVAMPHKIGRIIEGSPADRCGKLKVGDRILAVNGCSITNKSHSDIVNLIKEAGNTVTLRIIPGDESSNATLLTNAEKIATITTTHTPSQQGTQETRNTTKPKQESQFEFKAPQATQEQDFYTVELERGAKGFGFSLRGGREYNMDLYVLRLAEDGPAERCGKMRIGDEILEINGETTKNMKHSRAIELIKNGGRRVRLFLKRGDGSVPEYAMIPPNIAACMRNEKLGEACFYLMGHNQTTTPAATATAPPPVHKVFRK

SEQ ID NO: 30365 - protein, 1359 aa, Artificial Sequence
  Synthetic polypeptide
WLKPIIPTLWEAKMSRSFEPRSLRPAWATLGDPISTKNYPGTTRSPREGEVPGVDYNFLTVKEFLDLEQSGTLLEVGTYEGNYYGTPKPPSQPVSGKVITTDALHSLQSGSKQSTPKRTKSYNDMQNAGIVHAENEEEDDVPEMNSSFTADSGEQEEHTLQETALPPVNSSIIAAPITDPSQKFPQYLPLSAEDNLGPLPENWEMAYTENGEVYFIDHNTKTTSWLDPRCLNKQQKPLEECEDDEGVHTEELDSELELPAGWEKIEDPVYGIYYVDHINRKTQYENPVLEAKRKKQLEQQQQQQQQQQQQQQQQQQQQTEEWTEDHSALVPPVIPNHPPSNPEPAREVPLQGKPFFTRNPSELKGKFIHTKLRKSSRGFGFTVVGGDEPDEFLQIKSLVLDGPAALDGKMETGDVIVSVNDTCVLGHTHAQVVKIFQSIPIGASVDLELCRGYPLPFDPDDPNTSLVTSVAILDKEPIIVNGQETYDSPASHSSKTGKVNGMKDARPSSPADVASNSSHGYPNDTVSLASSIATQPELITVHIVKGPMGFGFTIADSPGGGGQRVKQIVDSPRCRGLKEGDLIVEVNKKNVQALTHNQVVDMLVECPKGSEVTLLVQRGGLPVPKKSPKSQPLERKDSQNSSQHSVSSHRSLHTASPSHSTQVLPEFPPAEAQAPDQTDSSGQKKPDPFKIWAQSRSMYENRLPDYQEQDIFLWRKETGFGFRILGGNEPGEPIYIGHIVPLGAADTDGRLRSGDELICVDGTPVIGKSHQLVVQLMQQAAKQGHVNLTVRRKVVFAVPKTENEVPSPASSHHSSNQPASLTEEKRTPQGSQNSLNTVSSGSGSTSGIGSGGGGGSGVVSTVVQPYDVEIRRGENEGFGFVIVSSVSRPEAGTTFGNACVAMPHKIGRIIEGSPADRCGKLKVGDRILAVNGCSITNKSHSDIVNLIKEAGNTVTLRIIPGDESSNATLLTNAEKIATITTTHTPSQQGTQETRNTTKPKQESQFEFKAPQATQEQDFYTVELERGAKGFGFSLRGGREYNMDLYVLRLAEDGPAERCGKMRIGDEILEINGETTKNMKHSRAIELIKNGGRRVRLFLKRGDGSVPEYDPSSDRHGPATGPQGVPEVRAGPDRRQHPSLESSYPPDLHKSSPHGEKRAHARDPKGSREYSRQPNEHHTWNGTSRKPDSGACRPKDRAPEGRRDAQAERAAAANGPKRRSPEKRREGTRSADNTLERREKHEKRRDVSPERRRERSPTRRRDGSPSRRRRSLERLLEQRRSPERRRGGSPERRAKSTDRRRARSPERRRERSLDKRNREDRASHREREEANLKQDAGRSSRHPPEQRRRPYKECSTDLSI

SEQ ID NO: 30366 - protein, 1153 aa, Artificial Sequence
  Synthetic polypeptide
WLKPIIPTLWEAKMSRSFEPRSLRPAWATLGDPISTKNYPGTTRSPREGEVPGVDYNFLTVKEFLDLEQSGTLLEVGTYEGNYYGTPKPPSQPVSGKVITTDALHSLQSGSKQSTPKRTKSYNDMQNAGIVHAENEEEDDVPEMNSSFTADSGEQEEHTLQETALPPVNSSIIAAPITDPSQKFPQYLPLSAEDNLGPLPENWEMAYTENGEVYFIDHNTKTTSWLDPRCLNKQQKPLEECEDDEGVHTEELDSELELPAGWEKIEDPVYGIYYVDHINRKTQYENPVLEAKRKKQLEQQQQQQQQQQQQQQQQQQQQTEEWTEDHSALVPPVIPNHPPSNPEPAREVPLQGKPFFTRNPSELKGKFIHTKLRKSSRGFGFTVVGGDEPDEFLQIKSLVLDGPAALDGKMETGDVIVSVNDTCVLGHTHAQVVKIFQSIPIGASVDLELCRGYPLPFDPDDPNTSLVTSVAILDKEPIIVNGQETYDSPASHSSKTGKVNGMKDARPSSPADVASNSSHGYPNDTVSLASSIATQPELITVHIVKGPMGFGFTIADSPGGGGQRVKQIVDSPRCRGLKEGDLIVEVNKKNVQALTHNQVVDMLVECPKGSEVTLLVQRGGLPVPKKSPKSQPLERKDSQNSSQHSVSSHRSLHTASPSHSTQVLPEFPPAEAQAPDQTDSSGQKKPDPFKIWAQSRSMYENRPMSPSPASGLSKGEREREINSTNFGECPIPDYQEQDIFLWRKETGFGFRILGGNEPGEPIYIGHIVPLGAADTDGRLRSGDELICVDGTPVIGKSHQLVVQLMQQAAKQGHVNLTVRRKVVFAVPKTENEVPSPASSHHSSNQPASLTEEKRTPQGSQNSLNTVSSGSGSTSGIGSGGGGGSGVVSTVVQPYDVEIRRGENEGFGFVIVSSVSRPEAGTTFAGNACVAMPHKIGRIIEGSPADRCGKLKVGDRILAVNGCSITNKSHSDIVNLIKEAGNTVTLRIIPGDESSNATLLTNAEKIATITTTHTPSQQGTQETRNTTKPKQESQFEFKAPQATQEQDFYTVELERGAKGFGFSLRGGREYNMDLYVLRLAEDGPAERCGKMRIGDEILEINGETTKNMKHSRAIELIKNGGRRVRLFLKRGDGSVPEYGGSNYENIPSFPGMTP

SEQ ID NO: 30367 - protein, 1152 aa, Artificial Sequence
  Synthetic polypeptide
WLKPIIPTLWEAKMSRSFEPRSLRPAWATLGDPISTKNYPGTTRSPREGEVPGVDYNFLTVKEFLDLEQSGTLLEVGTYEGNYYGTPKPPSQPVSGKVITTDALHSLQSGSKQSTPKRTKSYNDMQNAGIVHAENEEEDDVPEMNSSFTADSGEQEEHTLQETALPPVNSSIIAAPITDPSQKFPQYLPLSAEDNLGPLPENWEMAYTENGEVYFIDHNTKTTSWLDPRCLNKQQKPLEECEDDEGVHTEELDSELELPAGWEKIEDPVYGIYYVDHINRKTQYENPVLEAKRKKQLEQQQQQQQQQQQQQQQQQQQQTEEWTEDHSALVPPVIPNHPPSNPEPAREVPLQGKPFFTRNPSELKGKFIHTKLRKSSRGFGFTVVGGDEPDEFLQIKSLVLDGPAALDGKMETGDVIVSVNDTCVLGHTHAQVVKIFQSIPIGASVDLELCRGYPLPFDPDDPNTSLVTSVAILDKEPIIVNGQETYDSPASHSSKTGKVNGMKDARPSSPADVASNSSHGYPNDTVSLASSIATQPELITVHIVKGPMGFGFTIADSPGGGGQRVKQIVDSPRCRGLKEGDLIVEVNKKNVQALTHNQVVDMLVECPKGSEVTLLVQRGGLPVPKKSPKSQPLERKDSQNSSQHSVSSHRSLHTASPSHSTQVLPEFPPAEAQAPDQTDSSGQKKPDPFKIWAQSRSMYENRPMSPSPASGLSKGEREREINSTNFGECPIPDYQEQDIFLWRKETGFGFRILGGNEPGEPIYIGHIVPLGAADTDGRLRSGDELICVDGTPVIGKSHQLVVQLMQQAAKQGHVNLTVRRKVVFAVPKTENEVPSPASSHHSSNQPASLTEEKRTPQGSQNSLNTVSSGSGSTSGIGSGGGGGSGVVSTVVQPYDVEIRRGENEGFGFVIVSSVSRPEAGTTFGNACVAMPHKIGRIIEGSPADRCGKLKVGDRILAVNGCSITNKSHSDIVNLIKEAGNTVTLRIIPGDESSNATLLTNAEKIATITTTHTPSQQGTQETRNTTKPKQESQFEFKAPQATQEQDFYTVELERGAKGFGFSLRGGREYNMDLYVLRLAEDGPAERCGKMRIGDEILEINGETTKNMKHSRAIELIKNGGRRVRLFLKRGDGSVPEYGGSNYENIPSFPGMTP

SEQ ID NO: 30368 - protein, 1057 aa, Artificial Sequence
  Synthetic polypeptide
WLKPIIPTLWEAKMSRSFEPRSLRPAWATLGDPISTKNYPGTTRSPREGEVPGVDYNFLTVKEFLDLEQSGTLLEVGTYEGNYYGTPKPPSQPVSGKVITTDALHSLQSGSKQSTPKRTKSYNDMQNAGIVHAENEEEDDVPEMNSSFTADSGEQEEHTLQETALPPVNSSIIAAPITDPSQKFPQYLPLSAEDNLGPLPENWEMAYTENGEVYFIDHNTKTTSWLDPRCLNKQQKPLEECEDDEGVHTEELDSELELPAGWEKIEDPVYGIYYVDHINRKTQYENPVLEAKRKKQLEQQQQQQQQQQQQQQQQQQQQTEEWTEDHSALVPPVIPNHPPSNPEPAREVPLQGKPFFTRNPSELKGKFIHTKLRKSSRGFGFTVVGGDEPDEFLQIKSLVLDGPAALDGKMETGDVIVSVNDTCVLGHTHAQVVKIFQSIPIGASVDLELCRGYPLPFDPDDPNTSLVTSVAILDKEPIIVNGQETYDSPASHSSKTGKVNGMKDARPSSPADVASNSSHGYPNDTVSLASSIATQPELITVHIVKGPMGFGFTIADSPGGGGQRVKQIVDSPRCRGLKEGDLIVEVNKKNVQALTHNQVVDMLVECPKGSEVTLLVQRGGLPVPKKSPKSQPLERKDSQNSSQHSVSSHRSLHTASPSHSTQVLPEFPPAEAQAPDQTDSSGQKKPDPFKIWAQSRSMYENRLPDYQEQDIFLWRKETGFGFRILGGNEPGEPIYIGHIVPLGAADTDGRLRSGDELICVDGTPVIGKSHQLVVQLMQQAAKQGHVNLTVRRKVVFAVPKTENEVPSPASSHHSSNQPASLTEEKRTPQGSQNSLNTVSSGSGSTSGIGSGGGGGSGVVSTVVQPYDVEIRRGENEGFGFVIVSSVSRPEAGTTFESSNATLLTNAEKIATITTTHTPSQQGTQETRNTTKPKQESQFEFKAPQATQEQDFYTVELERGAKGFGFSLRGGREYNMDLYVLRLAEDGPAERCGKMRIGDEILEINGETTKNMKHSRAIELIKNGGRRVRLFLKRGDGSVPEYGGSNYENIPSFPGMTP

SEQ ID NO: 30369 - protein, 145 aa, Artificial Sequence
  Synthetic polypeptide
HVSPGVWRITCWYLTPVCRNLKIPFSLVQFPLWESLKALWSWRQDHVVDSWQSAVCGAFAGGFAAAVTTPLDVAKTRITLAKAGSSTADGNVLSVLHGVWRSQGLAGLFAGVFPRMAAISLGGFIFLGAYDRTHSLLLEVGRKSP

SEQ ID NO: 30370 - protein, 90 aa, Artificial Sequence
  Synthetic polypeptide
SLTCVPWSLEDNLLVSDSCLQKPEDSFFFGPVSLMGVLKSPLVLEAGSCGGFLAVSSLWSFCRWICRCSHHPSRRGKDKNYAGKGWLQHC

SEQ ID NO: 30371 - protein, 45 aa, Artificial Sequence
  Synthetic polypeptide
HVSPGVWRITCWYLTPVCRNLKIPFSLVQFPLWESLKGWKPYNCF

SEQ ID NO: 30372 - protein, 44 aa, Artificial Sequence
  Synthetic polypeptide
SLTCVPWSLEDNLLVSDSCLQKPEDSFFFGPVSLMGVLKRLEAI

SEQ ID NO: 30373 - protein, 169 aa, Artificial Sequence
  Synthetic polypeptide
HVSPGVWRITCWYLTPVCRNLKIPFSLVQFPLWESLKALWSWRQDHVVDSWQSAVCGAFAGGFAAAVTTPLDVAKTRITLAKAGSSTADGNVLSVLHGVWRSQGLAGDHIPGIFLQEQSSGLPLQRVGRQLPGLRASQLAVPPPHPDAELDHLCDCSFCVPLAVLISAI

SEQ ID NO: 30374 - protein, 88 aa, Artificial Sequence
  Synthetic polypeptide
KEESINATITIFRNFHSHSNLQQPLPWSVSSHHSKQDPLSARRLQFTAGSDAHEHFLAIKHFKIKIICRCLPSNGSHQSGRFHLSGGL

SEQ ID NO: 30375 - protein, 44 aa, Artificial Sequence
  Synthetic polypeptide
SILKLRLFAGVFPRMAAISLGGFIFLGAYDRTHSLLLEVGRKSP

SEQ ID NO: 30376 - protein, 100 aa, Artificial Sequence
  Synthetic polypeptide
RETARGSGTNMDFTVEAILVNIFGGIVNCAIIANGITKACRELELKVPLVVRLEGTFMEKKGSYMHIKQETGNSNENITGIQENVAHQNLSKCAISIFLC

SEQ ID NO: 30377 - protein, 42 aa, Artificial Sequence
  Synthetic polypeptide
ERLPEGVERTWTLQLKPSLSIYLVVSSTVPSLPMGSPKPAGS

SEQ ID NO: 30378 - protein, 14 aa, Artificial Sequence
  Synthetic polypeptide
RDCQREWNEHGLYS

SEQ ID NO: 30379 - protein, 92 aa, Artificial Sequence
  Synthetic polypeptide
RETARGSGTNMDFTVEAILVNIFGGIVNCAIIANGITKACRELELKVPLVVRLEGTNVQEAQKILNNSGLPITSAIDLEDAAKKAVASVAKK

SEQ ID NO: 30380 - protein, 410 aa, Artificial Sequence
  Synthetic polypeptide
SLALSSPIFHLALKSELESPPCMEGGIWWEVIGSWRWFPLCCSHDDAKEIVLKAQILAGGRGKGVFNSGLKGGVHLTKDPNVVGQLAKQMIGYNLATKQTPKEGVKVNKVMVAEALDISRETYLAILMDRSCNGPVLVGSPQGGVDIEEVAASNPELIFKEQIDIFEGIKDSQAQRMAENLGFVGPLKSQAADQITKLYNLFLKIDATQVEVNPFGETPEGQVVCFDAKINFDDNAEFRQKDIFAMDDKSENEPIENEAAKYDLKYIGLDGNIACFVNGAGLAMATCDIIFLNGGKPANFLDLGGGVKEAQVYQAFKLLTADPKVEAILVNIFGGIVNCAIIANGITKACRELELKVPLVVRLEGTFMEKKGSYMHIKQETGNSNENITGIQENVAHQNLSKCAISIFLC

SEQ ID NO: 30381 - protein, 20 aa, Artificial Sequence
  Synthetic polypeptide
LDHGGGFPYAVLMMMQKKLF

SEQ ID NO: 30382 - protein, 402 aa, Artificial Sequence
  Synthetic polypeptide
SLALSSPIFHLALKSELESPPCMEGGIWWEVIGSWRWFPLCCSHDDAKEIVLKAQILAGGRGKGVFNSGLKGGVHLTKDPNVVGQLAKQMIGYNLATKQTPKEGVKVNKVMVAEALDISRETYLAILMDRSCNGPVLVGSPQGGVDIEEVAASNPELIFKEQIDIFEGIKDSQAQRMAENLGFVGPLKSQAADQITKLYNLFLKIDATQVEVNPFGETPEGQVVCFDAKINFDDNAEFRQKDIFAMDDKSENEPIENEAAKYDLKYIGLDGNIACFVNGAGLAMATCDIIFLNGGKPANFLDLGGGVKEAQVYQAFKLLTADPKVEAILVNIFGGIVNCAIIANGITKACRELELKVPLVVRLEGTNVQEAQKILNNSGLPITSAIDLEDAAKKAVASVAKK

SEQ ID NO: 30383 - protein, 349 aa, Artificial Sequence
  Synthetic polypeptide
SLALSSPIFHLALKSELESPPCMEGGIWWEVIGSWRWFPLCCSHDDAKEIVLKAQILAGGRGKGVFNSGLKGGVHLTKDPNVVGQLAKQMIGYNLATKQTPKEGVKVNKVMVAEALDISRETYLAILMDRSCNGPVLVGSPQGGVDIEEVAASNPELIFKEQIDIFEGIKDSQAQRMAENLGFVGPLKSQAADQITKLYNLFLKIDATQVEVNPFGETPEGQVVCFDAKINFDDNAEFRQKDIFAMDDKSENEPIENEAAKYDLKYIGLDGNIACFVNGAGLAMATCDIIFLNGGKPANFLDLGGGVKEAQVYQAFKLLTADPKQQNLKARNTWAPEYRTQKHVLEAWK

SEQ ID NO: 30384 - protein, 54 aa, Artificial Sequence
  Synthetic polypeptide
LGSRVSGYDDTSSYHSPANAADPPATSAEPSAAPGSPPAAAGPHASTAAASRVL

SEQ ID NO: 30385 - protein, 13 aa, Artificial Sequence
  Synthetic polypeptide
RVPRLIRFPCQWL

SEQ ID NO: 30386 - protein, 49 aa, Artificial Sequence
  Synthetic polypeptide
FRAWTLEPKLPRFKSQPSHFPDVRLRKTSDQFSAGGTTSGTTVCHPTTP

SEQ ID NO: 30387 - protein, 201 aa, Artificial Sequence
  Synthetic polypeptide
SEPGLWSPSCLGSSLSPVTSQMCDSGKPRINSQLVAQQVAQQYATPPPPKKEKKEKVEKQDKEKPEKDKEISPSVTKKNTNKKTKPKSDILKDPPSEANSIQSANATTKTSETNHTSRPRLKNVDRSTAQQLAVTVGNVTVIITDFKEKTRSSSTSSSTVTSSAGSEQQNQSSSGSESTDKGSSRSSTPKGDMSAVNDESF

SEQ ID NO: 30388 - protein, 90 aa, Artificial Sequence
  Synthetic polypeptide
QSLDSGAQAASVQVSAQSLPRCATQENLGSILSWWHNKWHNSMPPHHPLKRRRRRKLKSRTKRNLRKTRKLVLVLPRKIPTRKPNQSLTF

SEQ ID NO: 30389 - protein, 42 aa, Artificial Sequence
  Synthetic polypeptide
FRAWTLEPKLPRFKSQPSHFPDVRLRAKKTSETCRRRRVLGL

SEQ ID NO: 30390 - protein, 243 aa, Artificial Sequence
  Synthetic polypeptide
SEPGLWSPSCLGSSLSPVTSQMCDSGPKRQAKPAADEGFWDCSVCTFRNSAEAFKCSICDVRKGTSTRKPRINSQLVAQQVAQQYATPPPPKKEKKEKVEKQDKEKPEKDKEISPSVTKKNTNKKTKPKSDILKDPPSEANSIQSANATTKTSETNHTSRPRLKNVDRSTAQQLAVTVGNVTVIITDFKEKTRSSSTSSSTVTSSAGSEQQNQSSSGSESTDKGSSRSSTPKGDMSAVNDESF

SEQ ID NO: 30391 - protein, 60 aa, Artificial Sequence
  Synthetic polypeptide
QSLDSGAQAASVQVSAQSLPRCATQGQKDKRNLPQTKGFGIVASAPSETVLKPLNAASAM

SEQ ID NO: 30392 - protein, 33 aa, Artificial Sequence
  Synthetic polypeptide
FYIMDRVFARRTFPRGLWSILPMSSSLRASPRL

SEQ ID NO: 30393 - protein, 80 aa, Artificial Sequence
  Synthetic polypeptide
ILKGARTLFVNCAFEGSGLRAAYENLMPDDLSLSPIPPDGTVYLQENKLKTVTDSTLWIASSPGGLSPADCGASFRCHRL

SEQ ID NO: 30394 - protein, 1389 aa, Artificial Sequence
  Synthetic polypeptide
CLMIFHCLPSPQMGLSTYRKTNSRLSLILHYGSRLRQEDFPPRIVEHPSDVIVSKGEPTTLNCKAEGRPTPTIEWYKDGERVETDKDDPRSHRMLLPSGSLFFLRIVHGRRSKPDEGSYVCVARNYLGEAVSRNASLEVALLRDDFRQNPTDVVVAAGEPAILECQPPRGHPEPTIYWKKDKVRIDDKEERISIRGGKLMISNTRKSDAGMYTCVGTNMVGERDSDPAELTVFERPTFLRRPINQVVLEEEAVEFRCQVQGDPQPTVRWKKDDADLPRGRYDIKDDYTLRIKKTMSTDEGTYMCIAENRVGKMEASATLTVRAPPQFVVRPRDQIVAQGRTVTFPCETKGNPQPAVFWQKEGSQNLLFPNQPQQPNSRCSVSPTGDLTITNIQRSDAGYYICQALTVAGSILAKAQLEVTDVLTDRPPPIILQGPANQTLAVDGTALLKCKATGDPLPVISWLKEGFTFPGRDPRATIQEQGTLQIKNLRISDTGTYTCVATSSSGETSWSAVLDVTESGATISKNYDLSDLPGPPSKPQVTDVTKNSVTLSWQPGTPGTLPASAYIIEAFSQSVSNSWQTVANHVKTTLYTVRGLRPNTIYLFMVRAINPQGLSDPSPMSDPVRTQDISPPAQGVDHRQVQKELGDVLVRLHNPVVLTPTTVQVTWTVDRQPQFIQGYRVMYRQTSGLQATSSWQNLDAKVPTERSAVLVNLKKGVTYEIKVRPYFNEFQGMDSESKTVRTTEEAPSAPPQSVTVLTVGSYNSTSISVSWDPPPPDHQNGIIQEYKIWCLGNETRFHINKTVDAAIRSVIIGGLFPGIQYRVEVAASTSAGVGVKSEPQPIIIGRRNEVVITENNNSITEQITDVVKQPAFIAGIGGACWVILMGFSIWLYWRRKKRKGLSNYAVTFQRGDGGLMSNGSRPGLLNAGDPSYPWLADSWPATSLPVNNSNSGPNEIGNFGRGDVLPPVPGQGDKTATMLSDGAIYSSIDFTTKTSYNSSSQITQATPYATTQILHSNSIHELAVDLPDPQWKSSIQQKTDLMGFGYSLPDQNKGNNGGKGGKKKKNKNSSKPQKNNGSTWANVPLPPPPVQPLPGTELEHYAVEQQENGYDSDSWCPPLPVQTYLHQGLEDELEEDDDRVPTPPVRGVASSPAISFGQQSTATLTPSPREEMQPMLQAHLDELTRAYQFDIAKQTWHIQSNNQPPQPPVPPLGYVSGALISDLETDVADDDADDEEEALEIPRPLRALDQTPGSSMDNLDSSVTGKAFTSSQRPRPTSPFSTDSNTSAALSQSQRPRPTKKHKGGRMDQQPALPHRREGMTDEEALVPYSKPSFPSPGGHSSSGTASSKGSTGPRKTEVLRAGHQRNASDLLDIGYMGSNSQGQFTGEL

SEQ ID NO: 30395 - protein, 1065 aa, Artificial Sequence
  Synthetic polypeptide
CLMIFHCLPSPQMGLSTYRKTNSRLSLILHYGSRLRQEDFPPRIVEHPSDVIVSKGEPTTLNCKAEGRPTPTIEWYKDGERVETDKDDPRSHRMLLPSGSLFFLRIVHGRRSKPDEGSYVCVARNYLGEAVSRNASLEVALLRDDFRQNPTDVVVAAGEPAILECQPPRGHPEPTIYWKKDKVRIDDKEERISIRGGKLMISNTRKSDAGMYTCVGTNMVGERDSDPAELTVFERPTFLRRPINQVVLEEEAVEFRCQVQGDPQPTVRWKKDDADLPRGRYDIKDDYTLRIKKTMSTDEGTYMCIAENRVGKMEASATLTVRARPVAPPQFVVRPRDQIVAQGRTVTFPCETKGNPQPAVFWQKEGSQNLLFPNQPQQPNSRCSVSPTGDLTITNIQRSDAGYYICQALTVAGSILAKAQLEVTDVLTDRPPPIILQGPANQTLAVDGTALLKCKATGDPLPVISWLKEGFTFPGRDPRATIQEQGTLQIKNLRISDTGTYTCVATSSSGETSWSAVLDVTESGATISKNYDLSDLPGPPSKPQVTDVTKNSVTLSWQPGTPGTLPASAYIIEAFSQSVSNSWQTVANHVKTTLYTVRGLRPNTIYLFMVRAINPQGLSDPSPMSDPVRTQDISPPAQGVDHRQVQKELGDVLVRLHNPVVLTPTTVQVTWTVDRQPQFIQGYRVMYRQTSGLQATSSWQNLDAKVPTERSAVLVNLKKGVTYEIKVRPYFNEFQGMDSESKTVRTTEEAPSAPPQSVTVLTVGSYNSTSISVSWDPPPPDHQNGIIQEYKIWCLGNETRFHINKTVDAAIRSVIIGGLFPGIQYRVEVAASTSAGVGVKSEPQPIIIGRRNEVVITENNNSITEQITDVVKQPAFIAGIGGACWVILMGFSIWLYWRRKKRKGLSNYAVTFQRGDGGLMSNGSRPGLLNAGDPSYPWLADSWPATSLPVNNSNSGPNEIGNFGRGDVLPPVPGQGDKTATMLSDGAIYSSIDFTTKTSYNSSSQITQATPYATTQILHSNSIHELAVDLPDPQWKSSIQQKTDLMGFGYSLPDQNKGNNGGKGG

SEQ ID NO: 30396 - protein, 1450 aa, Artificial Sequence
  Synthetic polypeptide
CLMIFHCLPSPQMGLSTYRKTNSRLSLILHYGSRLRQEDFPPRIVEHPSDVIVSKGEPTTLNCKAEGRPTPTIEWYKDGERVETDKDDPRSHRMLLPSGSLFFLRIVHGRRSKPDEGSYVCVARNYLGEAVSRNASLEVALLRDDFRQNPTDVVVAAGEPAILECQPPRGHPEPTIYWKKDKVRIDDKEERISIRGGKLMISNTRKSDAGMYTCVGTNMVGERDSDPAELTVFERPTFLRRPINQVVLEEEAVEFRCQVQGDPQPTVRWKKDDADLPRGRYDIKDDYTLRIKKTMSTDEGTYMCIAENRVGKMEASATLTVRAPPQFVVRPRDQIVAQGRTVTFPCETKGNPQPAVFWQKEGSQNLLFPNQPQQPNSRCSVSPTGDLTITNIQRSDAGYYICQALTVAGSILAKAQLEVTDVLTDRPPPIILQGPANQTLAVDGTALLKCKATGDPLPVISWLKEGFTFPGRDPRATIQEQGTLQIKNLRISDTGTYTCVATSSSGETSWSAVLDVTESGATISKNYDLSDLPGPPSKPQVTDVTKNSVTLSWQPGTPGTLPASAYIIEAFSQSVSNSWQTVANHVKTTLYTVRGLRPNTIYLFMVRAINPQGLSDPSPMSDPVRTQDISPPAQGVDHRQVQKELGDVLVRLHNPVVLTPTTVQVTWTVDRQPQFIQGYRVMYRQTSGLQATSSWQNLDAKVPTERSAVLVNLKKGVTYEIKVRPYFNEFQGMDSESKTVRTTEEAPSAPPQSVTVLTVGSYNSTSISVSWDPPPPDHQNGIIQEYKIWCLGNETRFHINKTVDAAIRSVIIGGLFPGIQYRVEVAASTSAGVGVKSEPQPIIIGRRNEVVITENNNSITEQITDVVKQPAFIAGIGGACWVILMGFSIWLYWRRKKRKGLSNYAVTFQRGDGGLMSNGSRPGLLNAGDPSYPWLADSWPATSLPVNNSNSGPNEIGNFGRGDVLPPVPGQGDKTATMLSDGAIYSSIDFTTKTSYNSSSQITQATPYATTQILHSNSIHELAVDLPDPQWKSSIQQKTDLMGFGYSLPDQNKGNNGGKGGKKKKNKNSSKPQKNNGSTWANVPLPPPPVQPLPGTELEHYAVEQQENGYDSDSWCPPLPVQTYLHQGLEDELEEDDDRVPTPPVRGVASSPAISFGQQSTATLTPSPREEMQPMLQAHLDELTRAYQFDIAKQTWHIQSNNQPPQPPVPPLGYVSGALISDLETDVADDDADDEEEALEIPRPLRALDQTPGSSMDNLDSSVTGSMVNGWGSASDEDRNFSSHRSSVGSSSDGSIFASGSFAQALVAAADKAGFRLDGTSLTRTGKAFTSSQRPRPTSPFSTDSNTSAALSQSQRPRPTKKHKGGRMDQQPALPHRREGMTDEEALVPYSKPSFPSPGGHSSSGTASSKGSTGPRKTEVLRAGHQRNASDLLDIGYMGSNSQGQFTGEL

SEQ ID NO: 30397 - protein, 575 aa, Artificial Sequence
  Synthetic polypeptide
CLMIFHCLPSPQMGLSTYRKTNSRLSLILHYGSRLRQEDFPPRIVEHPSDVIVSKGEPTTLNCKAEGRPTPTIEWYKDGERVETDKDDPRSHRMLLPSGSLFFLRIVHGRRSKPDEGSYVCVARNYLGEAVSRNASLEVALLRDDFRQNPTDVVVAAGEPAILECQPPRGHPEPTIYWKKDKVRIDDKEERISIRGGKLMISNTRKSDAGMYTCVGTNMVGERDSDPAELTVFERPTFLRRPINQVVLEEEAVEFRCQVQGDPQPTVRWKKDDADLPRGRYDIKDDYTLRIKKTMSTDEGTYMCIAENRVGKMEASATLTVRAPPQFVVRPRDQIVAQGRTVTFPCETKGNPQPAVFWQKEGSQNLLFPNQPQQPNSRCSVSPTGDLTITNIQRSDAGYYICQALTVAGSILAKAQLEVTDVLTDRPPPIILQGPANQTLAVDGTALLKCKATGDPLPVISWLKEGFTFPGRDPRATIQEQGTLQIKNLRISDTGTYTCVATSSSGETSWSAVLDVTESGATISKNYDLSDLPGPPSKPQVTDVTKNSVTLSWQPGTPGTLPASAYIIEAFRYVV

SEQ ID NO: 30398 - protein, 1286 aa, Artificial Sequence
  Synthetic polypeptide
VLTRSDPLKVFSTSPLLSLLLPPCEEGACFSLTFCHDLLRDDFRQNPTDVVVAAGEPAILECQPPRGHPEPTIYWKKDKVRIDDKEERISIRGGKLMISNTRKSDAGMYTCVGTNMVGERDSDPAELTVFERPTFLRRPINQVVLEEEAVEFRCQVQGDPQPTVRWKKDDADLPRGRYDIKDDYTLRIKKTMSTDEGTYMCIAENRVGKMEASATLTVRAPPQFVVRPRDQIVAQGRTVTFPCETKGNPQPAVFWQKEGSQNLLFPNQPQQPNSRCSVSPTGDLTITNIQRSDAGYYICQALTVAGSILAKAQLEVTDVLTDRPPPIILQGPANQTLAVDGTALLKCKATGDPLPVISWLKEGFTFPGRDPRATIQEQGTLQIKNLRISDTGTYTCVATSSSGETSWSAVLDVTESGATISKNYDLSDLPGPPSKPQVTDVTKNSVTLSWQPGTPGTLPASAYIIEAFSQSVSNSWQTVANHVKTTLYTVRGLRPNTIYLFMVRAINPQGLSDPSPMSDPVRTQDISPPAQGVDHRQVQKELGDVLVRLHNPVVLTPTTVQVTWTVDRQPQFIQGYRVMYRQTSGLQATSSWQNLDAKVPTERSAVLVNLKKGVTYEIKVRPYFNEFQGMDSESKTVRTTEEAPSAPPQSVTVLTVGSYNSTSISVSWDPPPPDHQNGIIQEYKIWCLGNETRFHINKTVDAAIRSVIIGGLFPGIQYRVEVAASTSAGVGVKSEPQPIIIGRRNEVVITENNNSITEQITDVVKQPAFIAGIGGACWVILMGFSIWLYWRRKKRKGLSNYAVTFQRGDGGLMSNGSRPGLLNAGDPSYPWLADSWPATSLPVNNSNSGPNEIGNFGRGDVLPPVPGQGDKTATMLSDGAIYSSIDFTTKTSYNSSSQITQATPYATTQILHSNSIHELAVDLPDPQWKSSIQQKTDLMGFGYSLPDQNKGNNGGKGGKKKKNKNSSKPQKNNGSTWANVPLPPPPVQPLPGTELEHYAVEQQENGYDSDSWCPPLPVQTYLHQGLEDELEEDDDRVPTPPVRGVASSPAISFGQQSTATLTPSPREEMQPMLQAHLDELTRAYQFDIAKQTWHIQSNNQPPQPPVPPLGYVSGALISDLETDVADDDADDEEEALEIPRPLRALDQTPGSSMDNLDSSVTGKAFTSSQRPRPTSPFSTDSNTSAALSQSQRPRPTKKHKGGRMDQQPALPHRREGMTDEEALVPYSKPSFPSPGGHSSSGTASSKGSTGPRKTEVLRAGHQRNASDLLDIGYMGSNSQGQFTGEL

SEQ ID NO: 30399 - protein, 18 aa, Artificial Sequence
  Synthetic polypeptide
PSAMICYEMTSDKTPQML

SEQ ID NO: 30400 - protein, 962 aa, Artificial Sequence
  Synthetic polypeptide
VLTRSDPLKVFSTSPLLSLLLPPCEEGACFSLTFCHDLLRDDFRQNPTDVVVAAGEPAILECQPPRGHPEPTIYWKKDKVRIDDKEERISIRGGKLMISNTRKSDAGMYTCVGTNMVGERDSDPAELTVFERPTFLRRPINQVVLEEEAVEFRCQVQGDPQPTVRWKKDDADLPRGRYDIKDDYTLRIKKTMSTDEGTYMCIAENRVGKMEASATLTVRARPVAPPQFVVRPRDQIVAQGRTVTFPCETKGNPQPAVFWQKEGSQNLLFPNQPQQPNSRCSVSPTGDLTITNIQRSDAGYYICQALTVAGSILAKAQLEVTDVLTDRPPPIILQGPANQTLAVDGTALLKCKATGDPLPVISWLKEGFTFPGRDPRATIQEQGTLQIKNLRISDTGTYTCVATSSSGETSWSAVLDVTESGATISKNYDLSDLPGPPSKPQVTDVTKNSVTLSWQPGTPGTLPASAYIIEAFSQSVSNSWQTVANHVKTTLYTVRGLRPNTIYLFMVRAINPQGLSDPSPMSDPVRTQDISPPAQGVDHRQVQKELGDVLVRLHNPVVLTPTTVQVTWTVDRQPQFIQGYRVMYRQTSGLQATSSWQNLDAKVPTERSAVLVNLKKGVTYEIKVRPYFNEFQGMDSESKTVRTTEEAPSAPPQSVTVLTVGSYNSTSISVSWDPPPPDHQNGIIQEYKIWCLGNETRFHINKTVDAAIRSVIIGGLFPGIQYRVEVAASTSAGVGVKSEPQPIIIGRRNEVVITENNNSITEQITDVVKQPAFIAGIGGACWVILMGFSIWLYWRRKKRKGLSNYAVTFQRGDGGLMSNGSRPGLLNAGDPSYPWLADSWPATSLPVNNSNSGPNEIGNFGRGDVLPPVPGQGDKTATMLSDGAIYSSIDFTTKTSYNSSSQITQATPYATTQILHSNSIHELAVDLPDPQWKSSIQQKTDLMGFGYSLPDQNKGNNGGKGG

SEQ ID NO: 30401 - protein, 1347 aa, Artificial Sequence
  Synthetic polypeptide
VLTRSDPLKVFSTSPLLSLLLPPCEEGACFSLTFCHDLLRDDFRQNPTDVVVAAGEPAILECQPPRGHPEPTIYWKKDKVRIDDKEERISIRGGKLMISNTRKSDAGMYTCVGTNMVGERDSDPAELTVFERPTFLRRPINQVVLEEEAVEFRCQVQGDPQPTVRWKKDDADLPRGRYDIKDDYTLRIKKTMSTDEGTYMCIAENRVGKMEASATLTVRAPPQFVVRPRDQIVAQGRTVTFPCETKGNPQPAVFWQKEGSQNLLFPNQPQQPNSRCSVSPTGDLTITNIQRSDAGYYICQALTVAGSILAKAQLEVTDVLTDRPPPIILQGPANQTLAVDGTALLKCKATGDPLPVISWLKEGFTFPGRDPRATIQEQGTLQIKNLRISDTGTYTCVATSSSGETSWSAVLDVTESGATISKNYDLSDLPGPPSKPQVTDVTKNSVTLSWQPGTPGTLPASAYIIEAFSQSVSNSWQTVANHVKTTLYTVRGLRPNTIYLFMVRAINPQGLSDPSPMSDPVRTQDISPPAQGVDHRQVQKELGDVLVRLHNPVVLTPTTVQVTWTVDRQPQFIQGYRVMYRQTSGLQATSSWQNLDAKVPTERSAVLVNLKKGVTYEIKVRPYFNEFQGMDSESKTVRTTEEAPSAPPQSVTVLTVGSYNSTSISVSWDPPPPDHQNGIIQEYKIWCLGNETRFHINKTVDAAIRSVIIGGLFPGIQYRVEVAASTSAGVGVKSEPQPIIIGRRNEVVITENNNSITEQITDVVKQPAFIAGIGGACWVILMGFSIWLYWRRKKRKGLSNYAVTFQRGDGGLMSNGSRPGLLNAGDPSYPWLADSWPATSLPVNNSNSGPNEIGNFGRGDVLPPVPGQGDKTATMLSDGAIYSSIDFTTKTSYNSSSQITQATPYATTQILHSNSIHELAVDLPDPQWKSSIQQKTDLMGFGYSLPDQNKGNNGGKGGKKKKNKNSSKPQKNNGSTWANVPLPPPPVQPLPGTELEHYAVEQQENGYDSDSWCPPLPVQTYLHQGLEDELEEDDDRVPTPPVRGVASSPAISFGQQSTATLTPSPREEMQPMLQAHLDELTRAYQFDIAKQTWHIQSNNQPPQPPVPPLGYVSGALISDLETDVADDDADDEEEALEIPRPLRALDQTPGSSMDNLDSSVTGSMVNGWGSASDEDRNFSSHRSSVGSSSDGSIFASGSFAQALVAAADKAGFRLDGTSLTRTGKAFTSSQRPRPTSPFSTDSNTSAALSQSQRPRPTKKHKGGRMDQQPALPHRREGMTDEEALVPYSKPSFPSPGGHSSSGTASSKGSTGPRKTEVLRAGHQRNASDLLDIGYMGSNSQGQFTGEL

SEQ ID NO: 30402 - protein, 472 aa, Artificial Sequence
  Synthetic polypeptide
VLTRSDPLKVFSTSPLLSLLLPPCEEGACFSLTFCHDLLRDDFRQNPTDVVVAAGEPAILECQPPRGHPEPTIYWKKDKVRIDDKEERISIRGGKLMISNTRKSDAGMYTCVGTNMVGERDSDPAELTVFERPTFLRRPINQVVLEEEAVEFRCQVQGDPQPTVRWKKDDADLPRGRYDIKDDYTLRIKKTMSTDEGTYMCIAENRVGKMEASATLTVRAPPQFVVRPRDQIVAQGRTVTFPCETKGNPQPAVFWQKEGSQNLLFPNQPQQPNSRCSVSPTGDLTITNIQRSDAGYYICQALTVAGSILAKAQLEVTDVLTDRPPPIILQGPANQTLAVDGTALLKCKATGDPLPVISWLKEGFTFPGRDPRATIQEQGTLQIKNLRISDTGTYTCVATSSSGETSWSAVLDVTESGATISKNYDLSDLPGPPSKPQVTDVTKNSVTLSWQPGTPGTLPASAYIIEAFRYVV

SEQ ID NO: 30403 - protein, 11 aa, Artificial Sequence
  Synthetic polypeptide
GLPSHAEHVTR

SEQ ID NO: 30404 - protein, 1298 aa, Artificial Sequence
  Synthetic polypeptide
VLTRSDPLKVFSTSPLLSLLLPPCEEGACFSLTFCHDCKFPEASPAMQNMLRDDFRQNPTDVVVAAGEPAILECQPPRGHPEPTIYWKKDKVRIDDKEERISIRGGKLMISNTRKSDAGMYTCVGTNMVGERDSDPAELTVFERPTFLRRPINQVVLEEEAVEFRCQVQGDPQPTVRWKKDDADLPRGRYDIKDDYTLRIKKTMSTDEGTYMCIAENRVGKMEASATLTVRAPPQFVVRPRDQIVAQGRTVTFPCETKGNPQPAVFWQKEGSQNLLFPNQPQQPNSRCSVSPTGDLTITNIQRSDAGYYICQALTVAGSILAKAQLEVTDVLTDRPPPIILQGPANQTLAVDGTALLKCKATGDPLPVISWLKEGFTFPGRDPRATIQEQGTLQIKNLRISDTGTYTCVATSSSGETSWSAVLDVTESGATISKNYDLSDLPGPPSKPQVTDVTKNSVTLSWQPGTPGTLPASAYIIEAFSQSVSNSWQTVANHVKTTLYTVRGLRPNTIYLFMVRAINPQGLSDPSPMSDPVRTQDISPPAQGVDHRQVQKELGDVLVRLHNPVVLTPTTVQVTWTVDRQPQFIQGYRVMYRQTSGLQATSSWQNLDAKVPTERSAVLVNLKKGVTYEIKVRPYFNEFQGMDSESKTVRTTEEAPSAPPQSVTVLTVGSYNSTSISVSWDPPPPDHQNGIIQEYKIWCLGNETRFHINKTVDAAIRSVIIGGLFPGIQYRVEVAASTSAGVGVKSEPQPIIIGRRNEVVITENNNSITEQITDVVKQPAFIAGIGGACWVILMGFSIWLYWRRKKRKGLSNYAVTFQRGDGGLMSNGSRPGLLNAGDPSYPWLADSWPATSLPVNNSNSGPNEIGNFGRGDVLPPVPGQGDKTATMLSDGAIYSSIDFTTKTSYNSSSQITQATPYATTQILHSNSIHELAVDLPDPQWKSSIQQKTDLMGFGYSLPDQNKGNNGGKGGKKKKNKNSSKPQKNNGSTWANVPLPPPPVQPLPGTELEHYAVEQQENGYDSDSWCPPLPVQTYLHQGLEDELEEDDDRVPTPPVRGVASSPAISFGQQSTATLTPSPREEMQPMLQAHLDELTRAYQFDIAKQTWHIQSNNQPPQPPVPPLGYVSGALISDLETDVADDDADDEEEALEIPRPLRALDQTPGSSMDNLDSSVTGKAFTSSQRPRPTSPFSTDSNTSAALSQSQRPRPTKKHKGGRMDQQPALPHRREGMTDEEALVPYSKPSFPSPGGHSSSGTASSKGSTGPRKTEVLRAGHQRNASDLLDIGYMGSNSQGQFTGEL

SEQ ID NO: 30405 - protein, 30 aa, Artificial Sequence
  Synthetic polypeptide
PSAMIVSFLRPPQPCRTCYEMTSDKTPQML

SEQ ID NO: 30406 - protein, 974 aa, Artificial Sequence
  Synthetic polypeptide
VLTRSDPLKVFSTSPLLSLLLPPCEEGACFSLTFCHDCKFPEASPAMQNMLRDDFRQNPTDVVVAAGEPAILECQPPRGHPEPTIYWKKDKVRIDDKEERISIRGGKLMISNTRKSDAGMYTCVGTNMVGERDSDPAELTVFERPTFLRRPINQVVLEEEAVEFRCQVQGDPQPTVRWKKDDADLPRGRYDIKDDYTLRIKKTMSTDEGTYMCIAENRVGKMEASATLTVRARPVAPPQFVVRPRDQIVAQGRTVTFPCETKGNPQPAVFWQKEGSQNLLFPNQPQQPNSRCSVSPTGDLTITNIQRSDAGYYICQALTVAGSILAKAQLEVTDVLTDRPPPIILQGPANQTLAVDGTALLKCKATGDPLPVISWLKEGFTFPGRDPRATIQEQGTLQIKNLRISDTGTYTCVATSSSGETSWSAVLDVTESGATISKNYDLSDLPGPPSKPQVTDVTKNSVTLSWQPGTPGTLPASAYIIEAFSQSVSNSWQTVANHVKTTLYTVRGLRPNTIYLFMVRAINPQGLSDPSPMSDPVRTQDISPPAQGVDHRQVQKELGDVLVRLHNPVVLTPTTVQVTWTVDRQPQFIQGYRVMYRQTSGLQATSSWQNLDAKVPTERSAVLVNLKKGVTYEIKVRPYFNEFQGMDSESKTVRTTEEAPSAPPQSVTVLTVGSYNSTSISVSWDPPPPDHQNGIIQEYKIWCLGNETRFHINKTVDAAIRSVIIGGLFPGIQYRVEVAASTSAGVGVKSEPQPIIIGRRNEVVITENNNSITEQITDVVKQPAFIAGIGGACWVILMGFSIWLYWRRKKRKGLSNYAVTFQRGDGGLMSNGSRPGLLNAGDPSYPWLADSWPATSLPVNNSNSGPNEIGNFGRGDVLPPVPGQGDKTATMLSDGAIYSSIDFTTKTSYNSSSQITQATPYATTQILHSNSIHELAVDLPDPQWKSSIQQKTDLMGFGYSLPDQNKGNNGGKGG

SEQ ID NO: 30407 - protein, 1359 aa, Artificial Sequence
  Synthetic polypeptide
VLTRSDPLKVFSTSPLLSLLLPPCEEGACFSLTFCHDCKFPEASPAMQNMLRDDFRQNPTDVVVAAGEPAILECQPPRGHPEPTIYWKKDKVRIDDKEERISIRGGKLMISNTRKSDAGMYTCVGTNMVGERDSDPAELTVFERPTFLRRPINQVVLEEEAVEFRCQVQGDPQPTVRWKKDDADLPRGRYDIKDDYTLRIKKTMSTDEGTYMCIAENRVGKMEASATLTVRAPPQFVVRPRDQIVAQGRTVTFPCETKGNPQPAVFWQKEGSQNLLFPNQPQQPNSRCSVSPTGDLTITNIQRSDAGYYICQALTVAGSILAKAQLEVTDVLTDRPPPIILQGPANQTLAVDGTALLKCKATGDPLPVISWLKEGFTFPGRDPRATIQEQGTLQIKNLRISDTGTYTCVATSSSGETSWSAVLDVTESGATISKNYDLSDLPGPPSKPQVTDVTKNSVTLSWQPGTPGTLPASAYIIEAFSQSVSNSWQTVANHVKTTLYTVRGLRPNTIYLFMVRAINPQGLSDPSPMSDPVRTQDISPPAQGVDHRQVQKELGDVLVRLHNPVVLTPTTVQVTWTVDRQPQFIQGYRVMYRQTSGLQATSSWQNLDAKVPTERSAVLVNLKKGVTYEIKVRPYFNEFQGMDSESKTVRTTEEAPSAPPQSVTVLTVGSYNSTSISVSWDPPPPDHQNGIIQEYKIWCLGNETRFHINKTVDAAIRSVIIGGLFPGIQYRVEVAASTSAGVGVKSEPQPIIIGRRNEVVITENNNSITEQITDVVKQPAFIAGIGGACWVILMGFSIWLYWRRKKRKGLSNYAVTFQRGDGGLMSNGSRPGLLNAGDPSYPWLADSWPATSLPVNNSNSGPNEIGNFGRGDVLPPVPGQGDKTATMLSDGAIYSSIDFTTKTSYNSSSQITQATPYATTQILHSNSIHELAVDLPDPQWKSSIQQKTDLMGFGYSLPDQNKGNNGGKGGKKKKNKNSSKPQKNNGSTWANVPLPPPPVQPLPGTELEHYAVEQQENGYDSDSWCPPLPVQTYLHQGLEDELEEDDDRVPTPPVRGVASSPAISFGQQSTATLTPSPREEMQPMLQAHLDELTRAYQFDIAKQTWHIQSNNQPPQPPVPPLGYVSGALISDLETDVADDDADDEEEALEIPRPLRALDQTPGSSMDNLDSSVTGSMVNGWGSASDEDRNFSSHRSSVGSSSDGSIFASGSFAQALVAAADKAGFRLDGTSLTRTGKAFTSSQRPRPTSPFSTDSNTSAALSQSQRPRPTKKHKGGRMDQQPALPHRREGMTDEEALVPYSKPSFPSPGGHSSSGTASSKGSTGPRKTEVLRAGHQRNASDLLDIGYMGSNSQGQFTGEL

SEQ ID NO: 30408 - protein, 484 aa, Artificial Sequence
  Synthetic polypeptide
VLTRSDPLKVFSTSPLLSLLLPPCEEGACFSLTFCHDCKFPEASPAMQNMLRDDFRQNPTDVVVAAGEPAILECQPPRGHPEPTIYWKKDKVRIDDKEERISIRGGKLMISNTRKSDAGMYTCVGTNMVGERDSDPAELTVFERPTFLRRPINQVVLEEEAVEFRCQVQGDPQPTVRWKKDDADLPRGRYDIKDDYTLRIKKTMSTDEGTYMCIAENRVGKMEASATLTVRAPPQFVVRPRDQIVAQGRTVTFPCETKGNPQPAVFWQKEGSQNLLFPNQPQQPNSRCSVSPTGDLTITNIQRSDAGYYICQALTVAGSILAKAQLEVTDVLTDRPPPIILQGPANQTLAVDGTALLKCKATGDPLPVISWLKEGFTFPGRDPRATIQEQGTLQIKNLRISDTGTYTCVATSSSGETSWSAVLDVTESGATISKNYDLSDLPGPPSKPQVTDVTKNSVTLSWQPGTPGTLPASAYIIEAFRYVV

SEQ ID NO: 30409 - protein, 57 aa, Artificial Sequence
  Synthetic polypeptide
AKGLDFSTSVNLPRSHGWQTRGLILATTTMTAPSAAARQAMETATATSLPTVAQLIV

SEQ ID NO: 30410 - protein, 17 aa, Artificial Sequence
  Synthetic polypeptide
EQCLTHYKQRAWTSQHQ

SEQ ID NO: 30411 - protein, 700 aa, Artificial Sequence
  Synthetic polypeptide
NNASHIISKGPGLLNISEPAAQPWLADTWPNTGNNHNDCSISCCTAGNGNSDSNLTTYSRPADCIANYNNQLDNKQTNLMLPESTVYGDVDLSNKINEMKTFNSPNLKDGRFVNPSGQPTPYATTQLIQSNLSNNMNNGSGDSGEKHWKPLGQQKQEVAPVQYNIVEQNKLNKDYRANDTVPPTIPYNQSYDQNTGGSYNSSDRGSSTSGSQGHKKGARTPKVPKQGGMNWADLLPPPPAHPPPHSNSEEYNISVDESYDQEMPCPVPPARMYLQQDELEEEEDERGPTPPVRGAASSPAAVSYSHQSTATLTPSPQEELQPMLQDCPEETGHMQHQPDRRRQPVSPPPPPRPISPPHTYGYISGPLVSDMDTDAPEEEEDEADMEVAKMQTRRLLLRGLEQTPASSVGDLESSVTGSMINGWGSASEEDNISSGRSSVSSSDGSFFTDADFAQAVAAAAEYAGLKVARRQMQDAAGRRHFHASQCPRPTSPVSTDSNMSAAVMQKTRPAKKLKHQPGHLRRETYTDDLPPPPVPPPAIKSPTAQSKTQLEVRPVVVPKLPSMDARTDRSSDRKGSSYKGREVLDGRQVVDMRTNPGDPREAQEQQNDGKGRGNKAAKRDLPPAKTHLIQEDILPYCRPTFPTSNNPRDPSSSSSMSSRGSGSRQREQANVGRRNIAEMQVLGGYERGEDNNEELEETES

SEQ ID NO: 30412 - protein, 73 aa, Artificial Sequence
  Synthetic polypeptide
AKGLDFSTSVNLPRSHGWQTRGLILATTTMTAPSAAARQAMETATATSLPTVAQGSLLLTPPLSSSSQTSATT

SEQ ID NO: 30413 - protein, 645 aa, Artificial Sequence
  Synthetic polypeptide
NNASHIISKGPGLLNISEPAAQPWLADTWPNTGNNHNDCSISCCTAGNGNSDSNLTTYSRPGQPTPYATTQLIQSNLSNNMNNGSGDSGEKHWKPLGQQKQEVAPVQYNIVEQNKLNKDYRANDTVPPTIPYNQSYDQNTGGSYNSSDRGSSTSGSQGHKKGARTPKVPKQGGMNWADLLPPPPAHPPPHSNSEEYNISVDESYDQEMPCPVPPARMYLQQDELEEEEDERGPTPPVRGAASSPAAVSYSHQSTATLTPSPQEELQPMLQDCPEETGHMQHQPDRRRQPVSPPPPPRPISPPHTYGYISGPLVSDMDTDAPEEEEDEADMEVAKMQTRRLLLRGLEQTPASSVGDLESSVTGSMINGWGSASEEDNISSGRSSVSSSDGSFFTDADFAQAVAAAAEYAGLKVARRQMQDAAGRRHFHASQCPRPTSPVSTDSNMSAAVMQKTRPAKKLKHQPGHLRRETYTDDLPPPPVPPPAIKSPTAQSKTQLEVRPVVVPKLPSMDARTDRSSDRKGSSYKGREVLDGRQVVDMRTNPGDPREAQEQQNDGKGRGNKAAKRDLPPAKTHLIQEDILPYCRPTFPTSNNPRDPSSSSSMSSRGSGSRQREQANVGRRNIAEMQVLGGYERGEDNNEELEETES

SEQ ID NO: 30414 - protein, 47 aa, Artificial Sequence
  Synthetic polypeptide
VLMRSDGFISVWHFPCWHSFSLLSPCEEVPSAMIVSFLRSPQPCGTI

SEQ ID NO: 30415 - protein, 1353 aa, Artificial Sequence
  Synthetic polypeptide
GLPSHVELYEIRDDHTLKIRKVTAGDMGSYTCVAENMVGKAEASATLTVQEPPHFVVKPRDQVVALGRTVTFQCEATGNPQPAIFWRREGSQNLLFSYQPPQSSSRFSVSQTGDLTITNVQRSDVGYYICQTLNVAGSIITKAYLEVTDVIADRPPPVIRQGPVNQTVAVDGTFVLSCVATGSPVPTILWRKDGVLVSTQDSRIKQLENGVLQIRYAKLGDTGRYTCIASTPSGEATWSAYIEVQEFGVPVQPPRPTDPNLIPSAPSKPEVTDVSRNTVTLSWQPNLNSGATPTSYIIEAFSHASGSSWQTVAENVKTETSAIKGLKPNAIYLFLVRAANAYGISDPSQISDPVKTQDVLPTSQGVDHKQVQRELGNAVLHLHNPTVLSSSSIEVHWTVDQQSQYIQGYKILYRPSGANHGESDWLVFEVRTPAKNSVVIPDLRKGVNYEIKARPFFNEFQGADSEIKFAKTLEEAPSAPPQGVTVSKNDGNGTAILVSWQPPPEDTQNGMVQEYKVWCLGNETRYHINKTVDGSTFSVVIPFLVPGIRYSVEVAASTGAGSGVKSEPQFIQLDAHGNPVSPEDQVSLAQQISDVVKQPAFIAGIGAACWIILMVFSIWLYRHRKKRNGLTSTYAGIRKVPSFTFTPTVTYQRGGEAVSSGGRPGLLNISEPAAQPWLADTWPNTGNNHNDCSISCCTAGNGNSDSNLTTYSRPADCIANYNNQLDNKQTNLMLPESTVYGDVDLSNKINEMKTFNSPNLKDGRFVNPSGQPTPYATTQLIQSNLSNNMNNGSGDSGEKHWKPLGQQKQEVAPVQYNIVEQNKLNKDYRANDTVPPTIPYNQSYDQNTGGSYNSSDRGSSTSGSQGHKKGARTPKVPKQGGMNWADLLPPPPAHPPPHSNSEEYNISVDESYDQEMPCPVPPARMYLQQDELEEEEDERGPTPPVRGAASSPAAVSYSHQSTATLTPSPQEELQPMLQDCPEETGHMQHQPDRRRQPVSPPPPPRPISPPHTYGYISGPLVSDMDTDAPEEEEDEADMEVAKMQTRRLLLRGLEQTPASSVGDLESSVTGSMINGWGSASEEDNISSGRSSVSSSDGSFFTDADFAQAVAAAAEYAGLKVARRQMQDAAGRRHFHASQCPRPTSPVSTDSNMSAAVMQKTRPAKKLKHQPGHLRRETYTDDLPPPPVPPPAIKSPTAQSKTQLEVRPVVVPKLPSMDARTDRSSDRKGSSYKGREVLDGRQVVDMRTNPGDPREAQEQQNDGKGRGNKAAKRDLPPAKTHLIQEDILPYCRPTFPTSNNPRDPSSSSSMSSRGSGSRQREQANVGRRNIAEMQVLGGYERGEDNNEELEETES

SEQ ID NO: 30416 - protein, 28 aa, Artificial Sequence
  Synthetic polypeptide
RGAFRHDCKFPEVSPAMWNYMKSEMIIP

SEQ ID NO: 30417 - protein, 1347 aa, Artificial Sequence
  Synthetic polypeptide
GLPSHVELYEIRDDHTLKIRKVTAGDMGSYTCVAENMVGKAEASATLTVQVGSEPPHFVVKPRDQVVALGRTVTFQCEATGNPQPAIFWRREGSQNLLFSYQPPQSSSRFSVSQTGDLTITNVQRSDVGYYICQTLNVAGSIITKAYLEVTDVIADRPPPVIRQGPVNQTVAVDGTFVLSCVATGSPVPTILWRKDGVLVSTQDSRIKQLENGVLQIRYAKLGDTGRYTCIASTPSGEATWSAYIEVQEFGVPVQPPRPTDPNLIPSAPSKPEVTDVSRNTVTLSWQPNLNSGATPTSYIIEAFSHASGSSWQTVAENVKTETSAIKGLKPNAIYLFLVRAANAYGISDPSQISDPVKTQDVLPTSQGVDHKQVQRELGNAVLHLHNPTVLSSSSIEVHWTVDQQSQYIQGYKILYRPSGANHGESDWLVFEVRTPAKNSVVIPDLRKGVNYEIKARPFFNEFQGADSEIKFAKTLEEAPSAPPQGVTVSKNDGNGTAILVSWQPPPEDTQNGMVQEYKVWCLGNETRYHINKTVDGSTFSVVIPFLVPGIRYSVEVAASTGAGSGVKSEPQFIQLDAHGNPVSPEDQVSLAQQISDVVKQPAFIAGIGAACWIILMVFSIWLYRHRKKRNGLTSTYAGIRKVTYQRGGEAVSSGGRPGLLNISEPAAQPWLADTWPNTGNNHNDCSISCCTAGNGNSDSNLTTYSRPADCIANYNNQLDNKQTNLMLPESTVYGDVDLSNKINEMKTFNSPNLKDGRFVNPSGQPTPYATTQLIQSNLSNNMNNGSGDSGEKHWKPLGQQKQEVAPVQYNIVEQNKLNKDYRANDTVPPTIPYNQSYDQNTGGSYNSSDRGSSTSGSQGHKKGARTPKVPKQGGMNWADLLPPPPAHPPPHSNSEEYNISVDESYDQEMPCPVPPARMYLQQDELEEEEDERGPTPPVRGAASSPAAVSYSHQSTATLTPSPQEELQPMLQDCPEETGHMQHQPDRRRQPVSPPPPPRPISPPHTYGYISGPLVSDMDTDAPEEEEDEADMEVAKMQTRRLLLRGLEQTPASSVGDLESSVTGSMINGWGSASEEDNISSGRSSVSSSDGSFFTDADFAQAVAAAAEYAGLKVARRQMQDAAGRRHFHASQCPRPTSPVSTDSNMSAAVMQKTRPAKKLKHQPGHLRRETYTDDLPPPPVPPPAIKSPTAQSKTQLEVRPVVVPKLPSMDARTDRSSDRKGSSYKGREVLDGRQVVDMRTNPGDPREAQEQQNDGKGRGNKAAKRDLPPAKTHLIQEDILPYCRPTFPTSNNPRDPSSSSSMSSRGSGSRQREQANVGRRNIAEMQVLGGYERGEDNNEELEETES

SEQ ID NO: 30418 - protein, 1292 aa, Artificial Sequence
  Synthetic polypeptide
GLPSHVELYEIRDDHTLKIRKVTAGDMGSYTCVAENMVGKAEASATLTVQVGSEPPHFVVKPRDQVVALGRTVTFQCEATGNPQPAIFWRREGSQNLLFSYQPPQSSSRFSVSQTGDLTITNVQRSDVGYYICQTLNVAGSIITKAYLEVTDVIADRPPPVIRQGPVNQTVAVDGTFVLSCVATGSPVPTILWRKDGVLVSTQDSRIKQLENGVLQIRYAKLGDTGRYTCIASTPSGEATWSAYIEVQEFGVPVQPPRPTDPNLIPSAPSKPEVTDVSRNTVTLSWQPNLNSGATPTSYIIEAFSHASGSSWQTVAENVKTETSAIKGLKPNAIYLFLVRAANAYGISDPSQISDPVKTQDVLPTSQGVDHKQVQRELGNAVLHLHNPTVLSSSSIEVHWTVDQQSQYIQGYKILYRPSGANHGESDWLVFEVRTPAKNSVVIPDLRKGVNYEIKARPFFNEFQGADSEIKFAKTLEEAPSAPPQGVTVSKNDGNGTAILVSWQPPPEDTQNGMVQEYKVWCLGNETRYHINKTVDGSTFSVVIPFLVPGIRYSVEVAASTGAGSGVKSEPQFIQLDAHGNPVSPEDQVSLAQQISDVVKQPAFIAGIGAACWIILMVFSIWLYRHRKKRNGLTSTYAGIRKVTYQRGGEAVSSGGRPGLLNISEPAAQPWLADTWPNTGNNHNDCSISCCTAGNGNSDSNLTTYSRPGQPTPYATTQLIQSNLSNNMNNGSGDSGEKHWKPLGQQKQEVAPVQYNIVEQNKLNKDYRANDTVPPTIPYNQSYDQNTGGSYNSSDRGSSTSGSQGHKKGARTPKVPKQGGMNWADLLPPPPAHPPPHSNSEEYNISVDESYDQEMPCPVPPARMYLQQDELEEEEDERGPTPPVRGAASSPAAVSYSHQSTATLTPSPQEELQPMLQDCPEETGHMQHQPDRRRQPVSPPPPPRPISPPHTYGYISGPLVSDMDTDAPEEEEDEADMEVAKMQTRRLLLRGLEQTPASSVGDLESSVTGSMINGWGSASEEDNISSGRSSVSSSDGSFFTDADFAQAVAAAAEYAGLKVARRQMQDAAGRRHFHASQCPRPTSPVSTDSNMSAAVMQKTRPAKKLKHQPGHLRRETYTDDLPPPPVPPPAIKSPTAQSKTQLEVRPVVVPKLPSMDARTDRSSDRKGSSYKGREVLDGRQVVDMRTNPGDPREAQEQQNDGKGRGNKAAKRDLPPAKTHLIQEDILPYCRPTFPTSNNPRDPSSSSSMSSRGSGSRQREQANVGRRNIAEMQVLGGYERGEDNNEELEETES

SEQ ID NO: 30419 - protein, 178 aa, Artificial Sequence
  Synthetic polypeptide
QEGSHLQARMRALTRTQPCWHPDLGIPAIQMVWWTSVLRPRVLWRPPQSSWRDCPAMTGFFKGAEDRYSSHLWRPQGGPRSKGPGPRSWNTGRTLLPPGSHLWPLQPTVSLVLPSMDLKTDGPLCVPGLEDAGDTSVQNCGLMALRAAMEKCMKMQGEEGGFFPLGGVGARKTSSPCD

SEQ ID NO: 30420 - protein, 27 aa, Artificial Sequence
  Synthetic polypeptide
EPSPEPNHAGTLILEFQPSKWCGGPQF

SEQ ID NO: 30421 - protein, 155 aa, Artificial Sequence
  Synthetic polypeptide
SWNSSHPNGVVDLSFEAESPLAPPTELLERLPSYDWLLQGGRGQIFFPPLEAPGRPQEQRSWPSFLEHRKNPASSGESSLASPAHSVSCAAIHGSEDRRAPLCARAGGCWRYKCAELWINGSQGCHGEMHEDARGGRRILSSWRCWGQKDFKSLR

SEQ ID NO: 30422 - protein, 95 aa, Artificial Sequence
  Synthetic polypeptide
QEGSHLQARMRALTRTQPCWHPDLGIPAIQMVWWTSVLRPRVLWRPPQSSWRDCPAMTGFFKGAEDRYSSHLWRPQGGPRSKGPGPRSWNTESLR

SEQ ID NO: 30423 - protein, 374 aa, Artificial Sequence
  Synthetic polypeptide
SWNSSHPNGVVDLSFEAESPLAPPTELLERLPSYDWLLQGGRGQIFFPPLEAPGRPQEQRSWPSFLEHRVPAMTEEVAREALLSFVDSKCCYSSTVAGDLVIQELKRQTLCRYRLETFSESRISEWTFQPFTNHSVDGPQRGASPRLWDIKVQGPPMFQEDTRKFQVPHSSLVKECHKCHGRGRYKCSGCHGAGTVRCPSCCGAKRKAKQSRRCQLCAGSGRRRCSTCSGRGNKTCATCKGEKKLLHFIQLVIMWKNSLFEFVSEHRLNCPRELLAKAKGENLFKDENSVVYPIVDFPLRDISLASQRGIAEHSAALASRARVLQQRQTIELIPLTEVHYWYQGKTYVYYIYGTDHQVYAVDYPERYCCGCTIV

SEQ ID NO: 30424 - protein, 172 aa, Artificial Sequence
  Synthetic polypeptide
SWNSSHPNGVVDLSFEAESPLAPPTELLERLPSYDWLLQGGRGQIFFPPLEAPGRPQEQRSWPSFLEHRVPAMTEEVAREALLSFVDSKCCYSSTVAGDLVIQELKRQTLCRYRLETFSESRISEWTFQPFTNHSVDGPQRGASPRLWDIKVQGPPMFQEDTRKFQVPHSSL

SEQ ID NO: 30425 - protein, 167 aa, Artificial Sequence
  Synthetic polypeptide
GCCEGRITWKQHAYHSALCMVWWTSVLRPRVLWRPPQSSWRDCPAMTGFFKGAEDRYSSHLWRPQGGPRSKGPGPRSWNTGRTLLPPGSHLWPLQPTVSLVLPSMDLKTDGPLCVPGLEDAGDTSVQNCGLMALRAAMEKCMKMQGEEGGFFPLGGVGARKTSSPCD

SEQ ID NO: 30426 - protein, 19 aa, Artificial Sequence
  Synthetic polypeptide
HGSNMPIIVLCVWCGGPQF

SEQ ID NO: 30427 - protein, 151 aa, Artificial Sequence
  Synthetic polypeptide
CFVYGVVDLSFEAESPLAPPTELLERLPSYDWLLQGGRGQIFFPPLEAPGRPQEQRSWPSFLEHRKNPASSGESSLASPAHSVSCAAIHGSEDRRAPLCARAGGCWRYKCAELWINGSQGCHGEMHEDARGGRRILSSWRCWGQKDFKSLR

SEQ ID NO: 30428 - protein, 84 aa, Artificial Sequence
  Synthetic polypeptide
GCCEGRITWKQHAYHSALCMVWWTSVLRPRVLWRPPQSSWRDCPAMTGFFKGAEDRYSSHLWRPQGGPRSKGPGPRSWNTESLR

SEQ ID NO: 30429 - protein, 370 aa, Artificial Sequence
  Synthetic polypeptide
CFVYGVVDLSFEAESPLAPPTELLERLPSYDWLLQGGRGQIFFPPLEAPGRPQEQRSWPSFLEHRVPAMTEEVAREALLSFVDSKCCYSSTVAGDLVIQELKRQTLCRYRLETFSESRISEWTFQPFTNHSVDGPQRGASPRLWDIKVQGPPMFQEDTRKFQVPHSSLVKECHKCHGRGRYKCSGCHGAGTVRCPSCCGAKRKAKQSRRCQLCAGSGRRRCSTCSGRGNKTCATCKGEKKLLHFIQLVIMWKNSLFEFVSEHRLNCPRELLAKAKGENLFKDENSVVYPIVDFPLRDISLASQRGIAEHSAALASRARVLQQRQTIELIPLTEVHYWYQGKTYVYYIYGTDHQVYAVDYPERYCCGCTIV

SEQ ID NO: 30430 - protein, 168 aa, Artificial Sequence
  Synthetic polypeptide
CFVYGVVDLSFEAESPLAPPTELLERLPSYDWLLQGGRGQIFFPPLEAPGRPQEQRSWPSFLEHRVPAMTEEVAREALLSFVDSKCCYSSTVAGDLVIQELKRQTLCRYRLETFSESRISEWTFQPFTNHSVDGPQRGASPRLWDIKVQGPPMFQEDTRKFQVPHSSL

SEQ ID NO: 30431 - protein, 36 aa, Artificial Sequence
  Synthetic polypeptide
AQCGASCLLSQHFGRPRQKDHLRPGVGDQPRETLGQ

SEQ ID NO: 30432 - protein, 16 aa, Artificial Sequence
  Synthetic polypeptide
GQELETSLGRHWVSSG

SEQ ID NO: 30433 - protein, 62 aa, Artificial Sequence
  Synthetic polypeptide
GRAWWLTPVIPALSEAEESSAAVCFRVTSQISCFFLFKESCCQSIYSCSLQTVFKAGEQVNG

SEQ ID NO: 30434 - protein, 414 aa, Artificial Sequence
  Synthetic polypeptide
SQHFRRPRNHLLQFALESPAKSPASSSSKNLAVKVYTPVASRQSLKQGSRLMDNFLIREMSGSTSELLIKENKSKFSPQKEASPAAKTKETRSVEEIAPDPSEAKRPEPPSTSTLKQVTKVDCPVCGVNIPESHINKHLDSCLSREEKKESLRSSVHKRKPLPKTVYNLLSDRDLKKKLKEHGLSIQGNKQQLIKRHQEFVHMYNAQCDALHPKSAAEIVREIENIEKTRMRLEASKLNESVMVFTKDQTEKEIDEIHSKYRKKHKSEFQLLVDQARKGYKKIAGMSQKTVTITKEDESTEKLSSVCMGQEDNMTSVTNHFSQSKLDSPEELEPDREEDSSSCIDIQEVLSSSESDSCNSSSSDIIRDLLEEEEAWEASHKNDLQDTEISPRQNRRTRAAESAEIEPRNKRNRN

SEQ ID NO: 30435 - protein, 24 aa, Artificial Sequence
  Synthetic polypeptide
PGLVADACNPSTFGGRGIICCSLL

SEQ ID NO: 30436 - protein, 229 aa, Artificial Sequence
  Synthetic polypeptide
SQHFRRPRNHLLQFALESPAKSPASSSSKNLAVKVYTPVASRQSLKQGSRLMDNFLIREMSGSTSELLIKENKSKFSPQKEASPAAKTKETRSVEEIAPDPSEAKRPEPPSTSTLKQVTKVDCPVCGVNIPESHINKHLDSCLSREEKKESLRSSVHKRKPLPKTVYNLLSDRDLKKKLKEHGLSIQGNKQQLIKRHQEFVHMYNAQCDALHPKSGNGFYKGPNRKGNR

SEQ ID NO: 30437 - protein, 53 aa, Artificial Sequence
  Synthetic polypeptide
SQHFRRPRNHLLQFALESPAKSPASSSSKNLAVKVYTPVASRQSLKQGSRLMD

SEQ ID NO: 30438 - protein, 20 aa, Artificial Sequence
  Synthetic polypeptide
GRAWWLTPVIPALSEAEESS

SEQ ID NO: 30439 - protein, 10 aa, Artificial Sequence
  Synthetic polypeptide
SQHFRRPRNH

SEQ ID NO: 30440 - protein, 19 aa, Artificial Sequence
  Synthetic polypeptide
PGLVADACNPSTFGGRGII

SEQ ID NO: 30441 - protein, 21 aa, Artificial Sequence
  Synthetic polypeptide
VPVVLGEISCLPLDCMTFDNR

SEQ ID NO: 30442 - protein, 480 aa, Artificial Sequence
  Synthetic polypeptide
PSTIDDLLRCGICFEYFNIAMIIPQCSHNYCSLCIRKFLSYKTQCPTCCVTVTEPDLKNNRILDELVKSLNFARNHLLQFALESPAKSPASSSSKNLAVKVYTPVASRQSLKQGSRLMDNFLIREMSGSTSELLIKENKSKFSPQKEASPAAKTKETRSVEEIAPDPSEAKRPEPPSTSTLKQVTKVDCPVCGVNIPESHINKHLDSCLSREEKKESLRSSVHKRKPLPKTVYNLLSDRDLKKKLKEHGLSIQGNKQQLIKRHQEFVHMYNAQCDALHPKSAAEIVREIENIEKTRMRLEASKLNESVMVFTKDQTEKEIDEIHSKYRKKHKSEFQLLVDQARKGYKKIAGMSQKTVTITKEDESTEKLSSVCMGQEDNMTSVTNHFSQSKLDSPEELEPDREEDSSSCIDIQEVLSSSESDSCNSSSSDIIRDLLEEEEAWEASHKNDLQDTEISPRQNRRTRAAESAEIEPRNKRNRN

SEQ ID NO: 30443 - protein, 6 aa, Artificial Sequence
  Synthetic polypeptide
LYDLRQ

SEQ ID NO: 30444 - protein, 295 aa, Artificial Sequence
  Synthetic polypeptide
PSTIDDLLRCGICFEYFNIAMIIPQCSHNYCSLCIRKFLSYKTQCPTCCVTVTEPDLKNNRILDELVKSLNFARNHLLQFALESPAKSPASSSSKNLAVKVYTPVASRQSLKQGSRLMDNFLIREMSGSTSELLIKENKSKFSPQKEASPAAKTKETRSVEEIAPDPSEAKRPEPPSTSTLKQVTKVDCPVCGVNIPESHINKHLDSCLSREEKKESLRSSVHKRKPLPKTVYNLLSDRDLKKKLKEHGLSIQGNKQQLIKRHQEFVHMYNAQCDALHPKSGNGFYKGPNRKGNR

SEQ ID NO: 30445 - protein, 38 aa, Artificial Sequence
  Synthetic polypeptide
PSTIDDLLRCGICFEYFNIAMIIPQCSHNYCHRAGSEK

SEQ ID NO: 30446 - protein, 111 aa, Artificial Sequence
  Synthetic polypeptide
PSTIDDLLRCGICFEYFNIAMIIPQCSHNYCSLCIRKFLSYKTQCPTCCVTVTEPDLKNNRILDELESSAAVCFRVTSQISCFFLFKESCCQSIYSCSLQTVFKAGEQVNG

SEQ ID NO: 30447 - protein, 76 aa, Artificial Sequence
  Synthetic polypeptide
PSTIDDLLRCGICFEYFNIAMIIPQCSHNYCSLCIRKFLSYKTQCPTCCVTVTEPDLKNNRILDELVKSLNFARNH

SEQ ID NO: 30448 - protein, 7 aa, Artificial Sequence
  Synthetic polypeptide
RHMHTCG

SEQ ID NO: 30449 - protein, 493 aa, Artificial Sequence
  Synthetic polypeptide
NIYPKDYKSCCYKDTCTHVDECSLKPSICGTAVCKNIPGDFECECPEGYRYNLKSKSCEDIDECSENMCAQLCVNYPGGYTCYCDGKKGFKLAQDQKSCEVVSVCLPLNLDTKYELLYLAEQFAGVVLYLKFRLPEISRFSAEFDFRTYDSEGVILYAESIDHSAWLLIALRGGKIEVQLKNEHTSKITTGGDVINNGLWNMVSVEELEHSISIKIAKEAVMDINKPGPLFKPENGLLETKVYFAGFPRKVESELIKPINPRLDGCIRSWNLMKQGASGIKEIIQEKQNKHCLVTVEKGSYYPGSGIAQFHIDYNNVSSAEGWHVNVTLNIRPSTGTGVMLALVSGNNTVPFAVSLVDSTSEKSQDILLSVENTVIYRIQALSLCSDQQSHLEFRVNRNNLELSTPLKIETISHEDLQRQLAVLDKAMKAKVATYLGGLPDVPFSATPVNAFYNGCMEVNINGVQLDLDEAISKHNDIRAHSCPSVWKKTKNS

SEQ ID NO: 30450 - protein, 23 aa, Artificial Sequence
  Synthetic polypeptide
IYTQRTINHAAIKTHAHMWMNAL

SEQ ID NO: 30451 - protein, 7 aa, Artificial Sequence
  Synthetic polypeptide
LYIMVGK

SEQ ID NO: 30452 - protein, 330 aa, Artificial Sequence
  Synthetic polypeptide
SVTASHHPPRWDHLVAGKQAWGPTDCTLWLANKQDKEGALGEADVIECLSLEKLVNEHKCLCQIEPCSAISGYGKKIDKSIKKGLYWLLHVIARDFDALNERIQKETTEQRALEEQEKQERAERVRKLREERKQNEQEQAELDGTSGLAELDPEPTNPFQPIASVIIENEGKLEREKKNQKMEKDSDGCHLKHKMEHEQIETQGQVNHNGQKNNEFGLVENYKEALTQQLKNEDETDRPSLESANGKKKTKKLRMKRNHRVEPLNIDDCAPESPTPPPPPPPVGWGTPKVTRLPKLEPLGETHHNDFYRKPLPPLAVPQRPNSDAHDVIS

SEQ ID NO: 30453 - protein, 25 aa, Artificial Sequence
  Synthetic polypeptide
LQENKLGVPLIVHYGWQINKIKKEL

SEQ ID NO: 30454 - protein, 19 aa, Artificial Sequence
  Synthetic polypeptide
GQAWWLMAVIPTLWEAQTC

SEQ ID NO: 30455 - protein, 80 aa, Artificial Sequence
  Synthetic polypeptide
SQHFGRLRLVEPIKEMEVSLSDGAECHQVTSASVSSHTTPSQFRLKESPAGHTWLISPRRRGVSKWIQPHVFTSHISYYC

SEQ ID NO: 30456 - protein, 633 aa, Artificial Sequence
  Synthetic polypeptide
PGVVAHGCNPNTLGGSDLLSPLKKWKSRYLMEQNVTKLLRPLSPVTPPPPNSGSKSPQLATPGSSHPGEEECRNGYSLMFSPVTSLTTASRCNTPLQFELCHRKDLDLAKVGYLDSNTNSCADRPSLLNSGHSDLAPHPSLGPTSETGFPSRSGDGHQTLVRNSDQAFRTEFNLMYAYSPLNAMPRADGLYRGSPLVGDRKPLHLDGGYCSPAEGFSSRYEHGLMKDLSRGSLSPGGERACEGVPSAPQNPPQRKKVSLLEYRKRKQEAKENSAGGGGDSAQSKSKSAGAGQGSSNSVSDTGAHGVQGSSARTPSSPHKKFSPSHSSMSHLEAVSPSDSRGTSSSHCRPQENISSRWMVPTSVERLREGGSIPKVLRSSVRVAQKGEPSPTWESNITEKDSDPADGEGPETLSSALSKGATVYSPSRYSYQLLQCDSPRTESQSLLQQSSSPFRGHPTQSPGYSYRTTALRPGNPPSHGSSESSLSSTSYSSPAHPVSTDSLAPFTGTPGYFSSQPHSGNSTGSNLPRRSCPSSAASPTLQGPSDSPTSDSVSQSSTGTLSSTSFPQNSRSSLPSDLRTISLPSAGQSAVYQASRVSAVSNSQHYPHRGSGGVHQYRLQPLQGSGVKTQTGLS

SEQ ID NO: 30457 - protein, 434 aa, Artificial Sequence
  Synthetic polypeptide
PGVVAHGCNPNTLGGSDLLSPLKKWKSRYLMEQNVTKLLRPLSPVTPPPPNSGSKSPQLATPGSSHPGEEECRNGYSLMFSPVTSLTTASRCNTPLQFELCHRKDLDLAKVGYLDSNTNSCADRPSLLNSGHSDLAPHPSLGPTSETGFPSRSGDGHQTLVRNSDQAFRTEFNLMYAYSPLNAMPRADGLYRGSPLVGDRKPLHLDGGYCSPAEGFSSRYEHGLMKDLSRGSLSPGGERACEGVPSAPQNPPQRKKVSLLEYRKRKQEAKENSAGGGGDSAQSKSKSAGAGQGSSNSVSDTGAHGVQGSSARTPSSPHKKFSPSHSSMSHLEAVSPSDSRGTSSSHCRPQENISSRWMVPTSVERLREGGSIPKVLRSSVRVAQKGEPSPTWESNITEKDSDPADGEGPETLSSALSKGATVYSPSRYSYQICD

SEQ ID NO: 30458 - protein, 320 aa, Artificial Sequence
  Synthetic polypeptide
PGVVAHGCNPNTLGGSDLLSPLKKWKSRYLMEQNVTKLLRPLSPVTPPPPNSGSKSPQLATPGSSHPGEEECRNGYSLMFSPVTSLTTASRCNTPLQFENISSPESSPAHRPESLSPELCHRKDLDLAKVGYLDSNTNSCADRPSLLNSGHSDLAPHPSLGPTSETGFPSRSGDGHQTLVRNSDQAFRTEFNLMYAYSPLNAMPRADGLYRGSPLVGDRKPLHLDGGYCSPAEGFSSRYEHGLMKDLSRGSLSPGGERACEGVPSAPQNPPQRKKVSLLEYRKRKQEAKENSAGGGGDSAQSKSKSAGAGQGSSNSVSDT

SEQ ID NO: 30459 - protein, 456 aa, Artificial Sequence
  Synthetic polypeptide
GRAPCLTPVISTLWEAKASGSRGGADDAWADVEDVTEEDCALRSGDTHLFDKVRGYDIKLLRYLSVKYICDLMVENKKVKFGMNVTSSEKVDKAQRYADFTLLSIPYPGCEFFKEYKDRDYMAEGLIFNWKQDYVDAPLSIPDFLTHSLNIDWSQYQCWDLVQQTQNYLKLLLSLVNSDDDSGLLVHCISGWDRTPLFISLLRLSLWADGLIHTSLKPTEILYLTVAYDWFLFGHMLVDRLSKGEEIFFFCFNFLKHITSEEFSALKTQRRKSLPARDGGFTLEDICMLRRKDRGSTTSLGSDFSLVMESSPGATGSFTYEAVELVPAGAPTQAAWRKSHSSSPQSVLWNRPQPSEDRLPSQQGLAEARSSSSSSSNHSDNFFRMGSSPLEVPKPRLAALSDRETRLQEVRSAFLAAYSSTVGLRAVAPSPSGAIGGLLEQFARGVGLRSISSNAL

SEQ ID NO: 30460 - protein, 62 aa, Artificial Sequence
  Synthetic polypeptide
SQHFGRPRRADPEGVQMMPGQMWRTSRRRTVLFEVVTRIFLIRSEAMTSSCFDTCQSNTSVT

SEQ ID NO: 30461 - protein, 25 aa, Artificial Sequence
  Synthetic polypeptide
PGAMPHACNLNTLGGQGERIPRGCR

SEQ ID NO: 30462 - protein, 508 aa, Artificial Sequence
  Synthetic polypeptide
GRAPCLTPVISTLWEAKASGSRGGADDAWADVEDVTEEDCALRSGDTHLFDKVRGYDIKLLRYLSVKYICDLMVENKKVKFGMNVTSSEKVDKAQRYADFTLLSIPYPGCEFFKEYKDRDYMAEGLIFNWKQDYVDAPLSIPDFLTHSLNIDWSQYQCWDLVQQTQNYLKLLLSLVNSDDDSGLLVHCISGWDRTPLFISLLRLSLWADGLIHTSLKPTEILYLTVAYDWFLFGHMLVDRLSKGEEIFFFCFNFLKHITSEEFSALKTQRRKSLPARDGGFTLEDICMLRRKDRGSTTSLGSDFSLVMESSPGATGSFTYEAVELVPAGAPTQAAWRKSHSSSPQSVLWNRPQPSEDRLPSQQGLAEARSSSSSSSNHSDNFFRMGSSPLEVPKPRSVDHPLPGSSLSTDYGSWQMVTGCGSIQERAVLHTDSSLPFSFPDELPNSCLLAALSDRETRLQEVRSAFLAAYSSTVGLRAVAPSPSGAIGGLLEQFARGVGLRSISSNAL

SEQ ID NO: 30463 - protein, 72 aa, Artificial Sequence
  Synthetic polypeptide
GRAPCLTPVISTLWEAKASGSRGGADDAWADVEDVTEEDCALRSGDTHLFDKVRGYDIKLLRYLSVKYICDL

SEQ ID NO: 30464 - protein, 396 aa, Artificial Sequence
  Synthetic polypeptide
GRAPCLTPVISTLWEAKASGSRGGADDAWADVEDVTEEDCALRSGDTHLFDKVRGYDIKLLRYLSVKYICDLMVENKKVKFGMNVTSSEKVDKAQRYADFTLLSIPYPGCEFFKEYKDRDYMAEGLIFNWKQDYVDAPLSIPDFLTHSLNIDWSQYQCWDLVQQTQNYLKLLLSLVNSDDDSGLLVHCISGWDRTPLFISLLRLSLWADGLIHTSLKPTEILYLTVAYDWFLFGHMLVDRLSKGEEIFFFCFNFLKHITSEEFSALKTQRRKSLPARDGGFTLEDICMLRRKDRGSTTSLGSDFSLVMESSPGATGSFTYEAVELVPAGAPTQAAWLAALSDRETRLQEVRSAFLAAYSSTVGLRAVAPSPSGAIGGLLEQFARGVGLRSISSNAL

SEQ ID NO: 30465 - protein, 82 aa, Artificial Sequence
  Synthetic polypeptide
GRAPCLTPVISTLWEAKASGSRGQEFETILANTGVQMMPGQMWRTSRRRTVLFEVVTRIFLIRSEAMTSSCFDTCQSNTSVT

SEQ ID NO: 30466 - protein, 27 aa, Artificial Sequence
  Synthetic polypeptide
SQHFGRPRRADPEVRSSRPSWLTRGCR

SEQ ID NO: 30467 - protein, 435 aa, Artificial Sequence
  Synthetic polypeptide
HGGADDAWADVEDVTEEDCALRSGDTHLFDKVRGYDIKLLRYLSVKYICDLMVENKKVKFGMNVTSSEKVDKAQRYADFTLLSIPYPGCEFFKEYKDRDYMAEGLIFNWKQDYVDAPLSIPDFLTHSLNIDWSQYQCWDLVQQTQNYLKLLLSLVNSDDDSGLLVHCISGWDRTPLFISLLRLSLWADGLIHTSLKPTEILYLTVAYDWFLFGHMLVDRLSKGEEIFFFCFNFLKHITSEEFSALKTQRRKSLPARDGGFTLEDICMLRRKDRGSTTSLGSDFSLVMESSPGATGSFTYEAVELVPAGAPTQAAWRKSHSSSPQSVLWNRPQPSEDRLPSQQGLAEARSSSSSSSNHSDNFFRMGSSPLEVPKPRLAALSDRETRLQEVRSAFLAAYSSTVGLRAVAPSPSGAIGGLLEQFARGVGLRSISSNAL

SEQ ID NO: 30468 - protein, 487 aa, Artificial Sequence
  Synthetic polypeptide
HGGADDAWADVEDVTEEDCALRSGDTHLFDKVRGYDIKLLRYLSVKYICDLMVENKKVKFGMNVTSSEKVDKAQRYADFTLLSIPYPGCEFFKEYKDRDYMAEGLIFNWKQDYVDAPLSIPDFLTHSLNIDWSQYQCWDLVQQTQNYLKLLLSLVNSDDDSGLLVHCISGWDRTPLFISLLRLSLWADGLIHTSLKPTEILYLTVAYDWFLFGHMLVDRLSKGEEIFFFCFNFLKHITSEEFSALKTQRRKSLPARDGGFTLEDICMLRRKDRGSTTSLGSDFSLVMESSPGATGSFTYEAVELVPAGAPTQAAWRKSHSSSPQSVLWNRPQPSEDRLPSQQGLAEARSSSSSSSNHSDNFFRMGSSPLEVPKPRSVDHPLPGSSLSTDYGSWQMVTGCGSIQERAVLHTDSSLPFSFPDELPNSCLLAALSDRETRLQEVRSAFLAAYSSTVGLRAVAPSPSGAIGGLLEQFARGVGLRSISSNAL

SEQ ID NO: 30469 - protein, 51 aa, Artificial Sequence
  Synthetic polypeptide
HGGADDAWADVEDVTEEDCALRSGDTHLFDKVRGYDIKLLRYLSVKYICDL

SEQ ID NO: 30470 - protein, 375 aa, Artificial Sequence
  Synthetic polypeptide
HGGADDAWADVEDVTEEDCALRSGDTHLFDKVRGYDIKLLRYLSVKYICDLMVENKKVKFGMNVTSSEKVDKAQRYADFTLLSIPYPGCEFFKEYKDRDYMAEGLIFNWKQDYVDAPLSIPDFLTHSLNIDWSQYQCWDLVQQTQNYLKLLLSLVNSDDDSGLLVHCISGWDRTPLFISLLRLSLWADGLIHTSLKPTEILYLTVAYDWFLFGHMLVDRLSKGEEIFFFCFNFLKHITSEEFSALKTQRRKSLPARDGGFTLEDICMLRRKDRGSTTSLGSDFSLVMESSPGATGSFTYEAVELVPAGAPTQAAWLAALSDRETRLQEVRSAFLAAYSSTVGLRAVAPSPSGAIGGLLEQFARGVGLRSISSNAL

SEQ ID NO: 30471 - protein, 200 aa, Artificial Sequence
  Synthetic polypeptide
GQAWWLTLVIPALWEAEAGGSRRQEIETILANTTATLRPYLSAVRATLQAALCLENFSSQVVERHNKPEVEVRSSKELLLQPVTISRNEKEKVLIEGSINSVRVSIAVKQADEIEKILCHKFMRFMMMRAENFFILRRKPVEGYDISFLITNFHTEQMYKHKLVDFVIHFMEEIDKEISEMKLSVNARARIVAEEFLKNF

SEQ ID NO: 30472 - protein, 31 aa, Artificial Sequence
  Synthetic polypeptide
SQHFGRQRRADHDVRRSRPSWLTRLPLSAPT

SEQ ID NO: 30473 - protein, 42 aa, Artificial Sequence
  Synthetic polypeptide
HDCHSPPLPECRAGHIAGCPLPGELLLPGCGTTQQAGSGSQE

SEQ ID NO: 30474 - protein, 76 aa, Artificial Sequence
  Synthetic polypeptide
GQAWWLTLVIPALWEAEAGGSRRQEIETILANTTATLRPYLSAVRATLQAALCLENFSSQVVERHNKPEVEVSPRQ

SEQ ID NO: 30475 - protein, 45 aa, Artificial Sequence
  Synthetic polypeptide
HDCHSPPLPECRAGHIAGCPLPGELLLPGCGTTQQAGSGSQSSPV

SEQ ID NO: 30476 - protein, 79 aa, Artificial Sequence
  Synthetic polypeptide
GQAWWLTLVIPALWEAEAGGSRRQEIETILANTTATLRPYLSAVRATLQAALCLENFSSQVVERHNKPEVEVRGMISAF

SEQ ID NO: 30477 - protein, 48 aa, Artificial Sequence
  Synthetic polypeptide
HDCHSPPLPECRAGHIAGCPLPGELLLPGCGTTQQAGSGSQGYDISFL

SEQ ID NO: 30478 - protein, 213 aa, Artificial Sequence
  Synthetic polypeptide
GQAWWLTLVIPALWEAEAGGSRRQEIETILANTTATLRPYLSAVRATLQAALCLENFSSQVVERHNKPEVEVRSSKELLLQPVTISRNEKEKVLIEGSINSVRVSIAVKQADEIEKILCHKFMRFMMMRAENFFILRRKPVEGYDISFLITNFHTEQMYKHKLVDFVIHFMEEIDKEISEMKLSVNARARIVAEEFLKNVSRSSGEDPPRRLT

SEQ ID NO: 30479 - protein, 145 aa, Artificial Sequence
  Synthetic polypeptide
GQAWWLTLVIPALWEAEAGGSRRQEIETILANTTATLRPYLSAVRATLQAALCLENFSSQVVERHNKPEVEVRSSKELLLQPVTISRNEKEKVLIEGSINSVRVSIAVKQADEIEKILCHKFMRFMMMRAENFFILRRKPVEIIL

SEQ ID NO: 30480 - protein, 657 aa, Artificial Sequence
  Synthetic polypeptide
GQAWWLTLVIPALWEAEAGGSRRQEIETILANTTATLRPYLSAVRATLQAALCLENFSSQVVERHNKPEVEVRSSKELLLQPVTISRNEKEKVLIEGSINSVRVSIAVKQADEIEKILCHKFMRFMMMRAENFFILRRKPVEQKKIFTIQGCYPVIRCLLRRRGWVEKKMVHRSGPTLLPPQKDLDSSAMGDSDTTEDEDEDEDEEFQPSQLFDFDDLLKFDDLDGTHALMVGLCLNLRNLPWFDEVDANSFFPRCYCLGAEDDKKAFIGDKQPKKQEKNPVLVSPEFVDEALCACEEYLSNLAHMDIDKDLEAPLYLTPEGWSLFLQRYYQVVHEGAELRHLDTQVQRCEDILQQLQAVVPQIDMEGDRNIWIVKPGAKSRGRGIMCMDHLEEMLKLVNGNPVVMKDGKWVVQKYIERPLLIFGTKFDLRQWFLVTDWNPLTVWFYRDSYIRFSTQPFSLKNLDNSVHLCNNSIQKHLENSCHRHPLLPPDNMWSSQRFQAHLQEMGAPNAWSTIIVPGMKDAVIHALQTSQDTVQCRKASFELYGADFVFGEDFQPWLIEINASPTMAPSTAVTARLCAGVQADTLRVVIDRMLDRNCDTGAFELIYKQPVTTSPASTPRPSCLLPMYSDTRARSSDDSTASWWALRPCRPQARP

SEQ ID NO: 30481 - protein, 199 aa, Artificial Sequence
  Synthetic polypeptide
GQAWWLTLVIPALWEAEAGGSRRQEIETILANTTATLRPYLSAVRATLQAALCLENFSSQVVERHNKPEVEVRSSKELLLQPVTISRNEKEKVLIEGSINSVRVSIAVKQGYDISFLITNFHTEQMYKHKLVDFVIHFMEEIDKEISEMKLSVNARARIVAEEFLKNQKKIFTIQGCYPVIRCLLRRRGWVEKKMVHRS

SEQ ID NO: 30482 - protein, 54 aa, Artificial Sequence
  Synthetic polypeptide
IAKILNHHTHLQLPPRLPLQHQTSGLPPLWFPAMSHSNQGACRRRSLQSKAATR

SEQ ID NO: 30483 - protein, 84 aa, Artificial Sequence
  Synthetic polypeptide
QKSSTTTPIFNYLPVYPFSTKLLGSLHSGSLRCPTLIKVPAEEDLYNPRLLPGDPVSLAPEGLGGEEDGPSLRPHPAATPEGSG

SEQ ID NO: 30484 - protein, 519 aa, Artificial Sequence
  Synthetic polypeptide
SRCLQKKIFTIQGCYPVIRCLLRRRGWVEKKMVHRSGPTLLPPQKDLDSSAMGDSDTTEDEDEDEDEEFQPSQLFDFDDLLKFDDLDGTHALMVGLCLNLRNLPWFDEVDANSFFPRCYCLGAEDDKKAFIGDKQPKKQEKNPVLVSPEFVDEALCACEEYLSNLAHMDIDKDLEAPLYLTPEGWSLFLQRYYQVVHEGAELRHLDTQVQRCEDILQQLQAVVPQIDMEGDRNIWIVKPGAKSRGRGIMCMDHLEEMLKLVNGNPVVMKDGKWVVQKYIERPLLIFGTKFDLRQWFLVTDWNPLTVWFYRDSYIRFSTQPFSLKNLDNSVHLCNNSIQKHLENSCHRHPLLPPDNMWSSQRFQAHLQEMGAPNAWSTIIVPGMKDAVIHALQTSQDTVQCRKASFELYGADFVFGEDFQPWLIEINASPTMAPSTAVTARLCAGVQADTLRVVIDRMLDRNCDTGAFELIYKQPVTTSPASTPRPSCLLPMYSDTRARSSDDSTASWWALRPCRPQARP

SEQ ID NO: 30485 - protein, 72 aa, Artificial Sequence
  Synthetic polypeptide
QKSSTTTPIFNYLPVYPFSTKLLGSLHSGSLRCPTLIKVPAEEDLYNPRLLPGDPVSLAPEGLGGEEDGPSL

SEQ ID NO: 30486 - protein, 36 aa, Artificial Sequence
  Synthetic polypeptide
SRCLQKKIFTIQGCYPVIRCLLRRRGWVEKKMVHRS

SEQ ID NO: 30487 - protein, 100 aa, Artificial Sequence
  Synthetic polypeptide
SRCLQKKIFTIQGCYPVIRCLLRRRGWVEKKMVHRSGPTLLPPQKDLDSSAMGDSDTTEDEDEDEDEEFQPSQLFDFDDLLKFDDLDGTHALMSRMVQNE

SEQ ID NO: 30488 - protein, 128 aa, Artificial Sequence
  Synthetic polypeptide
SRCLQKKIFTIQGCYPVIRCLLRRRGWVEKKMVHRSGPTLLPPQKDLDSSAMGDSDTTEDEDEDEDEEFQPSQLFDFDDLLKFDDLDGTHALMSRMVQNEIPYFIWTTRRDVLDCRFLSKDQMINHYA

SEQ ID NO: 30489 - protein, 97 aa, Artificial Sequence
  Synthetic polypeptide
SRCLQKKIFTIQGCYPVIRCLLRRRGWVEKKMVHRSGPTLLPPQKDLDSSAMGDSDTTEDEDEDEDEEFQPSQLFDFDDLLKFDDLDGTHALMVGLC

SEQ ID NO: 30490 - protein, 148 aa, Artificial Sequence
  Synthetic polypeptide
SRCLQKKIFTIQGCYPVIRCLLRRRGWVEKKMVHRSGPTLLPPQKDLDSSAMGDSDTTEDEDEDEDEEFQPSQLFDFDDLLKFDDLDGTHALMVGLCLNLRNLPWFDEVDANSFFPRCYCLGAEDDKKAFIEDFWLTAARNVLKLVVK

SEQ ID NO: 30491 - protein, 103 aa, Artificial Sequence
  Synthetic polypeptide
SRCLQKKIFTIQGCYPVIRCLLRRRGWVEKKMVHRSGPTLLPPQKDLDSSAMGDSDTTEDEDEDEDEEFQPSQLFDFDDLLKFDDLDGTHALMSRMVQNEIPY

SEQ ID NO: 30492 - protein, 110 aa, Artificial Sequence
  Synthetic polypeptide
SRCLQKKIFTIQGCYPVIRCLLRRRGWVEKKMVHRSGPTLLPPQKDLDSSAMGDSDTTEDEDEDEDEEFQPSQLFDFDDLLKFDDLDGTHALMSRMVQNEIPYFIWTTRR

SEQ ID NO: 30493 - protein, 136 aa, Artificial Sequence
  Synthetic polypeptide
SRCLQKKIFTIQGCYPVIRCLLRRRGWVEKKMVHRSGPTLLPPQKDLDSSAMGDSDTTEDEDEDEDEEFQPSQLFDFDDLLKFDDLDGTHALMSRMVQNEIPYFIWTTRRDVLDCRFLSKDQMINHYARAGSFTTK

SEQ ID NO: 30494 - protein, 191 aa, Artificial Sequence
  Synthetic polypeptide
SRCLQKKIFTIQGCYPVIRCLLRRRGWVEKKMVHRSGPTLLPPQKDLDSSAMGDSDTTEDEDEDEDEEFQPSQLFDFDDLLKFDDLDGTHALMSRMVQNEIPYFIWTTRRDVLDCRFLSKDQMINHYARAGSFTTKVGLCLNLRNLPWFDEVDANSFFPRCYCLGAEDDKKAFIETGFHCVSQDGLDLLTS

SEQ ID NO: 30495 - protein, 760 aa, Artificial Sequence
  Synthetic polypeptide
SRCLQKKIFTIQGCYPVIRCLLRRRGWVEKKMVHRSGPTLLPPQKDLDSSAMGDSDTTEDEDEDEDEEFQPSQLFDFDDLLKFDDLDGTHALMVGLCLNLRNLPWFDEVDANSFFPRCYCLGAEDDKKAFIEDFWLTAARNVLKLVVKSEWKSYPIQAVEEEASGDKQPKKQEKNPVLVSPEFVDEALCACEEYLSNLAHMDIDKDLEAPLYLTPEGWSLFLQRYYQVVHEGAELRHLDTQVQRCEDILQQLQAVVPQIDMEGDRNIWIVKPGAKSRGRGIMCMDHLEEMLKLVNGNPVVMKDGKWVVQKYIERPLLIFGTKFDLRQWFLVTDWNPLTVWFYRDSYIRFSTQPFSLKNLDNSVHLCNNSIQKHLENSCHRHPLLPPDNMWSSQRFQAHLQEMGAPNAWSTIIVPGMKDAVIHALQTSQDTVQCRKASFELYGADFVFGEDFQPWLIEINASPTMAPSTAVTARLCAGVQADTLRVVIDRMLDRNCDTGAFELIYKQPAVEVPQYVGIRLLVEGFTIKKPMAMCHRRMGVRPAVPLLTQRGSGEARHHFPSLHTKAQLPSPHVLRHQGQVLRRQHSKLVGTKALSTTGKALRTLPTAKVFISLPPNLDFKVAPSILKPRKAPALLCLRGPQLEVPCCLCPLKSEQFLAPVGRSRPKANSRPDCDKPRAEACPMKRLSPLKPLPLVGTFQRRRGLGDMKLGKPLLRFPTALVLDPTPNKKKQVKYLGLDSIAVGGSRVDGARPCTPGSTARA

SEQ ID NO: 30496 - protein, 177 aa, Artificial Sequence
  Synthetic polypeptide
SRCLQKKIFTIQGCYPVIRCLLRRRGWVEKKMVHRSGPTLLPPQKDLDSSAMGDSDTTEDEDEDEDEEFQPSQLFDFDDLLKFDDLDGTHALMSRMVQNEIPYFIWTTRRDVLDCRFLSKDQMINHYARAGSFTTKVGLCLNLRNLPWFDEVDANSFFPRCYCLGAEDDKKAFIGKE

SEQ ID NO: 30497 - protein, 104 aa, Artificial Sequence
  Synthetic polypeptide
SRCLQKKIFTIQGCYPVIRCLLRRRGWVEKKMVHRSGPTLLPPQKDLDSSAMGDSDTTEDEDEDEDEEFQPSQLFDFDDLLKFDDLDGTHALMASCAWTTWRRC

SEQ ID NO: 30498 - protein, 149 aa, Artificial Sequence
  Synthetic polypeptide
SRCLQKKIFTIQGCYPVIRCLLRRRGWVEKKMVHRSGPTLLPPQKDLDSSAMGDSDTTEDEDEDEDEEFQPSQLFDFDDLLKFDDLDGTHALMVDANSFFPRCYCLGAEDDKKAFIEDFWLTAARNVLKLVVKSEWKSYPIQAVEEEAS

SEQ ID NO: 30499 - protein, 108 aa, Artificial Sequence
  Synthetic polypeptide
SRCLQKKIFTIQGCYPVIRCLLRRRGWVEKKMVHRSGPTLLPPQKDLDSSAMGDSDTTEDEDEDEDEEFQPSQLFDFDDLLKFDDLDGTHALMRRGRTQAPRHSGPAL

SEQ ID NO: 30500 - protein, 41 aa, Artificial Sequence
  Synthetic polypeptide
INYLLSTAQLVVCFLLLRYLEQFLMDIEIPRHCAWLVCMQE

SEQ ID NO: 30501 - protein, 571 aa, Artificial Sequence
  Synthetic polypeptide
QLFVKYCPAGCLLPFAEISGTIPHGYRDSSPLCMAGVHAGVVSNTLGGQISVVISKGIPYYESSLANNVTSVVGHLSTSLFTFKTSGCYGTLGMESGVIADPQITASSVLEWTDHTGQENSWKPKKARLKKPGPPWAAFATDEYQWLQIDLNKEKKITGIITTGSTMVEHNYYVSAYRILYSDDGQKWTVYREPGVEQDKIFQGNKDYHQDVRNNFLPPIIARFIRVNPTQWQQKIAMKMELLGCQFIPKGRPPKLTQPPPPRNSNDLKNTTAPPKIAKGRAPKFTQPLQPRSSNEFPAQTEQTTASPDIRNTTVTPNVTKDVALAAVLVPVLVMVLTTLILILVCAWHWRNRKKKTEGTYDLPYWDRAGWWKGMKQFLPAKAVDHEETPVRYSSSEVNHLSPREVTTVLQADSAEYAQPLVGGIVGTLHQRSTFKPEEGKEAGYADLDPYNSPGQEVYHAYAEPLPITGPEYATPIIMDMSGHPTTSVGQPSTSTFKATGNQPPPLVGTYNTLLSRTDSCSSAQAQYDTPKAGKPGLPAPDELVYQVPQSTQEVSGAGRDGECDVFKEIL

SEQ ID NO: 30502 - protein, 585 aa, Artificial Sequence
  Synthetic polypeptide
QLFVKYCPAGCLLPFAEISGTIPHGYRDSSPLCMAGVHAGVVSNTLGGQISVVISKGIPYYESSLANNVTSVVGHLSTSLFTFKTSGCYGTLGMESGVIADPQITASSVLEWTDHTGQENSWKPKKARLKKPGPPWAAFATDEYQWLQIDLNKEKKITGIITTGSTMVEHNYYVSAYRILYSDDGQKWTVYREPGVEQDKIFQGNKDYHQDVRNNFLPPIIARFIRVNPTQWQQKIAMKMELLGCQFIPKGRPPKLTQPPPPRNSNDLKNTTAPPKIAKGRAPKFTQPLQPRSSNEFPAQTEQTTASPDIRNTTVTPNVTKDVALAAVLVPVLVMVLTTLILILVCAWHWRNRKKKTEGTYDLPYWDRAGFYLMVSLACRHNEGWWKGMKQFLPAKAVDHEETPVRYSSSEVNHLSPREVTTVLQADSAEYAQPLVGGIVGTLHQRSTFKPEEGKEAGYADLDPYNSPGQEVYHAYAEPLPITGPEYATPIIMDMSGHPTTSVGQPSTSTFKATGNQPPPLVGTYNTLLSRTDSCSSAQAQYDTPKAGKPGLPAPDELVYQVPQSTQEVSGAGRDGECDVFKEIL

SEQ ID NO: 30503 - protein, 55 aa, Artificial Sequence
  Synthetic polypeptide
TDNLQNGEKIFAKCGSGKGLISNINKELKQVYKKKETLKSRSNYLFGHCIQFFGT

SEQ ID NO: 30504 - protein, 587 aa, Artificial Sequence
  Synthetic polypeptide
KADLITCLDTASNFLEPEFSKYCPAGCLLPFAEISGTIPHGYRDSSPLCMAGVHAGVVSNTLGGQISVVISKGIPYYESSLANNVTSVVGHLSTSLFTFKTSGCYGTLGMESGVIADPQITASSVLEWTDHTGQENSWKPKKARLKKPGPPWAAFATDEYQWLQIDLNKEKKITGIITTGSTMVEHNYYVSAYRILYSDDGQKWTVYREPGVEQDKIFQGNKDYHQDVRNNFLPPIIARFIRVNPTQWQQKIAMKMELLGCQFIPKGRPPKLTQPPPPRNSNDLKNTTAPPKIAKGRAPKFTQPLQPRSSNEFPAQTEQTTASPDIRNTTVTPNVTKDVALAAVLVPVLVMVLTTLILILVCAWHWRNRKKKTEGTYDLPYWDRAGWWKGMKQFLPAKAVDHEETPVRYSSSEVNHLSPREVTTVLQADSAEYAQPLVGGIVGTLHQRSTFKPEEGKEAGYADLDPYNSPGQEVYHAYAEPLPITGPEYATPIIMDMSGHPTTSVGQPSTSTFKATGNQPPPLVGTYNTLLSRTDSCSSAQAQYDTPKAGKPGLPAPDELVYQVPQSTQEVSGAGRDGECDVFKEIL

SEQ ID NO: 30505 - protein, 13 aa, Artificial Sequence
  Synthetic polypeptide
TSLQEKRNIKKQI

SEQ ID NO: 30506 - protein, 601 aa, Artificial Sequence
  Synthetic polypeptide
KADLITCLDTASNFLEPEFSKYCPAGCLLPFAEISGTIPHGYRDSSPLCMAGVHAGVVSNTLGGQISVVISKGIPYYESSLANNVTSVVGHLSTSLFTFKTSGCYGTLGMESGVIADPQITASSVLEWTDHTGQENSWKPKKARLKKPGPPWAAFATDEYQWLQIDLNKEKKITGIITTGSTMVEHNYYVSAYRILYSDDGQKWTVYREPGVEQDKIFQGNKDYHQDVRNNFLPPIIARFIRVNPTQWQQKIAMKMELLGCQFIPKGRPPKLTQPPPPRNSNDLKNTTAPPKIAKGRAPKFTQPLQPRSSNEFPAQTEQTTASPDIRNTTVTPNVTKDVALAAVLVPVLVMVLTTLILILVCAWHWRNRKKKTEGTYDLPYWDRAGFYLMVSLACRHNEGWWKGMKQFLPAKAVDHEETPVRYSSSEVNHLSPREVTTVLQADSAEYAQPLVGGIVGTLHQRSTFKPEEGKEAGYADLDPYNSPGQEVYHAYAEPLPITGPEYATPIIMDMSGHPTTSVGQPSTSTFKATGNQPPPLVGTYNTLLSRTDSCSSAQAQYDTPKAGKPGLPAPDELVYQVPQSTQEVSGAGRDGECDVFKEIL

SEQ ID NO: 30507 - protein, 599 aa, Artificial Sequence
  Synthetic polypeptide
EVRSLSARQPPHLGNLITCLDTASNFLEPEFSKYCPAGCLLPFAEISGTIPHGYRDSSPLCMAGVHAGVVSNTLGGQISVVISKGIPYYESSLANNVTSVVGHLSTSLFTFKTSGCYGTLGMESGVIADPQITASSVLEWTDHTGQENSWKPKKARLKKPGPPWAAFATDEYQWLQIDLNKEKKITGIITTGSTMVEHNYYVSAYRILYSDDGQKWTVYREPGVEQDKIFQGNKDYHQDVRNNFLPPIIARFIRVNPTQWQQKIAMKMELLGCQFIPKGRPPKLTQPPPPRNSNDLKNTTAPPKIAKGRAPKFTQPLQPRSSNEFPAQTEQTTASPDIRNTTVTPNVTKDVALAAVLVPVLVMVLTTLILILVCAWHWRNRKKKTEGTYDLPYWDRAGWWKGMKQFLPAKAVDHEETPVRYSSSEVNHLSPREVTTVLQADSAEYAQPLVGGIVGTLHQRSTFKPEEGKEAGYADLDPYNSPGQEVYHAYAEPLPITGPEYATPIIMDMSGHPTTSVGQPSTSTFKATGNQPPPLVGTYNTLLSRTDSCSSAQAQYDTPKAGKPGLPAPDELVYQVPQSTQEVSGAGRDGECDVFKEIL

SEQ ID NO: 30508 - protein, 13 aa, Artificial Sequence
  Synthetic polypeptide
GASPPGSHPIWEI

SEQ ID NO: 30509 - protein, 42 aa, Artificial Sequence
  Synthetic polypeptide
EVRSPSARQLPRLRSEEPLRPAATPSGKSNYLFGHCIQFFGT

SEQ ID NO: 30510 - protein, 613 aa, Artificial Sequence
  Synthetic polypeptide
EVRSLSARQPPHLGNLITCLDTASNFLEPEFSKYCPAGCLLPFAEISGTIPHGYRDSSPLCMAGVHAGVVSNTLGGQISVVISKGIPYYESSLANNVTSVVGHLSTSLFTFKTSGCYGTLGMESGVIADPQITASSVLEWTDHTGQENSWKPKKARLKKPGPPWAAFATDEYQWLQIDLNKEKKITGIITTGSTMVEHNYYVSAYRILYSDDGQKWTVYREPGVEQDKIFQGNKDYHQDVRNNFLPPIIARFIRVNPTQWQQKIAMKMELLGCQFIPKGRPPKLTQPPPPRNSNDLKNTTAPPKIAKGRAPKFTQPLQPRSSNEFPAQTEQTTASPDIRNTTVTPNVTKDVALAAVLVPVLVMVLTTLILILVCAWHWRNRKKKTEGTYDLPYWDRAGFYLMVSLACRHNEGWWKGMKQFLPAKAVDHEETPVRYSSSEVNHLSPREVTTVLQADSAEYAQPLVGGIVGTLHQRSTFKPEEGKEAGYADLDPYNSPGQEVYHAYAEPLPITGPEYATPIIMDMSGHPTTSVGQPSTSTFKATGNQPPPLVGTYNTLLSRTDSCSSAQAQYDTPKAGKPGLPAPDELVYQVPQSTQEVSGAGRDGECDVFKEIL

SEQ ID NO: 30511 - protein, 47 aa, Artificial Sequence
  Synthetic polypeptide
VHVLCKDMDEAGNHHSQQTITRTKNRTPHVLTHRQILWSGVANEPFN

SEQ ID NO: 30512 - protein, 887 aa, Artificial Sequence
  Synthetic polypeptide
TKELLHSKRNYHQSEQATYRMGENFCNLLIRQRANIENLQRTQTNLQEKNNPINKWANDMNRHFSKEDIYAAKRHMKKCSSSLAIREMQIKTTMRYHLTPVRMVIIKKSGNNRCWRGCGEIGTLLHCWWECKLVQPLWKTVWRFLRDLELEIPFDPAIPLLGIYPKDYKSCCYKDTCTRLFIAALFTIAKTWNQPRCPSMIDWIKKMWHIYTMEYYAAIKNDEFMSFVRTWMKLETIILSKLSQGQKTEHRMFSLIGKYCGLGLQMNHSIESKGNEITLLFMSGIHVSGRGFLASYSVIDKQDLITCLDTASNFLEPEFSKYCPAGCLLPFAEISGTIPHGYRDSSPLCMAGVHAGVVSNTLGGQISVVISKGIPYYESSLANNVTSVVGHLSTSLFTFKTSGCYGTLGMESGVIADPQITASSVLEWTDHTGQENSWKPKKARLKKPGPPWAAFATDEYQWLQIDLNKEKKITGIITTGSTMVEHNYYVSAYRILYSDDGQKWTVYREPGVEQDKIFQGNKDYHQDVRNNFLPPIIARFIRVNPTQWQQKIAMKMELLGCQFIPKGRPPKLTQPPPPRNSNDLKNTTAPPKIAKGRAPKFTQPLQPRSSNEFPAQTEQTTASPDIRNTTVTPNVTKDVALAAVLVPVLVMVLTTLILILVCAWHWRNRKKKTEGTYDLPYWDRAGWWKGMKQFLPAKAVDHEETPVRYSSSEVNHLSPREVTTVLQADSAEYAQPLVGGIVGTLHQRSTFKPEEGKEAGYADLDPYNSPGQEVYHAYAEPLPITGPEYATPIIMDMSGHPTTSVGQPSTSTFKATGNQPPPLVGTYNTLLSRTDSCSSAQAQYDTPKAGKPGLPAPDELVYQVPQSTQEVSGAGRDGECDVFKEIL

SEQ ID NO: 30513 - protein, 901 aa, Artificial Sequence
  Synthetic polypeptide
TKELLHSKRNYHQSEQATYRMGENFCNLLIRQRANIENLQRTQTNLQEKNNPINKWANDMNRHFSKEDIYAAKRHMKKCSSSLAIREMQIKTTMRYHLTPVRMVIIKKSGNNRCWRGCGEIGTLLHCWWECKLVQPLWKTVWRFLRDLELEIPFDPAIPLLGIYPKDYKSCCYKDTCTRLFIAALFTIAKTWNQPRCPSMIDWIKKMWHIYTMEYYAAIKNDEFMSFVRTWMKLETIILSKLSQGQKTEHRMFSLIGKYCGLGLQMNHSIESKGNEITLLFMSGIHVSGRGFLASYSVIDKQDLITCLDTASNFLEPEFSKYCPAGCLLPFAEISGTIPHGYRDSSPLCMAGVHAGVVSNTLGGQISVVISKGIPYYESSLANNVTSVVGHLSTSLFTFKTSGCYGTLGMESGVIADPQITASSVLEWTDHTGQENSWKPKKARLKKPGPPWAAFATDEYQWLQIDLNKEKKITGIITTGSTMVEHNYYVSAYRILYSDDGQKWTVYREPGVEQDKIFQGNKDYHQDVRNNFLPPIIARFIRVNPTQWQQKIAMKMELLGCQFIPKGRPPKLTQPPPPRNSNDLKNTTAPPKIAKGRAPKFTQPLQPRSSNEFPAQTEQTTASPDIRNTTVTPNVTKDVALAAVLVPVLVMVLTTLILILVCAWHWRNRKKKTEGTYDLPYWDRAGFYLMVSLACRHNEGWWKGMKQFLPAKAVDHEETPVRYSSSEVNHLSPREVTTVLQADSAEYAQPLVGGIVGTLHQRSTFKPEEGKEAGYADLDPYNSPGQEVYHAYAEPLPITGPEYATPIIMDMSGHPTTSVGQPSTSTFKATGNQPPPLVGTYNTLLSRTDSCSSAQAQYDTPKAGKPGLPAPDELVYQVPQSTQEVSGAGRDGECDVFKEIL

SEQ ID NO: 30514 - protein, 326 aa, Artificial Sequence
  Synthetic polypeptide
TKELLHSKRNYHQSEQATYRMGENFCNLLIRQRANIENLQRTQTNLQEKNNPINKWANDMNRHFSKEDIYAAKRHMKKCSSSLAIREMQIKTTMRYHLTPVRMVIIKKSGNNRCWRGCGEIGTLLHCWWECKLVQPLWKTVWRFLRDLELEIPFDPAIPLLGIYPKDYKSCCYKDTCTRLFIAALFTIAKTWNQPRCPSMIDWIKKMWHIYTMEYYAAIKNDEFMSFVRTWMKLETIILSKLSQGQKTEHRMFSLIGKYCGLGLQMNHSIESKGNEITLLFMSGIHVSGRGFLASYSVIDKQGNFHLLQWFLQFVISNNKNKMLFL

SEQ ID NO: 30515 - protein, 21 aa, Artificial Sequence
  Synthetic polypeptide
KWLYCPRSNYLFGHCIQFFGT

SEQ ID NO: 30516 - protein, 611 aa, Artificial Sequence
  Synthetic polypeptide
KRTQMEEHSMLMDRKNQYRENGYTAQDLITCLDTASNFLEPEFSKYCPAGCLLPFAEISGTIPHGYRDSSPLCMAGVHAGVVSNTLGGQISVVISKGIPYYESSLANNVTSVVGHLSTSLFTFKTSGCYGTLGMESGVIADPQITASSVLEWTDHTGQENSWKPKKARLKKPGPPWAAFATDEYQWLQIDLNKEKKITGIITTGSTMVEHNYYVSAYRILYSDDGQKWTVYREPGVEQDKIFQGNKDYHQDVRNNFLPPIIARFIRVNPTQWQQKIAMKMELLGCQFIPKGRPPKLTQPPPPRNSNDLKNTTAPPKIAKGRAPKFTQPLQPRSSNEFPAQTEQTTASPDIRNTTVTPNVTKDVALAAVLVPVLVMVLTTLILILVCAWHWRNRKKKTEGTYDLPYWDRAGWWKGMKQFLPAKAVDHEETPVRYSSSEVNHLSPREVTTVLQADSAEYAQPLVGGIVGTLHQRSTFKPEEGKEAGYADLDPYNSPGQEVYHAYAEPLPITGPEYATPIIMDMSGHPTTSVGQPSTSTFKATGNQPPPLVGTYNTLLSRTDSCSSAQAQYDTPKAGKPGLPAPDELVYQVPQSTQEVSGAGRDGECDVFKEIL

SEQ ID NO: 30517 - protein, 29 aa, Artificial Sequence
  Synthetic polypeptide
NKRGHKWKNIPCSWIGRINIVKMAILPKI

SEQ ID NO: 30518 - protein, 625 aa, Artificial Sequence
  Synthetic polypeptide
KRTQMEEHSMLMDRKNQYRENGYTAQDLITCLDTASNFLEPEFSKYCPAGCLLPFAEISGTIPHGYRDSSPLCMAGVHAGVVSNTLGGQISVVISKGIPYYESSLANNVTSVVGHLSTSLFTFKTSGCYGTLGMESGVIADPQITASSVLEWTDHTGQENSWKPKKARLKKPGPPWAAFATDEYQWLQIDLNKEKKITGIITTGSTMVEHNYYVSAYRILYSDDGQKWTVYREPGVEQDKIFQGNKDYHQDVRNNFLPPIIARFIRVNPTQWQQKIAMKMELLGCQFIPKGRPPKLTQPPPPRNSNDLKNTTAPPKIAKGRAPKFTQPLQPRSSNEFPAQTEQTTASPDIRNTTVTPNVTKDVALAAVLVPVLVMVLTTLILILVCAWHWRNRKKKTEGTYDLPYWDRAGFYLMVSLACRHNEGWWKGMKQFLPAKAVDHEETPVRYSSSEVNHLSPREVTTVLQADSAEYAQPLVGGIVGTLHQRSTFKPEEGKEAGYADLDPYNSPGQEVYHAYAEPLPITGPEYATPIIMDMSGHPTTSVGQPSTSTFKATGNQPPPLVGTYNTLLSRTDSCSSAQAQYDTPKAGKPGLPAPDELVYQVPQSTQEVSGAGRDGECDVFKEIL

SEQ ID NO: 30519 - protein, 19 aa, Artificial Sequence
  Synthetic polypeptide
SLCTSVFYIIKVMDVDTLY

SEQ ID NO: 30520 - protein, 13 aa, Artificial Sequence
  Synthetic polypeptide
FNLFVPQFSTSLR

SEQ ID NO: 30521 - protein, 58 aa, Artificial Sequence
  Synthetic polypeptide
GPHDEIIFLIRRERDKSSLYLCHVRTQKESNYLHARKWSSPEANYLGTLISDIQPPEL

SEQ ID NO: 30522 - protein, 715 aa, Artificial Sequence
  Synthetic polypeptide
SRTSSLQNCDGCGHTVLGPESGTLTSINYPQTYPNSTVCEWEIRVKMGERVRIKFGDFDIEDSDSCHFNYLRIYNGIGVSRTEIGKYCGLGLQMNHSIESKGNEITLLFMSGIHVSGRGFLASYSVIDKQDLITCLDTASNFLEPEFSKYCPAGCLLPFAEISGTIPHGYRDSSPLCMAGVHAGVVSNTLGGQISVVISKGIPYYESSLANNVTSVVGHLSTSLFTFKTSGCYGTLGMESGVIADPQITASSVLEWTDHTGQENSWKPKKARLKKPGPPWAAFATDEYQWLQIDLNKEKKITGIITTGSTMVEHNYYVSAYRILYSDDGQKWTVYREPGVEQDKIFQGNKDYHQDVRNNFLPPIIARFIRVNPTQWQQKIAMKMELLGCQFIPKGRPPKLTQPPPPRNSNDLKNTTAPPKIAKGRAPKFTQPLQPRSSNEFPAQTEQTTASPDIRNTTVTPNVTKDVALAAVLVPVLVMVLTTLILILVCAWHWRNRKKKTEGTYDLPYWDRAGWWKGMKQFLPAKAVDHEETPVRYSSSEVNHLSPREVTTVLQADSAEYAQPLVGGIVGTLHQRSTFKPEEGKEAGYADLDPYNSPGQEVYHAYAEPLPITGPEYATPIIMDMSGHPTTSVGQPSTSTFKATGNQPPPLVGTYNTLLSRTDSCSSAQAQYDTPKAGKPGLPAPDELVYQVPQSTQEVSGAGRDGECDVFKEIL

SEQ ID NO: 30523 - protein, 30 aa, Artificial Sequence
  Synthetic polypeptide
EVVLTRSQLLGHPDLGHPASRTVMDVDTLY

SEQ ID NO: 30524 - protein, 729 aa, Artificial Sequence
  Synthetic polypeptide
SRTSSLQNCDGCGHTVLGPESGTLTSINYPQTYPNSTVCEWEIRVKMGERVRIKFGDFDIEDSDSCHFNYLRIYNGIGVSRTEIGKYCGLGLQMNHSIESKGNEITLLFMSGIHVSGRGFLASYSVIDKQDLITCLDTASNFLEPEFSKYCPAGCLLPFAEISGTIPHGYRDSSPLCMAGVHAGVVSNTLGGQISVVISKGIPYYESSLANNVTSVVGHLSTSLFTFKTSGCYGTLGMESGVIADPQITASSVLEWTDHTGQENSWKPKKARLKKPGPPWAAFATDEYQWLQIDLNKEKKITGIITTGSTMVEHNYYVSAYRILYSDDGQKWTVYREPGVEQDKIFQGNKDYHQDVRNNFLPPIIARFIRVNPTQWQQKIAMKMELLGCQFIPKGRPPKLTQPPPPRNSNDLKNTTAPPKIAKGRAPKFTQPLQPRSSNEFPAQTEQTTASPDIRNTTVTPNVTKDVALAAVLVPVLVMVLTTLILILVCAWHWRNRKKKTEGTYDLPYWDRAGFYLMVSLACRHNEGWWKGMKQFLPAKAVDHEETPVRYSSSEVNHLSPREVTTVLQADSAEYAQPLVGGIVGTLHQRSTFKPEEGKEAGYADLDPYNSPGQEVYHAYAEPLPITGPEYATPIIMDMSGHPTTSVGQPSTSTFKATGNQPPPLVGTYNTLLSRTDSCSSAQAQYDTPKAGKPGLPAPDELVYQVPQSTQEVSGAGRDGECDVFKEIL

SEQ ID NO: 30525 - protein, 14 aa, Artificial Sequence
  Synthetic polypeptide
SWKLSTVRPEPSPC

SEQ ID NO: 30526 - protein, 565 aa, Artificial Sequence
  Synthetic polypeptide
ARSGLNPALADIYTEHAHQVVVAKYAPSGFYIASGDVSGKLRIWDTTQKEHLLKYEYQPFAGKIKDIAWTEDSKRIAVVGEGREKFGAVFLWDSGSSVGEITGHNKVINSVDIKQSRPYRLATGSDDNCAAFFEGPPFKFKFTIGDHSRFVNCVRFSPDGNRFATASADGQIYIYDGKTGEKVCALGGSKAHDGGIYAISWSPDSTHLLSASGDKTSKIWDVSVNSVVSTFPMGSTVLDQQLGCLWQKDHLLSVSLSGYINYLDRNNPSKPLHVIKGHSKSIQCLTVHKNGGKSYIYSGSHDGHINYWDSETGENDSFAGKGHTNQVSRMTVDESGQLISCSMDDTVRYTSLMLRDYSGQGVVKLDVQPKCVAVGPGGYAVVVCIGQIVLLKDQRKCFSIDNPGYEPEVVAVHPGGDTVAIGGVDGNVRLYSILGTTLKDEGKLLEAKGPVTDVAYSHDGAFLAVCDASKVVTVFSVADGYSENNVFYGHHAKIVCLAWSPDNEHFASGGMDMMVYVWTLSDPETRVKIQDAHRLHHVSSLAWLDEHTLVTTSHDASVKEWTITY

SEQ ID NO: 30527 - protein, 200 aa, Artificial Sequence
  Synthetic polypeptide
ARSGLNPALADIYTEHAHQVVVAKYAPSGFYIASGDVSGKLRIWDTTQKEHLLKYEYQPFAGKIKDIAWTEDSKRIAVVGEGREKFGAVFLWDSGSSVGEITGHNKVINSVDIKQSRPYRLATGSDDNCAAFFEGPPFKFKFTIGDHSRFVNCVRFSPDGNRFATASADGQIYIYDGKTGEKVCALGGSKAHDGGIYAVS

SEQ ID NO: 30528 - protein, 566 aa, Artificial Sequence
  Synthetic polypeptide
SWKLSTNPALADIYTEHAHQVVVAKYAPSGFYIASGDVSGKLRIWDTTQKEHLLKYEYQPFAGKIKDIAWTEDSKRIAVVGEGREKFGAVFLWDSGSSVGEITGHNKVINSVDIKQSRPYRLATGSDDNCAAFFEGPPFKFKFTIGDHSRFVNCVRFSPDGNRFATASADGQIYIYDGKTGEKVCALGGSKAHDGGIYAISWSPDSTHLLSASGDKTSKIWDVSVNSVVSTFPMGSTVLDQQLGCLWQKDHLLSVSLSGYINYLDRNNPSKPLHVIKGHSKSIQCLTVHKNGGKSYIYSGSHDGHINYWDSETGENDSFAGKGHTNQVSRMTVDESGQLISCSMDDTVRYTSLMLRDYSGQGVVKLDVQPKCVAVGPGGYAVVVCIGQIVLLKDQRKCFSIDNPGYEPEVVAVHPGGDTVAIGGVDGNVRLYSILGTTLKDEGKLLEAKGPVTDVAYSHDGAFLAVCDASKVVTVFSVADGYSENNVFYGHHAKIVCLAWSPDNEHFASGGMDMMVYVWTLSDPETRVKIQDAHRLHHVSSLAWLDEHTLVTTSHDASVKEWTITY

SEQ ID NO: 30529 - protein, 37 aa, Artificial Sequence
  Synthetic polypeptide
ARTQPLLTSTQSTPIRWWWPSMRPADSTLPPEMCLGS

SEQ ID NO: 30530 - protein, 20 aa, Artificial Sequence
  Synthetic polypeptide
HPESAGSPLILEAKHEPSPC

SEQ ID NO: 30531 - protein, 201 aa, Artificial Sequence
  Synthetic polypeptide
SWKLSTNPALADIYTEHAHQVVVAKYAPSGFYIASGDVSGKLRIWDTTQKEHLLKYEYQPFAGKIKDIAWTEDSKRIAVVGEGREKFGAVFLWDSGSSVGEITGHNKVINSVDIKQSRPYRLATGSDDNCAAFFEGPPFKFKFTIGDHSRFVNCVRFSPDGNRFATASADGQIYIYDGKTGEKVCALGGSKAHDGGIYAVS

SEQ ID NO: 30532 - protein, 76 aa, Artificial Sequence
  Synthetic polypeptide
FPLSLYMAESLSFCQCGMRKSSMCYFQIMQLKILMSSLLPFPLLANTLRMAGAEDAILTMGQRSYVSLWGHSWTIL

SEQ ID NO: 30533 - protein, 443 aa, Artificial Sequence
  Synthetic polypeptide
PWDRGHMSVCGDIHGQFFDLMKLFEVGGSPANTRYLFLGDYVDRGYFSIECVLYLWALKILYPKTLFLLRGNHECRHLTEYFTFKQECKIKYSERVYDACMDAFDCLPLAALMNQQFLCVHGGLSPEINTLDDIRKLDRFKEPPAYGPMCDILWSDPLEDFGNEKTQEHFTHNTVRGCSYFYSYPAVCEFLQHNNLLSILRAHEAQDAGYRMYRKSQTTGFPSLITIFSAPNYLDVYNNKAAVLKYENNVMNIRQFNCSPHPYWLPNFMDVFTWSLPFVGEKVTEMLVNVLNICSDDELGSEEDGFDGATAAARKEVIRNKIRAIGKMARVFSVLREESESVLTLKGLTPTGMLPSGVLSGGKQTLQSATVEAIEADEAIKGFSPQHKITSFEEAKGLDRINERMPPRRDAMPSDANLNSINKALTSETNGTDSNGSNSSNIQ

SEQ ID NO: 30534 - protein, 24 aa, Artificial Sequence
  Synthetic polypeptide
RCHSNHGTEVICQFVGTFMDNSLI

SEQ ID NO: 30535 - protein, 391 aa, Artificial Sequence
  Synthetic polypeptide
PWDRGHMSVCGDIHGQFFDLMKLFEVGGSPANTRYLFLGDYVDRGYFSIECVLYLWALKILYPKTLFLLRGNHECRHLTEYFTFKQECKIKYSERVYDACMDAFDCLPLAALMNQQFLCVHGGLSPEINTLDDIRKLDRFKEPPAYGPMCDILWSDPLEDFGNEKTQEHFTHNTVRGCSYFYSYPAVCEFLQHNNLLSILRAHEAQDAGYRMYRKSQTTGFPSLITIFSAPNYLDVYNNKVTEMLVNVLNICSDDELGSEEDGFDGATAAARKEVIRNKIRAIGKMARVFSVLREESESVLTLKGLTPTGMLPSGVLSGGKQTLQSAIKGFSPQHKITSFEEAKGLDRINERMPPRRDAMPSDANLNSINKALTSETNGTDSNGSNSSNIQ

SEQ ID NO: 30536 - protein, 433 aa, Artificial Sequence
  Synthetic polypeptide
PWDRGHMSVCGDIHGQFFDLMKLFEVGGSPANTRYLFLGDYVDRGYFSIECVLYLWALKILYPKTLFLLRGNHECRHLTEYFTFKQECKIKYSERVYDACMDAFDCLPLAALMNQQFLCVHGGLSPEINTLDDIRKLDRFKEPPAYGPMCDILWSDPLEDFGNEKTQEHFTHNTVRGCSYFYSYPAVCEFLQHNNLLSILRAHEAQDAGYRMYRKSQTTGFPSLITIFSAPNYLDVYNNKAAVLKYENNVMNIRQFNCSPHPYWLPNFMDVFTWSLPFVGEKVTEMLVNVLNICSDDELGSEEDGFDGATAAARKEVIRNKIRAIGKMARVFSVLREESESVLTLKGLTPTGMLPSGVLSGGKQTLQSAIKGFSPQHKITSFEEAKGLDRINERMPPRRDAMPSDANLNSINKALTSETNGTDSNGSNSSNIQ

SEQ ID NO: 30537 - protein, 119 aa, Artificial Sequence
  Synthetic polypeptide
PWDRGHMSVCGDIHGQFFDLMKLFEVGGSPANTRYLFLGDYVDRGYFSIECVLYLWALKILYPKTLFLLRGNHECRHLTEYFTFKQECKIKYSERVYDACMDAFDCLPLAALMNQQFLC

SEQ ID NO: 30538 - protein, 104 aa, Artificial Sequence
  Synthetic polypeptide
PWDRGHMSVCGDIHGQFFDLMKLFEVGGSPANTRYLFLGDYVDRGYFSIECVLYLWALKILYPKTLFLLRGNHECRHLTEYFTFKQECKIKYSERVYDACMDAF

SEQ ID NO: 30539 - protein, 26 aa, Artificial Sequence
  Synthetic polypeptide
KDMTTKCNVVSWMEPWNRKRPLDPRN

SEQ ID NO: 30540 - protein, 20 aa, Artificial Sequence
  Synthetic polypeptide
CSILDGTLEQKKAIRSKKLT

SEQ ID NO: 30541 - protein, 396 aa, Artificial Sequence
  Synthetic polypeptide
IGTAPVYSSQREQRRRRVISAFPTECLTAEEIFSLHGFSNATQITSSKFSVICPAVLQQLNFHPCEDRPKHKTRPSHSEVWGYGFLSVTIINLASLLGLILTPLIKKSYFPKILTFFVGLAIGTLFSNAIFQLIPEAFGFDPKVDSYVEKAVAVFGGFYLLFFFERMLKMLLKTYGQNGHTHFGNDNFGPQEKTHQPKALPAINGVTCYANPAVTEANGHIHFDNVSVVSLQDGKKEPSSCTCLKGPKLSEIGTIAWMITLCDALHNFIDGLAIGASCTLSLLQGLSTSIAILCEEFPHELGDFVILLNAGMSTRQALLFNFLSACSCYVGLAFGILVGNNFAPNIIFALAGGMFLYISLADMFPEMNDMLREKIIKWATDDIKSQLHLLWIYTAR

SEQ ID NO: 30542 - protein, 8 aa, Artificial Sequence
  Synthetic polypeptide
FLHFQLSV

SEQ ID NO: 30543 - protein, 412 aa, Artificial Sequence
  Synthetic polypeptide
IGTAPVYSSQREQRRRRVISAFPTECLTAEEIFSLHGFSNATQITSSKFSVICPAVLQQLNFHPCEDRPKHKTRPSHSEVWGYGFLSVTIINLASLLGLILTPLIKKSYFPKILTFFVGLAIGTLFSNAIFQLIPEAFGFDPKVDSYVEKAVAVFGGFYLLFFFERMLKMLLKTYGQNGHTHFGNDNFGPQEKTHQPKALPAINGVTCYANPAVTEANGHIHFDNVSVVSLQDGKKEPSSCTCLKGPKLSEIGTIAWMITLCDALHNFIDGLAIGASCTLSLLQGLSTSIAILCEEFPHELGDFVILLNAGMSTRQALLFNFLSACSCYVGLAFGILVGNNFAPNIIFALAGGMFLYISLADMFPEMNDMLREKVTGRKTDFTFFMIQNAGMLTGFTAILLITLYAGEIELE

SEQ ID NO: 30544 - protein, 81 aa, Artificial Sequence
  Synthetic polypeptide
LHWNSWAAIISQQGDIFVFDLETSAVAPFVWLDVGSIPGRFSDNGFLMTEKTRTILFYPWEPTSKNELEQSFHVTSLTDIY

SEQ ID NO: 30545 - protein, 33 aa, Artificial Sequence
  Synthetic polypeptide
FTGTAGRPSSLSKVTYLFLTWRPQLSLPLFGWM

SEQ ID NO: 30546 - protein, 13 aa, Artificial Sequence
  Synthetic polypeptide
SLEQLGGHHLSAR

SEQ ID NO: 30547 - protein, 42 aa, Artificial Sequence
  Synthetic polypeptide
RLMEIRILTTDLMTLTTDGSLWITGPIAKNLKSPLKLANGKK

SEQ ID NO: 30548 - protein, 13 aa, Artificial Sequence
  Synthetic polypeptide
SRGLWRSGFLLQI

SEQ ID NO: 30549 - protein, 861 aa, Artificial Sequence
  Synthetic polypeptide
RKGNDQTFWGLLDTGSELTLIPRDPKCHCGPPVEVEAYGDQDSYYRFNDLNYRWVSLDNWTYSKEFKIPFEISKWQKVNLILEGVDTVSKILFNEVTIGETDNMFNRYSFDITNVVRDVNSIELRFQSAVLYAAQQSKAHTRYQVPPDCPPLVQKGECHVNFVRKEQCSFSWDWGPSFPTQGIWKDVRIEAYNICHLNYFTFSPIYDKSAQEWNLEIESTFDVVSSKPVGGQVIVAIPKLQTQQTYSIELQPGKRIVELFVNISKNITVETWWPHGHGNQTGYNMTVLFELDGGLNIEKSAKVYFRTVELIEEPIKGSPGLSFYFKINGFPIFLKGSNWIPADSFQDRVTSELLRLLLQSVVDANMNTLRVWGGGIYEQDEFYELCDELGIMVWQDFMFACALYPTDQGFLDSVTAEVAYQIKRLKSHPSIIIWSGNNENEEALMMNWYHISFTDRPIYIKDYVTLYVKNIRELVLAGDKSRPFITSSPTNGAETVAEAWVSQNPNSNYFGDVHFYDYISDCWNWKVFPKARFASEYGYQSWPSFSTLEKVSSTEDWSFNSKFSLHRQHHEGGNKQMLYQAGLHFKLPQSTDPLRTFKDTIYLTQVMQAQCVKTETEFYRRSRSEIVDQQGHTMGALYWQLNDIWQAPSWASLEYGGKWKMLHYFAQNFFAPLLPVGFENENTFYIYGVSDLHSDYSMTLSVRVHTWSSLEPVCSRVTERFVMKGGEAVCLYEEPVSELLRRCGNCTRESCVVSFYLSADHELLSPTNYHFLSSPKEAVGLCKAQITAIISQQGDIFVFDLETSAVAPFVWLDVGSIPGRFSDNGFLMTEKTRTILFYPWEPTSKNELEQSFHVTSLTDIY

SEQ ID NO: 30550 - protein, 804 aa, Artificial Sequence
  Synthetic polypeptide
RKGNDQTFWGLLDTGSELTLIPRDPKCHCGPPVEVEAYGDQDSYYRFNDLNYRWVSLDNWTYSKEFKIPFEISKWQKVNLILEGVDTVSKILFNEVTIGETDNMFNRYEQCSFSWDWGPSFPTQGIWKDVRIEAYNICHLNYFTFSPIYDKSAQEWNLEIESTFDVVSSKPVGGQVIVAIPKLQTQQTYSIELQPGKRIVELFVNISKNITVETWWPHGHGNQTGYNMTVLFELDGGLNIEKSAKVYFRTVELIEEPIKGSPGLSFYFKINGFPIFLKGSNWIPADSFQDRVTSELLRLLLQSVVDANMNTLRVWGGGIYEQDEFYELCDELGIMVWQDFMFACALYPTDQGFLDSVTAEVAYQIKRLKSHPSIIIWSGNNENEEALMMNWYHISFTDRPIYIKDYVTLYVKNIRELVLAGDKSRPFITSSPTNGAETVAEAWVSQNPNSNYFGDVHFYDYISDCWNWKVFPKARFASEYGYQSWPSFSTLEKVSSTEDWSFNSKFSLHRQHHEGGNKQMLYQAGLHFKLPQSTDPLRTFKDTIYLTQVMQAQCVKTETEFYRRSRSEIVDQQGHTMGALYWQLNDIWQAPSWASLEYGGKWKMLHYFAQNFFAPLLPVGFENENTFYIYGVSDLHSDYSMTLSVRVHTWSSLEPVCSRVTERFVMKGGEAVCLYEEPVSELLRRCGNCTRESCVVSFYLSADHELLSPTNYHFLSSPKEAVGLCKAQITAIISQQGDIFVFDLETSAVAPFVWLDVGSIPGRFSDNGFLMTEKTRTILFYPWEPTSKNELEQSFHVTSLTDIY

SEQ ID NO: 30551 - protein, 142 aa, Artificial Sequence
  Synthetic polypeptide
SPEELSDLARDPPAQCSAGPVGDDMFHWQATIMGPNDSPYQGGVFFLTIHFPTDYPFKPPKVAFTTRIYHPNINSNGSICLDILRSQWSPALTISKVLLSICSLLCDPNPDDPLVPEIARIYKTDRDKYNRISREWTQKYAM

SEQ ID NO: 30552 - protein, 64 aa, Artificial Sequence
  Synthetic polypeptide
PGTVAHACNPSTLGGQGDHLRNLVIWPVTLQHNVLQVQLGMICFIGKPQLWDLMTAHIKAVYSF

SEQ ID NO: 30553 - protein, 143 aa, Artificial Sequence
  Synthetic polypeptide
SPEELSDLARDPPAQCSAGPVGDDMFHWQATIMGPNDSPYQGGVFFLTIHFPTDYPFKPPKVAFTTRIYHPNINSNGSICLDILRSQWSPALTISKVLLSICSLLCDPNPDDPLVPEIARIYKTDRDKYNRLAREWTEKYAML

SEQ ID NO: 30554 - protein, 43 aa, Artificial Sequence
  Synthetic polypeptide
SPEELSDLARDPPAQCSAGPVGDDMFHWQATIMGPISNYMLDN

SEQ ID NO: 30555 - protein, 53 aa, Artificial Sequence
  Synthetic polypeptide
PGTVAHACNPSTLGGQGDHLRNLVIWPVTLQHNVLQVQLGMICFIGKPQLWDL

SEQ ID NO: 30556 - protein, 30 aa, Artificial Sequence
  Synthetic polypeptide
SPEELSDLARDPPAQCSAGPVGDDKFFFFF

SEQ ID NO: 30557 - protein, 48 aa, Artificial Sequence
  Synthetic polypeptide
PGTVAHACNPSTLGGQGDHLRNLVIWPVTLQHNVLQVQLGMISFFSFS

SEQ ID NO: 30558 - protein, 91 aa, Artificial Sequence
  Synthetic polypeptide
SPEELSDLARDPPAQCSAGPVGDDMFHWQATIMGPNDSPYQGGVFFLTIHFPTDYPFKPPKVAFTTRIYHPNINSNGSICLDILRSQWSPA

SEQ ID NO: 30559 - protein, 50 aa, Artificial Sequence
  Synthetic polypeptide
SPEELSDLARDPPAQCSAGPVGDDMFHWQATIMGPQNSFLSWVDKQLYAG

SEQ ID NO: 30560 - protein, 60 aa, Artificial Sequence
  Synthetic polypeptide
PGTVAHACNPSTLGGQGDHLRNLVIWPVTLQHNVLQVQLGMICFIGKPQLWDLKIPFYPG

SEQ ID NO: 30561 - protein, 73 aa, Artificial Sequence
  Synthetic polypeptide
SPEELSDLARDPPAQCSAGPVGDDMFHWQATIMGPNDSPYQGGVFFLTIHFPTDYPFKPPKVAFTTRIYHPNI

SEQ ID NO: 30562 - protein, 44 aa, Artificial Sequence
  Synthetic polypeptide
SPEELSDLARDPPAQCSAGPVGDDMFHWQATIMGPNDSPYQGGV

SEQ ID NO: 30563 - protein, 61 aa, Artificial Sequence
  Synthetic polypeptide
PGTVAHACNPSTLGGQGDHLRNLVIWPVTLQHNVLQVQLGMICFIGKPQLWDLMTAHIKAV

SEQ ID NO: 30564 - protein, 156 aa, Artificial Sequence
  Synthetic polypeptide
GQARWLTPVIPALWEAKELSDLARDPPAQCSAGPVGDDMFHWQATIMGPNDSPYQGGVFFLTIHFPTDYPFKPPKVAFTTRIYHPNINSNGSICLDILRSQWSPALTISKVLLSICSLLCDPNPDDPLVPEIARIYKTDRDKYNRISREWTQKYAM

SEQ ID NO: 30565 - protein, 51 aa, Artificial Sequence
  Synthetic polypeptide
SQHFGRPRNLVIWPVTLQHNVLQVQLGMICFIGKPQLWDLMTAHIKAVYSF

SEQ ID NO: 30566 - protein, 18 aa, Artificial Sequence
  Synthetic polypeptide
PGTVAHACNPSTLGGQGT

SEQ ID NO: 30567 - protein, 157 aa, Artificial Sequence
  Synthetic polypeptide
GQARWLTPVIPALWEAKELSDLARDPPAQCSAGPVGDDMFHWQATIMGPNDSPYQGGVFFLTIHFPTDYPFKPPKVAFTTRIYHPNINSNGSICLDILRSQWSPALTISKVLLSICSLLCDPNPDDPLVPEIARIYKTDRDKYNRLAREWTEKYAML

SEQ ID NO: 30568 - protein, 57 aa, Artificial Sequence
  Synthetic polypeptide
GQARWLTPVIPALWEAKELSDLARDPPAQCSAGPVGDDMFHWQATIMGPISNYMLDN

SEQ ID NO: 30569 - protein, 40 aa, Artificial Sequence
  Synthetic polypeptide
SQHFGRPRNLVIWPVTLQHNVLQVQLGMICFIGKPQLWDL

SEQ ID NO: 30570 - protein, 44 aa, Artificial Sequence
  Synthetic polypeptide
GQARWLTPVIPALWEAKELSDLARDPPAQCSAGPVGDDKFFFFF

SEQ ID NO: 30571 - protein, 35 aa, Artificial Sequence
  Synthetic polypeptide
SQHFGRPRNLVIWPVTLQHNVLQVQLGMISFFSFS

SEQ ID NO: 30572 - protein, 105 aa, Artificial Sequence
  Synthetic polypeptide
GQARWLTPVIPALWEAKELSDLARDPPAQCSAGPVGDDMFHWQATIMGPNDSPYQGGVFFLTIHFPTDYPFKPPKVAFTTRIYHPNINSNGSICLDILRSQWSPA

SEQ ID NO: 30573 - protein, 64 aa, Artificial Sequence
  Synthetic polypeptide
GQARWLTPVIPALWEAKELSDLARDPPAQCSAGPVGDDMFHWQATIMGPQNSFLSWVDKQLYAG

SEQ ID NO: 30574 - protein, 47 aa, Artificial Sequence
  Synthetic polypeptide
SQHFGRPRNLVIWPVTLQHNVLQVQLGMICFIGKPQLWDLKIPFYPG

SEQ ID NO: 30575 - protein, 87 aa, Artificial Sequence
  Synthetic polypeptide
GQARWLTPVIPALWEAKELSDLARDPPAQCSAGPVGDDMFHWQATIMGPNDSPYQGGVFFLTIHFPTDYPFKPPKVAFTTRIYHPNI

SEQ ID NO: 30576 - protein, 58 aa, Artificial Sequence
  Synthetic polypeptide
GQARWLTPVIPALWEAKELSDLARDPPAQCSAGPVGDDMFHWQATIMGPNDSPYQGGV

SEQ ID NO: 30577 - protein, 48 aa, Artificial Sequence
  Synthetic polypeptide
SQHFGRPRNLVIWPVTLQHNVLQVQLGMICFIGKPQLWDLMTAHIKAV

SEQ ID NO: 30578 - protein, 46 aa, Artificial Sequence
  Synthetic polypeptide
TYKLRDTTASPSDPPERINHADTLILDFSPLELVLLLSPRLECNGM

SEQ ID NO: 30579 - protein, 24 aa, Artificial Sequence
  Synthetic polypeptide
HLDFGLLATRTSLALVTQAGVQWH

SEQ ID NO: 30580 - protein, 66 aa, Artificial Sequence
  Synthetic polypeptide
TYKLRDTTASPSDPPERINHADTLILDFSPLELFRMASVIAFPWCTRTSWLPCSSSIPPEEETTEG

SEQ ID NO: 30581 - protein, 102 aa, Artificial Sequence
  Synthetic polypeptide
NFSEWLRLLPFLGVLALLGYLAVRPFLPKKKQQKDSLINLKIQKENPKVVNEINIEDLCLTKAAYCRCWRSKTFPACDGSHNKHNELTGDNVGPLILKKKEV

SEQ ID NO: 30582 - protein, 46 aa, Artificial Sequence
  Synthetic polypeptide
HLDFGLLATRTFQNGFGYCLSLVYSHFLATLQFVHSSRRRNNRRIA

SEQ ID NO: 30583 - protein, 14 aa, Artificial Sequence
  Synthetic polypeptide
SQHFGRSRQEDHLR

SEQ ID NO: 30584 - protein, 381 aa, Artificial Sequence
  Synthetic polypeptide
WVWWLMPVIPALWEVKAGGSLEMKSDITEGVDIPKKPRLEKPETQSSPITVQSSKDLPMADLSSFEETSADDFAMEMGLACVVCRQMMVASGNQLVECQECHNLYHRDCHKPQVTDKEANDPRLVWYCARCTRQMKRMAQKTQKPPQKPAPAVVSVTPAVKDPLVKKPETKLKQETTFLAFKRTEVKTSTVISGNSSSASVSSSVTSGLTGWAAFAAKTSSAGPSTAKLSSTTQNNTGKPATSSANQKPVGLTGLATSSKGGIGSKIGSNNSTTPTVPLKPPPPLTLGKTGLSRSVSCDNVSKVGLPSPSSLVPGSSSQLSGNGNSGTSGPSGSTTSKTTSESSSSPSASLKGPTSQESQLNAMKRLQMVKKKAAQKKLKK

SEQ ID NO: 30585 - protein, 78 aa, Artificial Sequence
  Synthetic polypeptide
WVWWLMPVIPALWEVKAGGSLEMKSDITEGVDIPKKPRLEKPETQSSPITVQSSKDLPMADLSSFEETSADDFAMEMG

SEQ ID NO: 30586 - protein, 50 aa, Artificial Sequence
  Synthetic polypeptide
WVWWLMPVIPALWEVKAGGSLEMKSDITEGVDIPKKPRLEKPETQSSPIT

SEQ ID NO: 30587 - protein, 85 aa, Artificial Sequence
  Synthetic polypeptide
AGHGGSYLLITGLWKAEEHMILCRFADQTAVQLPPQRRLIGKQCMCLVDLDRARAAEECGYSVQVISMEPESCSPKNNMIVGVPI

SEQ ID NO: 30588 - protein, 10 aa, Artificial Sequence
  Synthetic polypeptide
SQDFGRLRNT

SEQ ID NO: 30589 - protein, 28 aa, Artificial Sequence
  Synthetic polypeptide
TVRTHGHRKVFSLRMVKALDKVEIEARF

SEQ ID NO: 30590 - protein, 10 aa, Artificial Sequence
  Synthetic polypeptide
EHMDTGRFSL

SEQ ID NO: 30591 - protein, 548 aa, Artificial Sequence
  Synthetic polypeptide
ELNSENTWTQEGFLFEDGESFGQGRDRSSLLDDTTVTLSLCQLRNRLKDVGGEAFYPLLEDDQSNLPHSNSNNELSAAATLPLIIREKDTEYQLNRIILFDRLLKAYPYKKNQIWKEARVDIPPLMRGLTWAALLGVEGAIHAKYDAIDKDTPIPTDRQIEVDIPRCHQYDELLSSPEGHAKFRRVLKAWVVSHPDLVYWQGLDSLCAPFLYLNFNNEALAYACMSAFIPKYLYNFFLKDNSHVIQEYLTVFSQMIAFHDPELSNHLNEIGFIPDLYAIPWFLTMFTHVFPLHKIFHLWDTLLLGNSSFPFCIGVAILQQLRDRLLANGFNECILLFSDLPEIDIERCVRESINLFCWTPKSATYRQHAQPPKPSSDSSGGRSSAPYFSAECPDPPKTDLSRESIPLNDLKSEVSPRISAEDLIDLCELTVTGHFKTPSKKTKSSKPKLLVVDIRNSEDFIRGHISGSINIPFSAAFTAEGELTQGPYTAMLQNFKGKVIVIVGHVAKHTAEFAAHLVKMKYPRICILDGGINKIKPTGLLTIPSPQI

SEQ ID NO: 30592 - protein, 55 aa, Artificial Sequence
  Synthetic polypeptide
ELNSENTWTQEGFLFEDGESFGQGRDRSSLLDDTTVTLSLCQLRNEQTFCLQVGS

SEQ ID NO: 30593 - protein, 69 aa, Artificial Sequence
  Synthetic polypeptide
MWHIYTMEYYAAIKNDEFMSFVGTWMKLEIIILSKLSQEQKTKHRIFSLIVFSLRMVKALDKVEIEARF

SEQ ID NO: 30594 - protein, 552 aa, Artificial Sequence
  Synthetic polypeptide
TIARTKNQTPHILTHSFLFEDGESFGQGRDRSSLLDDTTVTLSLCQLRNRLKDVGGEAFYPLLEDDQSNLPHSNSNNELSAAATLPLIIREKDTEYQLNRIILFDRLLKAYPYKKNQIWKEARVDIPPLMRGLTWAALLGVEGAIHAKYDAIDKDTPIPTDRQIEVDIPRCHQYDELLSSPEGHAKFRRVLKAWVVSHPDLVYWQGLDSLCAPFLYLNFNNEALAYACMSAFIPKYLYNFFLKDNSHVIQEYLTVFSQMIAFHDPELSNHLNEIGFIPDLYAIPWFLTMFTHVFPLHKIFHLWDTLLLGNSSFPFCIGVAILQQLRDRLLANGFNECILLFSDLPEIDIERCVRESINLFCWTPKSATYRQHAQPPKPSSDSSGGRSSAPYFSAECPDPPKTDLSRESIPLNDLKSEVSPRISAEDLIDLCELTVTGHFKTPSKKTKSSKPKLLVVDIRNSEDFIRGHISGSINIPFSAAFTAEGELTQGPYTAMLQNFKGKVIVIVGHVAKHTAEFAAHLVKMKYPRICILDGGINKIKPTGLLTIPSPQI

SEQ ID NO: 30595 - protein, 59 aa, Artificial Sequence
  Synthetic polypeptide
TIARTKNQTPHILTHSFLFEDGESFGQGRDRSSLLDDTTVTLSLCQLRNEQTFCLQVGS

SEQ ID NO: 30596 - protein, 364 aa, Artificial Sequence
  Synthetic polypeptide
EVRSPSARQPPRLGSEERFRFPPGSGPVREVGGSPRPAGAPSGRIFCRLLAKMANNDAVLKRLEQKGAEADQIIEYLKQQVSLLKEKAILQATLREEKKLRVENAKLKKEIEELKQELIQAEIQNGVKQIPFPSGTPLHANSMVSENVIQSTAVTTVSSGTKEQIKGGTGDEKKAKEKIEKKGEKKEKKQQSIAGSADSKPIDVSRLDLRIGCIITARKHPDADSLYVEEVDVGEIAPRTVVSGLVNHVPLEQMQNRMVILLCNLKPAKMRGVLSQAMVMCASSPEKIEILAPPNGSVPGDRITFDAFPGEPDKELNPKKKIWEQIQPDLHTNDECVATYKGVPFEVKGKGVCRAQTMSNSGIK

SEQ ID NO: 30597 - protein, 57 aa, Artificial Sequence
  Synthetic polypeptide
GAPPPGSRPVWEVRSVSAFRPAAAPSGRWGAAPARPAPRLGGFSAVSWQKWQIMMLF

SEQ ID NO: 30598 - protein, 39 aa, Artificial Sequence
  Synthetic polypeptide
GAFPLSARQRPRPGGGGQPPPGRRPVWEDFLPSLGKNGK

SEQ ID NO: 30599 - protein, 31 aa, Artificial Sequence
  Synthetic polypeptide
KKQKMVQDKCFQEHTYNLCQQHFLLADYKHS

SEQ ID NO: 30600 - protein, 232 aa, Artificial Sequence
  Synthetic polypeptide
SLCLCCRFSFRTFKRKVVFLVPECPNEKNKRWFKTSVSRNIHTIFASNTSSLQITSIANATTRQDRFAGLHFFNPVPVMKLVEVIKTPMTSQKTFESLVDFSKALGKHPVSCKDTPGFIVNRLLVPYLMEAIRLYERDFQTCGDSNSGLGFSLKGDASKEDIDTAMKLGAGYPMGPFELLDYVGLDTTKFIVDGWHEMDAENPLHQPSPSLNKLVAENKFGKKTGEGFYKYK

SEQ ID NO: 30601 - protein, 39 aa, Artificial Sequence
  Synthetic polypeptide
FFWYLSVRMKKTKDGSRQVFPGTYIQSLPATLPPCRLQA

SEQ ID NO: 30602 - protein, 215 aa, Artificial Sequence
  Synthetic polypeptide
SLCLCCRFSFRTFKRKVVFLVPECPNEKNKRWFKTSVSRNIHTIFASNTSSLQITSIANATTRQDRFAGLHFFNPVPVMKLVEVIKTPMTSQKTFESLVDFSKALGKHPVSCKDTPGFIVNRLLVPYLMEAIRLYERGDASKEDIDTAMKLGAGYPMGPFELLDYVGLDTTKFIVDGWHEMDAENPLHQPSPSLNKLVAENKFGKKTGEGFYKYK

SEQ ID NO: 30603 - protein, 16 aa, Artificial Sequence
  Synthetic polypeptide
NGMPTDDNARPSRETR

SEQ ID NO: 30604 - protein, 391 aa, Artificial Sequence
  Synthetic polypeptide
MNIFQVHRMGCPLMTMPGPPGKRGKRGRRGESGPPGQPGPQGPPGPKGDKGEQGDQGPRGPLGPPGQKGSIGAPGIPGMNGQKGEPGLPGAVGQNGIPGPKGEPGEQGEKGDAGENGPKGDTGEKGDPGSSAAGIKGEPGESGRPGQKGEPGLPGLPGLPGIKGEPGFIGPQGEPGLPGLPGTKGERGEAGPPGRGERGEPGAPGPKGKQGESGTRGPKGSKGDRGEKGDSGAQGPRGPPGQKGDQGATEIIDYNGNLHEALQRITTLTVTGPPGPPGPQGLQGPKGEQGSPGIPGMDGEQGLKGSKGDMGDPGSQWNERRKRRFWNAGSTGSFYHRPTRPTRSPWPTWPHGTSWTSWTKGSIWLRRKARIPGYRWSYGTPWPCRSQRRKR

SEQ ID NO: 30605 - protein, 47 aa, Artificial Sequence
  Synthetic polypeptide
QCQALQGNEVREAEEENLVLLDSLVLRALLVQKAIRENKVIRDLGVL

SEQ ID NO: 30606 - protein, 549 aa, Artificial Sequence
  Synthetic polypeptide
MNIFQVHRMGCPLMTMPGPPGKRGKRGRRGESGPPGQPGPQGPPGPKGDKGEQGDQGPRMVFPKINHGFLSADQQLIKRRLIKGDQGQAGPPGPPGPPGPRGPPGDTGKDGPRGMPGVPGEPGKPGEQGLMGPLGPPGQKGSIGAPGIPGMNGQKGEPGLPGAVGQNGIPGPKGEPGEQGEKGDAGENGPKGDTGEKGDPGSSAAGIKGEPGESGRPGQKGEPGLPGLPGLPGIKGEPGFIGPQGEPGLPGLPGTKGERGEAGPPGRGERGEPGAPGPKGKQGESGTRGPKGSKGDRGEKGDSGAQGPRGPPGQKGDQGATEIIDYNGNLHEALQRITTLTVTGPPGPPGPQGLQGPKGEQGSPGIPGMDGEQGLKGSKGDMGDPGMTGEKGGIGLPGLPGANGMKGEKGDSGMPGPQGPSIIGPPGPPGPHGPPGPMGPHGLPGPKGTDGPMGPHGPAGPKGERGEKGAMGEPGPRGPYGLPGKDGEPGLDGFPGPRGEKGDLGEKGEKGFRGVKGEKGEPGQPGLDGLDAPCQLGPDGLPMPGCWQK

SEQ ID NO: 30607 - protein, 66 aa, Artificial Sequence
  Synthetic polypeptide
QCQALQGNEVREAEEENLVLLDSLVLRALLVQKAIRENKVIRDLGWCFLKSIMGFSLLISSSLNAA

SEQ ID NO: 30608 - protein, 540 aa, Artificial Sequence
  Synthetic polypeptide
MNIFQVHRMGCPLMTMPGPPGKRGKRGRRGESGPPGQPGPQGPPGPKGDKGEQGDQGPRGLPGFPTVAALHSNQILTVKGDQGQAGPPGPPGPPGPRGPPGDTGKDGPRGMPGVPGEPGKPGEQGLMGPLGPPGQKGSIGAPGIPGMNGQKGEPGLPGAVGQNGIPGPKGEPGEQGEKGDAGENGPKGDTGEKGDPGSSAAGIKGEPGESGRPGQKGEPGLPGLPGLPGIKGEPGFIGPQGEPGLPGLPGTKGERGEAGPPGRGERGEPGAPGPKGDRGEKGDSGAQGPRGPPGQKGDQGATEIIDYNGNLHEALQGPPGPPGPQGLQGPKGEQGSPGIPGMDGEQGLKGSKGDMGDPGMTGEKGGIGLPGLPGANGMKGEKGDSGMPGPQGPSIIGPPGPPGPHGPPGPMGPHGLPGPKGEPGLNGVKGLKGEPGQKGDRGPLGLPGASGLDGKPGSRGTDGPMGPHGPAGPKGERGEKGAMGEPGPRGPYGLPGFPGPRGEKGDLGEKGEKVTSPSQHVPCLILLLLSALLFSLCDSI

SEQ ID NO: 30609 - protein, 111 aa, Artificial Sequence
  Synthetic polypeptide
QCQALQGNEVREAEEENLVLLDSLVLRALLVQKAIRENKVIRDLGACQASPQLLPCTVIRSSPSRVTKDRQGLQDPLALQAQEGHLGTQGKMAPVECQEYPVNQESQENKA

SEQ ID NO: 30610 - protein, 537 aa, Artificial Sequence
  Synthetic polypeptide
MNIFQVHRMGCPLMTMPGPPGKRGKRGRRGESGPPGQPGPQGPPGPKGDKGEQGDQGPRMVFPKINHGFLSADQQLIKRRLIKGDQGQAGPPGPPGPPGPRGPPGDTGKDGPRGMPGVPGEPGKPGEQGLMGPLGPPGQKGSIGAPGIPGMNGQKGEPGLPGAVGQNGIPGPKGEPGEQGEKGDAGENGPKGDTGEKGDPGSSAAGIKGEPGESGRPGQKGEPGLPGLPGLPGIKGEPGFIGPQGEPGLPGLPGTKGERGEAGPPGRGERGEPGAPGPKGKQGESGTRGPKGSKGDRGEKGDSGAQGPRGPPGQKGDQGATEIIDYNGNLHEALQRITTLTVTGPPGPPGPQGLQGPKGEQGSPGIPGMDGEQGLKGSKGDMGDPGMTGEKGGIGLPGLPGANGMKGEKGDSGMPGPQGPSIIGPPGPPGPHGPPGPMGPHGLPGPKGTDGPMGPHGPAGPKGERGEKGAMGEPGPRGPYGLPGKDGEPGLDGFPGPRGEKGDLGEKGEKVTSPSQHVPCLILLLLSALLFSLCDSI

SEQ ID NO: 30611 - protein, 385 aa, Artificial Sequence
  Synthetic polypeptide
QGEIGLLFYHEGPPGKRGKRGRRGESGPPGQPGPQGPPGPKGDKGEQGDQGPRGPLGPPGQKGSIGAPGIPGMNGQKGEPGLPGAVGQNGIPGPKGEPGEQGEKGDAGENGPKGDTGEKGDPGSSAAGIKGEPGESGRPGQKGEPGLPGLPGLPGIKGEPGFIGPQGEPGLPGLPGTKGERGEAGPPGRGERGEPGAPGPKGKQGESGTRGPKGSKGDRGEKGDSGAQGPRGPPGQKGDQGATEIIDYNGNLHEALQRITTLTVTGPPGPPGPQGLQGPKGEQGSPGIPGMDGEQGLKGSKGDMGDPGSQWNERRKRRFWNAGSTGSFYHRPTRPTRSPWPTWPHGTSWTSWTKGSIWLRRKARIPGYRWSYGTPWPCRSQRRKR

SEQ ID NO: 30612 - protein, 60 aa, Artificial Sequence
  Synthetic polypeptide
LTLTSKGKLDCYSTTKALQGNEVREAEEENLVLLDSLVLRALLVQKAIRENKVIRDLGVL

SEQ ID NO: 30613 - protein, 19 aa, Artificial Sequence
  Synthetic polypeptide
LARGNWTAILPRRPSRETR

SEQ ID NO: 30614 - protein, 543 aa, Artificial Sequence
  Synthetic polypeptide
QGEIGLLFYHEGPPGKRGKRGRRGESGPPGQPGPQGPPGPKGDKGEQGDQGPRMVFPKINHGFLSADQQLIKRRLIKGDQGQAGPPGPPGPPGPRGPPGDTGKDGPRGMPGVPGEPGKPGEQGLMGPLGPPGQKGSIGAPGIPGMNGQKGEPGLPGAVGQNGIPGPKGEPGEQGEKGDAGENGPKGDTGEKGDPGSSAAGIKGEPGESGRPGQKGEPGLPGLPGLPGIKGEPGFIGPQGEPGLPGLPGTKGERGEAGPPGRGERGEPGAPGPKGKQGESGTRGPKGSKGDRGEKGDSGAQGPRGPPGQKGDQGATEIIDYNGNLHEALQRITTLTVTGPPGPPGPQGLQGPKGEQGSPGIPGMDGEQGLKGSKGDMGDPGMTGEKGGIGLPGLPGANGMKGEKGDSGMPGPQGPSIIGPPGPPGPHGPPGPMGPHGLPGPKGTDGPMGPHGPAGPKGERGEKGAMGEPGPRGPYGLPGKDGEPGLDGFPGPRGEKGDLGEKGEKGFRGVKGEKGEPGQPGLDGLDAPCQLGPDGLPMPGCWQK

SEQ ID NO: 30615 - protein, 79 aa, Artificial Sequence
  Synthetic polypeptide
LTLTSKGKLDCYSTTKALQGNEVREAEEENLVLLDSLVLRALLVQKAIRENKVIRDLGWCFLKSIMGFSLLISSSLNAA

SEQ ID NO: 30616 - protein, 534 aa, Artificial Sequence
  Synthetic polypeptide
QGEIGLLFYHEGPPGKRGKRGRRGESGPPGQPGPQGPPGPKGDKGEQGDQGPRGLPGFPTVAALHSNQILTVKGDQGQAGPPGPPGPPGPRGPPGDTGKDGPRGMPGVPGEPGKPGEQGLMGPLGPPGQKGSIGAPGIPGMNGQKGEPGLPGAVGQNGIPGPKGEPGEQGEKGDAGENGPKGDTGEKGDPGSSAAGIKGEPGESGRPGQKGEPGLPGLPGLPGIKGEPGFIGPQGEPGLPGLPGTKGERGEAGPPGRGERGEPGAPGPKGDRGEKGDSGAQGPRGPPGQKGDQGATEIIDYNGNLHEALQGPPGPPGPQGLQGPKGEQGSPGIPGMDGEQGLKGSKGDMGDPGMTGEKGGIGLPGLPGANGMKGEKGDSGMPGPQGPSIIGPPGPPGPHGPPGPMGPHGLPGPKGEPGLNGVKGLKGEPGQKGDRGPLGLPGASGLDGKPGSRGTDGPMGPHGPAGPKGERGEKGAMGEPGPRGPYGLPGFPGPRGEKGDLGEKGEKVTSPSQHVPCLILLLLSALLFSLCDSI

SEQ ID NO: 30617 - protein, 124 aa, Artificial Sequence
  Synthetic polypeptide
LTLTSKGKLDCYSTTKALQGNEVREAEEENLVLLDSLVLRALLVQKAIRENKVIRDLGACQASPQLLPCTVIRSSPSRVTKDRQGLQDPLALQAQEGHLGTQGKMAPVECQEYPVNQESQENKA

SEQ ID NO: 30618 - protein, 531 aa, Artificial Sequence
  Synthetic polypeptide
QGEIGLLFYHEGPPGKRGKRGRRGESGPPGQPGPQGPPGPKGDKGEQGDQGPRMVFPKINHGFLSADQQLIKRRLIKGDQGQAGPPGPPGPPGPRGPPGDTGKDGPRGMPGVPGEPGKPGEQGLMGPLGPPGQKGSIGAPGIPGMNGQKGEPGLPGAVGQNGIPGPKGEPGEQGEKGDAGENGPKGDTGEKGDPGSSAAGIKGEPGESGRPGQKGEPGLPGLPGLPGIKGEPGFIGPQGEPGLPGLPGTKGERGEAGPPGRGERGEPGAPGPKGKQGESGTRGPKGSKGDRGEKGDSGAQGPRGPPGQKGDQGATEIIDYNGNLHEALQRITTLTVTGPPGPPGPQGLQGPKGEQGSPGIPGMDGEQGLKGSKGDMGDPGMTGEKGGIGLPGLPGANGMKGEKGDSGMPGPQGPSIIGPPGPPGPHGPPGPMGPHGLPGPKGTDGPMGPHGPAGPKGERGEKGAMGEPGPRGPYGLPGKDGEPGLDGFPGPRGEKGDLGEKGEKVTSPSQHVPCLILLLLSALLFSLCDSI

SEQ ID NO: 30619 - protein, 25 aa, Artificial Sequence
  Synthetic polypeptide
DKMWRWKTVILILILCRTKQISILV

SEQ ID NO: 30620 - protein, 55 aa, Artificial Sequence
  Synthetic polypeptide
SCVGLSKSVSWCEPAILQYRRIESSEFSTTRKPETCKPYSGEEYFTYDSCLGSCT

SEQ ID NO: 30621 - protein, 774 aa, Artificial Sequence
  Synthetic polypeptide
ANQYPGVNQLSSSIGGLSLQSSPQPESLRPVNLTQERNILPMTPVWAPVPNLNADLKKLNCSPDSFRCTLTNIPQTQALLNKAKLPLGLLLHPFRDLTQLPVITSNTIVRCRSCRTYINPFVSFIDQRRWKCNLCYRVNDVPEEFMYNPLTRSYGEPHKRPEVQNSTVEFIASSDYMLRPPQPAVYLFVLDVSHNAVEAGYLTILCQSLLENLDKLPGDSRTRIGFMTFDSTIHFYNLQEGLSQPQMLIVSDIDDVFLPTPDSLLVNLYESKELIKDLLNALPNMFTNTRETHSALGPALQAAFKLMSPTGGRVSVFQTQLPSLGAGLLQSREDPNQRSSTKVVQHLGPATDFYKKLALDCSGQQTAVDLFLLSSQYSDLASLACMSKYSAGCIYYYPSFHYTHNPSQAEKLQKDLKRYLTRKIGFEAVMRIRCTKGLSMHTFHGNFFVRSTDLLSLANINPDAGFAVQLSIEESLTDTSLVCFQTALLYTSSKGERRIRVHTLCLPVVSSLADVYAGVDVQAAICLLANMAVDRSVSSSLSDARDALVNAVVDSLSAYGSTVSNLQHSALMAPSSLKLFPLYVLALLKQKAFRTGTSTRLDDRVYAMCQIKSQPLVHLMKMIHPNLYRIDRLTDEGAVHVNDRIVPQPPLQKLSAEKLTREGAFLMDCGSVFYIWVGKGCDNNFIEDVLGYTNFASIPQKMTHLPELDTLSSERARSFITWLRDSRPLSPILHIVKDESPAKAEFFQHLIEDRTEAAFSYYEFLLHVQQQICK

SEQ ID NO: 30622 - protein, 24 aa, Artificial Sequence
  Synthetic polypeptide
DKMWRWKTVILILILCRTKQIILV

SEQ ID NO: 30623 - protein, 54 aa, Artificial Sequence
  Synthetic polypeptide
SCVGLSKLSWCEPAILQYRRIESSEFSTTRKPETCKPYSGEEYFTYDSCLGSCT

SEQ ID NO: 30624 - protein, 773 aa, Artificial Sequence
  Synthetic polypeptide
ANYPGVNQLSSSIGGLSLQSSPQPESLRPVNLTQERNILPMTPVWAPVPNLNADLKKLNCSPDSFRCTLTNIPQTQALLNKAKLPLGLLLHPFRDLTQLPVITSNTIVRCRSCRTYINPFVSFIDQRRWKCNLCYRVNDVPEEFMYNPLTRSYGEPHKRPEVQNSTVEFIASSDYMLRPPQPAVYLFVLDVSHNAVEAGYLTILCQSLLENLDKLPGDSRTRIGFMTFDSTIHFYNLQEGLSQPQMLIVSDIDDVFLPTPDSLLVNLYESKELIKDLLNALPNMFTNTRETHSALGPALQAAFKLMSPTGGRVSVFQTQLPSLGAGLLQSREDPNQRSSTKVVQHLGPATDFYKKLALDCSGQQTAVDLFLLSSQYSDLASLACMSKYSAGCIYYYPSFHYTHNPSQAEKLQKDLKRYLTRKIGFEAVMRIRCTKGLSMHTFHGNFFVRSTDLLSLANINPDAGFAVQLSIEESLTDTSLVCFQTALLYTSSKGERRIRVHTLCLPVVSSLADVYAGVDVQAAICLLANMAVDRSVSSSLSDARDALVNAVVDSLSAYGSTVSNLQHSALMAPSSLKLFPLYVLALLKQKAFRTGTSTRLDDRVYAMCQIKSQPLVHLMKMIHPNLYRIDRLTDEGAVHVNDRIVPQPPLQKLSAEKLTREGAFLMDCGSVFYIWVGKGCDNNFIEDVLGYTNFASIPQKMTHLPELDTLSSERARSFITWLRDSRPLSPILHIVKDESPAKAEFFQHLIEDRTEAAFSYYEFLLHVQQQICK

SEQ ID NO: 30625 - protein, 30 aa, Artificial Sequence
  Synthetic polypeptide
QLEKMLKTHRTTLVSRLEMTTRKWEHFLVN

SEQ ID NO: 30626 - protein, 33 aa, Artificial Sequence
  Synthetic polypeptide
LLKNGQRGAVLLALKMKEEEPRNVGSSSNWKRC

SEQ ID NO: 30627 - protein, 96 aa, Artificial Sequence
  Synthetic polypeptide
KKRSQGMWAALATGKDVEDSQNHTGEPVGDDYKKMGTLFGELNKNLINMGFTRMYFGERIVEPVIVIFFWVMLWFLGLQALGLVAVLCLVIIYVQQ

SEQ ID NO: 30628 - protein, 42 aa, Artificial Sequence
  Synthetic polypeptide
MTPIHSSCRCQLKNSFLQKSSKTISYPPEDPSILEHAQEVST

SEQ ID NO: 30629 - protein, 32 aa, Artificial Sequence
  Synthetic polypeptide
LLFTHLVDASLRILSYRSLPKPSPTLQRIQVF

SEQ ID NO: 30630 - protein, 291 aa, Artificial Sequence
  Synthetic polypeptide
EFFPTEVFQNHLLPSRGSKYFRTCSRGEHLTIEFENLVESDEGESPGSSHRPLTEEEIVDLRERHYDSIAEKQKDLDKKIQKELALQEEKLRLEEEALYAAQREAARAAKQRKLLEQERQRIVQQYHPSNNGEYQSSGPEDDFESCLRNMKSQYEVFRSSRLSSDATVLTPNTESSCDLMTKTKSTSGNDDSTSLDLEWEDEEGMNRMLPMRERSKTEEDILRAALKYSNKKTGSNPTSASDDSNGLEWENDFVSAEMDDNGNSEYSGFVNPVLELSDSGIRHSDTDQQTR

SEQ ID NO: 30631 - protein, 258 aa, Artificial Sequence
  Synthetic polypeptide
EFFPTEVFQNHLLPSRGSKYFRTCSRGEHLTIEFENLVESDEGESPGSSHRPLTEEEIVDLRERHYDSIAEKQKDLDKKIQKEQERQRIVQQYHPSNNGEYQSSGPEDDFESCLRNMKSQYEVFRSSRLSSDATVLTPNTESSCDLMTKTKSTSGNDDSTSLDLEWEDEEGMNRMLPMRERSKTEEDILRAALKYSNKKTGSNPTSASDDSNGLEWENDFVSAEMDDNGNSEYSGFVNPVLELSDSGIRHSDTDQQTR

SEQ ID NO: 30632 - protein, 21 aa, Artificial Sequence
  Synthetic polypeptide
RFHQVICKMLNKVSACSLRQL

SEQ ID NO: 30633 - protein, 17 aa, Artificial Sequence
  Synthetic polypeptide
YVKCSTKCQHVVFANYS

SEQ ID NO: 30634 - protein, 24 aa, Artificial Sequence
  Synthetic polypeptide
GKEFKTSLGNIVRLGPYKKNLKIR

SEQ ID NO: 30635 - protein, 25 aa, Artificial Sequence
  Synthetic polypeptide
KLGDITRRKHLYIEPCFYLFFELKR

SEQ ID NO: 30636 - protein, 346 aa, Artificial Sequence
  Synthetic polypeptide
PRCGNSLNEWMKKMWGPARARTMAYFGEGKGPIHVDNVKCTGNERSLADCIKQDIGRHNCRHSEDAGVICDYFGKKASGNSNKESLSSVCGLRLLHRRQKRIIGGKNSLRGGWPWQVSLRLKSSHGDGRLLCGATLLSSCWVLTAAHCFKRYGNSTRSYAVRVGDYHTLVPEEFEEEIGVQQIVIHREYRPDRSDYDIALVRLQGPEEQCARFSSHVLPACLPLWRERPQKTASNCYITGWGDTGRAYSRTLQQAAIPLLPKRFCEERYKGRFTGRMLCAGNLHEHKRVDSCQGDSGGPLMCERPGESWVVYGVTSWGYGCGVKDSPGVYTKVSAFVPWIKSVTKL

SEQ ID NO: 30637 - protein, 26 aa, Artificial Sequence
  Synthetic polypeptide
RKCGVLPEQEPWLTLEKEKDPSMWIM

SEQ ID NO: 30638 - protein, 27 aa, Artificial Sequence
  Synthetic polypeptide
MDEENVGSCQSKNHGLLWRRKRTHPCG

SEQ ID NO: 30639 - protein, 45 aa, Artificial Sequence
  Synthetic polypeptide
EAEVAVSQDYHTELQPSVYENGVTEDVKIFVGLKPIKTILGRLRL

SEQ ID NO: 30640 - protein, 20 aa, Artificial Sequence
  Synthetic polypeptide
AKITTLNSSLVFTKMGLQKM

SEQ ID NO: 30641 - protein, 18 aa, Artificial Sequence
  Synthetic polypeptide
SQHFGRPRNTASWGSKEL

SEQ ID NO: 30642 - protein, 26 aa, Artificial Sequence
  Synthetic polypeptide
VAHFCNPSTLGGRGTLPHGDQRNCEA

SEQ ID NO: 30643 - protein, 184 aa, Artificial Sequence
  Synthetic polypeptide
WLTSVIPALWEAEEHCLMGIKGTVKRSTDGDFIHANVDIDLIITEEPEIGNIEKPVEIFHIIEHFCLGRRRLHLFGRDSTIRPGWLTVGPTLTNSNYNAETYASYFSAPNSYLTGCTEEIERLRPKSPPPKSKSDRGGGAPRGGGRGGTSAGRGRERNRSNFRGERGGFRGGRGGAHRGGFPPR

SEQ ID NO: 30644 - protein, 65 aa, Artificial Sequence
  Synthetic polypeptide
LDLMFSSENLTVNLVLSYSSLVKNNIYEDGEIPKGIPLFYHRAQSFLDPSKTIKELSGFLFYQIP

SEQ ID NO: 30645 - protein, 67 aa, Artificial Sequence
  Synthetic polypeptide
KIISMKMERFLKEFHYFTIEPKVSLTQARPSRSYLDSYSTRFHESIASVHELLVEKLCTTQQTRDLN

SEQ ID NO: 30646 - protein, 211 aa, Artificial Sequence
  Synthetic polypeptide
PKQDHQGAIWILILPDSMKVLPVYMNCLLKNCVLLSRPEISTDERAYQRQLVMTMGVADSQLFFYPQLLPIHTLDVKSTMLPAAVRCSESRLSEEGIFLLANGLHMFLWLGVSSPPELIQGIFNVPSFAHINTDMTLLPEVGNPYSQQLRMIMGIIQQKRPYSMKLTIVKQREQPEMVFRQFLVEDKGLYGGSSYVDFLCCVHKEICQLLN

SEQ ID NO: 30647 - protein, 614 aa, Artificial Sequence
  Synthetic polypeptide
ASHKKDKYGMILYEKSKPPNPPAFIFMIDVSYSNIKNGLVKLICEELKTMLEKIPKEEQEETSAIRVGFITYNKVLHFFNVKSNLAQPQMMVVTDVGEVFVPLLDGFLVNYQESQSVIHNLLDQIPDMFADSNENETVFAPVIQAGMEALKAADCPGKLFIFHSSLPTAEAPGKLKNRDDKKLVNTDKEKILFQPQTNVYDSLAKDCVAHGCSVTLFLFPSQYVDVASLGLVPQLTGGTLYKYNNFQMHLDRQQFLNDLRNDIEKKIGFDAIMRVRTSTGFRATDFFGGILMNNTTDVEMAAIDCDKAVTVEFKHDDKLSEDSGALIQCAVLYTTISGQRRLRIHNLGLNCSSQLADLYKSCETDALINFFAKSAFKAVLHQPLKVIREILVNQTAHMLACYRKNCASPSAASQLILPDSMKVLPVYMNCLLKNCVLLSRPEISTDERAYQRQLVMTMGVADSQLFFYPQLLPIHTLDVKSTMLPAAVRCSESRLSEEGIFLLANGLHMFLWLGVSSPPELIQGIFNVPSFAHINTDMTLLPEVGNPYSQQLRMIMGIIQQKRPYSMKLTIVKQREQPEMVFRQFLVEDKGLYGGSSYVDFLCCVHKEICQLLN

SEQ ID NO: 30648 - protein, 16 aa, Artificial Sequence
  Synthetic polypeptide
FYMRRVSLPTHQPLSS

SEQ ID NO: 30649 - protein, 49 aa, Artificial Sequence
  Synthetic polypeptide
IDIFQKKTNGQQEILRKSLYVQCAIKSVLQHQAYRNIERFMRYLIVKNV

SEQ ID NO: 30650 - protein, 13 aa, Artificial Sequence
  Synthetic polypeptide
TFFKRRQMANRRS

SEQ ID NO: 30651 - protein, 358 aa, Artificial Sequence
  Synthetic polypeptide
RKYLNRHFSKEDKWPTGDPKKKLICSVCNKKCSSASSLQEHRKIHEIFDCQECMKKFISANQLKRHMITHSEKRPYNCEICNKSFKRLDQVGAHKVIHSEDKPYKCKLCGKGFAHRNVYKNHKKTHSEERPFQCEECKALFRTPFSLQRHLLIHNSERTFKCHHCDATFKRKDTLNVHVQVVHERHKKYRCELCNKAFVTPSVLRSHKKTHTGEKEKICPYCGQKFASSGTLRVHIRSHTGERPYQCPYCEKGFSKNDGLKMHIRTHTREKPYKCSECSKAFSQKRGLDEHKRTHTGEKPFQCDVCDLAFSLKKMLIRHKMTHNPNRPLAECQFCHKKFTRNDYLKVHMDNIHGVADS

SEQ ID NO: 30652 - protein, 260 aa, Artificial Sequence
  Synthetic polypeptide
RKYLNRHFSKEDKWPTGDPKKKLICSVCNKKCSSASSLQEHRKIHEIFDCQECMKKFISANQLKRHMITHSEKRPYNCEICNKSFKRLDQVGAHKVIHSEDKPYKCKLCGKGFAHRNVYKNHKKTHSEERPFQCEECKALFRTPFSLQRHLLIHNSERTFKCHHCDATFKRKDTLNVHVQVVHERHKKYRCELCNKAFVTPSVLRSHKKTHTGEKEKICPYCGQKFASSGTLRVHIRSHTGEAVQVLRVQQGLQPEARPG

SEQ ID NO: 30653 - protein, 37 aa, Artificial Sequence
  Synthetic polypeptide
LPKLKFTYLSNAWDSDYFNRLLCTLNKKMRERTWLTM

SEQ ID NO: 30654 - protein, 357 aa, Artificial Sequence
  Synthetic polypeptide
IRKCVKEPGSPCESMELDKKIQDLIERNASPHPKRFTPEAMPTHRNLCSLKTPGKTASMAHFVQGTSRMIAAESSTEHKECAEPSTRKNLMNSLEQKIRCLEKQRKELLEVNQQWDQQFRSMKELYERKVAELKTKLDAAERFLSTREKDPHQRQRKDDRQREDDRQRDLTRDRLQREEKEKERLNEELHELKEENKLLKGKNTLANKEKEHYECEIKRLNKALQDALNIKCSFSEDCLRKSRVEFCHEEMRTEMEVLKQQVQIYEEDFKKERSDRERLNQEKEELQQINETSQSQLNRLNSQIKACQMEKEKLEKQLKQMYCPPCNCGLVFHLQDPWVPTGPGAVQKQREHPVYPQ

SEQ ID NO: 30655 - protein, 18 aa, Artificial Sequence
  Synthetic polypeptide
KNLAHHVKAWSWTKKSRI

SEQ ID NO: 30656 - protein, 133 aa, Artificial Sequence
  Synthetic polypeptide
VTQILSTMLQLPTVFSTVMCCTGLQPGSNKLYHHLGLFKLQLQAEERGVVSIKGVCANRYLAMKEDGRLLASKCVTDECFFFERLESNNYNTYRSRKYTSWYVALKRTGQYKLGSKTGPGQKAILFLPMSAKS

SEQ ID NO: 30657 - protein, 27 aa, Artificial Sequence
  Synthetic polypeptide
DCSSYNFKQKREELCLSKECVLTVTWL

SEQ ID NO: 30658 - protein, 27 aa, Artificial Sequence
  Synthetic polypeptide
AIPSSRIVQATTSSRRERSCVYQRSVC

SEQ ID NO: 30659 - protein, 47 aa, Artificial Sequence
  Synthetic polypeptide
KASSVKNEPLLDTESASTLILDFLASRTELYLMKVLEKYWLYKIEIN

SEQ ID NO: 30660 - protein, 7 aa, Artificial Sequence
  Synthetic polypeptide
LLELSCI

SEQ ID NO: 30661 - protein, 69 aa, Artificial Sequence
  Synthetic polypeptide
QGVYMGWLTASGSGARILGPMFISQVYAHWGPRWAFSLVCGIIVLTITLLGVVYKRLIALSVRYGRIQE

SEQ ID NO: 30662 - protein, 11 aa, Artificial Sequence
  Synthetic polypeptide
LACSRVYTWAG

SEQ ID NO: 30663 - protein, 79 aa, Artificial Sequence
  Synthetic polypeptide
STYLSDWHVAGCIHGLVNSIWKWSPDSWAYVHQPSVCSLGTTMGIQPGVWNNSAHHHPPGSGLQKTHCSFCKIWEDSGI

SEQ ID NO: 30664 - protein, 58 aa, Artificial Sequence
  Synthetic polypeptide
SQHFGRTTQVDCLRSGVRDQPGQHGSNLLCLKNGTANIDLYAFILLEQEIIITGGDEH

SEQ ID NO: 30665 - protein, 17 aa, Artificial Sequence
  Synthetic polypeptide
GQEFETSLANMVPIYCA

SEQ ID NO: 30666 - protein, 354 aa, Artificial Sequence
  Synthetic polypeptide
QAWWLTPVIPALWEDDAGGLPEVRSSRPAWPTWFQFIVPKEWNSKYRPVCIHLAGTGDHHYWRRRTLMARPMIKEARMASLLLENPYYGCRKPKDQVRSSLKNVSDLFVMGGALVLESAALLHWLEREGYGPLGMTGISMGGHMASLAVSNWPKPMPLIPCLSWSTASGVFTTTDSFKMGQEFVKHFTSSADKLTNLNLVSRTLNLDISNQVVSQKPADCHNSSKTSVSATSEGLLLQDTSKMKRFNQTLSTNKSGYTSRNPQSYHLLSKEQSRNSLRKESLIFMKGVMDECTHVANFSVPVDPSLIIVVQAKEDAYIPRTGVRSLQEIWPGCEIRYLEGGHISAYLFKQGLFR

SEQ ID NO: 30667 - protein, 31 aa, Artificial Sequence
  Synthetic polypeptide
SQHFGRTTQVDCLRSGVRDQPGQHGSNLLCL

SEQ ID NO: 30668 - protein, 39 aa, Artificial Sequence
  Synthetic polypeptide
QAWWLTPVIPALWEDDAGGLPEVRSSRPAWPTWFQFIVP

SEQ ID NO: 30669 - protein, 404 aa, Artificial Sequence
  Synthetic polypeptide
QAWWLTPVIPALWEDDAGGLPEVRSSRPAWPTWFQFIVPKEWNSKYRPVCIHLAGTGDHHYWRRRTLMARPMIKEARMASLLLENPYYGCRKPKDQVRSSLKNVSDLFVMGGALVLESAALLHWLEREGYGPLGMTGISMGGHMASLAVSNWPKPMPLIPCLSWSTASGVFTTGVLSKSINWRELEKQYYTQTVYEEEIIHMLEYCGTDSFKMGQEFVKHFTSSADKLTNLNLVSRTLNLDISNQVVSQKPADCHNSSKTSVSATSEGLLLQDTSKMKRFNQTLSTNKSGYTSRNPQSYHLLSKEQSRNSLRKESLIFMKGVMDECTHVANFSVPVDPSLIIVVQAKEDAYIPRTGVRSLQEIWPGCEIRYLEGGHISAYLFKQGLFRQAIYDAFDRFLHKYAN

SEQ ID NO: 30670 - protein, 37 aa, Artificial Sequence
  Synthetic polypeptide
SQHFGRTTQVDCLRSGVRDQPGQHGSNLLCLKNGTAN

SEQ ID NO: 30671 - protein, 45 aa, Artificial Sequence
  Synthetic polypeptide
QAWWLTPVIPALWEDDAGGLPEVRSSRPAWPTWFQFIVPKEWNSK

SEQ ID NO: 30672 - protein, 270 aa, Artificial Sequence
  Synthetic polypeptide
RNVQRCWKPKDQVRSSLKNVSDLFVMGGALVLESAALLHWLEREGYGPLGMTGISMGGHMASLAVSNWPKPMPLIPCLSWSTASGVFTTTDSFKMGQEFVKHFTSSADKLTNLNLVSRTLNLDISNQVVSQKPADCHNSSKTSVSATSEGLLLQDTSKMKRFNQTLSTNKSGYTSRNPQSYHLLSKEQSRNSLRKESLIFMKGVMDECTHVANFSVPVDPSLIIVVQAKEDAYIPRTGVRSLQEIWPGCEIRYLEGGHISAYLFKQGLFR

SEQ ID NO: 30673 - protein, 27 aa, Artificial Sequence
  Synthetic polypeptide
RLFTEEEMKLVHRYKEMFNVAGNPRTK

SEQ ID NO: 30674 - protein, 75 aa, Artificial Sequence
  Synthetic polypeptide
NWCTDIKKCSTLLETQGPSKVQLKKCVRPFCDGRSSCFRICSSLALAREGRLRPFRNDWNIHGRTHGFLSGIQLA

SEQ ID NO: 30675 - protein, 320 aa, Artificial Sequence
  Synthetic polypeptide
RNVQRCWKPKDQVRSSLKNVSDLFVMGGALVLESAALLHWLEREGYGPLGMTGISMGGHMASLAVSNWPKPMPLIPCLSWSTASGVFTTGVLSKSINWRELEKQYYTQTVYEEEIIHMLEYCGTDSFKMGQEFVKHFTSSADKLTNLNLVSRTLNLDISNQVVSQKPADCHNSSKTSVSATSEGLLLQDTSKMKRFNQTLSTNKSGYTSRNPQSYHLLSKEQSRNSLRKESLIFMKGVMDECTHVANFSVPVDPSLIIVVQAKEDAYIPRTGVRSLQEIWPGCEIRYLEGGHISAYLFKQGLFRQAIYDAFDRFLHKYAN

SEQ ID NO: 30676 - protein, 25 aa, Artificial Sequence
  Synthetic polypeptide
RLFTEEEMKLVHRYKEMFNVAEGPA

SEQ ID NO: 30677 - protein, 69 aa, Artificial Sequence
  Synthetic polypeptide
NWCTDIKKCSTLLKVQLKKCVRPFCDGRSSCFRICSSLALAREGRLRPFRNDWNIHGRTHGFLSGIQLA

SEQ ID NO: 30678 - protein, 40 aa, Artificial Sequence
  Synthetic polypeptide
VYEYHGRPFSHEEEWSVAVCHITGALRDAEQTLSRRSEEH

SEQ ID NO: 30679 - protein, 399 aa, Artificial Sequence
  Synthetic polypeptide
TNRYTNTTEDHSAMKRSGASLYATSQVPYETLNKRFRAAQKNIDRETSHVTMVVAELEKTLSGCPAVDSVVSLLDGVVEKLSVLKRKAVESIQAEDESAKLCKRRIEHLKEHSSDQPAAASVWKRKRMDRMMVEHLLRCGYYNTAVKLARQSGIEDLVNIEMFLTAKEVEESLERRETATCLAWCHDNKSRLRKMKSCLEFSLRIQEFIELIRQNKRLDAVRHARKHFSQAEGSQLDEVRQAMGMLAFPPDTHISPYKDLLDPARWRMLIQQFRYDNYRLHQLGNNSVFTLTLQAGLSAIKTPQCYKEDGSSKSPDCPVCSRSLNKLAQPLPMAHCANSRLVCKISGDVMNENNPPMMLPNGYVYGYNSLLSIRQDDKVVCPRTKEVFHFSQAEKVYIM

SEQ ID NO: 30680 - protein, 17 aa, Artificial Sequence
  Synthetic polypeptide
RGVERRCMPHHRCPTRR

SEQ ID NO: 30681 - protein, 437 aa, Artificial Sequence
  Synthetic polypeptide
TNRYTNTTEDHSAMKRSGASLYATSQVPYETLNKRFRAAQKNIDRETSHVTMVVAELEKTLSGCPAVDSVVSLLDGVVEKLSVLKRKAVESIQAEDESAKLCKRRIEHLKEHSSDQPAAASVWKRKRMDRMMVEHLLRCGYYNTAVKLARQSGIEDLVNIEMFLTAKEVEESLERRETATCLAWCHDNKSRLRKMKGRQNKHEAKTGRKSRAASSSPKESLDLGMETLKGKPELSCLEFSLRIQEFIELIRQNKRLDAVRHARKHFSQAEGSQLDEVRQAMGMLAFPPDTHISPYKDLLDPARWRMLIQQFRYDNYRLHQLGNNSVFTLTLQAGLSAIKTPQCYKEDGSSKSPDCPVCSRSLNKLAQPLPMAHCANSRLVCKISGDVMNENNPPMMLPNGYVYGYNSLLSIRQDDKVVCPRTKEVFHFSQAEKVYIM

SEQ ID NO: 30682 - protein, 110 aa, Artificial Sequence
  Synthetic polypeptide
TNRYTNTTEDHSAMKRSGASLYATSQVPYETLNKRFRAAQKNIDRETSHVTMVVAELEKTLSGCPAVDSVVSLLDGVVEKLSVLKRKVGPAWRSLFSLGHGHPFCLENES

SEQ ID NO: 30683 - protein, 277 aa, Artificial Sequence
  Synthetic polypeptide
TNRYTNTTEDHSAMKRSGASLYATSQVPYETLNKRFRAAQKNIDRETSHVTMVVAELEKTLSGCPAVDSVVSLLDGVVEKLSVLKRKAVESIQAEDESAKLCKRRIEHLKEHSSDQPAAASVWKRKRMDRMMVEHLLRCGYYNTAVKLARQSGIEDLVNIEMFLTAKEVEESLERRETATCLAWCHDNKSRLRKMKTCKKALQPSRREPAGRGAPGHGHAGLPARHAHLPVQGPSGPCTVADADPAVPVRQLPTTPAGKQFCVHPHPAGWPLSHQDT

SEQ ID NO: 30684 - protein, 358 aa, Artificial Sequence
  Synthetic polypeptide
TNRYTNTTEDHSAMKRSGASLYATSQVPYETLNKRFRAAQKNIDRETSHVTMVVAELEKTLSGCPAVDSVVSLLDGVVEKLSVLKRKAVESIQAEDESAKLCKRRIEHLKEHSSDQPAAASVWKRKRMDRMMVEHLLRCGYYNTAVKLARQSGIESCLEFSLRIQEFIELIRQNKRLDAVRHARKHFSQAEGSQLDEVRQAMGMLAFPPDTHISPYKDLLDPARWRMLIQQFRYDNYRLHQLGNNSVFTLTLQAGLSAIKTPQCYKEDGSSKSPDCPVCSRSLNKLAQPLPMAHCANSRLVCKISGDVMNENNPPMMLPNGYVYGYNSLLSIRQDDKVVCPRTKEVFHFSQAEKVYIM

SEQ ID NO: 30685 - protein, 186 aa, Artificial Sequence
  Synthetic polypeptide
TNRYTNTTEDHSAMKRSGASLYATSQVPYETLNKRFRAAQKNIDRETSHVTMVVAELEKTLSGCPAVDSVVSLLDGVVEKLSVLKRKDLVNIEMFLTAKEVEESLERRETATCLAWCHDNKSRLRKMKSCLEFSLRIQEFIELIRQNKRLDAVRHARKHFSQAEGSQLDEVRQAMGMLAFPPDTHI

SEQ ID NO: 30686 - protein, 331 aa, Artificial Sequence
  Synthetic polypeptide
TNRYTNTTEDHSAMKRSGASLYATSQVPYETLNKRFRAAQKNIDRETSHVTMVVAELEKTLSGCPAVDSVVSLLDGVVEKLSVLKRKDLVNIEMFLTAKEVEESLERRETATCLAWCHDNKSRLRKMKSCLEFSLRIQEFIELIRQNKRLDAVRHARKHFSQAEGSQLDEVRQAMGMLAFPPDTHISPYKDLLDPARWRMLIQQFRYDNYRLHQLGNNSVFTLTLQAGLSAIKTPQCYKEDGSSKSPDCPVCSRSLNKLAQPLPMAHCANSRLVCKISGDVMNENNPPMMLPNGYVYGYNSLLSIRQDDKVVCPRTKEVFHFSQAEKVYIM

SEQ ID NO: 30687 - protein, 331 aa, Artificial Sequence
  Synthetic polypeptide
TNRYTNTTEDHSAMKRSGASLYATSQVPYETLNKRFRAAQKNIDRETSHVTMVVAELEKTLSGCPAVDSVVSLLDGVVEKLSVLKRKAVESIQAEDESAKLCKRRIEHLKEHSSDQPAAASVWKRKRMDRMMVEHLLRCGYYNTAVKLARQSGIETCKKALQPSRREPAGRGAPGHGHAGLPARHAHLPVQGPSGPCTVADADPAVPVRQLPTTPAGKQFCVHPHPAGWPLSHQDTCYKEDGSSKSPDCPVCSRSLNKLAQPLPMAHCANSRLVCKISGDVMNENNPPMMLPNGYVYGYNSLLSIRQDDKVVCPRTKEVFHFSQAEKVYIM

SEQ ID NO: 30688 - protein, 248 aa, Artificial Sequence
  Synthetic polypeptide
TNRYTNTTEDHSAMKRSGASLYATSQVPYETLNKRFRAAQKNIDRETSHVTMVVAELEKTLSGCPAVDSVVSLLDGVVEKLSVLKRKAVESIQAEDESAKLCKRRIEHLKEHSSDQPAAASVWKRKRMDRMMVEHLLRCGYYNTAVKLARQSGIETCKKALQPSRREPAGRGAPGHGHAGLPARHAHLPVQGPSGPCTVADADPAVPVRQLPTTPAGKQFCVHPHPAGWPLSHQDTTVLQGGRQLQEP

SEQ ID NO: 30689 - protein, 546 aa, Artificial Sequence
  Synthetic polypeptide
SQLIRRLRRLHYLSLEGRGWEMSGEIESCLTEVESCFRLLVPFDFDPNPETESLGMASGMSDALRSSCAGQVGPCRSGTPDPRDGEQPCCSRDLPASAGHPRAGGGAQPSQTATGDPSDEDEDSDLEEFVRSHGLGSHKYTLDVELCSEGLKVQENEDNLALIHAARDTLKLIRNKFLPAVCSWIQRFTRVGTHGGCLKRAIDLKAELELVLRKYKELDIEPEGGERRRTEALGDAEEDEDDEDFVEVPEKEGYEPHIPDHLRPEYGLEAAPEKDTVVRCLRTRTRMDEEVSDPTSAAAQLRQLRDHLPPPSSASPSRALPEPQEAQKLAAERARAPVVPYGVDLHYWGQELPTAGKIVKSDSQHRFWKPSEVEEEVVNADISEMLRSRHITFAGKFEPVQHWCRAPRPDGRLCERQDRLKCPFHGKIVPRDDEGRPLDPEDRAREQRRQLQKQERPEWQDPELMRDVEAATGQDLGSSRYSGKGRGKKRRYPSLTNLKAQADTARARIGRKVFAKAAVRRVVAAMNRMDQKKHEKFSNQFNYALN

SEQ ID NO: 30690 - protein, 16 aa, Artificial Sequence
  Synthetic polypeptide
AWKVEAGKCLEKLNPA

SEQ ID NO: 30691 - protein, 33 aa, Artificial Sequence
  Synthetic polypeptide
AWHHVSVVPANQEAEAAALPEPGRSRLGNVWRN

SEQ ID NO: 30692 - protein, 13 aa, Artificial Sequence
  Synthetic polypeptide
RSVALESVFPGPP

SEQ ID NO: 30693 - protein, 62 aa, Artificial Sequence
  Synthetic polypeptide
LWNQYSPDLLNYVFCSRNFWETVQTNYRTGFLFEKDNIARKLECYPSNLGYRRADNRRQNVG

SEQ ID NO: 30694 - protein, 80 aa, Artificial Sequence
  Synthetic polypeptide
ERSSGISIPRTSLTTCFAQETFGKQYKQTIGLDFFLRRITLPGNLNVTLQIWDIGGQTIGGKMLDKYIYGAQLIWSICEQ

SEQ ID NO: 30695 - protein, 205 aa, Artificial Sequence
  Synthetic polypeptide
ERSSGISIPRTSLTTCFAQETFGKQYKQTIGLDFFLRRITLPGNLNVTLQIWDIGGQTIGGKMLDKYIYGAQGVLLVYDITNYQSFENLEDWYTVVKKVSEESETQPLVALVGNKIDLEHMRTIKPEKHLRFCQENGFSSHFVSAKTGDSVFLCFQKVAAEILGIKLNKAEIEQSQRIVRAEIVKYPEEENQHTTSTQSRICSVQ

SEQ ID NO: 30696 - protein, 206 aa, Artificial Sequence
  Synthetic polypeptide
ERSSGISIPRTSLTTCFAQETFGKQYKQTIGLDFFLRRITLPGNLNVTLQIWDIGGQTIGGKMLDKYIYGAQGVLLVYDITNYQSFENLEDWYTVVKKVSEESETQPLVALVGNKIDLEHMRTIKPEKHLRFCQENGFSSHFVSAKTGDSVFLCFQKVAAEILGIKLNKAEIEQSQRVVKADIVNYNQEPMSRTVNPPRSSMCAVQ

SEQ ID NO: 30697 - protein, 189 aa, Artificial Sequence
  Synthetic polypeptide
ERSSGISIPRTSLTTCFAQETFGKQYKQTIGLDFFLRRITLPGNLNVTLQIWDIGGQTIGGKMLDKYIYGAQGVLLVYDITNYQSFENLEDWYTVVKKVSEESETQPLVALVGNKIDLEHMRTIKPEKHLRFCQENGFSSHFVSAKTGDSVFLCFQKVAAEILGIKLNKAEIEQSQGHFIIFISSTNRE

SEQ ID NO: 30698 - protein, 9 aa, Artificial Sequence
  Synthetic polypeptide
YKQTCLTKS

SEQ ID NO: 30699 - protein, 5 aa, Artificial Sequence
  Synthetic polypeptide
ISKHV

SEQ ID NO: 30700 - protein, 133 aa, Artificial Sequence
  Synthetic polypeptide
RINCYCYFALQVGKARLKYKVTPPAVTGSPEFERVFRAQQNCVEFYPIFIITLWMAGWYFNQVFATCLGLVYIYGRHLYFWGYSEAAKKRITGFRLSLGILALLTLLGALGIANSFLDEYLDLNIAKKLRRQF

SEQ ID NO: 30701 - protein, 14 aa, Artificial Sequence
  Synthetic polypeptide
IAIVILLCKLERQD

SEQ ID NO: 30702 - protein, 47 aa, Artificial Sequence
  Synthetic polypeptide
LASTVILDFPAFRTVTNKLLLLFCFASWKGKIKIQSYAPSSHWVTRV

SEQ ID NO: 30703 - protein, 63 aa, Artificial Sequence
  Synthetic polypeptide
RINCYCYFALQVGKARLKYKVTPPAVTGSPEFERVFRAHFCYLSGSGVHIWPSPILLGIFRSC

SEQ ID NO: 30704 - protein, 24 aa, Artificial Sequence
  Synthetic polypeptide
PTSTPFLKNFVSKAQKFVTQDDEC

SEQ ID NO: 30705 - protein, 154 aa, Artificial Sequence
  Synthetic polypeptide
SFTECLTLLPPFFSSISSASVASGTGRPTPSLPPSPQLVQCENEEDEDFHDDPLPHHSSRILYPRPKSLLPKMMNADMDAVDAENQVELEEKTRLINQVLELQHTLEDLSARVDAVKEENLKLKSENQVLGQYIENLMSASSVFQTTDTKSKRK

SEQ ID NO: 30706 - protein, 66 aa, Artificial Sequence
  Synthetic polypeptide
LSFLPFSPPSLLPLLPLGQEDQPLLFLLLLSLFNVKMKKMKTFMMTHFHTIPQEFCIQGPKVCYPR

SEQ ID NO: 30707 - protein, 126 aa, Artificial Sequence
  Synthetic polypeptide
SFTECLTLLPPFFSSISSASVASGTGRPTPSLPPSPQLVQCENEEDEDFHDDPLPHHSSRILYPRPKSLLPKMMNADMDDLSARVDAVKEENLKLKSENQVLGQYIENLMSASSVFQTTDTKSKRK

SEQ ID NO: 30708 - protein, 221 aa, Artificial Sequence
  Synthetic polypeptide
ILSSIRRGLIPFLCSQRCFKICMKMCLLQITGYKQLYLDVESVRKRPYDSDNLQHEELLMKLWNLLMPTKKLNARISKQWAEIGFQGDDPKTDFRGMGILGLINLVYFSENYTSEAHQILSRSNHPKLGYSYAIVGINLTEMAYSLLKSEALKFHLYNLVPGIPTMEHFHQFYCYLVYEFDKFWFEEEPESIMYFNLYREKFHEKIKGLLLDCNVALTLKV

SEQ ID NO: 30709 - protein, 17 aa, Artificial Sequence
  Synthetic polypeptide
EEDLSHFCVPSAVLKYA

SEQ ID NO: 30710 - protein, 27 aa, Artificial Sequence
  Synthetic polypeptide
LTLVLPSVNSKFHKKRTYPISVFPALF

SEQ ID NO: 30711 - protein, 95 aa, Artificial Sequence
  Synthetic polypeptide
ILSSIRRGLIPFLCSQRCFKICMKMCLLQITGYKQLYLDVESVRKRPYDSDNLQHEELLMKLWNLLMPTKKLNARISKQWAEIGFQGDDPKTDFR

SEQ ID NO: 30712 - protein, 101 aa, Artificial Sequence
  Synthetic polypeptide
ILSSIRRGLIPFLCSQRCFKICMKMCLLQITGYKQLYLDVESVRKRPYDSDNLQHEELLMKLWNLLMPTKKLNARISKQWAEIGFQGDDPKTDFRGMGILG

SEQ ID NO: 30713 - protein, 18 aa, Artificial Sequence
  Synthetic polypeptide
SQHFGRLRTGCGPMWGRA

SEQ ID NO: 30714 - protein, 418 aa, Artificial Sequence
  Synthetic polypeptide
CSGSPPVIPALWEAEDRVWANVGKSLNCIIAMVDKLIERDGGSEGSGGNNDGEKEPSLTDAIPSHPREDWYEQLYPLILTLKDCMGEVVNRAKQSLTFVLLQELAYSLPQCLMLTLRRDIVFSQALAGLVCGFIIKLQTSLYDPGFLQQLHTVGLIVQYEGLLSTYSDEIGMLEDMAVGISDLKKVAFKIIEAKSNDVLPVITGRREHYVVEVKLPARMFESLPLQIKEGQLLHVYPVLFNVGINEQQTLAERFGDVSLQESINQENFELLQEYYKIFMEKMPPDYISHFQEQNDLKALLENLLQNIQSKKRKNVEIMWLAATICRKLNGIRFTCCKSAKDRTSMSVTLEQCSILRDEHQLHKDFFIRALDCMRREGCRIENVLKNIKCRKYAFNMLQLMAFPKYYRPPEGTYGKADT

SEQ ID NO: 30715 - protein, 432 aa, Artificial Sequence
  Synthetic polypeptide
CSGSPPVIPALWEAEDRVWANVGKSLNCIIAMVDKLIERDGGSEGSGGNNDGEKEPSLTDAIPSHPREDWYEQLYPLILTLKDCMGEVVNRAKQSLTFVLLQELAYSLPQCLMLTLRRDIVFSQALAGLVCGFIIKLQTSLYDPGFLQQLHTVGLIVQYEGLLSTYSDEIGMLEDMAVGISDLKKVAFKIIEAKSNDVLPVITGRREHYVVEVKLPARMFESLPLQIKEGQLLHVYPVLFNVGINEQQTLAERFGDVSLQESINQENFELLQEYYKIFMEKMPPDYISHFQEQNDLKALLENLLQNIQSKKRKNVEIMWLAATICRKLNGIRFTCCKSAKDRTSMSVTLEQCSILRDEHQLHKDFFIRALDCMRSRQTQGALNESDDPETGCLTDNKPTSRHFYPVALLLVSSHLLVVWLILSLALLLAKYQ

SEQ ID NO: 30716 - protein, 367 aa, Artificial Sequence
  Synthetic polypeptide
CSGSPPVIPALWEAEDRVWANVGKSLNCIIAMVDKLIERDGGSEGSGGNNDGEKEPSLTDAIPSHPREDWYEQLYPLILTLKDCMGEVVNRAKQSLTFVLLQELAYSLPQCLMLTLRRDIVFSQALAGLVCGFIIKLQTSLYDPGFLQQLHTVGLIVQYEGLLSTYSDEIGMLEDMAVGISDLKKVAFKIIEAKSNDVLPVITGRREHYVVEVKLPARMFESLPLQIKEGQLLHVYPVLFNVGINEQQTLAERFGDVSLQESINQENFELLQEYYKIFMEKMPPDYISHFQEQNDLKALLENLLQNIQSKKRKNVEIMWLAATICRKLNGIRFTCCKSAKDRTSMSVTLEQCSILRDEHQLHKDFFI

SEQ ID NO: 30717 - protein, 311 aa, Artificial Sequence
  Synthetic polypeptide
CSGSPPVIPALWEAEDRVWANVGKSLNCIIAMVDKLIERDGGSEGSGGNNDGEKEPSLTDAIPSHPREDWYEQLYPLILTLKDCMGEVVNRAKQSLTFVLLQELAYSLPQCLMLTLRRDIVFSQALAGLVCGFIIKLQTSLYDPGFLQQLHTVGLIVQYEGLLSTYSDEIGMLEDMAVGISDLKKVAFKIIEAKSNDVLPVITGRREHYVVEVKLPARMFESLPLQIKEGQLLHVYPVLFNVGINEQQTLAERFGDVSLQESINQENFELLQEYYKIFMEKMPPDYISHFQEQNDLKALLENLLQNIQSKK

SEQ ID NO: 30718 - protein, 309 aa, Artificial Sequence
  Synthetic polypeptide
CSGSPPVIPALWEAEDRVWANVGKSLNCIIAMVDKLIERDGGSEGSGGNNDGEKEPSLTDAIPSHPREDWYEQLYPLILTLKDCMGEVVNRAKQSLTFVLLQELAYSLPQCLMLTLRRDIVFSQALAGLVCGFIIKLQTSLYDPGFLQQLHTVGLIVQYEGLLSTYSDEIGMLEDMAVGISDLKKVAFKIIEAKSNDVLPVITGRREHYVVEVKLPARMFESLPLQIKEGQLLHVYPVLFNVGINEQQTLAERFGDVSLQESINQENFELLQEYYKIFMEKMPPDYISHFQEQNDLKALLENLLQNIQS

SEQ ID NO: 30719 - protein, 23 aa, Artificial Sequence
  Synthetic polypeptide
GNLIFTRKKKHGRGDGSCYAVAV

SEQ ID NO: 30720 - protein, 60 aa, Artificial Sequence
  Synthetic polypeptide
SQHFGKLRQEDRLSSGVRDQPRQHEETSSLQEKKSMEEEMVRVTQWPFNWRSRCFGILQK

SEQ ID NO: 30721 - protein, 721 aa, Artificial Sequence
  Synthetic polypeptide
AQEFETNLGNMRKPHLYKKKKAWKRRWFVLRSGRLTGDPDVLEYYKNDHAKKPIRIIDLNLCQQVDAGLTFNKKEFENSYIFDINTIDRIFYLVADSEEEMNKWVRCICDICGFNPTEEDPVKPPGSSLQAPADLPLAINTAPPSTQADSSSATLPPPYQLINVPPHLETLGIQEDPQDYLLLINCQSKKPEPTRTHADSAKSTSSETDCNDNVPSHKNPASSQSKHGMNGFFQQQMIYDSPPSRAPSASVDSSLYNLPRSYSHDVLPKVSPSSTEADGELYVFNTPSGTSSVETQMRHVSISYDIPPTPGNTYQIPRTFPEGTLGQTSKLDTIPDIPPPRPPKPHPAHDRSPVETCSIPRTASDTDSSYCIPTAGMSPSRSNTISTVDLNKLRKDASSQDCYDIPRAFPSDRSSSLEGFHNHFKVKNVLTVGSVSSEELDENYVPMNPNSPPRQHSSSFTEPIQEANYVPMTPGTFDFSSFGMQVPPPAHMGFRSSPKTPPRRPVPVADCEPPPVDRNLKPDRKGQSPKILRLKPHGLERTDSQTIGDFATRRKVKPAPLEIKPLPEWEELQAPVRSPITRSFARDSSRFPMSPRPDSVHSTTSSSDSHDSEENYVPMNPNLSSEDPNLFGSNSLDGGSSPMIKPKGDKQVEYLDLDLDSGKSTPPRKQKSSGSGSSVADERVDYVVVDQQKTLALKSTREAWTDGRQSTESETPAKSVK

SEQ ID NO: 30722 - protein, 691 aa, Artificial Sequence
  Synthetic polypeptide
AQEFETNLGNMRKPHLYKKKKAWKRRWFVLRSGRLTGDPDVLEYYKNDHAKKPIRIIDLNLCQQVDAGLTFNKKEFENSYIFDINTIDRIFYLVADSEEEMNKWVRCICDICGFNPTEEDPVKPPGSSLQAPADLPLAINTAPPSTQADSSSATLPPPYQLINVPPHLETLGIQEDPQDYLLLINCQSKKPEPTRTHADSAKSTSSETDCNDNVPSHKNPASSQSKHGMNGFFQQQMIYDSPPSRAPSASVDSSLYNLPRSYSHDVLPKVSPSSTEADGELYVFNTPSGTSSVETQMRHVSISYDIPPTPGNTYQIPRTFPEGTLGQTSKLDTIPDIPPPRPPKPHPAHDRSPVETCSIPRTASDTDSSYCIPTAGMSPSRSNTISTVDLNKLRKDASSQDCYDIPRAFPSDRSSSLEGFHNHFKVKNVLTVGSVSSEELDENYVPMNPNSPPRQHSSSFTEPIQEANYVPMTPGTFDFSSFGMQVPPPAHMGFRSSPKTPPRRPVPVADCEPPPVDRNLKPDRKVKPAPLEIKPLPEWEELQAPVRSPITRSFARDSSRFPMSPRPDSVHSTTSSSDSHDSEENYVPMNPNLSSEDPNLFGSNSLDGGSSPMIKPKGDKQVEYLDLDLDSGKSTPPRKQKSSGSGSSVADERVDYVVVDQQKTLALKSTREAWTDGRQSTESETPAKSVK

SEQ ID NO: 30723 - protein, 236 aa, Artificial Sequence
  Synthetic polypeptide
AQEFETNLGNMRKPHLYKKKKAWKRRWFVLRSGRLTGDPDVLEYYKNDHAKKPIRIIDLNLCQQVDAGLTFNKKEFENSYIFDINTIDRIFYLVADSEEEMNKWVRCICDICGFNPTEEDPVKPPGSSLQAPADLPLAINTAPPSTQADSSSATLPPPYQLINVPPHLETLGIQEDPQDYLLLINCQSKKPEPTSQGSSFVSEEGEEYLLLEDFESKTIPLQTHADSAKSTSSETD

SEQ ID NO: 30724 - protein, 194 aa, Artificial Sequence
  Synthetic polypeptide
AQEFETNLGNMRKPHLYKKKKAWKRRWFVLRSGRLTGDPDVLEYYKNDHAKKPIRIIDLNLCQQVDAGLTFNKKEFENSYIFDINTIDRIFYLVADSEEEMNKWVRCICDICGFNPTEEDPVKPPGSSLQAPADLPLAINTAPPSTQADSSSATLPPPYQLINVPPHLETLGIQEDPQDYLLLINCQSKKPEPT

SEQ ID NO: 30725 - protein, 33 aa, Artificial Sequence
  Synthetic polypeptide
SGTEPTISLRFCVHSSFVELRLMLKRVCLQRRK

SEQ ID NO: 30726 - protein, 672 aa, Artificial Sequence
  Synthetic polypeptide
AYNISEVLRPFLLRRIKADVEKSLPPKKEVKIYVGLSKMQREWYTRILMKDIDILNSAGKMDKMRLLNILMQLRKCCNHPYLFDGAEPGPPYTTDMHLVTNSGKMVVLDKLLPKLKEQGSRVLIFSQMTRVLDILEDYCMWRNYEYCRLDGQTPHDERQDSINAYNEPNSTKFVFMLSTRAGGLGINLATADVVILYDSDWNPQVDLQAMDRAHRIGQTKTVRVFRFITDNTVEERIVERAEMKLRLDSIVIQQGRLVDQNLNKIGKDEMLQMIRHGATHVFASKESEITDEDIDGILERGAKKTAEMNEKLSKMGESSLRNFTMDTESSVYNFEGEDYREKQKIAFTEWIEPPKRERKANYAVDAYFREALRVSEPKAPKAPRPPKQPNVQDFQFFPPRLFELLEKEILFYRKTIGYKVPRNPELPNAAQAQKEEQLKIDEAESLNDEELEEKEKLLTQGFTNWNKRDFNQFIKANEKWGRDDIENIAREVEGKTPEEVIEYSAVFWERCNELQDIEKIMAQIERGEARIQRRISIKKALDTKIGRYKAPFHQLRISYGTNKGKNYTEEEDRFLICMLHKLGFDKENVYDELRQCIRNSPQFRFDWFLKSRTAMELQRRCNTLITLIERENMELEEKEKAEKKKRGPKPSTQKRKMDGAPDGRGRKKKLKL

SEQ ID NO: 30727 - protein, 36 aa, Artificial Sequence
  Synthetic polypeptide
GRSQDGQIGTAPVYSSQREQRRRRVISAFPSEEEIN

SEQ ID NO: 30728 - protein, 9 aa, Artificial Sequence
  Synthetic polypeptide
FLHFHLRRK

SEQ ID NO: 30729 - protein, 7 aa, Artificial Sequence
  Synthetic polypeptide
KIQKLAT

SEQ ID NO: 30730 - protein, 59 aa, Artificial Sequence
  Synthetic polypeptide
MSTVTYACNSSTLGSHGRQITRSRDRDHPGQHGETTSLLKNTKISNLSWWNQVAGFMFP

SEQ ID NO: 30731 - protein, 185 aa, Artificial Sequence
  Synthetic polypeptide
TWEAELAGSVRQLLHEKIRDAYTHPQFVTDVMKPLQIENIIDQEVQTLSGGELQRVALALCLGKPADVYLIDEPSAYLDSEQRLMAARVVKRFILHAKKTAFVVEHDFIMATYLADRVIVFDGVPSKNTVANSPQTLLAGMNKFLSQLEITFRRDPNNYRPRINKLNSIKDVEQKKSGNYFFLDD

SEQ ID NO: 30732 - protein, 39 aa, Artificial Sequence
  Synthetic polypeptide
PSVVAAPVVPATQEAEAGEWREPGRQSLQEVFASYYMKR

SEQ ID NO: 30733 - protein, 28 aa, Artificial Sequence
  Synthetic polypeptide
SQLLRRLRQENGVNLGGRACRKCSPVTT

SEQ ID NO: 30734 - protein, 39 aa, Artificial Sequence
  Synthetic polypeptide
GQAQWFMPVIPELWEAKEIETILSNGCRTKEEWKLLFLG

SEQ ID NO: 30735 - protein, 31 aa, Artificial Sequence
  Synthetic polypeptide
SQNFGKPRRSRPSCLTDVEQKKSGNYFFLDD

SEQ ID NO: 30736 - protein, 37 aa, Artificial Sequence
  Synthetic polypeptide
SQLFRRPRQENRLNLGCRGCSELRLCRCTPAWATGNG

SEQ ID NO: 30737 - protein, 46 aa, Artificial Sequence
  Synthetic polypeptide
DCAAALQPGQQGMGRTSGNKCPFSYVQERFYNLSGTKCFSFTSNRK

SEQ ID NO: 30738 - protein, 1029 aa, Artificial Sequence
  Synthetic polypeptide
AEIVPLHSSLGNREWVGQVEISALSLMYRKDFIIYREPNVSPSQVTENNFPEKVLLCFSNGNHYDIVYPIKYKESSAMCQSLLYELLYEKVFKTDVSKIVMELDTLEVADEDNSEISDSEDDSCKSKTAAAAADVNGFKPLSGNEQLKNNGNSTSLPLSRKVLKSLNPAVYRNVEYEIWLKSKQAQQKRDYSIAAGLQYEVGDKCQVRLDHNGKFLNADVQGIHSENGPVLVEELGKKHTSKNLKAPPPESWNTVSGKKMKKPSTSGQNFHSDVDYRGPKNPSKPIKAPSALPPRLQHPSGVRQHAFSSHSSGSQSQKFSSEHKNLSRTPSQIIRKPDRERVEDFDHTSRESNYFGLSPEERREKQAIEESRLLYEIQNRDEQAFPALSSSSVNQSASQSSNPCVQRKSSHVGDRKGSRRRMDTEERKDKDSIHGHSQLDKRPEPSTLENITDDKYATVSSPSKSKKLECPSPAEQKPAEHVSLSNPAPLLVSPEVHLTPAVPSLPATVPAWPSEPTTFGPTGVPAPIPVLSVTQTLTTGPDSAVSQAHLTPSPVPVSIQAVNQPLMPLPQTLSLYQDPLYPGFPCNEKGDRAIVPPYSLCQTGEDLPKDKNILRFFFNLGVKAYSCPMWAPHSYLYPLHQAYLAACRMYPKVPVPVYPHNPWFQEAPAAQNESDCTCTDAHFPMQTEASVNGQMPQPEIGPPTFSSPLVIPPSQVSESHGQLSYQADLESETPGQLLHADYEESLSGKNMFPQPSFGPNPFLGPVPIAPPFFPHVWYGYPFQGFIENPVMRQNIVLPSDEKGELDLSLENLDLSKDCGSVSTVDEFPEARGEHVHSLPEASVSSKPDEGRTEQSSQTRKADTALASIPPVAEGKAHPPTQILNRERETVPVELEPKRTIQSLKEKTEKVKDPKTAADVVSPGANSVDSRVQRPKEESSEDENEVSNILRSGRSKQFYNQTYGSRKYKSDWGYSGRGGYQHVRSEESWKGQPSRSRDEGYQYHRNVRGRPFRGDRRRSGMGDGHRGQHT

SEQ ID NO: 30739 - protein, 352 aa, Artificial Sequence
  Synthetic polypeptide
AEIVPLHSSLGNREWVGQVEISALSLMYRKDFIIYREPNVSPSQVTENNFPEKVLLCFSNGNHYDIVYPIKYKESSAMCQSLLYELLYEKVFKTDVSKIVMELDTLEVADEDNSEISDSEDDSCKSKTAAAAADVNGFKPLSGNELKNNGNSTSLPLSRKVLKSLNPAVYRNVEYEIWLKSKQAQQKRDYSIAAGLQYEVGDKCQVRLDHNGKFLNADVQGIHSENGPVLVEELGKKHTSKNLKAPPPESWNTVSGKKMKKPSTSGQNFHSDVDYRGPKNPSKPIKAPSALPPRLQHPSGVRQHAFSSHSSGSQSQKFSSEHKNLSRTPSQIIRKPDRERVEDFDHTSRESN

SEQ ID NO: 30740 - protein, 125 aa, Artificial Sequence
  Synthetic polypeptide
AEIVPLHSSLGNREWVGQVEISALSLMYRKDFIIYREPNVSPSQVTENNFPEKVLLCFSNGNHYDIVYPIKYKESSAMCQSLLYELLYEKVFKTDVSKIVMELDTLEVADEDNSEISDSEDDSCK

SEQ ID NO: 30741 - protein, 119 aa, Artificial Sequence
  Synthetic polypeptide
AEIVPLHSSLGNREWVGQVEISALSLMYRKDFIIYREPNVSPSQVTENNFPEKVLLCFSNGNHYDIVYPIKYKESSAMCQSLLYELLYEKVFKTDVSKIVMELDTLEVADEDNSEISDS

SEQ ID NO: 30742 - protein, 26 aa, Artificial Sequence
  Synthetic polypeptide
GLPSHAEINRKDSPRGRKWITILEIQ

SEQ ID NO: 30743 - protein, 16 aa, Artificial Sequence
  Synthetic polypeptide
FCFLRPPQPCRDKQKR

SEQ ID NO: 30744 - protein, 34 aa, Artificial Sequence
  Synthetic polypeptide
GQAQWLTPVIPTHWKAEARGTLEPRSSRPAWTTG

SEQ ID NO: 30745 - protein, 47 aa, Artificial Sequence
  Synthetic polypeptide
SQHIGRLRQEEHLSPGVQDQPGLLDKAWRPCDDGSILSRLLLKNPEY

SEQ ID NO: 30746 - protein, 410 aa, Artificial Sequence
  Synthetic polypeptide
AQEFKTSLDYWIKPGDHVMMEVSCQDCYLRIQSISVLGLECEMDVAKSFTQNKDLLSLGNEAELCSALANLQTSKPDAVEQTCILESTEIALLNNIPYHEGFKMAMSKVLSSLTPEKLYQTMDTHCQNEMSSGTGQSNTVQNILEPFYVLDVSEGFSVLPVIAGTLGQVKPYSSVEKDQHRIALDLISEANHFPKETLEFWLRHVEDESAMLQRPKSDKLWSIIILDVIEPSGLIQQEIMEKAAISRCLLQSGGKIFPQYVLMFGLLVESQTLLEENAVQGTERTLGLNIAPFINQFQVPIRVFLDLSSLPCIPLSKPVELLRLDLMTPYLNTSNREVKVYVCKSGRLTAIPFWYHMYLDEEIRLDTSSEASHWKQAAVVLDNPIQVEMGEELVLSIQHHKSNVSITVKQ

SEQ ID NO: 30747 - protein, 184 aa, Artificial Sequence
  Synthetic polypeptide
SQLLGRLRQENCLNLGGGACGDNPYPSKEDTPTSSLDSLSSPSPVTTAVPGPPGPDKNHLLADGGSFGDWASTIPGQTRSSMVQWLNPQSPTTTSSNSAVTPLSPGSSPFPFSPPATVADKPPESIRSRKARAVYPCEAEHSSELSFEIGAIFEDVQTSREPGWLEGTLNGKRGLIPQNYVKLL

SEQ ID NO: 30748 - protein, 31 aa, Artificial Sequence
  Synthetic polypeptide
TWEAELAVTILTLPRRTPLPAVWTHFPPRLP

SEQ ID NO: 30749 - protein, 34 aa, Artificial Sequence
  Synthetic polypeptide
KYKISRAWWCMPVIPTTREAEAGELLEPGRRSLR

SEQ ID NO: 30750 - protein, 133 aa, Artificial Sequence
  Synthetic polypeptide
SQLLGRLRQENCLNLGGGACGDNPYPSKEDTPTSSLDSLSSPSPVTTAVPGPPGPDKNHLLADGGSFGDWASTIIRSRKARAVYPCEAEHSSELSFEIGAIFEDVQTSREPGWLEGTLNGKRGLIPQNYVKLL

SEQ ID NO: 30751 - protein, 106 aa, Artificial Sequence
  Synthetic polypeptide
YNIPKDGLKSQAAFEEMRTNYIKELRKMVTKCPNNSGQSWQRFYQLTKLLDSMHDLVSDLLEFCFYTFRESHALKVEFPAMLVEIISDQLPKVESGNAKPLYFHRK

SEQ ID NO: 30752 - protein, 20 aa, Artificial Sequence
  Synthetic polypeptide
NENDITFQRMASKARLHLKK

SEQ ID NO: 30753 - protein, 54 aa, Artificial Sequence
  Synthetic polypeptide
KLFLNHYSPYSLCLKSFATSLHAVCRAGPLLLTRLSLSHCSVTVCPVFCRQTRR

SEQ ID NO: 30754 - protein, 983 aa, Artificial Sequence
  Synthetic polypeptide
CSPGLPFENYFLTIILLIHYVSSPLQLHFMLFVVLGPCFLQDCLCLIVQSLCAQYSADKREDEKMCDHLIRAAKYRDHVTATQLIQKIINILTDKHGAWGNSAVSRPLEFWRLDYWEDDLRRRRRFVRNPLGSTHPEATLKTAVEHATDEDILAKGKQSIRSQALGNQNSENEILLEGDDDTLSSVDEKDLENLAGPVSLSTPAQLVAPSVVVKGTLSVTSSELYFEVDEEDPNFKKIDPKILAYTEGLHGKWLFTEIRSIFSRRYLLQNTALEIFMANRVAVMFNFPDPATVKKVVNYLPRVGVGTSFGLPQTRRISLASPRQLFKASNMTQRWQHREISNFEYLMFLNTIAGRSYNDLNQYPVFPWVITNYESEELDLTLPTNFRDLSKPIGALNPKRAAFFAERYESWEDDQVPKFHYGTHYSTASFVLAWLLRIEPFTTYFLNLQGGKFDHADRTFSSISRAWRNSQRDTSDIKELIPEFYYLPEMFVNFNNYNLGVMDDGTVVSDVELPPWAKTSEEFVHINRLALESEFVSCQLHQWIDLIFGYKQQGPEAVRALNVFYYLTYEGAVNLNSITDPVLREAVEAQIRSFGQTPSQLLIEPHPPRGSAMQVSPLMFTDKAQQDVIMVLKFPSNSPVTHVAANTQPGLATPAVITVTANRLFAVNKWHNLPAHQGAVQDQPYQLPVEIDPLIASNTGMHRRQITDLLDQSIQVHSQCFVITSDNRYILVCGFWDKSFRVYSTDTGRLIQVVFGHWDVVTCLARSESYIGGNCYILSGSRDATLLLWYWNGKCSGIGDNPGSETAAPRAILTGHDYEVTCAAVCAELGLVLSGSQEGPCLIHSMNGDLLRTLEGPENCLKPKLIQASREGHCVIFYENGLFCTFSVNGKLQATMETDDNIRAIQLSRDGQYLLTGGDRGVVVVRQVSDLKQLFAYPGCDAGIRAMALSYDQRCIISGMASGSIVLFYNDFNRWHHEYQTRY

SEQ ID NO: 30755 - protein, 56 aa, Artificial Sequence
  Synthetic polypeptide
PLFSLFTMSQVLCNFTSCCLSCWAPASYKTVFVSLFSHCVPSILQTNEKMRRCVII

SEQ ID NO: 30756 - protein, 982 aa, Artificial Sequence
  Synthetic polypeptide
CSPGLPFENYFLTIILLIHYVSSPLQLHFMLFVVLGPCFLQDCLCLIVQSLCAQYSADKREDEKMCDHLIRAAKYRDHVTATQLIQKIINILTDKHGAWGNSAVSRPLEFWRLDYWEDDLRRRRRFVRNPLGSTHPEATLKTAVEHATDEDILAKGKQSIRSQALGNQNSENEILLEGDDDTLSSVDEKDLENLAGPVSLSTPAQLVAPSVVVKGTLSVTSSELYFEVDEEDPNFKKIDPKILAYTEGLHGKWLFTEIRSIFSRRYLLQNTALEIFMANRVAVMFNFPDPATVKKVVNYLPRVGVGTSFGLPQTRRISLASPRQLFKASNMTQRWQHREISNFEYLMFLNTIAGRSYNDLNQYPVFPWVITNYESEELDLTLPTNFRDLSKPIGALNPKRAAFFAERYESWEDDQVPKFHYGTHYSTASFVLAWLLRIEPFTTYFLNLQGGKFDHADRTFSSISRAWRNSQRDTSDIKELIPEFYYLPEMFVNFNNYNLGVMDDGTVVSDVELPPWAKTSEEFVHINRLALESEFVSCQLHQWIDLIFGYKQQGPEAVRALNVFYYLTYEGAVNLNSITDPVLREAVEAQIRSFGQTPSQLLIEPHPPRGSAMQVSPLMFTDKAQQDVIMVLKFPSNSPVTHVAANTQPGLATPAVITVTANRLFAVNKWHNLPAHQGAVQDQPYQLPVEIDPLIASNTGMHRRQITDLLDQSIQVHSQCFVITSDNRYILVCGFWDKSFRVYSTDTGRLIQVVFGHWDVVTCLARSESYIGGNCYILSGSRDATLLLWYWNGKCSGIGDNPGETAAPRAILTGHDYEVTCAAVCAELGLVLSGSQEGPCLIHSMNGDLLRTLEGPENCLKPKLIQASREGHCVIFYENGLFCTFSVNGKLQATMETDDNIRAIQLSRDGQYLLTGGDRGVVVVRQVSDLKQLFAYPGCDAGIRAMALSYDQRCIISGMASGSIVLFYNDFNRWHHEYQTRY

SEQ ID NO: 30757 - protein, 994 aa, Artificial Sequence
  Synthetic polypeptide
CSPGLPFENYFLTIILLIHYVSSPLQLHFMLFVVLGPCFLQDCLCLIVQSLCAQYSADKREDEKMCDHLIRAAKYRDHVTATQLIQKIINILTDKHGAWGNSAVSRPLEFWRLDYWEDDLRRRRRFVRNPLGSTHPEATLKTAVEHVCIFKLRENSKATDEDILAKGKQSIRSQALGNQNSENEILLEGDDDTLSSVDEKDLENLAGPVSLSTPAQLVAPSVVVKGTLSVTSSELYFEVDEEDPNFKKIDPKILAYTEGLHGKWLFTEIRSIFSRRYLLQNTALEIFMANRVAVMFNFPDPATVKKVVNYLPRVGVGTSFGLPQTRRISLASPRQLFKASNMTQRWQHREISNFEYLMFLNTIAGRSYNDLNQYPVFPWVITNYESEELDLTLPTNFRDLSKPIGALNPKRAAFFAERYESWEDDQVPKFHYGTHYSTASFVLAWLLRIEPFTTYFLNLQGGKFDHADRTFSSISRAWRNSQRDTSDIKELIPEFYYLPEMFVNFNNYNLGVMDDGTVVSDVELPPWAKTSEEFVHINRLALESEFVSCQLHQWIDLIFGYKQQGPEAVRALNVFYYLTYEGAVNLNSITDPVLREAVEAQIRSFGQTPSQLLIEPHPPRGSAMQVSPLMFTDKAQQDVIMVLKFPSNSPVTHVAANTQPGLATPAVITVTANRLFAVNKWHNLPAHQGAVQDQPYQLPVEIDPLIASNTGMHRRQITDLLDQSIQVHSQCFVITSDNRYILVCGFWDKSFRVYSTDTGRLIQVVFGHWDVVTCLARSESYIGGNCYILSGSRDATLLLWYWNGKCSGIGDNPGSETAAPRAILTGHDYEVTCAAVCAELGLVLSGSQEGPCLIHSMNGDLLRTLEGPENCLKPKLIQASREGHCVIFYENGLFCTFSVNGKLQATMETDDNIRAIQLSRDGQYLLTGGDRGVVVVRQVSDLKQLFAYPGCDAGIRAMALSYDQRCIISGMASGSIVLFYNDFNRWHHEYQTRY

SEQ ID NO: 30758 - protein, 706 aa, Artificial Sequence
  Synthetic polypeptide
CSPGLPFENYFLTIILLIHYVSSPLQLHFMLFVVLGPCFLQDCLCLIVQSLCAQYSADKREDEKMCDHLIRAAKYRDHVTATQLIQKIINILTDKHGAWGNSAVSRPLEFWRLDYWEDDLRRRRRFVRNPLGSTHPEATLKTAVEHATDEDILAKGKQSIRSQALGNQNSENEILLEGDDDTLSSVDEKDLENLAGPVSLSTPAQLVAPSVVVKGTLSVTSSELYFEVDEEDPNFKKIDPKILAYTEGLHGKWLFTEIRSIFSRRYLLQNTALEIFMANRVAVMFNFPDPATVKKVVNYLPRVGVGTSFGLPQTRRISLASPRQLFKASNMTQRWQHREISNFEYLMFLNTIAGRSYNDLNQYPVFPWVITNYESEELDLTLPTNFRDLSKPIGALNPKRAAFFAERYESWEDDQVPKFHYGTHYSTASFVLAWLLRIEPFTTYFLNLQGGKFDHADRTFSSISRAWRNSQRDTSDIKELIPEFYYLPEMFVNFNNYNLGVMDDGTVVSDVELPPWAKTSEEFVHINRLALESEFVSCQLHQWIDLIFGYKQQGPEAVRALNVFYYLTYEGAVNLNSITDPVLREAVEAQIRSFGQTPSQLLIEPHPPRGSAMQVSPLMFTDKAQQDVIMVLKFPSNSPVTHVAANTQPGLATPAVITVTANRLFAVNKWHNLPAHQGAVQDQPYQLPVEIDPLIGLSLPSLFAIH

SEQ ID NO: 30759 - protein, 17 aa, Artificial Sequence
  Synthetic polypeptide
GLPSHVELVLDRLSLRS

SEQ ID NO: 30760 - protein, 25 aa, Artificial Sequence
  Synthetic polypeptide
EVPFASCHDSEASPAMWNLYSTDYL

SEQ ID NO: 30761 - protein, 296 aa, Artificial Sequence
  Synthetic polypeptide
IMGAGLSHAILVIVNKSHKIWWVYQGFLLLLLSHFLLLPPYKKYLSPPAMILRPPQPCGTCTRQIISEKLGRGSRTVDLELEAQIDILRDNKKKYENILKLAQTLSTQLFQMVHTQRQLGDAFADLSLKSLELHEEFGYNADTQKLLAKNGETLLGAINFFIASVNTLVNKTIEDTLMTVKQYESARIEYDAYRTDLEELNLGPRDANTLPKIEQSQHLFQAHKEKYDKMRNDVSVKLKFLEENKVKVLHNQLVLFHNAIAAYFAGNQKQLEQTLKQFHIKLKTPGVDAPSWLEEQ

SEQ ID NO: 30762 - protein, 72 aa, Artificial Sequence
  Synthetic polypeptide
GWAQWLTPVIPALWEAEAGRSRGQANKVAKEAANRWTDNIFAIKSWAKRKFGFEENKIDRTFGIPEDFDYID

SEQ ID NO: 30763 - protein, 18 aa, Artificial Sequence
  Synthetic polypeptide
SQHFGRLRRADHEAKQIK

SEQ ID NO: 30764 - protein, 9 aa, Artificial Sequence
  Synthetic polypeptide
GGQITRPSK

SEQ ID NO: 30765 - protein, 47 aa, Artificial Sequence
  Synthetic polypeptide
GWAQWLTPVIPALWEAEAGRSRGQANKVAKEAANRWTGMYYNNADKL

SEQ ID NO: 30766 - protein, 1448 aa, Artificial Sequence
  Synthetic polypeptide
GNFSDKLFSGKGLHFQPSVLDFGIQFLGHPVAKILHAYNPSRDSEVVVNSVFAAAGHFHVPPVPCRVIPAMGKTSFRIIFLPTEEGSIESSLFINTSSYGVLSYHVSGIGTRRISTEGSAKQLPNAYFLLPKVQSIQLSQMQAETTNTSLLQVQLECSLHNKVCQQLKGCYLESDDVLRLQMSIMVTMENFSKEFEENTQHLLDHLSIVYVATDESETSDDSAVNMYILHSGNSLIWIQDIRHFSQRDALSLQFEPVLLPTSTTNFTKIASFTCKAATSCDSGIIEDVKKTTHTPTLKACLFSSVAQGYFRMDSSATQFHIETHENTSGLWSIWYRNHFDRSVVLNDVFLSKETKHMLKILNFTGPLFLPPGCWNIFSLKLAVKDIAINLFTNVFLTTNIGAIFAIPLQIYSAPTKEGSLGFEVIAHCGMHYFMGKSKAGNPNWNGSLSLDQSTWNVDSELANKLYERWKKYKNGDVCKFGTDMQMINFTTGEFQLTEACPYLGTHSEESRFGILHLHLQPLEMKRVGVVFTPADYGKVTSLILIRNNLTVIDMIGVEGFGARELLKVGGRLPGAGGSLRFKVPESTLMDCRRQLKDSKQILSITKNFKVENIGPLPITVSSLKINGYNCQGYGFEVLDCHQFSLDPNTSRDISIVFTPDFTSSWVIRDLSLVTAADLEFRFTLNVTLPHHLLPLCADVVPGPSWEESFWRLTVFFVSLSLLGVILIAFQQAQYILMEFMKTRQRQNASSSSQQNNGPMDVISPHSYKSNCKNFLDTYGPSDKGRGKNCLPVNTPQSRIQNAAKRSPATYGHSQKKHKCSVYYSKHKTSTAAASSTSTTTEEKQTSPLGSSLPAAKEDICTDAMRENWISLRYASGINVNLQKNLTLPKNLLNKEENTLKNTIVFSNPSSECSMKEGIQTCMFPKETDIKTSENTAEFKERELCPLKTSKKLPENHLPRNSPQYHQPDLPEISRKNNGNNQQVPVKNEVDHCENLKKVDTKPSSEKKIHKTSREDMFSEKQDIPFVEQEDPYRKKKLQEKREGNLQNLNWSKSRTCRKNKKRGVAPVSRPPEQSDLKLVCSDFERSELSSDINVRSWCIQESTREVCKADAEIASSLPAAQREAEGYYQKPEKKCVDKFCSDSSSDCGSSSGSVRASRGSWGSWSSTSSSDGDKKPMVDAQHFLPAGDSVSQNDFPSEAPISLNLSHNICNPMTVNSLPQYAEPSCPSLPAGPTGVEEDKGLYSPGDLWPTPPVCVTSSLNCTLENGVPCVIQESAPVHNSFIDWSATCEGQFSSAYCPLELNDYNAFPEENMNYANGFPCPADVQTDFIDHNSQSTWNTPPNMPAAWGHASFISSPPYLTSTRSLSPMSGLFGSIWAPQSDVYENCCPINPTTEHSTHMENQAVVCKEYYPGFNPFRAYMNLDIWTTTANRNANFPLSRDSSYCGNV

SEQ ID NO: 30767 - protein, 67 aa, Artificial Sequence
  Synthetic polypeptide
GFQAELWCPPIRVSYVLACLVNRWVRPLQVSFQGRTEEPSEGEFIHYKGTSRTNYLVEKAYIFSHQF

SEQ ID NO: 30768 - protein, 34 aa, Artificial Sequence
  Synthetic polypeptide
IGGLGHCRSASRGGLRNLLRENSFIIRELLGQTI

SEQ ID NO: 30769 - protein, 1531 aa, Artificial Sequence
  Synthetic polypeptide
GNFSDKLFSGKGLHFQPSVLDFGIQFLGHPVAKILHAYNPSRDSEVVVNSVFAAAGHFHVPPVPCRVIPAMGKTSFRIIFLPTEEGSIESSLFINTSSYGVLSYHVSGIGTRRISTEGSAKQLPNAYFLLPKVQSIQLSQMQAETTNTSLLQVQLECSLHNKVCQQLKGCYLESDDVLRLQMSIMVTMENFSKEFEENTQHLLDHLSIVYVATDESETSDDSAVNMYILHSGNSLIWIQDIRHFSQRDALSLQFEPVLLPTSTTNFTKIASFTCKATSCDSGIIEDVKKTTHTPTLKACLFSSVAQGYFRMDSSATQFHIETHENTSGLWSIWYRNHFDRSVVLNDVFLSKETKHMLKILNFTGPLFLPPGCWNIFSLKLAVKDIAINLFTNVFLTTNIGAIFAIPLQIYSAPTKEGSLGFEVIAHCGMHYFMGKSKAGNPNWNGSLSLDQSTWNVDSELANKLYERWKKYKNGDVCKRNVLGTTRFAHLKKSKESESFVFFLPRLIAEPGLMLNFSATALRSRMIKYFVVQNPSSWPVSLQLLPLSLYPKPEALVHLLHRWFGTDMQMINFTTGEFQLTEACPYLGTHSEESRFGILHLHLQPLEMKRVGVVFTPADYGKVTSLILIRNNLTVIDMIGVEGFGARELLKVGGRLPGAGGSLRFKVPESTLMDCRRQLKDSKQILSITKNFKVENIGPLPITVSSLKINGYNCQGYGFEVLDCHQFSLDPNTSRDISIVFTPDFTSSWVIRDLSLVTAADLEFRFTLNVTLPHHLLPLCADVVPGPSWEESFWRLTVFFVSLSLLGVILIAFQQAQYILMEFMKTRQRQNASSSSQQNNGPMDVISPHSYKSNCKNFLDTYGPSDKGRGKNCLPVNTPQSRIQNAAKRSPATYGHSQKKHKCSVYYSKHKTSTAAASSTSTTTEEKQTSPLGSSLPAAKEDICTDAMRENWISLRYASGINVNLQKNLTLPKNLLNKEENTLKNTIVFSNPSSECSMKEGIQTCMFPKETDIKTSENTAEFKERELCPLKTSKKLPENHLPRNSPQYHQPDLPEISRKNNGNNQQVPVKNEVDHCENLKKVDTKPSSEKKIHKTSREDMFSEKQDIPFVEQEDPYRKKKLQEKREGNLQNLNWSKSRTCRKNKKRGVAPVSRPPEQSDLKLVCSDFERSELSSDINVRSWCIQESTREVCKADAEIASSLPAAQREAEGYYQKPEKKCVDKFCSDSSSDCGSSSGSVRASRGSWGSWSSTSSSDGDKKPMVDAQHFLPAGDSVSQNDFPSEAPISLNLSHNICNPMTVNSLPQYAEPSCPSLPAGPTGVEEDKGLYSPGDLWPTPPVCVTSSLNCTLENGVPCVIQESAPVHNSFIDWSATCEGQFSSAYCPLELNDYNAFPEENMNYANGFPCPADVQTDFIDHNSQSTWNTPPNMPAAWGHASFISSPPYLTSTRSLSPMSGLFGSIWAPQSDVYENCCPINPTTEHSTHMENQAVVCKEYYPGFNPFRAYMNLDIWTTTANRNANFPLSRDSSYCGNV

SEQ ID NO: 30770 - protein, 8 aa, Artificial Sequence
  Synthetic polypeptide
GNFSDKLF

SEQ ID NO: 30771 - protein, 56 aa, Artificial Sequence
  Synthetic polypeptide
GFQAELWCPPIRVSYVLACLVNRWVRPLQVSFQGRTEEPSEGEFIHYKGTSRTNYL

SEQ ID NO: 30772 - protein, 1532 aa, Artificial Sequence
  Synthetic polypeptide
GNFSDKLFSGKGLHFQPSVLDFGIQFLGHPVAKILHAYNPSRDSEVVVNSVFAAAGHFHVPPVPCRVIPAMGKTSFRIIFLPTEEGSIESSLFINTSSYGVLSYHVSGIGTRRISTEGSAKQLPNAYFLLPKVQSIQLSQMQAETTNTSLLQVQLECSLHNKVCQQLKGCYLESDDVLRLQMSIMVTMENFSKEFEENTQHLLDHLSIVYVATDESETSDDSAVNMYILHSGNSLIWIQDIRHFSQRDALSLQFEPVLLPTSTTNFTKIASFTCKAATSCDSGIIEDVKKTTHTPTLKACLFSSVAQGYFRMDSSATQFHIETHENTSGLWSIWYRNHFDRSVVLNDVFLSKETKHMLKILNFTGPLFLPPGCWNIFSLKLAVKDIAINLFTNVFLTTNIGAIFAIPLQIYSAPTKEGSLGFEVIAHCGMHYFMGKSKAGNPNWNGSLSLDQSTWNVDSELANKLYERWKKYKNGDVCKRNVLGTTRFAHLKKSKESESFVFFLPRLIAEPGLMLNFSATALRSRMIKYFVVQNPSSWPVSLQLLPLSLYPKPEALVHLLHRWFGTDMQMINFTTGEFQLTEACPYLGTHSEESRFGILHLHLQPLEMKRVGVVFTPADYGKVTSLILIRNNLTVIDMIGVEGFGARELLKVGGRLPGAGGSLRFKVPESTLMDCRRQLKDSKQILSITKNFKVENIGPLPITVSSLKINGYNCQGYGFEVLDCHQFSLDPNTSRDISIVFTPDFTSSWVIRDLSLVTAADLEFRFTLNVTLPHHLLPLCADVVPGPSWEESFWRLTVFFVSLSLLGVILIAFQQAQYILMEFMKTRQRQNASSSSQQNNGPMDVISPHSYKSNCKNFLDTYGPSDKGRGKNCLPVNTPQSRIQNAAKRSPATYGHSQKKHKCSVYYSKHKTSTAAASSTSTTTEEKQTSPLGSSLPAAKEDICTDAMRENWISLRYASGINVNLQKNLTLPKNLLNKEENTLKNTIVFSNPSSECSMKEGIQTCMFPKETDIKTSENTAEFKERELCPLKTSKKLPENHLPRNSPQYHQPDLPEISRKNNGNNQQVPVKNEVDHCENLKKVDTKPSSEKKIHKTSREDMFSEKQDIPFVEQEDPYRKKKLQEKREGNLQNLNWSKSRTCRKNKKRGVAPVSRPPEQSDLKLVCSDFERSELSSDINVRSWCIQESTREVCKADAEIASSLPAAQREAEGYYQKPEKKCVDKFCSDSSSDCGSSSGSVRASRGSWGSWSSTSSSDGDKKPMVDAQHFLPAGDSVSQNDFPSEAPISLNLSHNICNPMTVNSLPQYAEPSCPSLPAGPTGVEEDKGLYSPGDLWPTPPVCVTSSLNCTLENGVPCVIQESAPVHNSFIDWSATCEGQFSSAYCPLELNDYNAFPEENMNYANGFPCPADVQTDFIDHNSQSTWNTPPNMPAAWGHASFISSPPYLTSTRSLSPMSGLFGSIWAPQSDVYENCCPINPTTEHSTHMENQAVVCKEYYPGFNPFRAYMNLDIWTTTANRNANFPLSRDSSYCGNV

SEQ ID NO: 30773 - protein, 23 aa, Artificial Sequence
  Synthetic polypeptide
DWTLWLMPVIPALWDAKTNKKIP

SEQ ID NO: 30774 - protein, 1139 aa, Artificial Sequence
  Synthetic polypeptide
SQHFGMPRQTRKFRDAEQEKDRTLLKTIIKVWKEMKSLREFQRFTNTPLKLVLRKEKADQKADEEAYEAEIQAEISELLEEHTEEYAQKMEEYRTSLQQWKAWRKVQRAKKKKRKQAAEEHPGDEIAEPYPEEDLVKPSPPEPTDRAVIEQEVRERAAQSRRRPWEPTLVPELSLAGSVTPNDQCPRAEVSRREDVKKRSVYLKVLFNNKEVSRTVSRPLGADFRVHFGQIFNLQIVNWPESLTLQVYETVGHSSPTLLAEVFLPIPETTVVTGRAPTEEVEFSSNQHVTLDHEGVGSGVPFSFEADGSNQLTLMTSGKVSHSVAWAIGENGIPLIPPLSQQNIGFRSALKKADAISSIGTSGLTDMKKLAKWAAESKLDPNDPNNAPLMQLISVATSGESYVPDFFRLEQLQQEFNFVSDQELNRSKRFRLLHLRSQEVPEFRNYKQVPVYDREIMEKVFQDYEKRLRDRNVIETKEHIDTHRAIVAKYLQQVRESVINRFLIAKQYFLLADMIVEEEVPNISILGLSLFKLAEQKRPLRPRRKGRKKVTAQNLSDGDIKLLVNIVRAYDIPVRKPAVSKFQQPSRSSRMFSEKHAASPSTYSPTHNADYPLGQVLVRPFVEVSFQRTVCHTTTAEGPNPSWNEELELPFRAPNGDYSTASLQSVKDVVFINIFDEVLHDVLEDDRERGSGIHTRIERHWLGCVKMPFSTIYFQARIDGTFKIDIPPVLLGYSKERNMILERGFDSVRSLSEGSYITLFITIEPQLVPGESIREKFESQEDEKLLQATEKFQAECALKFPNRQCLTTVIDISGKTVFITRYLKPLNPPQELLNVYPNNLQATAELVARYVSLIPFLPDTVSFGGICDLWSTSDQFLDLLAGDEEEHAVLLCNYFLSLGKKAWLLMGNAIPEGPTAYVLTWEQGRYLIWNPCSGHFYGQFDTFCPLKNVGCLIGPDNIWFNIQRYESPLRINFDVTRPKLWKSFFSRSLPYPGLSSVQPEELIYQRSDKAAAAELQDRIEKILKEKIMDWRPRHLTRWNRYCTSTLRHFLPLLEKSQGEDVEDDHRAELLKQLGDYRFSGFPLHMPYSEVKPLIDAVYSTGVHNIDVPNVEFALAVYIHPYPKNVLSVWIYVASLIRNR

SEQ ID NO: 30775 - protein, 37 aa, Artificial Sequence
  Synthetic polypeptide
MDTVAHACNPSTLGCQDKQENSVMLNKKKIEHCLRLS

SEQ ID NO: 30776 - protein, 107 aa, Artificial Sequence
  Synthetic polypeptide
SQHFGMPRQTRKFRDAEQEKDRTLLKTIIKVWKEMKSLREFQRFTNTPLKLVLRKEKADQKADEEAYEAEIQAEISELLEEHTEEYAQKMEEYRTSLQQWKAWRKVQ

SEQ ID NO: 30777 - protein, 1080 aa, Artificial Sequence
  Synthetic polypeptide
SQHFGMPRQTRKFRDAEQEKDRTLLKTIIKVWKEMKSLREFQRFTNTPLKLVLRKEKADQKADEEAYEAEIQAEISELLEEHTEEYAQKMEEYRTSLQQWKAWRKVQRAKKKKRKQAAEEHPGDEIAEPYPEEDLVKPSPPEPTDRAVIEQEVRERAAQSRRRPWEPTLVPELSLAGSVTPNDQCPRAEVSRREDVKKRSVYLKVLFNNKEVSRTVSRPLGADFRVHFGQIFNLQIVNWPESLTLQVYETVGHSSPTLLAEVFLPIPETTVVTGRAPTEEVEFSSNQHVTLDHEGVGSGVPFSFEADGSNQLTLMTSGKVSHSVAWAIGENGIPLIPPLSQQNIGFRSALKKADAISSIGTSGLTDMKKLAKWAAESKLDPNDPNNAPLMQLISVATSGESYVPDFFRLEQLQQEFNFVSDQELNRSKRFRLLHLRSQEVPEFRNYKQVPVYDREIMEKVFQDYEKRLRDRNVIETKEHIDTHRAIVAKYLQQVRESVINRFLIAKQYFLLADMIVEEEVPNISILGLSLFKLAEQKRPLRPRRKGRKKVTAQNLSDGDIKLLVNIVRAYDIPVRKPAVSKFQQPSRSSRMFSEKHAASPSTYSPTHNADYPLGQVLVRPFVEVSFQRTVCHTTTAEGPNPSWNEELELPFRAPNGDYSTASLQSVKDVVFINIFDEVLHDVLEDDRERGSGIHTRIERHWLGCVKMPFSTIYFQARFESQEDEKLLQATEKFQAECALKFPNRQCLTTVIDISGKTVFITRYLKPLNPPQELLNVYPNNLQATAELVARYVSLIPFLPDTVSFGGICDLWSTSDQFLDLLAGDEEEHAVLLCNYFLSLGKKAWLLMGNAIPEGPTAYVLTWEQGRYLIWNPCSGHFYGQFDTFCPLKNVGCLIGPDNIWFNIQRYESPLRINFDVTRPKLWKSFFSRSLPYPGLSSVQPEELIYQRSDKAAAAELQDRIEKILKEKIMDWRPRHLTRWNRYCTSTLRHFLPLLEKSQGEDVEDDHRAELLKQLGDYRFSGFPLHMPYSEVKPLIDAVYSTGVHNIDVPNVEFALAVYIHPYPKNVLSVWIYVASLIRNR

SEQ ID NO: 30778 - protein, 71 aa, Artificial Sequence
  Synthetic polypeptide
DMTCSSLPSTMIVRLPQICGTFCETVKIIIRDQRSVLASAVLGLASIVCTGLVSYTTLPAIFIPFFLWMAG

SEQ ID NO: 30779 - protein, 12 aa, Artificial Sequence
  Synthetic polypeptide
GFPRYVELFVRL

SEQ ID NO: 30780 - protein, 41 aa, Artificial Sequence
  Synthetic polypeptide
KQEFCCTSSLSLPAVIHVRHDLLLLAFHHDCEASPDMWNFL

SEQ ID NO: 30781 - protein, 199 aa, Artificial Sequence
  Synthetic polypeptide
MAESIFSVLSLASECTTLAAELPKVSYVKALDVWLIACLLFGFASLVEYAVVQVMLNNPKRVEAEKARIAKAEQADGKGGNVAKKNTVNGTGTPVHISTLQVGETRCKKVCTSKSDLRSNDFSIVGSLPRDFELSNYDCYGKPIEVNNGLGKSQAKNNKKPPPAKPVIPTAAKRIDLYARALFPFCFLFFNVIYWSIYL

SEQ ID NO: 30782 - protein, 27 aa, Artificial Sequence
  Synthetic polypeptide
WLKVSSQSSAWPLSAQPLPLSFPKFPM

SEQ ID NO: 30783 - protein, 5 aa, Artificial Sequence
  Synthetic polypeptide
MAESW

SEQ ID NO: 30784 - protein, 101 aa, Artificial Sequence
  Synthetic polypeptide
WLKVGETRCKKVCTSKSDLRSNDFSIVGSLPRDFELSNYDCYGKPIEVNNGLGKSQAKNNKKPPPAKPVIPTAAKRIDLYARALFPFCFLFFNVIYWSIYL

SEQ ID NO: 30785 - protein, 5 aa, Artificial Sequence
  Synthetic polypeptide
WLKVG

SEQ ID NO: 30786 - protein, 19 aa, Artificial Sequence
  Synthetic polypeptide
WLKVGETRCKKVCTSKSDL

SEQ ID NO: 30787 - protein, 57 aa, Artificial Sequence
  Synthetic polypeptide
GRARWLTPVIPALWEAEAGGSRAQKFETSLANLTCRLPKCMGCFQGCIYFKTSLQHY

SEQ ID NO: 30788 - protein, 34 aa, Artificial Sequence
  Synthetic polypeptide
PGTVAHACNPSTLGGRGGWITSSEVRDQPGQPDM

SEQ ID NO: 30789 - protein, 202 aa, Artificial Sequence
  Synthetic polypeptide
GEEPRWLNRNSSSLQLPVRPTQKILLWSRIKDLAHQFTQVQRDMFTLEDTLLGYLADDLTWCGEFNTSKINYQSCPDWRKDCSNNPVSVFWKTVSRRFAEAACDVVHVMLNGSRSKIFDKNSTFGSVEVHNLQPEKVQTLEAWVIHGGREDSRDLCQDPTIKELESIISKRNIQFSCKNIYRPDKFLQCVKNPEDSSCTSEI

SEQ ID NO: 30790 - protein, 11 aa, Artificial Sequence
  Synthetic polypeptide
DQRRRFFFGAE

SEQ ID NO: 30791 - protein, 47 aa, Artificial Sequence
  Synthetic polypeptide
EQLQSAAPSETNAEDSSLEQNKRSGPSVHTGPAGHVHPGGHAARLPC

SEQ ID NO: 30792 - protein, 159 aa, Artificial Sequence
  Synthetic polypeptide
GEEPRWLNRNSSSLQLPVRPTQKILLWSRIKDLAHQFTQVQRDMFTLEDTLLGYLADDLTWCEINYQSCPDWRKDCSNNPVSVFWKTVSRRFAEAACDVVHVMLNGSRSKIFDKNSTFGSVEVHNLQPEKVQTLEAWVIHGGREDSRDLCQDPTIKELE

SEQ ID NO: 30793 - protein, 13 aa, Artificial Sequence
  Synthetic polypeptide
RTDCLLKFFFGAE

SEQ ID NO: 30794 - protein, 59 aa, Artificial Sequence
  Synthetic polypeptide
RQQLILTRGILPAQHTNSAKGRIASSNSSLEQNKRSGPSVHTGPAGHVHPGGHAARLPC

SEQ ID NO: 30795 - protein, 199 aa, Artificial Sequence
  Synthetic polypeptide
QEGFSQHSTPTLLKDGLPPQILLWSRIKDLAHQFTQVQRDMFTLEDTLLGYLADDLTWCGEFNTSKINYQSCPDWRKDCSNNPVSVFWKTVSRRFAEAACDVVHVMLNGSRSKIFDKNSTFGSVEVHNLQPEKVQTLEAWVIHGGREDSRDLCQDPTIKELESIISKRNIQFSCKNIYRPDKFLQCVKNPEDSSCTSEI

SEQ ID NO: 30796 - protein, 156 aa, Artificial Sequence
  Synthetic polypeptide
QEGFSQHSTPTLLKDGLPPQILLWSRIKDLAHQFTQVQRDMFTLEDTLLGYLADDLTWCEINYQSCPDWRKDCSNNPVSVFWKTVSRRFAEAACDVVHVMLNGSRSKIFDKNSTFGSVEVHNLQPEKVQTLEAWVIHGGREDSRDLCQDPTIKELE

SEQ ID NO: 30797 - protein, 26 aa, Artificial Sequence
  Synthetic polypeptide
KKKQKATTSMKKTPQKPIQRFFFGAE

SEQ ID NO: 30798 - protein, 42 aa, Artificial Sequence
  Synthetic polypeptide
KRPHKNPSKDSSLEQNKRSGPSVHTGPAGHVHPGGHAARLPC

SEQ ID NO: 30799 - protein, 201 aa, Artificial Sequence
  Synthetic polypeptide
LLKEKTESNNINEKDPTKTHPKILLWSRIKDLAHQFTQVQRDMFTLEDTLLGYLADDLTWCGEFNTSKINYQSCPDWRKDCSNNPVSVFWKTVSRRFAEAACDVVHVMLNGSRSKIFDKNSTFGSVEVHNLQPEKVQTLEAWVIHGGREDSRDLCQDPTIKELESIISKRNIQFSCKNIYRPDKFLQCVKNPEDSSCTSEI

SEQ ID NO: 30800 - protein, 158 aa, Artificial Sequence
  Synthetic polypeptide
LLKEKTESNNINEKDPTKTHPKILLWSRIKDLAHQFTQVQRDMFTLEDTLLGYLADDLTWCEINYQSCPDWRKDCSNNPVSVFWKTVSRRFAEAACDVVHVMLNGSRSKIFDKNSTFGSVEVHNLQPEKVQTLEAWVIHGGREDSRDLCQDPTIKELE

SEQ ID NO: 30801 - protein, 213 aa, Artificial Sequence
  Synthetic polypeptide
RYVHAYVHCSAIHNSKDMESTQMPISDRLDKENVILLWSRIKDLAHQFTQVQRDMFTLEDTLLGYLADDLTWCGEFNTSKINYQSCPDWRKDCSNNPVSVFWKTVSRRFAEAACDVVHVMLNGSRSKIFDKNSTFGSVEVHNLQPEKVQTLEAWVIHGGREDSRDLCQDPTIKELESIISKRNIQFSCKNIYRPDKFLQCVKNPEDSSCTSEI

SEQ ID NO: 30802 - protein, 36 aa, Artificial Sequence
  Synthetic polypeptide
RKCDSSLEQNKRSGPSVHTGPAGHVHPGGHAARLPC

SEQ ID NO: 30803 - protein, 170 aa, Artificial Sequence
  Synthetic polypeptide
RYVHAYVHCSAIHNSKDMESTQMPISDRLDKENVILLWSRIKDLAHQFTQVQRDMFTLEDTLLGYLADDLTWCEINYQSCPDWRKDCSNNPVSVFWKTVSRRFAEAACDVVHVMLNGSRSKIFDKNSTFGSVEVHNLQPEKVQTLEAWVIHGGREDSRDLCQDPTIKELE

SEQ ID NO: 30804 - protein, 27 aa, Artificial Sequence
  Synthetic polypeptide
FLHFHLRPDKFLQCVKNPEDSSCTSEI

SEQ ID NO: 30805 - protein, 33 aa, Artificial Sequence
  Synthetic polypeptide
RRSQDGRIGTAPVYSSQRERRRRRVISAFPSET

SEQ ID NO: 30806 - protein, 160 aa, Artificial Sequence
  Synthetic polypeptide
TSLCIGVLICKIGIIMIYNRLDTNCCGFRPRKEDACVQNGLRPKCDDQGSAALAHIIQRKHDPRHLVFIDNKGFFDRSEDNLNFKLLEGIKEFPASAVSVLKSQHLRQKLLQSLFLDKVYWESQGGRQGIEKLIDVIEHRAKILITYINAHGVKVLPMNE

SEQ ID NO: 30807 - protein, 7 aa, Artificial Sequence
  Synthetic polypeptide
NRNNNDL

SEQ ID NO: 30808 - protein, 122 aa, Artificial Sequence
  Synthetic polypeptide
TSLCIGVLICKIGIIMIYNRLDTNCCGFRPRKEDACVQNGLRPKCDDQGSAALAHIIQRKHDPRHLVFIDNKGFFDRSEDNLNFKLLEGIKEFPASAVSVLKSQHLRQKLLQSLFLDKVYWE

SEQ ID NO: 30809 - protein, 115 aa, Artificial Sequence
  Synthetic polypeptide
TSLCIGVLICKIGIIMIYNRLDTNCCGFRPRKEDACVQNGLRPKCDDQGSAALAHIIQRKHDPRHLVFIDNKGFFDRSEDNLNFKLLEGIKEFPASAVSVLKSQHLRQKLLQSLF

SEQ ID NO: 30810 - protein, 91 aa, Artificial Sequence
  Synthetic polypeptide
TSLCIGVLICKIGIIMIYNRLDTNCCGFRPRKEDACVQNGLRPKCDDQGSAALAHIIQRKHDPRHLVFIDNKGFFDRSEDNLNFKLLEGIK

SEQ ID NO: 30811 - protein, 34 aa, Artificial Sequence
  Synthetic polypeptide
GAPPPGSHPVWEVRSVSARQLPHLGGSIQSWMSQ

SEQ ID NO: 30812 - protein, 18 aa, Artificial Sequence
  Synthetic polypeptide
GASPPGSCPIWEGASSPG

SEQ ID NO: 30813 - protein, 160 aa, Artificial Sequence
  Synthetic polypeptide
EVRSPSAWQPPRLGSEERLRPAAAPSGREHPVLDEPIAEAVCIIADTDKWSVQVATSQRKVTDNMKLGQDVLVSSQVSSLLQSILQLYKLHLPADFCIMHLEDRLQEMYLKSKMLSEYLRGHTRVHVKELGVVLGIESNDLPLLTAIASTHSPYVAQILL

SEQ ID NO: 30814 - protein, 390 aa, Artificial Sequence
  Synthetic polypeptide
NPVSTKNTKISRAWWRVPVIPATWEAEVADRLFSSFGQDILDALYWTATEPKERKRAHIGVIPHFFMAVLYVFLHAILIMVQATTLNVAFNSHNKSLLTIMMSNNFVEIKGSVFKKFEKNNLFQMSNSDIKERFTNYVLLLIVCLRNMEQFSWNPDHLWVLFPDVCMVIASEIAVDIVKHAFITKFNDITADVYSEYRASLAFDLVSSRQKNAYTDYSDSVARRMGFIPLPLAVLLIRVVTSSIKVQGILSYACVILFYFGLISLKVLNSIVLLGKSCQYVKEAKMEEKLSNPPATCTPGKPSSKSQNKCKPSQGLSTEENLSASITKQPIHQKENIIPLLVTSNSDQFLTTPDGDEKDITQDNSELKHRSSKKDLLEIDRFTICGNRID

SEQ ID NO: 30815 - protein, 8 aa, Artificial Sequence
  Synthetic polypeptide
SQLLGRLR

SEQ ID NO: 30816 - protein, 197 aa, Artificial Sequence
  Synthetic polypeptide
NPVSTKNTKISRAWWRVPVIPATWEAEVADRLFSSFGQDILDALYWTATEPKERKRAHIGFVEIKGSVFKKFEKNNLFQMSNSDIKERFTNYVLLLIVCLRNMEQFSWNPDHLWVLFPDVCMVIASEIAVDIVKHAFITKFNDITADVYSEYRASLAFDLVSSRQKNAYTDYSDSVARRMGFIPLPLAVLVDIPEST

SEQ ID NO: 30817 - protein, 69 aa, Artificial Sequence
  Synthetic polypeptide
EVPFTSCRDSAEVSPASESVELSDPVESARRSETKHHCSNCGTKCCSELCHSRNPETSHYLEKEQYYSK

SEQ ID NO: 30818 - protein, 11 aa, Artificial Sequence
  Synthetic polypeptide
GLPSLRICGTK

SEQ ID NO: 30819 - protein, 622 aa, Artificial Sequence
  Synthetic polypeptide
ELPFTSHNDSEASPDMWNLIQLSLPEDQKLSITAATVGQSAVLSCAIQGTLRPPIIWKRNNIILNNLDLEDINDFGDDGSLYITKVTTTHVGNYTCYADGYEQVYQTHIFQVNVPPVIRVYPESQAREPGVTASLRCHAEGIPKPQLGWLKNGIDITPKLSKQLTLQANGSEVHISNVRYEDTGAYTCIAKNEAGVDEDISSLFVEDSARKTLANILWREEGLGIGNMFYVFYEDGIKVIQPIECEFQRHIKPSEKLLGFQDEVCPKAEGDEVQRCVWASAVNVKDKFIYVAQPTLDRVLIVDVQSQKVVQAVSTDPVPVKLHYDKSHDQVWVLSWGTLEKTSPTLQVITLASGNVPHHTIHTQPVGKQFDRVDDFFIPTTTLIITHMRFGFILHKDEAALQKIDLETMSYIKTINLKDYKCVPQSLAYTHLGGYYFIGCKPDSTGAVSPQVMVDGVTDSVIGFNSDVTGTPYVSPDGHYLVSINDVKGLVRVQYITIRGEIQEAFDIYTNLHISDLAFQPSFTEAHQYNIYGSSSTQTDVLFVELSSGKVKMIKSLKEPLKAEEWPWNRKNRQIQDSGLFGQYLMTPSKDSLFILDGRLNKLNCEITEVEKGNTVIWVGDA

SEQ ID NO: 30820 - protein, 54 aa, Artificial Sequence
  Synthetic polypeptide
GLPRHVEFDPVESARRSETKHHCSNCGTKCCSELCHSRNPETSHYLEKEQYYSK

SEQ ID NO: 30821 - protein, 613 aa, Artificial Sequence
  Synthetic polypeptide
ELPFTSHNDSEASPDMWNLIQLSLPEDQKLSITAATVGQSAVLSCAIQGTLRPPIIWKRNNIILNNLDLEDINDFGDDGSLYITKVTTTHVGNYTCYADGYEQVYQTHIFQVNVPPVIRVYPESQAREPGVTASLRCHAEGIPKPQLGWLKNGIDITPKLSKQLTLQANGSEVHISNVRYEDTGAYTCIAKNEAGVDEDISSLFVEDSARKTRLGIGNMFYVFYEDGIKVIQPIECEFQRHIKPSEKLLGFQDEVCPKAEGDEVQRCVWASAVNVKDKFIYVAQPTLDRVLIVDVQSQKVVQAVSTDPVPVKLHYDKSHDQVWVLSWGTLEKTSPTLQVITLASGNVPHHTIHTQPVGKQFDRVDDFFIPTTTLIITHMRFGFILHKDEAALQKIDLETMSYIKTINLKDYKCVPQSLAYTHLGGYYFIGCKPDSTGAVSPQVMVDGVTDSVIGFNSDVTGTPYVSPDGHYLVSINDVKGLVRVQYITIRGEIQEAFDIYTNLHISDLAFQPSFTEAHQYNIYGSSSTQTDVLFVELSSGKVKMIKSLKEPLKAEEWPWNRKNRQIQDSGLFGQYLMTPSKDSLFILDGRLNKLNCEITEVEKGNTVIWVGDA

SEQ ID NO: 30822 - protein, 5 aa, Artificial Sequence
  Synthetic polypeptide
LIDHG

SEQ ID NO: 30823 - protein, 8 aa, Artificial Sequence
  Synthetic polypeptide
MTNRPWLT

SEQ ID NO: 30824 - protein, 27 aa, Artificial Sequence
  Synthetic polypeptide
LLCMFRSQLKIYFSGKPSQILKHMIEE

SEQ ID NO: 30825 - protein, 15 aa, Artificial Sequence
  Synthetic polypeptide
NLLLWKTFPNPKTYD

SEQ ID NO: 30826 - protein, 140 aa, Artificial Sequence
  Synthetic polypeptide
EDCLRPGVRDQPGQHSNTVLLLILCMQHSFPEPGRLYLDLILAILALELICSLICLLIYTVKIRRFNKAKPEPDILEEEKIYAYPSNITSETGFRTISSLEEIVEKQGDTIEYLKRHNALLSKRLLALTSSDLGCQPSRT

SEQ ID NO: 30827 - protein, 48 aa, Artificial Sequence
  Synthetic polypeptide
GQEFETSLGNIATQCFSSYCACSTPSQSLADCILTSFWPSWHWNSSVP

SEQ ID NO: 30828 - protein, 94 aa, Artificial Sequence
  Synthetic polypeptide
EDCLRPGVRDQPGQHSNTVLLLILCMQHSFPEPGRLYLDLILAILALELICSLICLLIYTVKIRRFNKAKPEPDILEEEKIYAYPSNITSETGF

SEQ ID NO: 30829 - protein, 27 aa, Artificial Sequence
  Synthetic polypeptide
SVLNQQPKWSLENMHKAGSSEASRFKR

SEQ ID NO: 30830 - protein, 656 aa, Artificial Sequence
  Synthetic polypeptide
HVIWLFQQISLAVSSKCPEPSQFSSPPLRLSSLSHCHFLVNYCNILLNSCPLFIFDPCRVFSTSSQSGLWKTCTKQGHQKPLDSKDDNTEKHCPVTVNPWHMKKAFKVMNELRSQNLLCDVTIVAEDMEISAHRVVLAACSPYFHAMFTGEMSESRAKRVRIKEVDGWTLRMLIDYVYTAEIQVTEENVQVLLPAAGLLQLQDVKKTCCEFLESQLHPVNCLGIRAFADMHACTDLLNKANTYAEQHFADVVLSEEFLNLGIEQVCSLISSDKLTISSEEKVFEAVIAWVNHDKDVRQEFMARLMEHVRLPLLPREYLVQRVEEEALVKNSSACKDYLIEAMKYHLLPTEQRILMKSVRTRLRTPMNLPKLMVVVGGQAPKAIRSVECYDFKEERWHQVAELPSRRCRAGMVYMAGLVFAVGGFNGSLRVRTVDSYDPVKDQWTSVANMRDRRSTLGAAVLNGLLYAVGGFDGSTGLSSVEAYNIKSNEWFHVAPMNTRRSSVGVGVVGGLLYAVGGYDGASRQCLSTVECYNATTNEWTYIAEMSTRRSGAGVGVLNNLLYAVGGHDGPLVRKSVEVYDPTTNAWRQVADMNMCRRNAGVCAVNGLLYVVGGDDGSCNLASVEYYNPTTDKWTVVSSCMSTGRSYAGVTVIDKPL

SEQ ID NO: 30831 - protein, 47 aa, Artificial Sequence
  Synthetic polypeptide
IVAPFSSLTRVECSQPAAKVVFGKHAQSRVIRSLSIQKMIIPKNTAQ

SEQ ID NO: 30832 - protein, 207 aa, Artificial Sequence
  Synthetic polypeptide
HVIWLFQQISLAVSSKCPEPSQFSSPPLRLSSLSHCHFLVNYCNILLNSCPLFIFDPCRVFSTSSQSGLWKTCTKQGHQKPLDSKDDNTEKHCPVTVNPWHMKKAFKVMNELRRQSHSATQAGMQWRDLSSLQPPTPGFKRLSHLSLPSSWDYSQNLLCDVTIVAEDMEISAHRVVLAACSPYFHAMFTGEMSESRAKRVRIKEVDG

SEQ ID NO: 30833 - protein, 114 aa, Artificial Sequence
  Synthetic polypeptide
HVIWLFQQISLAVSSKCPEPSQFSSPPLRLSSLSHCHFLVNYCNILLNSCPLFIFDPCRVFSTSSQSGLWKTCTKQGHQKPLDSKDDNTEKHCPVTVNPWHMKKAFKVMNELRR

SEQ ID NO: 30834 - protein, 328 aa, Artificial Sequence
  Synthetic polypeptide
TDSDNLWWDAFATEFFEDDATLTLSFCLEDGPKRYTIGRTLIPRYFSTVFEGGVTDLYYILKHSKESYHNSSITVDCDQCTMVTQHGKPMFTKVCTEGRLILEFTFDDLMRIKTWHFTIRQYRELVPRSILAMHAQDPQVLDQLSKNITRMGLTNFTLNYLRLCVILEPMQELMSRHKTYNLSPRDCLKTCLFQKWQRMVAPPAEPTRQPTTKRRKRKNSTSSTSNSSAGNNANSTGSKKKTTAANLSLSSQDVMVVGEPTLMGGEFGDEDERLITRLENTQYDAANGMDDEEDFNNSPALGNNSPWNSKPPATQETKSENPPPQASQ

SEQ ID NO: 30835 - protein, 28 aa, Artificial Sequence
  Synthetic polypeptide
GLPSHAELIVTTSGGTPLPLNFLKMTPH

SEQ ID NO: 30836 - protein, 288 aa, Artificial Sequence
  Synthetic polypeptide
TDSDNLWWDAFATEFFEDDATLTLSFCLEDGPKRYTIGRTLIPRYFSTVFEGGVTDLYYILKHSKESYHNSSITVDCDQCTMVTQHGKPMFTKVCTEGRLILEFTFDDLMRIKTWHFTIRQYRELVPRSILAMHAQDPQVLDQLSKNITRMGLTNFTLNYLRLCVILEPMQELMSRHKTYNLSPRDCLKTCLFQKWQRMVAPPAEPTRQPTTKRRKRKNSTSSTSNSSAGNNANSTGSKKKTTAANLSLSSQVPGLGAIPNCSLNPGRDGDLCHSTAVTPSGQFKEKH

SEQ ID NO: 30837 - protein, 330 aa, Artificial Sequence
  Synthetic polypeptide
TDSDNLWWDAFATEFFEDDATLTLSFCLEDGPKRYTIGRTLIPRYFSTVFEGGVTDLYYILKHSKESYHNSSITVDCDQCTMVTQHGKPMFTKVCTEGRLILEFTFDDLMRIKTWHFTIRQYRELVPRSILAMHAQDPQVLDQLSKNITRMGLTNFTLNYLRLCVILEPMQELMSRHKTYNLSPRDCLKTCLFQKWQRMVAPPAEPTRQPTTKRRKRKNSTSSTSNSSAGNNANSTGSKKKTTAANLSLSSQVPDVMVVGEPTLMGGEFGDEDERLITRLENTQYDAANGMDDEEDFNNSPALGNNSPWNSKPPATQETKSENPPPQASQ

SEQ ID NO: 30838 - protein, 270 aa, Artificial Sequence
  Synthetic polypeptide
TDSDNLWWDAFATEFFEDDATLTLSFCLEDGPKRYTIGRTLIPRYFSTVFEGGVTDLYYILKHSKESYHNSSITVDCDQCTMVTQHGKPMFTKVCTEGRLILEFTFDDLMRIKTWHFTIRQYRELVPRSILAMHAQDPQVLDQLSKNITRMGLTNFTLNYLRLCVILEPMQELMSRHKTYNLSPRDCLKTCLFQKWQRMVAPPAEPTRQPTTKRRKRKNSTSSTSNSSAGNNANSTGSKKKTTAANLSLSSQVPIASIARSPVSGCALRT

SEQ ID NO: 30839 - protein, 67 aa, Artificial Sequence
  Synthetic polypeptide
TDSDNLWWDAFATEFFEDDATLTLSFCLEDGPKRYIVHSAADARGNCNQLGDSEPDACDGLLQFPIM

SEQ ID NO: 30840 - protein, 63 aa, Artificial Sequence
  Synthetic polypeptide
TDSDNLWWDAFATEFFEDDATLTLSFCLEDGPKRYRTKNLRPIGEKMNINGKCYRQDPHPPLL

SEQ ID NO: 30841 - protein, 145 aa, Artificial Sequence
  Synthetic polypeptide
TDSDNLWWDAFATEFFEDDATLTLSFCLEDGPKRYTIGRTLIPRYFSTVFEGGVTDLYYILKHSKESYHNSSITVDCDQCTMVTQHGKPMFTKVCTEGRLILEFTFDDLMRIKTWHFTIRQYRELVPRSILAMHAQDPQVLDQLS

SEQ ID NO: 30842 - protein, 21 aa, Artificial Sequence
  Synthetic polypeptide
NPVSTKIQIIARMCTLAHPPR

SEQ ID NO: 30843 - protein, 20 aa, Artificial Sequence
  Synthetic polypeptide
PGCVLWHTHQGETHGQSSGG

SEQ ID NO: 30844 - protein, 62 aa, Artificial Sequence
  Synthetic polypeptide
SQEFKTSLANMVKPCFYKNTNNSQDVYSGTPTKVRHMDSQVEDEFDLEACLTEPLRDFSAMS

SEQ ID NO: 30845 - protein, 12 aa, Artificial Sequence
  Synthetic polypeptide
FLHFHLRFIWQD

SEQ ID NO: 30846 - protein, 735 aa, Artificial Sequence
  Synthetic polypeptide
GRNQDGRIGTAPVYSSQRERRRRRVISAFPSEVYLARLRQIRLQNFNERQQIKAKLRGEKKEANHSEGQEGSEEADMRRKKIESLKAHANARAAVLKEQLERKRKEAYEREKKVWEEHLVAKGVKSSDVSPPLGQHETGGSPSKQQMRSVISVTSALKEVGVDSSLTDTRETSEEMQKTNNAISSKREILRRLNENLKAQEDEKGKQNLSDTFEINVHEDAKEHEKEKSVSSDRKKWEAGGQLVIPLDELTLDTSFSTTERHTVGEVIKLGPNGSPRRAWGKSPTDSVLKILGEAELQLQTELLENTTIRSEISPEGEKYKPLITGEKKVQCISHEINPSAIVDSPVETKSPEFSEASPQMSLKLEGNLEEPDDLETEILQEPSGTNKDESLPCTITDVWISEEKETKETQSADRITIQENEVSEDGVSSTVDQLSDIHIEPGTNDSQHSKCDVDKSVQPEPFFHKVVHSEHLNLVPQVQSVQCSPEESFAFRSHSHLPPKNKNKNSLLIGLSTGLFDANNPKMLRTCSLPDLSKLFRTLMDVPTVGDVRQDNLEIDEIEDENIKEGPSDSEDIVFEETDTDLQELQASMEQLLREQPGEEYSEEEESVLKNSDVEPTANGTDVADEDDNPSSESALNEEWHSDNSDGEIASECECDSVFNHLEELRLHLEQEMGFEKFFEVYEKIKAIHEDEDENIEICSKIVQNILGNEHQHLYAKILHLVMADGAYQEDNDE

SEQ ID NO: 30847 - protein, 838 aa, Artificial Sequence
  Synthetic polypeptide
KPAPFLGSGGTIAPSSFSSRGQYEHYHAIFDQMQQQRAEDNEAKWKREIYGRGLPERGILPGVRPGFPYGAAGHHHFPDADDIRKTLKRLKAVSKQANANRQKGQLAVERAKQVEEFLQRKREAMQNKARAEGHMVYLARLRQIRLQNFNERQQIKAKLRGEKKEANHSEGQEGSEEADMRRKKIESLKAHANARAAVLKEQLERKRKEAYEREKKVWEEHLVAKGVKSSDVSPPLGQHETGGSPSKQQMRSVISVTSALKEVGVDSSLTDTRETSEEMQKTNNAISSKREILRRLNENLKAQEDEKGKQNLSDTFEINVHEDAKEHEKEKSVSSDRKKWEAGGQLVIPLDELTLDTSFSTTERHTVGEVIKLGPNGSPRRAWGKSPTDSVLKILGEAELQLQTELLENTTIRSEISPEGEKYKPLITGEKKVQCISHEINPSAIVDSPVETKSPEFSEASPQMSLKLEGNLEEPDDLETEILQEPSGTNKDESLPCTITDVWISEEKETKETQSADRITIQENEVSEDGVSSTVDQLSDIHIEPGTNDSQHSKCDVDKSVQPEPFFHKVVHSEHLNLVPQVQSVQCSPEESFAFRSHSHLPPKNKNKNSLLIGLSTGLFDANNPKMLRTCSLPDLSKLFRTLMDVPTVGDVRQDNLEIDEIEDENIKEGPSDSEDIVFEETDTDLQELQASMEQLLREQPGEEYSEEEESVLKNSDVEPTANGTDVADEDDNPSSESALNEEWHSDNSDGEIASECECDSVFNHLEELRLHLEQEMGFEKFFEVYEKIKAIHEDEDENIEICSKIVQNILGNEHQHLYAKILHLVMADGAYQEDNDE

SEQ ID NO: 30848 - protein, 35 aa, Artificial Sequence
  Synthetic polypeptide
YIGIPFGSKKNSLFIHATPWINLKNLLLFWAVEGL

SEQ ID NO: 30849 - protein, 46 aa, Artificial Sequence
  Synthetic polypeptide
ILEYHLAVKRIACLYMQHHGSILKTCSFSGQWRDYSSIIFFFSRTV

SEQ ID NO: 30850 - protein, 822 aa, Artificial Sequence
  Synthetic polypeptide
KPAPFLGSGGTIAPSSFSSRGQYEHYHAIFDQMQQQRAEDNEAKWKREIYGRGLPERQKGQLAVERAKQVEEFLQRKREAMQNKARAEGHMGILQNLAAMYGGRPSSSRGGKPRNKEEEVYLARLRQIRLQNFNERQQIKAKLRGEKKEANHSEGQEGSEEADMRRKKIESLKAHANARAAVLKEQLERKRKEAYEREKKVWEEHLVAKGVKSSDVSPPLGQHETGGSPSKQQMRSVISVTSALKEVGVDSSLTDTRETSEEMQKTNNAISSKREILRRLNENLKAQEDEKGKQNLSDTFEINVHEDAKEHEKEKSVSSDRKKWEAGGQLVIPLDELTLDTSFSTTERHTVGEVIKLGPNGSPRRAWGKSPTDSVLKILGEAELQLQTELLENTTIRSEISPEGEKYKPLITGEKKVQCISHEINPSAIVDSPVETKSPEFSEASPQMSLKLEGNLEEPDDLETEILQEPSGTNKDESLPCTITDVWISEEKETKETQSADRITIQENEVSEDGVSSTVDQLSDIHIEPGTNDSQHSKCDVDKSVQPEPFFHKVVHSEHLNLVPQVQSVQCSPEESFAFRSHSHLPPKNKNKNSLLIGLSTGLFDANNPKMLRTCSLPDLSKLFRTLMDVPTVGDVRQDNLEIDEIEDENIKEGPSDSEDIVFEETDTDLQELQASMEQLLREQPGEEYSEEEESVLKNSDVEPTANGTDVADEDDNPSSESALNEEWHSDNSDGEIASECECDSVFNHLEELRLHLEQEMGFEKFFEVYEKIKAIHEDEDENIEICSKIVQNILGNEHQHLYAKILHLVMADGAYQEDNDE

SEQ ID NO: 30851 - protein, 794 aa, Artificial Sequence
  Synthetic polypeptide
KPAPFLGSGGTIAPSSFSSRGQYEHYHAIFDQMQQQRAEDNEAKWKREIYGRGLPERQKGQLAVERAKQVEEFLQRKREAMQNKARAEGHMVYLARLRQIRLQNFNERQQIKAKLRGEKKEANHSEGQEGSEEADMRRKKIESLKAHANARAAVLKEQLERKRKEAYEREKKVWEEHLVAKGVKSSDVSPPLGQHETGGSPSKQQMRSVISVTSALKEVGVDSSLTDTRETSEEMQKTNNAISSKREILRRLNENLKAQEDEKGKQNLSDTFEINVHEDAKEHEKEKSVSSDRKKWEAGGQLVIPLDELTLDTSFSTTERHTVGEVIKLGPNGSPRRAWGKSPTDSVLKILGEAELQLQTELLENTTIRSEISPEGEKYKPLITGEKKVQCISHEINPSAIVDSPVETKSPEFSEASPQMSLKLEGNLEEPDDLETEILQEPSGTNKDESLPCTITDVWISEEKETKETQSADRITIQENEVSEDGVSSTVDQLSDIHIEPGTNDSQHSKCDVDKSVQPEPFFHKVVHSEHLNLVPQVQSVQCSPEESFAFRSHSHLPPKNKNKNSLLIGLSTGLFDANNPKMLRTCSLPDLSKLFRTLMDVPTVGDVRQDNLEIDEIEDENIKEGPSDSEDIVFEETDTDLQELQASMEQLLREQPGEEYSEEEESVLKNSDVEPTANGTDVADEDDNPSSESALNEEWHSDNSDGEIASECECDSVFNHLEELRLHLEQEMGFEKFFEVYEKIKAIHEDEDENIEICSKIVQNILGNEHQHLYAKILHLVMADGAYQEDNDE

SEQ ID NO: 30852 - protein, 866 aa, Artificial Sequence
  Synthetic polypeptide
KPAPFLGSGGTIAPSSFSSRGQYEHYHAIFDQMQQQRAEDNEAKWKREIYGRGLPERGILPGVRPGFPYGAAGHHHFPDADDIRKTLKRLKAVSKQANANRQKGQLAVERAKQVEEFLQRKREAMQNKARAEGHMGILQNLAAMYGGRPSSSRGGKPRNKEEEVYLARLRQIRLQNFNERQQIKAKLRGEKKEANHSEGQEGSEEADMRRKKIESLKAHANARAAVLKEQLERKRKEAYEREKKVWEEHLVAKGVKSSDVSPPLGQHETGGSPSKQQMRSVISVTSALKEVGVDSSLTDTRETSEEMQKTNNAISSKREILRRLNENLKAQEDEKGKQNLSDTFEINVHEDAKEHEKEKSVSSDRKKWEAGGQLVIPLDELTLDTSFSTTERHTVGEVIKLGPNGSPRRAWGKSPTDSVLKILGEAELQLQTELLENTTIRSEISPEGEKYKPLITGEKKVQCISHEINPSAIVDSPVETKSPEFSEASPQMSLKLEGNLEEPDDLETEILQEPSGTNKDESLPCTITDVWISEEKETKETQSADRITIQENEVSEDGVSSTVDQLSDIHIEPGTNDSQHSKCDVDKSVQPEPFFHKVVHSEHLNLVPQVQSVQCSPEESFAFRSHSHLPPKNKNKNSLLIGLSTGLFDANNPKMLRTCSLPDLSKLFRTLMDVPTVGDVRQDNLEIDEIEDENIKEGPSDSEDIVFEETDTDLQELQASMEQLLREQPGEEYSEEEESVLKNSDVEPTANGTDVADEDDNPSSESALNEEWHSDNSDGEIASECECDSVFNHLEELRLHLEQEMGFEKFFEVYEKIKAIHEDEDENIEICSKIVQNILGNEHQHLYAKILHLVMADGAYQEDNDE

SEQ ID NO: 30853 - protein, 3 aa, Artificial Sequence
  Synthetic polypeptide
VLM

SEQ ID NO: 30854 - protein, 340 aa, Artificial Sequence
  Synthetic polypeptide
NSETAQNKFSCEKTTDVKKSKFCEADVSSDLRKEVENHYKLSLPEDFYHFWKFCEELDPEKPSDSLSASLGLQLVGPYDILAGKHKTKKKSTGLNFNLHWRFYYDPPEFQTIIIGDNKTQYHMGYFRDSPDEFPVYVGINEAKKNCIIVPNGDNVFAAVKLFLTKKLREITDKKKINLLKNIDEKLTEAARELGYSLEQRTVKMKQRDKKVVTKTFHGAGLVVPVDKNDVGYRELPETDADLKRICKTIVEAASDEERLKAFAPIQEMMTFVQFANDECDYGMGLELGMDLFCYGSHYFHKVAGQLLPLAYNLLKRNLFAEIIEEHLANRSQENIDQLAA

SEQ ID NO: 30855 - protein, 24 aa, Artificial Sequence
  Synthetic polypeptide
VNPQKVLRTVKQHKISSHVKKQLM

SEQ ID NO: 30856 - protein, 30 aa, Artificial Sequence
  Synthetic polypeptide
AQEHGVTGSHNCTTALQPRQQTAPTGLQHY

SEQ ID NO: 30857 - protein, 302 aa, Artificial Sequence
  Synthetic polypeptide
GLLEPRSMVLQGAIIAPLHFSPGSKLHPLGCNIINVASDESGIVPDSLRDILSRWKPEDAKNPQKNTPKFLYTVPNGNNPTGNSLTSERKKEIYELARKYDFLIIEDDPYYFLQFNKFRVPTFLSMDVDGRVIRADSFSKIISSGLRIGFLTGPKPLIERVILHIQVSTLHPSTFNQLMISQLLHEWGEEGFMAHVDRVIDFYSNQKDAILAAADKWLTGLAEWHVPAAGMFLWIKVKGINDVKELIEEKAVKMGVLMLPGNAFYVDSSAPSPYLRASFSSASPEQMDVAFQVLAQLIKESL

SEQ ID NO: 30858 - protein, 33 aa, Artificial Sequence
  Synthetic polypeptide
LHHCTSAQAANCTHWAATLLMLPVMKVGLFQIP

SEQ ID NO: 30859 - protein, 106 aa, Artificial Sequence
  Synthetic polypeptide
GLLEPRSMVLQGAIIAPLHFSPGSKLHPLGCNIINVASDESGIVPDSLRDILSRWKPEDAKNPQKNTPKFLYTVPNGNNPTGNSLTSERKKEIYELARKYDFLIIE

SEQ ID NO: 30860 - protein, 86 aa, Artificial Sequence
  Synthetic polypeptide
GLLEPRSMVLQGAIIAPLHFSPGSKLHPLGCNIINVASDESGIVPDSLRDILSRWKPEDAKNPQKNTPKFLYTVPNGNNPTGNSLT

SEQ ID NO: 30861 - protein, 57 aa, Artificial Sequence
  Synthetic polypeptide
GLLEPRSMVLQGAIIAPLHFSPGSKLHPLGCNIINVASDESGIVPDSLRDILSRWKP

SEQ ID NO: 30862 - protein, 345 aa, Artificial Sequence
  Synthetic polypeptide
TQVIPLVLGCLVKLKSIRNFSEEDTVCHKMPKAHKEKVNSTSQVFEMIINPGDNVLLDEPAYSGTLQSLHPLGCNIINVASDESGIVPDSLRDILSRWKPEDAKNPQKNTPKFLYTVPNGNNPTGNSLTSERKKEIYELARKYDFLIIEDDPYYFLQFNKFRVPTFLSMDVDGRVIRADSFSKIISSGLRIGFLTGPKPLIERVILHIQVSTLHPSTFNQLMISQLLHEWGEEGFMAHVDRVIDFYSNQKDAILAAADKWLTGLAEWHVPAAGMFLWIKVKGINDVKELIEEKAVKMGVLMLPGNAFYVDSSAPSPYLRASFSSASPEQMDVAFQVLAQLIKESL

SEQ ID NO: 30863 - protein, 8 aa, Artificial Sequence
  Synthetic polypeptide
IQHHRCLK

SEQ ID NO: 30864 - protein, 10 aa, Artificial Sequence
  Synthetic polypeptide
GKGKFNITGV

SEQ ID NO: 30865 - protein, 149 aa, Artificial Sequence
  Synthetic polypeptide
TQVIPLVLGCLVKLKSIRNFSEEDTVCHKMPKAHKEKVNSTSQVFEMIINPGDNVLLDEPAYSGTLQSLHPLGCNIINVASDESGIVPDSLRDILSRWKPEDAKNPQKNTPKFLYTVPNGNNPTGNSLTSERKKEIYELARKYDFLIIE

SEQ ID NO: 30866 - protein, 129 aa, Artificial Sequence
  Synthetic polypeptide
TQVIPLVLGCLVKLKSIRNFSEEDTVCHKMPKAHKEKVNSTSQVFEMIINPGDNVLLDEPAYSGTLQSLHPLGCNIINVASDESGIVPDSLRDILSRWKPEDAKNPQKNTPKFLYTVPNGNNPTGNSLT

SEQ ID NO: 30867 - protein, 100 aa, Artificial Sequence
  Synthetic polypeptide
TQVIPLVLGCLVKLKSIRNFSEEDTVCHKMPKAHKEKVNSTSQVFEMIINPGDNVLLDEPAYSGTLQSLHPLGCNIINVASDESGIVPDSLRDILSRWKP

SEQ ID NO: 30868 - protein, 47 aa, Artificial Sequence
  Synthetic polypeptide
QTNCLLCFLTYILSFFPYIPRVNGGRGPHSLWHAHYWDQRLRNCLLH

SEQ ID NO: 30869 - protein, 136 aa, Artificial Sequence
  Synthetic polypeptide
MEAGAHIHCGMPITGIRGFETAYCIDSMGKTNGGFVELGPCHRMGGNQLFRINEANQLMQYDQCLTKGADGSKVMITHCNLNEFKEWQYFKNLHRFTHIPSGKCLDRSEVLHQVFISNCDSSKTTQKWEMNNIHSV

SEQ ID NO: 30870 - protein, 173 aa, Artificial Sequence
  Synthetic polypeptide
VKTKSFLVVSKIHNICPHSSLASPATALPTPLQPHVLTGPQTPSRHVPACAVPSARNASLQIHACMASSHTSFKSADLPLLSEVHLVTSQRPSSHPNFLFFSFFSPHLSPFAITDKLSTMFFNLYSVFFPLHSQSEWRQGPTFTVACPLLGSEASKLLTALIAWEKQMEALLN

SEQ ID NO: 30871 - protein, 107 aa, Artificial Sequence
  Synthetic polypeptide
MEAGAHIHCGMPITGIRGFETAYCIDSMGKTNGGFVELGPCHRMGGNQLFRINEANQLMQYDQCLTKGADGSKVMITHCNLNEFKEWQYFKVFCILTSEILYAFHFQ

SEQ ID NO: 30872 - protein, 29 aa, Artificial Sequence
  Synthetic polypeptide
GTQQLCFNKPARDVFFGPKISFVIPCNNQ

SEQ ID NO: 30873 - protein, 22 aa, Artificial Sequence
  Synthetic polypeptide
GPSNYVLTNLPETFSLDQRSLS

SEQ ID NO: 30874 - protein, 22 aa, Artificial Sequence
  Synthetic polypeptide
QTCQRRFLWTKDLFRDSLQQSM

SEQ ID NO: 30875 - protein, 52 aa, Artificial Sequence
  Synthetic polypeptide
LNTTTSLRGGLERQWRGEIFSLETPSVWLPQRKQTVQDLEVLQCHLLIFWIN

SEQ ID NO: 30876 - protein, 39 aa, Artificial Sequence
  Synthetic polypeptide
GVALKDSGEGKSSPWKHLQFGCHKGNRQCKISKCSNVTF

SEQ ID NO: 30877 - protein, 455 aa, Artificial Sequence
  Synthetic polypeptide
KTVERGNLLLGNTFSLVATKETDSARSRSAPMSPSDFLDKLMGRTSGYDARIRPNFKGPPVNVTCNIFINSFGSIAETTMDYRVNIFLRQKWNDPRLAYSEYPDDSLDLDPSMLDSIWKPDLFFANEKGANFHEVTTDNKLLRIFKNGNVLYSIRLTLTLSCPMDLKNFPMDVQTCIMQLESFGYTMNDLIFEWQDEAPVQVAEGLTLPQFLLKEEKDLRYCTKHYNTGKFTCIEVRFHLERQMGYYLIQMYIPSLLIVILSWVSFWINMDAAPARVALGITTVLTMTTQSSGSRASLPKVSYVKAIDIWMAVCLLFVFSALLEYAAVNFVSRQHKELLRFRRKRKNKTEAFALEKFYRFSDMDDEVRESRFSFTAYGMGPCLQAKDGMTPKGPNHPVQVMPKSPDEMRKVFIDRAKKIDTISRACFPLAFLIFNIFYWVIYKILRHEDIHQQQD

SEQ ID NO: 30878 - protein, 440 aa, Artificial Sequence
  Synthetic polypeptide
KTVERGNLLLGNTFSLVATKETDSARSRSAPMSPSDFLDKLMGRTSGYDARIRPNFKGPPVNVTCNIFINSFGSIAETTMDYRVNIFLRQKWNDPRLAYSEYPDDSLDLDPSMLDSIWKPDLFFANEKGANFHEVTTDNKLLRIFKNGNVLYSIRLTLTLSCPMDLKNFPMDVQTCIMQLESFGYTMNDLIFEWQDEAPVQVAEGLTLPQFLLKEEKDLRYCTKHYNTGKFTCIEVRFHLERQMGYYLIQMYIPSLLIVILSWVSFWINMDAAPARVALGITTVLTMTTQSSGSRASLPKVSYVKAIDIWMAVCLLFVFSALLEYAAVNFVSRQHKELLRFRRKRKNKDDEVRESRFSFTAYGMGPCLQAKDGMTPKGPNHPVQVMPKSPDEMRKVFIDRAKKIDTISRACFPLAFLIFNIFYWVIYKILRHEDIHQQQD

SEQ ID NO: 30879 - protein, 1323 aa, Artificial Sequence
  Synthetic polypeptide
GCVRWLIPVIPALWEAEAGGSPEANMSQVRQVGLLAAGCQPWNKDVCAASGDRFAYCATLAIYIYQLDHRYNEFKLHAIMSEHKKTITAISWCPHNPDLFASGSTDNLVIIWNVAEQKVIAKLDSTKGIPASLSWCWNAEDVVAFVSHRGPLFIWTISGPDSGVIVHKDAHSFLSDICMFRWHTHQKGKVVFGHIDGSLSIFHPGNKNQKHVLRPESLEGTDEEDPVTALEWDPLSTDYLLVVNLHYGIRLVDSESLSCITTFNLPSAAASVQCLAWVPSAPGMFITGDSQVGVLRIWNVSRTTPIDNLKLKKTGFHCLHVLNSPPRKKFSVQSPTKNHYTSSTSEAVPPPTLTQNQAFSLPPGHAVCCFLDGGVGLYDMGAKKWDFLRDLGHVETIFDCKFKPDDPNLLATASFDGTIKVWDINTLTAVYTSPGNEGVIYSLSWAPGGLNCIAGGTSRNGAFIWNVQKGKIIQRFNEHGTNGIFCIAWSHKDSKRIATCSSDGFCIIRTIDGKVLHKYKHPAAVFGCDWSQNNKDMIATGCEDTNVRVYYVATSSDQPLKVFSGHTAKVFHVKWSPLREGILCSGSDDGTVRIWDYTQDACINILNGHTAPVRGLMWNTEIPYLLISGSWDYTIKVWDTREGTCVDTVYDHGADVYGLTCHPSRPFTMASCSRDSTVRLWSLTALVTPVQINILADRSWEEIIGNTDYAIEPGTPPLLCGKVSRDIRQEIEKLTANSQVKKLRWFSECLSPPGGSDNLWNLVAVIKGQDDSLLPQNYCKGIMHLKHLIKFRTSEAQELTTVKMSKFGGGIGVPAKEERLKEAAEIHLRLGQIQRYCELMVELGEWDKALSIAPGVSVKYWKKLMQRRADQLIQEDKDDVIPYCIAIGDVKKLVHFFMSRGQLKEALLVAQAACEGNMQPLHVSVPKGASYSDDIYKEDFNELLHKVSKELAEWYFQDGRAVLAACCHLAIDNIELAMAYLIRGNELELAVCVGTVLGESAAPATHYALELLARKCMMISVCFPCVGYSVPFCYVNRNLAADLLLMIPDNELHLIKLCAFYPGCTEEINDLHDKCKLPTVEECMQLAETARADDNIFETVKYYLLSQEPEKALPIGISFVKEYISSSDWTLDTIYPVLDLLSYIRTEKLLLHTCTEARNELLILCGYIGALLAIRRQYQSIVPALYEYTSQLLKRREVSVPLKIEYLSEELDAWRACTQSTNRSLEDSPYTPPSDSQRMIYATLLKRLKEESLKGIIGPDYVTGSNLPSHSDIHISCLTGLKIQGPVFFLEDGKSAISLNDALMWAKVNPFSPLGTGIRLNPF

SEQ ID NO: 30880 - protein, 19 aa, Artificial Sequence
  Synthetic polypeptide
SRHFGRLRQADHLRQTCPR

SEQ ID NO: 30881 - protein, 1298 aa, Artificial Sequence
  Synthetic polypeptide
GCVRWLIPVIPALWEAEAGGSPEANMSQVRQVGLLAAGCQPWNKDVCAASGDRFAYCATLAIYIYQLDHRYNEFKLHAIMSEHKKTITAISWCPHNPDLFASGSTDNLVIIWNVAEQKVIAKLDSTKGIPASLSWCWNAEDVVAFVSHRGPLFIWTISGPDSGVIVHKDAHSFLSDICMFRWHTHQKGKVVFGHIDGSLSIFHPDEEDPVTALEWDPLSTDYLLVVNLHYGIRLVDSESLSCITTFNLPSAAASVQCLAWVPSAPGMFITGDSQVGVLRIWNVSRTTPIDNLKLKKTGFHCLHVLNSPPRKKFSVQSPTKNHYTSSTSEAVPPPTLTQNQAFSLPPGHAVCCFLDGGVGLYDMGAKKWDFLRDLGHVETIFDCKFKPDDPNLLATASFDGTIKVWDINTLTAVYTSPGNEGVIYSLSWAPGGLNCIAGGTSRNGAFIWNVQKGKIIQRFNEHGTNGIFCIAWSHKDSKRIATCSSDGFCIIRTIDGKVLHKYKHPAAVFGCDWSQNNKDMIATGCEDTNVRVYYVATSSDQPLKVFSGHTAKVFHVKWSPLREGILCSGSDDGTVRIWDYTQDACINILNGHTAPVRGLMWNTEIPYLLISGSWDYTIKVWDTREGTCVDTVYDHGADVYGLTCHPSRPFTMASCSRDSTVRLWSLTALVTPVQINILADRSWEEIIGNTDYAIEPGTPPLLCGKVSRDIRQEIEKLTANSQVKKLRWFSECLSPPGGSDNLWNLVAVIKGQDDSLLPQNYCKGIMHLKHLIKFRTSEAQELTTVKMSKFGGGIGVPAKEERLKEAAEIHLRLGQIQRYCELMVELGEWDKALSIAPGVSVKYWKKLMQRRADQLIQEDKDDVIPYCIAIGDVKKLVHFFMSRGQLKEALLVAQAACEGNMQPLHVSVPKGASYSDDIYKEDFNELLHKVSKELAEWYFQDGRAVLAACCHLAIDNIELAMAYLIRGNELELAVCVGTVLGESAAPATHYALELLARKCMMISVCFPCVGYRNLAADLLLMIPDNELHLIKLCAFYPGCTEEINDLHDKCKLPTVEECMQLAETARADDNIFETVKYYLLSQEPEKALPIGISFVKEYISSSDWTLDTIYPVLDLLSYIRTEKLLLHTCTEARNELLILCGYIGALLAIRRQYQSIVPALYEYTSQLLKRREVSVPLKIEYLSEELDAWRACTQSTNRSLEDSPYTPPSDSQRMIYATLLKRLKEESLKGIIGPDYVTGSNLPSHSDIHISCLTGLKIQGPVFFLEDGKSAISLNDALMWAKVNPFSPLGTGIRLNPF

SEQ ID NO: 30882 - protein, 102 aa, Artificial Sequence
  Synthetic polypeptide
GCVRWLIPVIPALWEAEAGGSPEANMSQVRQVGLLAAGCQPWNKDVCAASGDRFAYCATLAIYIYQGSLLLLVGAGMQRMWWHLFPTEAHCSFGPSQDQIVE

SEQ ID NO: 30883 - protein, 25 aa, Artificial Sequence
  Synthetic polypeptide
GLLSHAELFSSGCFTHLECFKNNTY

SEQ ID NO: 30884 - protein, 1061 aa, Artificial Sequence
  Synthetic polypeptide
VSGISPVCPHSIPLPCEEGACFYFAFHHDCKFPEASSAMQNYSQVGVLRIWNVSRTTPIDNLKLKKTGFHCLHVLNSPPRKKFSVQSPTKNHYTSSTSEAVPPPTLTQNQAFSLPPGHAVCCFLDGGVGLYDMGAKKWDFLRDLGHVETIFDCKFKPDDPNLLATASFDGTIKVWDINTLTAVYTSPGNEGVIYSLSWAPGGLNCIAGGTSRNGAFIWNVQKGKIIQRFNEHGTNGIFCIAWSHKDSKRIATCSSDGFCIIRTIDGKVLHKYKHPAAVFGCDWSQNNKDMIATGCEDTNVRVYYVATSSDQPLKVFSGHTAKVFHVKWSPLREGILCSGSDDGTVRIWDYTQDACINILNGHTAPVRGLMWNTEIPYLLISGSWDYTIKVWDTREGTCVDTVYDHGADVYGLTCHPSRPFTMASCSRDSTVRLWSLTALVTPVQINILADRSWEEIIGNTDYAIEPGTPPLLCGKVSRDIRQEIEKLTANSQVKKLRWFSECLSPPGGSDNLWNLVAVIKGQDDSLLPQNYCKGIMHLKHLIKFRTSEAQELTTVKMSKFGGGIGVPAKEERLKEAAEIHLRLGQIQRYCELMVELGEWDKALSIAPGVSVKYWKKLMQRRADQLIQEDKDDVIPYCIAIGDVKKLVHFFMSRGQLKEALLVAQAACEGNMQPLHVSVPKGASYSDDIYKEDFNELLHKVSKELAEWYFQDGRAVLAACCHLAIDNIELAMAYLIRGNELELAVCVGTVLGESAAPATHYALELLARKCMMISVWNLAADLLLMIPDNELHLIKLCAFYPGCTEEINDLHDKCKLPTVEECMQLAETARADDNIFETVKYYLLSQEPEKALPIGISFVKEYISSSDWTLDTIYPVLDLLSYIRTEKLLLHTCTEARNELLILCGYIGALLAIRRQYQSIVPALYEYTSQLLKRREVSVPLKIEYLSEELDAWRACTQSTNRSLEDSPYTPPSDSQRMIYATLLKRLKEESLKGIIGPDYVTGSNLPSHSDIHISCLTGLKIQGPVFFLEDGKSAISLNDALMWAKVNPFSPLGTGIRLNPF

SEQ ID NO: 30885 - protein, 67 aa, Artificial Sequence
  Synthetic polypeptide
WFYKCLAFLLFALTPFHCPVKKVPASTLPSTMIVSFLRPPQPCRTILKWVFYAFGMFQEQHLLIILN

SEQ ID NO: 30886 - protein, 1076 aa, Artificial Sequence
  Synthetic polypeptide
VSGISPVCPHSIPLPCEEGACFYFAFHHDCKFPEASSAMQNYSQVGVLRIWNVSRTTPIDNLKLKKTGFHCLHVLNSPPRKKFSVQSPTKNHYTSSTSEAVPPPTLTQNQAFSLPPGHAVCCFLDGGVGLYDMGAKKWDFLRDLGHVETIFDCKFKPDDPNLLATASFDGTIKVWDINTLTAVYTSPGNEGVIYSLSWAPGGLNCIAGGTSRNGAFIWNVQKGKIIQRFNEHGTNGIFCIAWSHKDSKRIATCSSDGFCIIRTIDGKVLHKYKHPAAVFGCDWSQNNKDMIATGCEDTNVRVYYVATSSDQPLKVFSGHTAKVFHVKWSPLREGILCSGSDDGTVRIWDYTQDACINILNGHTAPVRGLMWNTEIPYLLISGSWDYTIKVWDTREGTCVDTVYDHGADVYGLTCHPSRPFTMASCSRDSTVRLWSLTALVTPVQINILADRSWEEIIGNTDYAIEPGTPPLLCGKVSRDIRQEIEKLTANSQVKKLRWFSECLSPPGGSDNLWNLVAVIKGQDDSLLPQNYCKGIMHLKHLIKFRTSEAQELTTVKMSKFGGGIGVPAKEERLKEAAEIHLRLGQIQRYCELMVELGEWDKALSIAPGVSVKYWKKLMQRRADQLIQEDKDDVIPYCIAIGDVKKLVHFFMSRGQLKEALLVAQAACEGNMQPLHVSVPKGASYSDDIYKEDFNELLHKVSKELAEWYFQDGRAVLAACCHLAIDNIELAMAYLIRGNELELAVCVGTVLGESAAPATHYALELLARKCMMISVCFPCVGYSVPFCYVNRNLAADLLLMIPDNELHLIKLCAFYPGCTEEINDLHDKCKLPTVEECMQLAETARADDNIFETVKYYLLSQEPEKALPIGISFVKEYISSSDWTLDTIYPVLDLLSYIRTEKLLLHTCTEARNELLILCGYIGALLAIRRQYQSIVPALYEYTSQLLKRREVSVPLKIEYLSEELDAWRACTQSTNRSLEDSPYTPPSDSQRMIYATLLKRLKEESLKGIIGPDYVTGSNLPSHSDIHISCLTGLKIQGPVFFLEDGKSAISLNDALMWAKVNPFSPLGTGIRLNPF

SEQ ID NO: 30887 - protein, 1068 aa, Artificial Sequence
  Synthetic polypeptide
VSGISPVCPHSIPLPCEEGACFYFAFHHDCKFPEASSAMQNYSQVGVLRIWNVSRTTPIDNLKLKKTGFHCLHVLNSPPRKKFSVQSPTKNHYTSSTSEAVPPPTLTQNQAFSLPPGHAVCCFLDGGVGLYDMGAKKWDFLRDLGHVETIFDCKFKPDDPNLLATASFDGTIKVWDINTLTAVYTSPGNEGVIYSLSWAPGGLNCIAGGTSRNGAFIWNVQKGKIIQRFNEHGTNGIFCIAWSHKDSKRIATCSSDGFCIIRTIDGKVLHKYKHPAAVFGCDWSQNNKDMIATGCEDTNVRVYYVATSSDQPLKVFSGHTAKVFHVKWSPLREGILCSGSDDGTVRIWDYTQDACINILNGHTAPVRGLMWNTEIPYLLISGSWDYTIKVWDTREGTCVDTVYDHGADVYGLTCHPSRPFTMASCSRDSTVRLWSLTALVTPVQINILADRSWEEIIGNTDYAIEPGTPPLLCGKVSRDIRQEIEKLTANSQVKKLRWFSECLSPPGGSDNLWNLVAVIKGQDDSLLPQNYCKGIMHLKHLIKFRTSEAQELTTVKMSKFGGGIGVPAKEERLKEAAEIHLRLGQIQRYCELMVELGEWDKALSIAPGVSVKYWKKLMQRRADQLIQEDKDDVIPYCIAIGDVKKLVHFFMSRGQLKEALLVAQAACEGNMQPLHVSVPKGASYSDDIYKEDFNELLHKVSKELAEWYFQDGRAVLAACCHLAIDNIELAMAYLIRGNELELAVCVGTVLGESAAPATHYALELLARKCMMISVCFPCVGYRNLAADLLLMIPDNELHLIKLCAFYPGCTEEINDLHDKCKLPTVEECMQLAETARADDNIFETVKYYLLSQEPEKALPIGISFVKEYISSSDWTLDTIYPVLDLLSYIRTEKLLLHTCTEARNELLILCGYIGALLAIRRQYQSIVPALYEYTSQLLKRREVSVPLKIEYLSEELDAWRACTQSTNRSLEDSPYTPPSDSQRMIYATLLKRLKEESLKGIIGPDYVTGSNLPSHSDIHISCLTGLKIQGPVFFLEDGKSAISLNDALMWAKVNPFSPLGTGIRLNPF

SEQ ID NO: 30888 - protein, 76 aa, Artificial Sequence
  Synthetic polypeptide
SGVRQRTRPAPPITCGIITSADAWLRKILCFPRMLEMTQQMDSMTSVDQTRSWMKRPVSVSAERGFGLPAVDPTKN

SEQ ID NO: 30889 - protein, 21 aa, Artificial Sequence
  Synthetic polypeptide
FILCDQVSGSEQDLPHQLHVE

SEQ ID NO: 30890 - protein, 203 aa, Artificial Sequence
  Synthetic polypeptide
AIPDSEFRFATNSFSVIRCQAANKTCPTNYMWNNHICRCLAQEDFMFSSDAGDDSTDGFHDICGPNKELDEETCQCVCRAGLRPASCGPHKELDRNSCQCVCKNKLFPSQCGANREFDENTCQCVCKRTCPRNQPLNPGKCACECTESPQKCLLKGKKFHHQTCSCYRRPCTNRQKACEPGFSYSEEVCRCVPSYWKRPQMMS

SEQ ID NO: 30891 - protein, 17 aa, Artificial Sequence
  Synthetic polypeptide
SQLLGRLRQENRLNLML

SEQ ID NO: 30892 - protein, 792 aa, Artificial Sequence
  Synthetic polypeptide
DHPGQHGETKISWAWWRMPVVPATREAEAGESLESDAVKQAMQKHLLQGWLRFSEGNILELLHRLDVENSSEVAVSVLNALFSITPLSELVGLCKNNDGRKLIPVETLTPEIALYWCALCEYLKSKGDEGEEFLEQILPEPVVYADYLLSYIQSIPVVNEEHRGDFSYIGNLMTKEFIGQQLILIIKSLDTSEEGGRKKLLAVLQEILILPTIPISLVSFLVERLLHIIIDDNKRTQIVTEIISEIRAPIVTVGVNNDPADVRKKELKMAEIKVKLIEAKEALENCITLQDFNRASELKEEIKALEDARINLLKETEQLEIKEVHIEKNDAETLQKCLILCYELLKQMSISTGLSATMNGIIESLILPGIISIHPVVRNLAVLCLGCCGLQNQDFARKHFVLLLQVLQIDDVTIKISALKAIFDQLMTFGIEPFKTKKIKTLHCEGTEINSDDEQESKEVEETATAKNVLKLLSDFLDSEVSELRTGAAEGLAKLMFSGLLVSSRILSRLILLWYNPVTEEDVQLRHCLGVFFPVFAYASRTNQECFEEAFLPTLQTLANAPASSPLAEIDITNVAELLVDLTRPSGLNPQAKTSQDYQALTVHDNLAMKICNEILTSPCSPEIRVYTKALSSLELSSHLAKDLLVLLNEILEQVKDRTCLRALEKIKIQLEKGNKEFGDQAEAAQDATLTTTTFQNEDEKNKEVYMTPLRGVKATQASKSTQLKTNRGQRKVTVSARTNRRCQTAEADSESDHEVPEPESEMKMRLPRRAKTAALEKSKLNLAQFLNEDLS

SEQ ID NO: 30893 - protein, 38 aa, Artificial Sequence
  Synthetic polypeptide
DHPGQHGETKISWAWWRMPVVPATREAEAGESLESDAV

SEQ ID NO: 30894 - protein, 49 aa, Artificial Sequence
  Synthetic polypeptide
ISLMRSDGFKNKSLLAQALFSYLLPCETCLSPSAMILRSPQPRGTTQHE

SEQ ID NO: 30895 - protein, 188 aa, Artificial Sequence
  Synthetic polypeptide
GLPSHVELPNMSEVSCKKRDDYLEWPEYFMAVAFLSAQRSKDPNSQVGACIVNSENKIVGIGYNGMPNGCSDDVLPWRRTAENKLDTKYPYVCHAELNAIMNKNSTDVKGCSMYVALFPCNECAKLIIQAGIKEVIFMSDKYHDSDEATAARLLFNMAGVTFRKFIPKCSKIVIDFDSINSRPSQKLQ

SEQ ID NO: 30896 - protein, 21 aa, Artificial Sequence
  Synthetic polypeptide
DMPFTFSHDSEVSPATWNYPT

SEQ ID NO: 30897 - protein, 158 aa, Artificial Sequence
  Synthetic polypeptide
LQNEKIGENGDPKAFLIEISWTETYPQTPPILSMNAFFNNTISSAVKQSILAKLQEAVEANLGTAMTYTLFEYAKDNKEQFMENHNPINSATSISNIISIETPNTAPSSKKKDKKEQLSKAQKRKLADKTDHKGELPRGWNWVDVVKHLSKTGSKDDE

SEQ ID NO: 30898 - protein, 10 aa, Artificial Sequence
  Synthetic polypeptide
RLFLNYKMKR

SEQ ID NO: 30899 - protein, 3 aa, Artificial Sequence
  Synthetic polypeptide
KDR

SEQ ID NO: 30900 - protein, 157 aa, Artificial Sequence
  Synthetic polypeptide
LQNEKIGENGDPKAFLIEISWTETYPQTPPILSMNAFFNNTISSAVKQSILAKLQEAVEANLGTAMTYTLFEYAKDNKEQFMENHNPINSATSISNIISIETPNTAPSSKKKDKKEQLSKAQKRKLADKTDHKGELPRGWNWVDVVKLSKTGSKDDE

SEQ ID NO: 30901 - protein, 21 aa, Artificial Sequence
  Synthetic polypeptide
LQNEKIGENGDPKAFLIEISW

SEQ ID NO: 30902 - protein, 28 aa, Artificial Sequence
  Synthetic polypeptide
SQHFGRPGQEGCLSPEVQDKHGQATWLY

SEQ ID NO: 30903 - protein, 18 aa, Artificial Sequence
  Synthetic polypeptide
AQKFKTSMGKQHGFIEKA

SEQ ID NO: 30904 - protein, 126 aa, Artificial Sequence
  Synthetic polypeptide
QVQWLMPVIPAFWEARAGGLPEPRSSRQAWASNMALLKRLEAVKPTVGMKRSEQLMDYHRNMGYLNSSPLSRRARSTLGQYSPLRASRTSSATSGLSCRSERSAVDPSSGHPRRRPKPPNVRTAWL

SEQ ID NO: 30905 - protein, 9 aa, Artificial Sequence
  Synthetic polypeptide
GLPSHVELA

SEQ ID NO: 30906 - protein, 57 aa, Artificial Sequence
  Synthetic polypeptide
WFYKWEFPCTSSLACCHVRCPLPSAMIVRPPQPCGTGVILSHQTQLGDLTMMAIRRH

SEQ ID NO: 30907 - protein, 690 aa, Artificial Sequence
  Synthetic polypeptide
MGIPLHKLSCLLSCKMPFAFCHDCEASPAMWNWRDSQSPDSAWRSYNDGNQETLNGDATYSSLAAKGFRSVRPNLQDKRSPTQSQITVNGNSGGAVSPMSYYQRPFSPSAYSLPASLNSSIVMQHGTSLDSTDTYPQHAQSLDGTTSSSIPLYRSSEEEKRVTVIKAPHYPGIGPVDESGIPTAIRTTVDRPKDWYKTMFKQIHMVHKPDDDTDMYNTPYTYNAGLYNPPYSAQSHPAAKTQTYRPLSKSHSDNSPNAFKDASSPVPPPHVPPPVPPLRPRDRSSTEKHDWDPPDRKVDTRKFRSEPRSIFEYEPGKSSILQHERPPPKKPLDYVQDHSSGVFNEASLYQSSIDRSLERPMSSASMASDFRKRRKSEPAVGPPRGLGDQSASRTSPGRVDLPGSSTTLTKSFTSSSPSSPSRAKDRESPRSYSSTLTDMGRSAPRERRGTPEKEKLPAKAVYDFKAQTSKELSFKKGDTVYILRKIDQNWYEGEHHGRVGIFPISYVEKLTPPEKAQPARPPPPAQPGEIGEAIAKYNFNADTNVELSLRKGDRVILLKRVDQNWYEGKIPGTNRQGIFPVSYVEVVKKNTKGAEDYPDPPIPHSYSSDRIHSLSSNKPQRPVFTHENIQGGGEPFQALYNYTPRNEDELELRESDVIDVMEKCDDGWFVGTSRRTKFFGTFPGNYVKRL

SEQ ID NO: 30908 - protein, 743 aa, Artificial Sequence
  Synthetic polypeptide
MGIPLHKLSCLLSCKMPFAFCHDCEASPAMWNWRDSQSPDSAWRSYNDGNQETLNGDATYSSLAAKGFRSVRPNLQDKRSPTQSQITVNGNSGGAVSPMSYYQRPFSPSAYSLPASLNSSIVMQHGTSLDSTDTYPQHAQSLDGTTSSSIPLYRSSEEEKRVTVIKAPHYPGIGPVDESGIPTAIRTTVDRPKDWYKTMFKQIHMVHKPDDDTDMYNTPYTYNAGLYNPPYSAQSHPAAKTQTYRPLSKSHSDNSPNAFKDASSPVPPPHVPPPVPPLRPRDRSSTEKHDWDPPDRKVDTRKFRSEPRSIFEYEPGKSSILQHERPPPLPTTPTPVPREPGRKPLSSSRLGEVTGSPSPPPRSGAPTPSSRAPALSPTRPPKKPLDYVQDHSSGVFNEASLYQSSIDRSLERPMSSASMASDFRKRRKSEPAVGPPRGLGDQSASRTSPGRVDLPGSSTTLTKSFTSSSPSSPSRAKDRESPRSYSSTLTDMGRSAPRERRGTPEKEKLPAKAVYDFKAQTSKELSFKKGDTVYILRKIDQNWYEGEHHGRVGIFPISYVEKLTPPEKAQPARPPPPAQPGEIGEAIAKYNFNADTNVELSLRKGDRVILLKRVDQNWYEGKIPGTNRQGIFPVSYVEVVKKNTKGAEDYPDPPIPHSYSSDRIHSLSSNKPQRPVFTHENIQGGGEPFQALYNYTPRNEDELELRESDVIDVMEKCDDGWFVGTSRRTKFFGTFPGNYVKRL

SEQ ID NO: 30909 - protein, 656 aa, Artificial Sequence
  Synthetic polypeptide
MGIPLHKLSCLLSCKMPFAFCHDCEASPAMWNWRDSQSPDSAWRSYNDGNQETLNGDATYSSLAAKGFRSVRPNLQDKRSPTQSQITVNGNSGGAVSPMSYYQRPFSPSAYSLPASLNSSIVMQHGTSLDSTDTYPQHAQSLDGTTSSSIPLYRSSEEEKRVTVIKAPHYPGIGPVDESGIPTAIRTTVDRPKDWYKTMFKQIHMVHKPGLYNPPYSAQSHPAAKTQTYRPLSKSHSDNSPNAFKDASSPVPPPHVPPPVPPLRPRDRSSTEKHDWDPPDRKVDTRKFRSEPRSIFEYEPGKSSILQHERPASLYQSSIDRSLERPMSSASMASDFRKRRKSEPAVGPPRGLGDQSASRTSPGRVDLPGSSTTLTKSFTSSSPSSPSRAKDRESPRSYSSTLTDMGRSAPRERRGTPEKEKLPAKAVYDFKAQTSKELSFKKGDTVYILRKIDQNWYEGEHHGRVGIFPISYVEKLTPPEKAQPARPPPPAQPGEIGEAIAKYNFNADTNVELSLRKGDRVILLKRVDQNWYEGKIPGTNRQGIFPVSYVEVVKKNTKGAEDYPDPPIPHSYSSDRIHSLSSNKPQRPVFTHENIQGGGEPFQALYNYTPRNEDELELRESDVIDVMEKCDDGWFVGTSRRTKFFGTFPGNYVKRL

SEQ ID NO: 30910 - protein, 1198 aa, Artificial Sequence
  Synthetic polypeptide
MGIPLHKLSCLLSCKMPFAFCHDCEASPAMWNWRDSQSPDSAWRSYNDGNQETLNGDATYSSLAAKGFRSVRPNLQDKRSPTQSQITVNGNSGGAVSPMSYYQRPFSPSAYSLPASLNSSIVMQHGTSLDSTDTYPQHAQSLDGTTSSSIPLYRSSEEEKRVTVIKAPHYPGIGPVDESGIPTAIRTTVDRPKDWYKTMFKQIHMVHKPDDDTDMYNTPYTYNAGLYNPPYSAQSHPAAKTQTYRPLSKSHSDNSPNAFKDASSPVPPPHVPPPVPPLRPRDRSSTEKHDWDPPDRKVDTRKFRSEPRSIFEYEPGKSSILQHERPASLYQSSIDRSLERPMSSASMASDFRKRRKSEPAVGPPRGLGDQSASRTSPGRVDLPGSSTTLTKSFTSSSPSSPSRAKGGDDSKICPSLCSYSGLNGNPSSELDYCSTYRQHLDVPRDSPRAISFKNGWQMARQNAEIWSSTEETVSPKIKSRSCDDLLNDDCDSFPDPKVKSESMGSLLCEEDSKESCPMAWGSPYVPEVRSNGRSRIRHRSARNAPGFLKMYKKMHRINRKDLMNSEVICSVKSRILQYESEQQHKDLLRAWSQCSTEEVPRDMVPTRISEFEKLIQKSKSMPNLGDDMLSPVTLEPPQNGLCPKRRFSIEYLLEEENQSGPPARGRRGCQSNALVPIHIEVTSDEQPRAHVEFSDSDQDGVVSDHSDYIHLEGSSFCSESDFDHFSFTSSESFYGSSHHHHHHHHHHHRHLISSCKGRCPASYTRFTTMLKHERARHENTEEPRRQEMDPGLSKLAFLVSPVPFRRKKNSAPKKQTEKAKCKASVFEALDSALKDICDQIKAEKKRGSLPDNSILHRLISELLPDVPERNSSLRALRRSPLHQPLHPLPPDGAIHCPPYQNDCGRMPRSASFQDVDTANSSCHHQDRGGALQDRESPRSYSSTLTDMGRSAPRERRGTPEKEKLPAKAVYDFKAQTSKELSFKKGDTVYILRKIDQNWYEGEHHGRVGIFPISYVEKLTPPEKAQPARPPPPAQPGEIGEAIAKYNFNADTNVELSLRKGDRVILLKRVDQNWYEGKIPGTNRQGIFPVSYVEVVKKNTKGAEDYPDPPIPHSYSSDRIHSLSSNKPQRPVFTHENIQGGGEPFQALYNYTPRNEDELELRESDVIDVMEKCDDGWFVGTSRRTKFFGTFPGNYVKRL

SEQ ID NO: 30911 - protein, 66 aa, Artificial Sequence
  Synthetic polypeptide
WFYKWEFPCTSSLACCHVRCPLPSAMIVRPPQPCGTGVILSHQTQQKVLEAFDQTYKIKDHQLRAR

SEQ ID NO: 30912 - protein, 695 aa, Artificial Sequence
  Synthetic polypeptide
MGIPLHKLSCLLSCKMPFAFCHDCEASPAMWNWRDSQSPDSAKGFRSVRPNLQDKRSPTQSQITVNGNSGGAVSPMSYYQRPFSPSAYSLPASLNSSIVMQHGTSLDSTDTYPQHAQSLDGTTSSSIPLYRSSEEEKRVTVIKAPHYPGIGPVDESGIPTAIRTTVDRPKDWYKTMFKQIHMVHKPDDDTDMYNTPYTYNAGLYNPPYSAQSHPAAKTQTYRPLSKSHSDNSPNAFKDASSPVPPPHVPPPVPPLRPRDRSSTEKHDWDPPDRKVDTRKFRSEPRSIFEYEPGKSSILQHERPTDRINPDDIDLENEPWYKFFSELEFGRPPPKKPLDYVQDHSSGVFNEASLYQSSIDRSLERPMSSASMASDFRKRRKSEPAVGPPRGLGDQSASRTSPGRVDLPGSSTTLTKSFTSSSPSSPSRAKDRESPRSYSSTLTDMGRSAPRERRGTPEKEKLPAKAVYDFKAQTSKELSFKKGDTVYILRKIDQNWYEGEHHGRVGIFPISYVEKLTPPEKAQPARPPPPAQPGEIGEAIAKYNFNADTNVELSLRKGDRVILLKRVDQNWYEGKIPGTNRQGIFPVSYVEVVKKNTKGAEDYPDPPIPHSYSSDRIHSLSSNKPQRPVFTHENIQGGGEPFQALYNYTPRNEDELELRESDVIDVMEKCDDGWFVGTSRRTKFFGTFPGNYVKRL

SEQ ID NO: 30913 - protein, 665 aa, Artificial Sequence
  Synthetic polypeptide
MGIPLHKLSCLLSCKMPFAFCHDCEASPAMWNWRDSQSPDSAKGFRSVRPNLQDKRSPTQSQITVNGNSGGAVSPMSYYQRPFSPSAYSLPASLNSSIVMQHGTSLDSTDTYPQHAQSLDGTTSSSIPLYRSSEEEKRVTVIKAPHYPGIGPVDESGIPTAIRTTVDRPKDWYKTMFKQIHMVHKPDDDTDMYNTPYTYNAGLYNPPYSAQSHPAAKTQTYRPLSKSHSDNSPNAFKDASSPVPPPHVPPPVPPLRPRDRSSTEKHDWDPPDRKVDTRKFRSEPRSIFEYEPGKSSILQHERPPPLPTTPTPVPREPGRKPLSSSRLGEVTGSPSPPPRSGAPTPSSRAPALSPTRPPKKPLDYVQDHSSGVFNEASLYQSSIDRSLERPMSSASMASDFRKRRKSEPAVGPPRGLGDQSASRTSPGRVDLPGSSTTLTKSFTSSSPSSPSRAKDRESPRSYSSTLTDMGRSAPRERRGTPEKEKLPAKAVYDFKAQTSKELSFKKGDTVYILRKIDQNWYEGEHHGRVGIFPISYVEKLTPPEKAQPARPPPPAQPGEIGEAIAKYNFNADTNVELSLRKGDRVILLKRVDQNWYEGKIPGTNRQGIFPVSYVEVVKKNTKGAEDYPDPPIPHSYSSDRIHSLSSNKPQRPVFTHENIQGGGEP

SEQ ID NO: 30914 - protein, 148 aa, Artificial Sequence
  Synthetic polypeptide
MGIPLHKLSCLLSCKMPFAFCHDCEASPAMWNWRDSQSPDSAKGFRSVRPNLQDKRSPTQSQITVNGNSGGAVSPMSYYQRPFSPSAYSLPASLNSSIVMQHGTSLDSTDTYPQHAQSLDGTTSSSIPLYRSSEEEKRVTVIKAPHYP

SEQ ID NO: 30915 - protein, 150 aa, Artificial Sequence
  Synthetic polypeptide
MGIPLHKLSCLLSCKMPFAFCHDCEASPAMWNWRDSQSPDSAWRSYNDGNQETLNGDATYSSLAAKGFRSVRPNLQDKRSPTQSQITVNGNSGGAVSPMSYYQRPFSPSAYSLPASLNSSIVMQHGTSLDSTDTYPQHAQSLDGTTSSSI

SEQ ID NO: 30916 - protein, 149 aa, Artificial Sequence
  Synthetic polypeptide
MGIPLHKLSCLLSCKMPFAFCHDCEASPAMWNWRDSQSPDSAWRSYNDGNQETLNGDATYSSLAAKGFRSVRPNLQDKRSPTQSQITVNGNSGGAVSPMSYYQRPFSPSAYSLPASLNSSIVMQHGTSLDSTDTYPQHAQSLDGTTSSS

SEQ ID NO: 30917 - protein, 138 aa, Artificial Sequence
  Synthetic polypeptide
MGIPLHKLSCLLSCKMPFAFCHDCEASPAMWNWRDSQSPDSAWRSYNDGNQETLNGDATYSSLAAKGFRSVRPNLQDKRSPTQSQITVNGNSGGAVSPMSYYQRPFSPSAYSLPASLNSSIVMQHGTSLDSTDTYPQH

SEQ ID NO: 30918 - protein, 112 aa, Artificial Sequence
  Synthetic polypeptide
MGIPLHKLSCLLSCKMPFAFCHDCEASPAMWNWRDSQSPDSAKGFRSVRPNLQDKRSPTQSQITVNGNSGGAVSPMSYYQRPFSPSAYSLPASLNSSIVMQHGTSLDSTDTY

SEQ ID NO: 30919 - protein, 128 aa, Artificial Sequence
  Synthetic polypeptide
MGIPLHKLSCLLSCKMPFAFCHDCEASPAMWNWRDSQSPDSAWRSYNDGNQETLNGDATYSSLAAKGFRSVRPNLQDKRSPTQSQITVNGNSGGAVSPMSYYQRPFSPSAYSLPASLNSSIVMQHGTS

SEQ ID NO: 30920 - protein, 111 aa, Artificial Sequence
  Synthetic polypeptide
MGIPLHKLSCLLSCKMPFAFCHDCEASPAMWNWRDSQSPDSAWRSYNDGNQETLNGDATYSSLAAKGFRSVRPNLQDKRSPTQSQITVNGNSGGAVSPMSYYQRPFSPSAY

SEQ ID NO: 30921 - protein, 105 aa, Artificial Sequence
  Synthetic polypeptide
MGIPLHKLSCLLSCKMPFAFCHDCEASPAMWNWRDSQSPDSAWRSYNDGNQETLNGDATYSSLAAKGFRSVRPNLQDKRSPTQSQITVNGNSGGAVSPMSYYQRP

SEQ ID NO: 30922 - protein, 73 aa, Artificial Sequence
  Synthetic polypeptide
MGIPLHKLSCLLSCKMPFAFCHDCEASPAMWNWRDSQSPDSAKGFRSVRPNLQDKRSPTQSQITVNGNSGGAV

SEQ ID NO: 30923 - protein, 94 aa, Artificial Sequence
  Synthetic polypeptide
MGIPLHKLSCLLSCKMPFAFCHDCEASPAMWNWRDSQSPDSAWRSYNDGNQETLNGDATYSSLAAKGFRSVRPNLQDKRSPTQSQITVNGNSGG

SEQ ID NO: 30924 - protein, 92 aa, Artificial Sequence
  Synthetic polypeptide
MGIPLHKLSCLLSCKMPFAFCHDCEASPAMWNWRDSQSPDSAWRSYNDGNQETLNGDATYSSLAAKGFRSVRPNLQDKRSPTQSQITVNGNS

SEQ ID NO: 30925 - protein, 85 aa, Artificial Sequence
  Synthetic polypeptide
MGIPLHKLSCLLSCKMPFAFCHDCEASPAMWNWRDSQSPDSAWRSYNDGNQETLNGDATYSSLAAKGFRSVRPNLQDKRSPTQSQ

SEQ ID NO: 30926 - protein, 76 aa, Artificial Sequence
  Synthetic polypeptide
WFYKWEFPCTSSLACCHVRCPLPSAMIVRPPQPCGTGVILSHQTQQKVLEAFDQTYKIKDHQLSLEIRTYLPVCWR

SEQ ID NO: 30927 - protein, 116 aa, Artificial Sequence
  Synthetic polypeptide
MGIPLHKLSCLLSCKMPFAFCHDCEASPAMWNWRDSQSPDSAKGFRSVRPNLQDKRSPTQLGNQNLPASVLEVNASQTHRQTTPEASPPCPPSVVPLNRATFSPGSGTSSASLSLP

SEQ ID NO: 30928 - protein, 114 aa, Artificial Sequence
  Synthetic polypeptide
MGIPLHKLSCLLSCKMPFAFCHDCEASPAMWNWRDSQSPDSAWRSYNDGNQETLNGDATYSSLAAKGFRSVRPNLQDKRSPTQLGNQNLPASVLEVNASQTHRQTTPEASPPCP

SEQ ID NO: 30929 - protein, 180 aa, Artificial Sequence
  Synthetic polypeptide
MGIPLHKLSCLLSCKMPFAFCHDCEASPAMWNWRDSQSPDSAWRSYNDGNQETLNGDATYSSLAAKGFRSVRPNLQDKRSPTQAPPPPERKESFHSSLITSHTKGVILDQLVTNTQIPSSTEYFANKKPLQGTMYSNEDSRQTIVYSEESNTTMSYTQKITNPLPAASSTDPAPFANINT

SEQ ID NO: 30930 - protein, 83 aa, Artificial Sequence
  Synthetic polypeptide
MGIPLHKLSCLLSCKMPFAFCHDCEASPAMWNWRDSQSPDSAWRSYNDGNQETLNGDATYSSLAAKGFRSVRPNLQDKRSPTQ

SEQ ID NO: 30931 - protein, 82 aa, Artificial Sequence
  Synthetic polypeptide
MGIPLHKLSCLLSCKMPFAFCHDCEASPAMWNWRDSQSPDSAWRSYNDGNQETLNGDATYSSLAAKGFRSVRPNLQDKRSPT

SEQ ID NO: 30932 - protein, 27 aa, Artificial Sequence
  Synthetic polypeptide
EAAVEALRWRARYNCSCNKLVLIPVGF

SEQ ID NO: 30933 - protein, 216 aa, Artificial Sequence
  Synthetic polypeptide
EAAVEALRWRKRRRWRRYAGGHDTTAAAINWSLYLLGSNPEVQKKVDHELDDVFGKSDRPATVEDLKKLRYLECVIKETLRLFPSVPLFARSVSEDCEVAGYRVLKGTEAVIIPYALHRDPRYFPNPEEFQPERFFPENAQGRHPYAYVPFSAGPRNCIGQKFAVMEEKTILSCILRHFWIESNQKREELGLEGQLILRPSNGIWIKLKRRNADER

SEQ ID NO: 30934 - protein, 39 aa, Artificial Sequence
  Synthetic polypeptide
EAAVETLRWRKRRRWRRYAGVRGGGGGATLAGTIQLQLQ

SEQ ID NO: 30935 - protein, 20 aa, Artificial Sequence
  Synthetic polypeptide
EAAVEALRWRKRGTIQLQLQ

SEQ ID NO: 30936 - protein, 40 aa, Artificial Sequence
  Synthetic polypeptide
EAAVEALRWRKRRRWRRYAGVRGARYNCSCNKLVLIPVGF

SEQ ID NO: 30937 - protein, 197 aa, Artificial Sequence
  Synthetic polypeptide
EGHDTTAAAINWSLYLLGSNPEVQKKVDHELDDVFGKSDRPATVEDLKKLRYLECVIKETLRLFPSVPLFARSVSEDCEVAGYRVLKGTEAVIIPYALHRDPRYFPNPEEFQPERFFPENAQGRHPYAYVPFSAGPRNCIGQKFAVMEEKTILSCILRHFWIESNQKREELGLEGQLILRPSNGIWIKLKRRNADER

SEQ ID NO: 30938 - protein, 11 aa, Artificial Sequence
  Synthetic polypeptide
ALFWEILEILL

SEQ ID NO: 30939 - protein, 16 aa, Artificial Sequence
  Synthetic polypeptide
VASELCFGKYWKFFYD

SEQ ID NO: 30940 - protein, 3009 aa, Artificial Sequence
  Synthetic polypeptide
NATLVANLEQESEKAVKWQVSFVLGNIGNSFMIDPVLGSIKTAKELDRSNQAEYDLMVKATDKGSPPMSEITSVRIFVTIADNASPKFTSKEYSVELSETVSIGSFVGMVTAHSQSSVVYEIKDGNTGDAFDINPHSGTIITQKALDFETLPIYTLIIQGTNMAGLSTNTTVLVHLQDENDNAPVFMQAEYTGLISESASINSVVLTDRNVPLVIRAADADKDSNALLVYHIVEPSVHTYFAIDSSTGAIHTVLSLDYEETSIFHFTVQVHDMGTPRLFAEYAANVTVHVIDINDCPPVFAKPLYEASLLLPTYKGVKVITVNATDADSSAFSQLIYSITEGNIGEKFSMDYKTGALTVQNTTQLRSRYELTVRASDGRFAGLTSVKINVKESKESHLKFTQDVYSAVVKENSTEAETLAVITAIGNPINEPLFYHILNPDRRFKISRTSGVLSTTGTPFDREQQEAFDVVVEVTEEHKPSAVAHVVVKVIVEDQNDNAPVFVNLPYYAVVKVDTEVGHVIRYVTAVDRDSGRNGEVHYYLKEHHEHFQIGPLGEISLKKQFELDTLNKEYLVTVVAKDGGNPAFSAEVIVPITVMNKAMPVFEKPFYSAEIAESIQVHSPVVHVQANSPEGLKVFYSITDGDPFSQFTINFNTGVINVIAPLDFEAHPAYKLSIRATDSLTGAHAEVFVDIIVDDINDNPPVFAQQSYAVTLSEASVIGTSVVQVRATDSDSEPNRGISYQMFGNHSKSHDHFHVDSSTGLISLLRTLDYEQSRQHTIFVRAVDGGMPTLSSDVIVTVDVTDLNDNPPLFEQQIYEARISEHAPHGHFVTCVKAYDADSSDIDKLQYSILSGNDHKHFVIDSATGIITLSNLHRHALKPFYSLNLSVSDGVFRSSTQVHVTVIGGNLHSPAFLQNEYEVELAENAPLHTLVMEVKTTDGDSGIYGHVTYHIVNDFAKDRFYINERGQIFTLEKLDRETPAEKVISVRLMAKDAGGKVAFCTVNVILTDDNDNAPQFRATKYEVNIGSSAAKGTSVVKVLASDADEGSNADITYAIEADSESVKENLEINKLSGVITTKESLIGLENEFFTFFVRAVDNGSPSKESVVLVYVKILPPEMQLPKFSEPFYTFTVSEDVPIGTEIDLIRAEHSGTVLYSLVKGNTPESNRDESFVIDRQSGRLKLEKSLDHETTKWYQFSILARCTQDDHEMVASVDVSIQVKDANDNSPVFESSPYEAFIVENLPGGSRVIQIRASDADSGTNGQVMYSLDQSQSVEVIESFAINMETGWITTLKELDHEKRDNYQIKVVASDHGEKIQLSSTAIVDVTVTDVNDSPPRFTAEIYKGTVSEDDPQGGVIAILSTTDADSEEINRQVTYFITGGDPLGQFAVETIQNEWKVYVKKPLDREKRDNYLLTITATDGTFSSKAIVEVKVLDANDNSPVCEKTLYSDTIPEDVLPGKLIMQISATDADIRSNAEITYTLLGSGAEKFKLNPDTGELKTSTPLDREEQAVYHLLVRATDGGGRFCQASIVLTLEDVNDNAPEFSADPYAITVFENTEPGTLLTRVQATDADAGLNRKILYSLIDSADGQFSINELSGIIQLEKPLDRELQAVYTLSLKAVDQGLPRRLTATGTVIVSVLDINDNPPVFEYREYGATVSEDILVGTEVLQVYAASRDIEANAEITYSIISGNEHGKFSIDSKTGAVFIIENLDYESSHEYYLTVEATDGGTPSLSDVATVNVNVTDINDNTPVFSQDTYTTVISEDAVLEQSVITVMADDADGPSNSHIHYSIIDGNQGSSFTIDPVRGEVKVTKLLDRETISGYTLTVQASDNGSPPRVNTTTVNIDVSDVNDNAPVFSRGNYSVIIQENKPVGFSVLQLVVTDEDSSHNGPPFFFTIVTGNDEKAFEVNPQGVLLTSSAIKRKEKDHYLLQVKVADNGKPQLSSLTYIDIRVIEESIYPPAILPLEIFITSSGEEYSGGVIGKIHATDQDVYDTLTYSLDPQMDNLFSVSSTGGKLIAHKKLDIGQYLLNVSVTDGKFTTVADITVHIRQVTQEMLNHTIAIRFANLTPEEFVGDYWRNFQRALRNILGVRRNDIQIVSLQSSEPHPHLDVLLFVEKPGSAQISTKQLLHKINSSVTDIEEIIGVRILNVFQKLCAGLDCPWKFCDEKVSVDESVMSTHSTARLSFVTPRHHRAAVCLCKEGRCPPVHHGCEDDPCPEGSECVSDPWEEKHTCVCPSGRFGQCPGSSSMTLTGNSYVKYRLTENENKLEMKLTMRLRTYSTHAVVMYARGTDYSILEIHHGRLQYKFDCGSGPGIVSVQSIQVNDGQWHAVALEVNGNYARLVLDQVHTASGTAPGTLKTLNLDNYVFFGGHIRQQGTRHGRSPQVGNGFRGCMDSIYLNGQELPLNSKPRSYAHIEESVDVSPGCFLTATEDCASNPCQNGGVCNPSPAGGYYCKCSALYIGTHCEISVNPCSSKPCLYGGTCVVDNGGFVCQCRGLYTGQRCQLSPYCKDEPCKNGGTCFDSLDGAVCQCDSGFRGERCQSDIDECSGNPCLHGALCENTHGSYHCNCSHEYRGRHCEDAAPNQYVSTPWNIGLAEGIGIVVFVAGIFLLVVVFVLCRKMISRKKKHQAEPKDKHLGPATAFLQRPYFDSKLNKNIYSDIPPQVPVRPISYTPSIPSDSRNNLDRNSFEGSAIPEHPEFSTFNPESVHGHRKAVAVCSVAPNLPPPPPSNSPSDSDSIQKPSWDFDYDTKVVDLDPCLSKKPLEEKPSQPYSARESLSEVQSLSSFQSESCDDNGYHWDTSDWMPSVPLPDIQEFPNYEVIDEQTPLYSADPNAIDTDYYPGGYDIESDFPPPPEDFPAADELPPLPPEFSNQFESIHPPRDMPAAGSLGSSSRNRQRFNLNQYLPNFYPLDMSEPQTKGTGENSTCREPHAPYPPGYQRHFEAPAVESMPMSVYASTASCSDVSACCEVESEVMMSDYESGDDGHFEEVTIPPLDSQQHTEV

SEQ ID NO: 30941 - protein, 29 aa, Artificial Sequence
  Synthetic polypeptide
YKTYSVNLRGKWLCWPQIAALLDAMKQGT

SEQ ID NO: 30942 - protein, 116 aa, Artificial Sequence
  Synthetic polypeptide
FEGKMALLASNSCFIRCNEAGDIEAKSKTAGEEEMIKIRSCAERETKKKDDIPEEDKGNVKQCEINYVKKFQSFQDHKLKISKEDSKILKKARKDGFLHETLLDRRAKLKADRYCK

SEQ ID NO: 30943 - protein, 88 aa, Artificial Sequence
  Synthetic polypeptide
FEGKMALLASNSCFIRCNEAGDIEAKSKTAGEEEMIKIRSCAERETKKKDDIPEEDKGNVKQCEINYVKKFQSFQDHKLKISKEDSKI

SEQ ID NO: 30944 - protein, 37 aa, Artificial Sequence
  Synthetic polypeptide
FEGKMALLASNSCFIRCNEAGDIEAKSKTAGEEEMIK

SEQ ID NO: 30945 - protein, 24 aa, Artificial Sequence
  Synthetic polypeptide
LVVVAGACNPGYSEGEVGMSLASL

SEQ ID NO: 30946 - protein, 115 aa, Artificial Sequence
  Synthetic polypeptide
NLISTEHRKISWSWWRAPVILATRKGKWECPWHHCDVCGKPSTSFCHLCPNSFCKEHQDGTAFSCTPDGRSYCCEHDLGAASVRSTKTEKPPPEPGKPKGKRRRRRGWRRVTEGK

SEQ ID NO: 30947 - protein, 58 aa, Artificial Sequence
  Synthetic polypeptide
SWLLGRGSGNVLGIIVTCVANLRLHFATSAPIRSVRSTRTGQPSAAPRTGGPTAVSMT

SEQ ID NO: 30948 - protein, 8 aa, Artificial Sequence
  Synthetic polypeptide
VGMPQWCC

SEQ ID NO: 30949 - protein, 168 aa, Artificial Sequence
  Synthetic polypeptide
IMEAVPPCCSRDKWECPSGVVNEETFKEIYSQFFPQGDSTTYAHFLFNAFDTDHNGAVSFEDFIKGLSILLRGTVQEKLNWAFNLYDINKDGYITKEEMLDIMKAIYDMMGKCTYPVLKEDAPRQHVETFFQKMDKNKDGVVTIDEFIESCQKDENIMRSMQLFENVI

SEQ ID NO: 30950 - protein, 89 aa, Artificial Sequence
  Synthetic polypeptide
MWLCFVPYPNLILNCNPHNPQVSRERAGGVIESWRQFPHAVLVISGNAPVVLLMKKPSKRFTRSSFHRETLQHMHIFCSMHLIQTTMEL

SEQ ID NO: 30951 - protein, 23 aa, Artificial Sequence
  Synthetic polypeptide
MNPSSVRPWEAVIEHSLCTKCCP

SEQ ID NO: 30952 - protein, 17 aa, Artificial Sequence
  Synthetic polypeptide
DLGKRLLSIRCVPSAVL

SEQ ID NO: 30953 - protein, 12 aa, Artificial Sequence
  Synthetic polypeptide
ESQLCETLGSGY

SEQ ID NO: 30954 - protein, 43 aa, Artificial Sequence
  Synthetic polypeptide
VFLLFFMSLTPTYLAGWDNSSLFHPCHSTMGRSDSSKYLQTSH

SEQ ID NO: 30955 - protein, 500 aa, Artificial Sequence
  Synthetic polypeptide
LPLTLQVGIILHYSTLATVLWVGVTARNIYKQVTKKAKRCQDPDEPPPPPRPMLRFYLIGGGIPIIVCGITAAANIKNYGSRPNAPYCWMAWEPSLGAFYGPASFITFVNCMYFLSIFIQLKRHPERKYELKEPTEEQQRLAANENGEINHQDSMSLSLISTSALENEHTFHSQLLGASLTLLLYVALWMFGALAVSLYYPLDLVFSFVFGATSLSFSAFFVVHHCVNREDVRLAWIMTCCPGRSSYSVQVNVQPPNSNGTNGEAPKCPNSSAESSCTNKSASSFKNSSQGCKLTNLQAAAAQCHANSLPLNSTPQLDNSLTEHSMDNDIKMHVAPLEVQFRTNVHSSRHHKNRSKGHRASRLTVLREYAYDVPTSVEGSVQNGLPKSRLGNNEGHSRSRRAYLAYRERQYNPPQQDSSDACSTLPKSSRNFEKPVSTTSKKDALRKPAVVELENQQKSYGLNLAIQNGPIKSNGQEGPLLGTDSTGNVRTGLWKHETTV

SEQ ID NO: 30956 - protein, 17 aa, Artificial Sequence
  Synthetic polypeptide
LSPLLHVADSHLPCRLG

SEQ ID NO: 30957 - protein, 82 aa, Artificial Sequence
  Synthetic polypeptide
GKYVDIHHSAWHRVSTQILLWRLLFSFLLPFSHQSKKENSDQLMTLFTSFNSLHSAMESFFQPLEIQQIWLMMENDVLWLPL

SEQ ID NO: 30958 - protein, 28 aa, Artificial Sequence
  Synthetic polypeptide
ALKYYCGGFYSASSFPFLTKAKKRTQTN

SEQ ID NO: 30959 - protein, 733 aa, Artificial Sequence
  Synthetic polypeptide
ICRHSPQCLAQSKHSNTIVEASIQLPPSLFSPKQKRELRPTDDSLYKLQLIAFRNGKLFPATGNSTNLADDGKRRTVVTPVILTKIDGVNVDTHHIPVNVTLRRIAHGADAVAARWDFDLLNGQGGWKSDGCHILYSDENITTIQCYSLSNYAVLMDLTGSELYTQAASLLHPVVYTTAIILLLCLLAVIVSYIYHHSLIRISLKSWHMLVNLCFHIFLTCVVFVGGITQTRNASICQAVGIILHYSTLATVLWVGVTARNIYKQVTKKAKRCQDPDEPPPPPRPMLRFYLIGGGIPIIVCGITAAANIKNYGSRPNAPYCWMAWEPSLGAFYGPASFITFVNCMYFLSIFIQLKRHPERKYELKEPTEEQQRLAANENGEINHQDSMSLSLISTSALENEHTFHSQLLGASLTLLLYVALWMFGALAVSLYYPLDLVFSFVFGATSLSFSAFFVVHHCVNREDVRLAWIMTCCPGRSSYSVQVNVQPPNSNGTNGEAPKCPNSSAESSCTNKSASSFKNSSQGCKLTNLQAAAAQCHANSLPLNSTPQLDNSLTEHSMDNDIKMHVAPLEVQFRTNVHSSRHHKNRSKGHRASRLTVLREYAYDVPTSVEGSVQNGLPKSRLGNNEGHSRSRRAYLAYRERQYNPPQQDSSDACSTLPKSSRNFEKPVSTTSKKDALRKPAVVELENQQKSYGLNLAIQNGPIKSNGQEGPLLGTDSTGNVRTGLWKHETTV

SEQ ID NO: 30960 - protein, 57 aa, Artificial Sequence
  Synthetic polypeptide
VRQEVGSAAACPVLLCRRGAEPGGRGAGQPGWAEGPPAVHAAGQPVPLLSGQCVEHH

SEQ ID NO: 30961 - protein, 877 aa, Artificial Sequence
  Synthetic polypeptide
SGRRSDPQLLARFYYADEELNQVAAELDSLDGRKDPQRCTLLVSQFRSCQDNVLNIINQIMDECIPQDRAPRDFCVKFPEEIRHDNLAGQLWFGAECLAAGSIIMNRELESMAMRPLAKELTRSLEDVRGALRDQALRDLNTYTEKMREALRHFDVLFAEFELSYVSAMVPVKSPREYYVQQEVIVLFCETVERALDFGYLTQDMIDDYEPALMFSIPRLAIVCGLVVYADGPLNLDRKVEDMSELFRPFHTLLRKIRDLLQTLTEEELHTLERNLCISQDVEFPIRADVQGPAALAPALSAPLPPEGPLSAKAKDPDAELACSMQYDDQELEQLSRMVHRAGDEMSSLLSPPIACQSPAHRPGAEGSPGGEASPGRPRLRSGSDEEERVFFMDDVEGTAEALARPESPAGPFGWAGSTWADPQEKGQGGPGGAAGISLPASEKEEDLSNNNLEAEGTDGASLAGTSSCSCLDSRLHLDGWEVGADDAETAEMIAHRTGGMKLSATVIFNPKSPTSLDSAVATQEAASEPVAEGMDGGPHKLSTGATNCLLHSCVCCGSCGDSREDVVERLREKCSPGGVIGASYAAGLAKASDRAPERQEEAPPPSEDASNGREPKAPTSDKCLPHTSGSQVDTASGLQGEAGVAGQQEPEARELHAGSPSAHEAPQALSGSSSSTAGSCSSDKMGPEAAPAATHAAPQATREKIRSRFHGSHDLIHRLFVCISGVADQLQTNYASDLRSILKTLFEVMATKPETDDKEKLRKVTQTLRSAALEDCALCQETLSSSELAAKTRDGDFEDPPEWVPDEACGFCTACKAPFTVIRRKHHCRSCGKIFCSRCSSHSAPLPRYGQVKPVRVCTHCYMFHVTPFYSDKAGL

SEQ ID NO: 30962 - protein, 19 aa, Artificial Sequence
  Synthetic polypeptide
QAGGRIRSCLPGSTMPTRS

SEQ ID NO: 30963 - protein, 847 aa, Artificial Sequence
  Synthetic polypeptide
SGRRSDPQLLARFYYADEELNQVAAELDSLDGRKDPQRCTLLVSQFRSCQDNVLNIINQIMDECIPQDRAPRDFCVKFPEEIRHDNLAGQLWFGAECLAAGSIIMNRELESMAMRPLAKELTRSLEDVRGALRDQALRDLNTYTEKMREALRHFDVLFAEFELSYVSAMVPVKSPREYYVQQEVIVLFCETVESGLVVYADGPLNLDRKVEDMSELFRPFHTLLRKIRDLLQTLTEEELHTLERNLCISQDVEFPIRADVQGPAALAPALSAPLPPEGPLSAKAKDPDAELACSMQYDDQELEQLSRMVHRAGDEMSSLLSPPIACQSPAHRPGAEGSPGGEASPGRPRLRSGSDEEERVFFMDDVEGTAEALARPESPAGPFGWAGSTWADPQEKGQGGPGGAAGISLPASEKEEDLSNNNLEAEGTDGASLAGTSSCSCLDSRLHLDGWEVGADDAETAEMIAHRTGGMKLSATVIFNPKSPTSLDSAVATQEAASEPVAEGMDGGPHKLSTGATNCLLHSCVCCGSCGDSREDVVERLREKCSPGGVIGASYAAGLAKASDRAPERQEEAPPPSEDASNGREPKAPTSDKCLPHTSGSQVDTASGLQGEAGVAGQQEPEARELHAGSPSAHEAPQALSGSSSSTAGSCSSDKMGPEAAPAATHAAPQATREKIRSRFHGSHDLIHRLFVCISGVADQLQTNYASDLRSILKTLFEVMATKPETDDKEKLRKVTQTLRSAALEDCALCQETLSSSELAAKTRDGDFEDPPEWVPDEACGFCTACKAPFTVIRRKHHCRSCGKIFCSRCSSHSAPLPRYGQVKPVRVCTHCYMFHVTPFYSDKAGL

SEQ ID NO: 30964 - protein, 277 aa, Artificial Sequence
  Synthetic polypeptide
SGRRSDPQLLARFYYADEELNQVAAELDSLDGRKDPQRCTLLVSQFRSCQDNVLNIINQIMDECIPQDRAPRDFCVKFPEEIRHDNLAGQLWFGAECLAAGSIIMNRELESMAMRPLAKELTRSLEDVRGALRDQALRDLNTYTEKMREALRHFDVLFAEFELSYVSAMVPVKSPREYYVQQEVIVLFCETVERALDFGYLTQDMIDDYEPALMFSIPRLAIVCPLLPAHPRTRAGATAHVACRMVAGSSSGALTHPPVSKQGVISALLRPLPELPP

SEQ ID NO: 30965 - protein, 128 aa, Artificial Sequence
  Synthetic polypeptide
GRALWLTPVIPALWEAEAGGSRGQEIETILANMVAHLERTGHYLTVKDNQVVQLHPSTVLDHKPEWVLYNEFVLTTKNYIRTCTDIKPEWLVKIAPQYYDMSNFPQCEAKRQLDRIIAKLQSKEYSQY

SEQ ID NO: 30966 - protein, 27 aa, Artificial Sequence
  Synthetic polypeptide
SQHFGRPRRVDHEVKRSRPSWLTWWHI

SEQ ID NO: 30967 - protein, 16 aa, Artificial Sequence
  Synthetic polypeptide
HGGTFRTNRALLNCER

SEQ ID NO: 30968 - protein, 31 aa, Artificial Sequence
  Synthetic polypeptide
SQHFGRPRRMDHLRSGVQDQPGQGSRSRPGS

SEQ ID NO: 30969 - protein, 780 aa, Artificial Sequence
  Synthetic polypeptide
GQEFKTSLAKDRDRDRDREDRSKDRDRERDRGDREREREKEKEKELRASTNAMLISAGLPPLKASHSAHSTHSAHSTHSTHSAHSTHAGHAGHTSLPQCINPFTNLPHTPRYYDILKKRLQLPVWEYKDRFTDILVRHQSFVLVGETGSGKTTQIPQWCVEYMRSLPGPKRGVACTQPRRVAAMSVAQRVADEMDVMLGQEVGYSIRFEDCSSAKTILKYMTDGMLLREAMNDPLLERYGVIILDEAHERTLATDILMGVLKEVVRQRSDLKVIVMSATLDAGKFQIYFDNCPLLTIPGRTHPVEIFYTPEPERDYLEAAIRTVIQIHMCEEEEGDLLLFLTGQEEIDEACKRIKREVDDLGPEVGDIKIIPLYSTLPPQQQQRIFEPPPPKKQNGAIGRKVVVSTNIAETSLTIDGVVFVIDPGFAKQKVYNPRIRVESLLVTAISKASAQQRAGRAGRTRPGKCFRLYTEKAYKTEMQDNTYPEILRSNLGSVVLQLKKLGIDDLVHFDFMDPPAPETLMRALELLNYLAALNDDGDLTELGSMMAEFPLDPQLAKMVIASCDYNCSNEVLSITAMLSVPQCFVRPTEAKKAADEAKMRFAHIDGDHLTLLNVYHAFKQNHESVQWCYDNFINYRSLMSADNVRQQLSRIMDRFNLPRRSTDFTSRDYYINIRKALVTGYFMQVAHLERTGHYLTVKDNQVVQLHPSTVLDHKPEWVLYNEFVLTTKNYIRTCTDIKPEWLVKIAPQYYDMSNFPQCEAKRQLDRIIAKLQSKEYSQY

SEQ ID NO: 30970 - protein, 67 aa, Artificial Sequence
  Synthetic polypeptide
ANGSPEVRSSRPAWPRIEIETGIVKIGLKIETENVIEEIESERGRKKRRRSCELQQMLCLSVLDYHL

SEQ ID NO: 30971 - protein, 76 aa, Artificial Sequence
  Synthetic polypeptide
SQHFGRPRRMDHLRSGVQDQPGQGRIEIETGIVKIGLKIETENVIEEIESERGRKKRRRSCELQQMLCLSVLDYHL

SEQ ID NO: 30972 - protein, 19 aa, Artificial Sequence
  Synthetic polypeptide
GQEFKTSLAKEGSRSRPGS

SEQ ID NO: 30973 - protein, 787 aa, Artificial Sequence
  Synthetic polypeptide
ANGSPEVRSSRPAWPRKDRDRDRDREDRSKDRDRERDRGDREREREKEKEKELRASTNAMLISAGLPPLKASHSAHSTHSAHSTHSTHSAHSTHAGHAGHTSLPQCINPFTNLPHTPRYYDILKKRLQLPVWEYKDRFTDILVRHQSFVLVGETGSGKTTQIPQWCVEYMRSLPGPKRGVACTQPRRVAAMSVAQRVADEMDVMLGQEVGYSIRFEDCSSAKTILKYMTDGMLLREAMNDPLLERYGVIILDEAHERTLATDILMGVLKEVVRQRSDLKVIVMSATLDAGKFQIYFDNCPLLTIPGRTHPVEIFYTPEPERDYLEAAIRTVIQIHMCEEEEGDLLLFLTGQEEIDEACKRIKREVDDLGPEVGDIKIIPLYSTLPPQQQQRIFEPPPPKKQNGAIGRKVVVSTNIAETSLTIDGVVFVIDPGFAKQKVYNPRIRVESLLVTAISKASAQQRAGRAGRTRPGKCFRLYTEKAYKTEMQDNTYPEILRSNLGSVVLQLKKLGIDDLVHFDFMDPPAPETLMRALELLNYLAALNDDGDLTELGSMMAEFPLDPQLAKMVIASCDYNCSNEVLSITAMLSVPQCFVRPTEAKKAADEAKMRFAHIDGDHLTLLNVYHAFKQNHESVQWCYDNFINYRSLMSADNVRQQLSRIMDRFNLPRRSTDFTSRDYYINIRKALVTGYFMQVAHLERTGHYLTVKDNQVVQLHPSTVLDHKPEWVLYNEFVLTTKNYIRTCTDIKPEWLVKIAPQYYDMSNFPQCEAKRQLDRIIAKLQSKEYSQY

SEQ ID NO: 30974 - protein, 61 aa, Artificial Sequence
  Synthetic polypeptide
GWAQWRTPIIPALWEAEAGGSLEAWSSRPAWPTCMGRNTNADGFSSHQVCAGKEHNHISAR

SEQ ID NO: 30975 - protein, 558 aa, Artificial Sequence
  Synthetic polypeptide
SQHFGRLRQVDHLRLGVRDQPGQHAWEEILMQMDSRLTKFVQEKNTTTSVQDEFMHLLLWGKASAELQTLLMNQLTVKGLKKLGQSIESSYSSIQKLVISHLQSGSESLLYHLSELKGMASWKQKYEPLGLDAAGIEEAITAVGSFILKANELLQVIDSSMKNFKAFFRWLYVAMLRMTEDHVLPELNKMTQKDITFVAEFLTEHFNEAPDLYNRKGKYFNVERVGQYLKDEDDDLVSPPNTEGNQWYDFLQNSSHLKESPLLFPYYPRKSLHFVKRRMENIIDQCLQKPADVIGKSMNQAICIPLYRDTRSEDSTRRLFKFPFLWNNKTSNLHYLLFTILEDSLYKMCILRRHTDISQSVSNGLIAIKFGSFTYATTEKVRRSIYSCLDAQFYDDETVTVVLKDTVGREGRDRLLVQLPLSLVYNSEDSAEYQFTGTYSTRLDEQCSAIPTRTMHFEKHWRLLESMKAQYVAGNGFRKVSCVLSSNLRHVRVFEMDIDDEWELDESSDEEEEASNKPVKIKEEVLSESEAENQQAGAAALAPEIVIKVEKLDPELDS

SEQ ID NO: 30976 - protein, 16 aa, Artificial Sequence
  Synthetic polypeptide
GLEFETSLANMHGKKY

SEQ ID NO: 30977 - protein, 559 aa, Artificial Sequence
  Synthetic polypeptide
SQHFGRLRQVDHLRLGVRDQPGQHAWEEILMQMDSRLTKFVQEKNTTTSVQDEFMHLLLWGKASAELQTLLMNQLTVKGLKKLGQSIESSYSSIQKLVISHLQSGSESLLYHLSELKGMASWKQKYEPLGLDAAGIEEAITAVGSFILKANELLQVIDSSMKNFKAFFRWLYVAMLRMTEDHVLPELNKVMTQKDITFVAEFLTEHFNEAPDLYNRKGKYFNVERVGQYLKDEDDDLVSPPNTEGNQWYDFLQNSSHLKESPLLFPYYPRKSLHFVKRRMENIIDQCLQKPADVIGKSMNQAICIPLYRDTRSEDSTRRLFKFPFLWNNKTSNLHYLLFTILEDSLYKMCILRRHTDISQSVSNGLIAIKFGSFTYATTEKVRRSIYSCLDAQFYDDETVTVVLKDTVGREGRDRLLVQLPLSLVYNSEDSAEYQFTGTYSTRLDEQCSAIPTRTMHFEKHWRLLESMKAQYVAGNGFRKVSCVLSSNLRHVRVFEMDIDDEWELDESSDEEEEASNKPVKIKEEVLSESEAENQQAGAAALAPEIVIKVEKLDPELDS

SEQ ID NO: 30978 - protein, 31 aa, Artificial Sequence
  Synthetic polypeptide
DQPTRFLIPSLRSNLLNKSSYIMKGVLRFKK

SEQ ID NO: 30979 - protein, 11 aa, Artificial Sequence
  Synthetic polypeptide
SQEFETSQQDF

SEQ ID NO: 30980 - protein, 733 aa, Artificial Sequence
  Synthetic polypeptide
QAWWLTPVIPALWEAEAGGSLEVRSLRPANKIFNPLLEKQLAEQIKLYYERCAEVQEIVSVYASAAKHGGERQEACHLHNSYLDLQRRYGRPSMCRAFPWEKELKDKHPSLFQALLEMDLLTVPRNQNESVSEIGGKIFEKAVKRLSSIDGLHQISSIVPFLTDSSCCGYHKASYYLAVFYETGLNVPRDQLQGMLYSLVGGQGSERLSSMNLGYKHYQGIDNYPLDWELSYAYYSNIATKTPLDQHTLQGDQAYVETIRLKDDEILKVQTKEDGDVFMWLKHEATRGNAAAQQRLAQMLFWGQQGVAKNPEAAIEWYAKGALETEDPALIYDYAIVLFKGQGVKKNRRLALELMKKAASKGLHQAVNGLGWYYHKFKKNYAKAAKYWLKAEEMGNPDASYNLGVLHLDGIFPGVPGRNQTLAGEYFHKAAQGGHMEGTLWCSLYYITGNLETFPRDPEKAVVWAKHVAEKNGYLGHVIRKGLNAYLEGSWHEALLYYVLAAETGIEVSQTNLAHICEERPDLARRYLGVNCVWRYYNFSVFQIDAPSFAYLKMGDLYYYGHQNQSQDLELSVQMYAQAALDGDSQGFFNLALLIEEGTIIPHHILDFLEIDSTLHSNNISILQELYERCWSHSNEESFSPCSLAWLYLHLRLLWGAILHSALIYFLGTFLLSILIAWTVQYFQSVSASDPPPRPSQASPDTATSTASPAVTPAADASDQDQPTVTNNPEPRG

SEQ ID NO: 30981 - protein, 23 aa, Artificial Sequence
  Synthetic polypeptide
MFVATSSMLKCRASCETQRRNKL

SEQ ID NO: 30982 - protein, 33 aa, Artificial Sequence
  Synthetic polypeptide
NAEPPVRLREGTSYKSGWNCSRGCAATRVKSVV

SEQ ID NO: 30983 - protein, 33 aa, Artificial Sequence
  Synthetic polypeptide
DSEKEQAINRAGIVQEDVQPPGLKVWSDPFGRK

SEQ ID NO: 30984 - protein, 1104 aa, Artificial Sequence
  Synthetic polypeptide
LCIVDLQTSVNKSIDTGTLVQSWLRGAAMTMKTKQRMLTEDWELFKQRRFIEEQLTNKKAVTGENNFTDTMRHMLSSRLSMPDCPNCNYRRRCACDDCSLSHILTCGIMDPPVTDDIHIHQLPLQVDPAPDYLAERSPPSVSSASSGSGSSSPITIQQHPRLILTDSGSAPTFDDEDVAPLSAKFADIYPLSNYDDTEVVANMNGIHSELNGGGENMALKDESPQISSTSSSSSEADDEEADGESSGEPPGAPKEDGVLGSRSPRTEESKADSPPPSYPTQQAEQAPNTCECHVCKQEASGLTPSAMTAGALPPGHQFLSPEKPTHPALHLYPHIHGHVPLHTVPHLPRPLIHPTLYATPPFTHSKALPPAPVQNHTNKHQVFNASLQDHIYPSCFGNTPEWNSSKFISLWGSEVMNDKNWNPGTFLPDTISGSEILGPTLSETRPEALPPPSSNETPAVSDSKEKKNAAKKKCLYNFQDAFMEANKVVMATSSATSSVSCTATTVQSSNSQFRVSSKRPPSVGDVFHGISKEDHRHSAPAAPRNSPTGLAPLPALSPAALSPAALSPASTPHLANLAAPSFPKTATTTPGFVDTRKSFCPAPLPPATDGSISAPPSVCSDPDCEGHRCENGVYDPQQDDGDESADEDSCSEHSSSTSTSTNQKEGKYCDCCYCEFFGHGGPPAAPTSRNYAEMREKLRLRLTKRKEEQPKKMDQISERESVVDHRRVEDLLQFINSSETKPVSSTRAAKRARHKQRKLEEKARLEAEARAREHLHLQEEQRRREEEEDEEEEEDRFKEEFQRLQELQKLRAVKKKKKERPSKDCPKLDMLTRNFQAATESVPNSGNIHNGSLEQTEEPETSSHSPSRHMNHSEPRPGLGADGDAADPVDTRDSKFLLPKEVNGKQHEPLSFFFDIMQHHKEGNGKQKLRQTSKASSEPARRPTEPPKATEGQSKPRAQTESKAKVVDLMSITEQKREERKVNSNNNNKKQLNHIKDEKSNPTPMEPTSPGEHQQNSKLVLAESPQPKGKNKKNKKKKGDRVNNSIDDVFLPKDIDLDSVDMDETEREVEYFKRFCLDSARQTRQRLSINWSNFSLKKATFAAH

SEQ ID NO: 30985 - protein, 20 aa, Artificial Sequence
  Synthetic polypeptide
LKENKLRAPTNCALWTFRPV

SEQ ID NO: 30986 - protein, 20 aa, Artificial Sequence
  Synthetic polypeptide
RKTSSGLPLIVHCGPSDQCE

SEQ ID NO: 30987 - protein, 49 aa, Artificial Sequence
  Synthetic polypeptide
RGVPLHTLFLACYHIRFDFAPHSPSAMIVRPPSHVELPVFRDLRLNLNH

SEQ ID NO: 30988 - protein, 13 aa, Artificial Sequence
  Synthetic polypeptide
GLPAMWNCQSSET

SEQ ID NO: 30989 - protein, 77 aa, Artificial Sequence
  Synthetic polypeptide
LCSSFTFCHDCEASQPCGTASLQRPEIKLESLKEDIKEFFKISGWEKKLQNAVYSELSVFPLPSHPAAPPEHLKEPL

SEQ ID NO: 30990 - protein, 284 aa, Artificial Sequence
  Synthetic polypeptide
LCSSFTFCHDCEASQPCGTASLQRPEIKLESLKEDIKEFFKISGWEKKLQNAVYSELSVFPLPSHPAAPPEHLKEPLVYMRKAQGSWEKRILKSLNSMCTELSIPLARKRPVGEQKELLNKWNEMGTDEPDLSLFRPVYAPKDFLEVLINLRNPNYENGDSLSFRTHLGLIQVPLKVKDIPELKECFVELGLNIGQLGIDDSTQVPPELFENEHVRIGQKVLAEQDSAAAQQYIRQGSPTALRAELWALILNISSQPEDVLYYEQLKTNVIQHDLLVDSLIYKD

SEQ ID NO: 30991 - protein, 512 aa, Artificial Sequence
  Synthetic polypeptide
LCSSFTFCHDCEASQPCGTASLQRPEIKLESLKEDIKEFFKISGWEKKLQNAVYSELSVFPLPSHPAAPPEHLKEPLVYMRKAQGSWEKRILKSLNSMCTELSIPLARKRPVGEQKELLNKWNEMGTDEPDLSLFRPVYAPKDFLEVLINLRNPNYENGDSLSFRTHLGLIQVPLKVKDIPELKECFVELGLNIGQLGIDDSTQVPPELFENEHVRIGQKVLAEQDSAAAQQYIRQGSPTALRAELWALILNISSQPEDVLYYEQLKTNVIQHDLLVDSLIYKDVKLTASNDDYYFVFEDYLYQVLLCFSRDTSVLSHFAFNSASPPKSYIRGKLGLEEYAVFYPPNGVIPFHGFSMYVAPLCFLYHEPSKLYQIFREMYVRFFFRLHSISSHPSGIVSLCLLFETLLQTYLPQLFYHLREIGAQPLRISFKWMVRAFSGYLATDQLLLLWDRILGYNSLEILAVLAAAVFAFRAVNLMEVTSLAAAEAVLADLSTLKVMPLLQIFLFATVT

SEQ ID NO: 30992 - protein, 135 aa, Artificial Sequence
  Synthetic polypeptide
LCSSFTFCHDCEASQPCGTASLQRPEIKLESLKEDIKEFFKISGWEKKLQNAVYSELSVFPLPSHPAAPPEHLKEPLVYMRKAQGSWEKRILKSLNSMCTELSIPLARKRPVGEQKELLNKWNEMGTDEPDLSLF

SEQ ID NO: 30993 - protein, 183 aa, Artificial Sequence
  Synthetic polypeptide
CRCSEEFIPKCSEVTCFMASARRTTDTRPQPPRGIAPRAWPPSQRSRLLRCHLLRSHLPPHLTLQILQPHHSPKQQPQLLGLWTHARVSVLHPYPRPQMAPLAPLQVSAVTLTAKGTAARMVSTTHSRMMGTRVQMRTAALSTAPAPRPPPTRRRASTATAATANSLGTAGLQLHQQVEIMQK

SEQ ID NO: 30994 - protein, 13 aa, Artificial Sequence
  Synthetic polypeptide
VDVLRSSYRSVQR

SEQ ID NO: 30995 - protein, 576 aa, Artificial Sequence
  Synthetic polypeptide
GVHTEVFRGDVFHGISKEDHRHSAPAAPRNSPTGLAPLPALSPAALSPAALSPASTPHLANLAAPSFPKTATTTPGFVDTRKSFCPAPLPPATDGSISAPPSVCSDPDCEGHRCENGVYDPQQDDGDESADEDSCSEHSSSTSTSTNQKEGKYCDCCYCEFFGHGGPPAAPTSRNYAEMREKLRLRLTKRKEEQPKKMDQISERESVVDHRRVEDLLQFINSSETKPVSSTRAAKRARHKQRKLEEKARLEAEARAREHLHLQEEQRRREEEEDEEEEEDRFKEEFQRLQELQKLRAVKKKKKERPSKDCPKLDMLTRNFQAATESVPNSGNIHNGSLEQTEEPETSSHSPSRHMNHSEPRPGLGADGDAADPVDTRDSKFLLPKEVNGKQHEPLSFFFDIMQHHKEGNGKQKLRQTSKASSEPARRPTEPPKATEGQSKPRAQTESKAKVVDLMSITEQKREERKVNSNNNNKKQLNHIKDEKSNPTPMEPTSPGEHQQNSKLVLAESPQPKGKNKKNKKKKGDRVNNSIDDVFLPKDIDLDSVDMDETEREVEYFKRDGVSPHCPGWSRTPGLK

SEQ ID NO: 30996 - protein, 589 aa, Artificial Sequence
  Synthetic polypeptide
GVHTEVFRGDVFHGISKEDHRHSAPAAPRNSPTGLAPLPALSPAALSPAALSPASTPHLANLAAPSFPKTATTTPGFVDTRKSFCPAPLPPATDGSISAPPSVCSDPDCEGHRCENGVYDPQQDDGDESADEDSCSEHSSSTSTSTNQKEGKYCDCCYCEFFGHGGPPAAPTSRNYAEMREKLRLRLTKRKEEQPKKMDQISERESVVDHRRVEDLLQFINSSETKPVSSTRAAKRARHKQRKLEEKARLEAEARAREHLHLQEEQRRREEEEDEEEEEDRFKEEFQRLQELQKLRAVKKKKKERPSKDCPKLDMLTRNFQAATESVPNSGNIHNGSLEQTEEPETSSHSPSRHMNHSEPRPGLGADGDAADPVDTRDSKFLLPKEVNGKQHEPLSFFFDIMQHHKEGNGKQKLRQTSKASSEPARRPTEPPKATEGQSKPRAQTESKAKVVDLMSITEQKREERKVNSNNNNKKQLNHIKDEKSNPTPMEPTSPGEHQQNSKLVLAESPQPKGKNKKNKKKKGDRVNNSIDDVFLPKDIDLDSVDMDETEREVEYFKRFCLDSARQTRQRLSINWSNFSLKKATFAAH

SEQ ID NO: 30997 - protein, 162 aa, Artificial Sequence
  Synthetic polypeptide
CRCSEEFIPKCSEVTCFMASARRTTDTRPQPPRGIAPRAWPPSQRSRLLRCHLLRSHLPPHLTLQILQPHHSPKQQPQLLGLWTHARVSVLHPYPRPQMAPLAPLQVSAVTLTAKGTAARMVSTTHSRMMGTRVQMRTAALSTAPAPRPPPTRRRPPAAPTS

SEQ ID NO: 30998 - protein, 157 aa, Artificial Sequence
  Synthetic polypeptide
GVHTEVFRGDVFHGISKEDHRHSAPAAPRNSPTGLAPLPALSPAALSPAALSPASTPHLANLAAPSFPKTATTTPGFVDTRKSFCPAPLPPATDGSISAPPSVCSDPDCEGHRCENGVYDPQQDDGDESADEDSCSEHSSSTSTSTNQKEASSCTNK

SEQ ID NO: 30999 - protein, 630 aa, Artificial Sequence
  Synthetic polypeptide
GVHTEVFRGDVFHGISKEDHRHSAPAAPRNSPTGLAPLPALSPAALSPAALSPASTPHLANLAAPSFPKTATTTPGFVDTRKSFCPAPLPPATDGSISAPPSVCSDPDCEGHRCENGVYDPQQDDGDESADEDSCSEHSSSTSTSTNQKEGKYCDCCYCEFFGHGGPPAAPTSRNYAEMREKLRLRLTKRKEEQPKKMDQISERESVVDHRRVEDLLQFINSSETKPVSSTRAAKRARHKQRKLEEKARLEAEARAREHLHLQEEQRRREEEEDEEEEEDRFKEEFQRLQELQKLRAVKKKKKERPSKDCPKLDMLTRNFQAATESVPNSGNIHNGSLEQTEEPETSSHSPSRHMNHSEPRPGLGADGDAADPVDTRDSKFLLPKEVNGKQHEPLSFFFDIMQHHKEGNGKQKLRQTSKASSEPARRPTEPPKATEGQSKPRAQTESKAKVVDLMSITEQKREERKVNSNNNNKKQLNHIKDEKSNPTPMEPTSPGEHQQNSKLVLAESPQPKGKNKKNKKKKGDRVNNSIDGVSLLLPSLGYNGAILAHCNLRLPGSSDCAASASQVVGITDDVFLPKDIDLDSVDMDETEREVEYFKRFCLDSARQTRQRLSINWSNFSLKKATFAAH

SEQ ID NO: 31000 - protein, 171 aa, Artificial Sequence
  Synthetic polypeptide
CRCSEEFIPKCSEVTCFMASARRTTDTRPQPPRGIAPRAWPPSQRSRLLRCHLLRSHLPPHLTLQILQPHHSPKQQPQLLGLWTHARVSVLHPYPRPQMAPLAPLQVSAVTLTAKGTAARMVSTTHSRMMGTRVQMRTAALSTAPAPRPPPTRRRASTATAATANSLGTAG

SEQ ID NO: 31001 - protein, 169 aa, Artificial Sequence
  Synthetic polypeptide
GVHTEVFRGDVFHGISKEDHRHSAPAAPRNSPTGLAPLPALSPAALSPAALSPASTPHLANLAAPSFPKTATTTPGFVDTRKSFCPAPLPPATDGSISAPPSVCSDPDCEGHRCENGVYDPQQDDGDESADEDSCSEHSSSTSTSTNQKEGKYCDCCYCEFFGHGGVSA

SEQ ID NO: 31002 - protein, 517 aa, Artificial Sequence
  Synthetic polypeptide
GVHTEVFRGDVFHGISKEDHRHSAPAAPRNSPTGLAPLPALSPAALSPAALSPASTPHLANLAAPSFPKTATTTPGFVDTRKSFCPAPLPPATDGSISAPPSVCSDPDCEGHRCENGVYDPQQDDGDESADEDSCSEHSSSTSTSTNQKEGKYCDCCYCEFFGHGGPPAAPTSRNYAEMREKLRLRLTKRKEEQPKKMDQISERESVVDHRRVEDLLQFINSSETKPVSSTRAAKRARHKQRKLEEKARLEAEARAREHLHLQEEQRRREEEEDEEEEEDRFKEEFQRLQELQKLRAVKKKKKERPSKDCPKLDMLTRNFQAATESVPNSGNIHNGSLEQTEEPETSSHSPSRHMNHSEPRPGLGADGDAADPVDTRDSKFLLPKEVNGKQHEPLSFFFDIMQHHKEGNGKQKLRQTSKASSEPARRPTEPPKATEGQSKPRAQTESKAKVVDLMSITEQKREERKVNSNNNNKKQLNHIKDEKSNPTPMEPTSPGEHQQNSKLVLAESPQPKGKNK

SEQ ID NO: 31003 - protein, 33 aa, Artificial Sequence
  Synthetic polypeptide
LARFCLDSARQTRQRLSINWSNFSLKKATFAAH

SEQ ID NO: 31004 - protein, 23 aa, Artificial Sequence
  Synthetic polypeptide
PGSAWILLDRPDKDCLSTGPILA

SEQ ID NO: 31005 - protein, 19 aa, Artificial Sequence
  Synthetic polypeptide
QDTVSTKNKIISQVLLGFC

SEQ ID NO: 31006 - protein, 3 aa, Artificial Sequence
  Synthetic polypeptide
PGN

SEQ ID NO: 31007 - protein, 349 aa, Artificial Sequence
  Synthetic polypeptide
NLVSAKNTEISQEIERLTERLEEKEREMQQLLSQPQHEREKEVVLLRRSMAEGERARAASDVLCRSLANETHQLRRTLTATAHMCQHLAKCLDERQHAQRNVGERSPDQSEHTDGHTSVQSVIEKLQEENRLLKQKVTHVEDLNAKWQRYNASRDEYVRGLHAQLRGLQIPHEPELMRKEISRLNRQLEEKINDCAEVKQELAASRTARDAALERVQMLEQQILAYKDDFMSERADRERAQSRIQELEEKVASLLHQVSWRQDSREPDAGRIHAGSKTAKYLAADALELMVPGGWRPGTGSQQPEPPAEGGHPGAAQRGQGDLQCPHCLQCFSDEQGEELLRHVAECCQ

SEQ ID NO: 31008 - protein, 32 aa, Artificial Sequence
  Synthetic polypeptide
GRRITQVQDQTGQSGETLSLQKIQKLARKLRG

SEQ ID NO: 31009 - protein, 266 aa, Artificial Sequence
  Synthetic polypeptide
NLVSAKNTEISQEIERLTERLEEKEREMQQLLSQPQHEREKEVVLLRRSMAEGERARAASDVLCRSLANETHQLRRTLTATAHMCQHLAKCLDERQHAQRNVGERSPDQSEHTDGHTSVQSVIEKLQEENRLLKQKVTHILAYKDDFMSERADRERAQSRIQELEEKVASLLHQVSWRQDSREPDAGRIHAGSKTAKYLAADALELMVPGGWRPGTGSQQPEPPAEGGHPGAAQRGQGDLQCPHCLQCFSDEQGEELLRHVAECCQ

SEQ ID NO: 31010 - protein, 9 aa, Artificial Sequence
  Synthetic polypeptide
STLYLLHGG

SEQ ID NO: 31011 - protein, 572 aa, Artificial Sequence
  Synthetic polypeptide
PEGCEALCTCFMAAEEMHWPVPMKAIGAQNLLTMPGGVAKAGYLHKKGGTQLQLLKWPLRFVIIHKRCVYYFKSSTSASPQGAFSLSGYNRVMRAAEETTSNNVFPFKIIHISKKHRTWFFSASSEEERKSWMALLRREIGHFHEKKDLPLDTSDSSSDTDSFYGAVERPVDISLSPYPTDNEDYEHDDEDDSYLEPDSPEPGRLEDALMHPPAYPPPPVPTPRKPAFSDMPRAHSFTSKGPGPLLPPPPPKHGLPDVGLAAEDSKRDPLCPRRAEPCPRVPATPRRMSDPPLSTMPTAPGLRKPPCFRESASPSPEPWTPGHGACSTSSAAIMATATSRNCDKLKSFHLSPRGPPTSEPPPVPANKPKFLKIAEEDPPREAAMPGLFVPPVAPRPPALKLPVPEAMARPAVLPRPEKPQLPHLQRSPPDGQSFRSFSFEKPRQPSQADTGGDDSDEDYEKVPLPNSVFVNTTESCEVERLFKATSPRGEPQDGLYCIRNSSTKSGKVLVVWDETSNKVRNYRIFEKDSKFYLEGEVLFVSVGSMVEHYHTHVLPSHQSLLLRHPYGYTGPR

SEQ ID NO: 31012 - protein, 39 aa, Artificial Sequence
  Synthetic polypeptide
SWPGGFPLPPLRFLIHDLRAVKHFVPASWRLKRCIGLSL

SEQ ID NO: 31013 - protein, 583 aa, Artificial Sequence
  Synthetic polypeptide
GRARWLTAVIPALLEAEAGGSQGGYGKKSGRSKKWKEILTLPPVSQCSELRHSIEKDYSSLCDKQPIGRRLFRQFCDTKPTLKRHIEFLDAVAEYEVADDEDRSDCGLSILDRFFNDKLAAPLPEIPPDVVTECRLGLKEENPSKKAFEECTRVAHNYLRGEPFEEYQESSYFSQFLQWKWLERQPVTKNTFRHYRVLGKGGFGEVCACQVRATGKMYACKKLQKKRIKKRKGEAMALNEKRILEKVQSRFVVSLAYAYETKDALCLVLTIMNGGDLKFHIYNLGNPGFDEQRAVFYAAELCCGLEDLQRERIVYRDLKPENILLDDRGHIRISDLGLATEIPEGQRVRGRVGTVGYMAPEVVNNEKYTFSPDWWGLGCLIYEMIQGHSPFKKYKEKVKWEEVDQRIKNDTEEYSEKFSEDAKSICRMLLTKNPSKRLGCRGEGAAGVKQHPVFKDINFRRLEANMLEPPFCPDPHAVYCKDVLDIEQFSVVKGIYLDTADEDFYARFATGCVSIPWQNEMIESGCFKDINKSESEEALPLDLDKNIHTPVSRPNRGFFYRLFRRGGCLTMVPSEKEVEPKQC

SEQ ID NO: 31014 - protein, 29 aa, Artificial Sequence
  Synthetic polypeptide
SQHFWRPRRADHKEDMAKKVVVVKNGRRY

SEQ ID NO: 31015 - protein, 30 aa, Artificial Sequence
  Synthetic polypeptide
PGTVAHSCNPSTFGGRGGRITRRIWQKKWS

SEQ ID NO: 31016 - protein, 537 aa, Artificial Sequence
  Synthetic polypeptide
GRARWLTAVIPALLEAEAGGSQGGYGKKSGRSKKWKEILTLPPVSQCSELRHSIEKDYSSLCDKQPIGRRLFRQFCDTKPTLKRHIEFLDAVAEYEVADDEDRSDCGLSILDRFFNDKLAAPLPEIPPDVVTECRLGLKEENPSKKAFEECTRVAHNYLRGEPFEEYQESSYFSQFLQWKWLERQPVTKNTFRHYRVLGKGGFGEVCACQVRATGKMYACKKLQKKRIKKRKGEAMALNEKRILEKVQSRFVVSLAYAYETKDALCLVLTIMNGGDLKFHIYNLGNPGFDEQRAVFYAAELCCGLEDLQRERIVYRDLKPENILLDDRGHIRISDLGLATEIPEGQRVRGRVGTVGYMAPEVVNNEKYTFSPDWWGLGCLIYEMIQGHSPFKKYKEKVKWEEVDQRIKNDTEEYSEKFSEDAKSICRMLLTKNPSKRLGCRGEGAAGVKQHPVFKDINFRRLEANMLEPPFCPDPHAVYCKDVLDIEQFSVVKGIYLDTADEDFYARFATGCVSIPWQNEGCLTMVPSEKEVEPKQC

SEQ ID NO: 31017 - protein, 59 aa, Artificial Sequence
  Synthetic polypeptide
ARAVARAEAPGAGASGAARAQNLGGELDSLSLLNARLLGDHLGDPRDSVSLAPLMILRV

SEQ ID NO: 31018 - protein, 53 aa, Artificial Sequence
  Synthetic polypeptide
RGRWRGPKRPERERAARPGLKIWAGNWTHSAFSTHVCSEIIWEIQEIQYHSLP

SEQ ID NO: 31019 - protein, 58 aa, Artificial Sequence
  Synthetic polypeptide
AGGGAGRSARSGSERRGPGSKFGRGTGLTQPSQRTSARRSFGRSKRFSITRSLDDLES

SEQ ID NO: 31020 - protein, 66 aa, Artificial Sequence
  Synthetic polypeptide
ARAVARAEAPGAGASGAARAQNLGGELDSLSLLNARLLGDHLGDPRDSVSLAPLMILSLQLCLMAS

SEQ ID NO: 31021 - protein, 767 aa, Artificial Sequence
  Synthetic polypeptide
AGGGAGRSARSGSERRGPGSKFGRGTGLTQPSQRTSARRSFGRSKRFSITRSLDDLESATVSDGELTGADLKDCVSNNSLSSNASLPSVQSCRRLRERRVASWAVSFERLLQDPVGVRYFSDFLRKEFSEENILFWQACEYFNHVPAHDKKELSYRAREIFSKFLCSKATTPVNIDSQAQLADDVLRAPHPDMFKEQQLQIFNLMKFDSYTRFLKSPLYQECILAEVEGRALPDSQQVPSSPASKHSLGSDHSSVSTPKKLSGKSKSGRSLNEELGDEDSEKKRKGAFFSWSRTRSTGRSQKKREHGDHADDALHANGGLCRRESQGSVSSAGSLDLSEACRTLAPEKDKATKHCCIHLPDGTSCVVAVKAGFSIKDILSGLCERHGINGAAADLFLVGGDKPLVLHQDSSILESRDLRLEKRTLFRLDLVPINRSVGLKAKPTKPVTEVLRPVVARYGLDLSGLLVRLSGEKEPLDLGAPISSLDGQRVVLEEKDPSRGKASADKQKGVPVKQNTAVNSSSRNHSATGEERTLGKSNSIKIKGENGKNARDPRLSKREESIAKIGKKKYQKINLDEAEEFFELISKAQSNRADDQRGLLRKEDLVLPEFLRLPPGSTELTLPTPAAVAKGFSKRSATGNGRESASQPGEQWEPVQESSDSPSTSPGSASSPPGPPGTTPPGQKSPSGPFCTPQSPVSLAQEGTAQIWKRQSQEVEAGGIQTVEDEHVAELTLMGEGDISSPNSTLLPPPSTPQEVPGPSRPGTSRF

SEQ ID NO: 31022 - protein, 838 aa, Artificial Sequence
  Synthetic polypeptide
AGGGAGRSARSGSERRGPGSKFGRGTGLTQPSQRTSARRSFGRSKRFSITRSLDDLESATVSDGELTGADLKDCVSNNSLSSNASLPSVQSCRRLRERRVASWAVSFERLLQDPVGVRYFSDFLRKEFSEENILFWQACEYFNHVPAHDKKELSYRAREIFSKFLCSKATTPVNIDSQAQLADDVLRAPHPDMFKEQQLQIFNLMKFDSYTRFLKSPLYQECILAEVEGRALPDSQQVPSSPASKHSLGSDHSSVSTPKKLSGKSKSGRSLNEELGDEDSEKKRKGAFFSWSRTRSTGRSQKKREHGDHADDALHANGGLCRRESQGSVSSAGSLDLSEACRTLAPEKDKATKHCCIHLPDGTSCVVAVKAGFSIKDILSGLCERHGINGAAADLFLVGGDKPLVLHQDSSILESRDLRLEKRTLFRLDLVPINRSVGLKAKPTKPVTEVLRPVVARYGLDLSGLLVRLSGEKEPLDLGAPISSLDGQRVVLEEKDPSRGKASADKQKGVPVKQNTAVNSSSRNHSATGEERTLGKSNSIKIKGENGKNARDPRLSKREESIAKIGKKKYQKINLDEAEEFFELISKAQSNRADDQRGLLRKEDLVLPEFLRLPPGSTELTLPTPAAVAKGFSKRSATGNGRESASQPGEQWEPVQESSDSPSTSPGSASSPPGPPGTTPPGQKSPSGPFCTPQSPVSLAQEGTAQIWKRQSQEVEAGGIQTVEDEHVAELTLMGEGDISSPNSTLLPPPSTPQEVPGPSRPGSGTHGSRDLPVNRIIDVDLVTGSAPGRDGGIAGAQAGPGRSQASGGPPTSDLPGLGPVPGEPAKPKTSAHHATFV

SEQ ID NO: 31023 - protein, 548 aa, Artificial Sequence
  Synthetic polypeptide
AGGGAGRSARSGSERRGPGSKFGRGTGLTQPSQRTSARRSFGRSKRFSITRSLDDLESATVSDGELTGADLKDCVSNNSLSSNASLPSVQSCRRLRERRVASWAVSFERLLQDPVGVRYFSDFLRKEFSEENILFWQACEYFNHVPAHDKKELSYRAREIFSKFLCSKATTPVNIDSQAQLADDVLRAPHPDMFKEQQLQIFNLMKFDSYTRFLKSPLYQECILAEVEGRALPDSQQVPSSPASKHSLGSDHSSVSTPKKLSGKSKSGRSLNEELGDEDSEKKRKGAFFSWSRTRSTGRSQKKREHGDHADDALHANGGLCRRESQGSVSSAGSLDLSEACRTLAPEKDKATKHCCIHLPDGTSCVVAVKAGFSIKDILSGLCERHGINGAAADLFLVGGDKPLVLHQDSSILESRDLRLEKRTLFRLDLVPINRSVGLKAKPTKPVTEVLRPVVARYGLDLSGLLVRLSGEKEPLDLGAPISSLDGQRVVLEEKDPSRGKASADKQKGVPVKQNTAVNSSSRNHSATSFLSLFPKLRATEQMTNVGC

SEQ ID NO: 31024 - protein, 26 aa, Artificial Sequence
  Synthetic polypeptide
CACVGTLNIQGCGHRILSRRVEMPGP

SEQ ID NO: 31025 - protein, 204 aa, Artificial Sequence
  Synthetic polypeptide
VRAWELLTFRDVAIEFSPEEWKCLDPDQQNLYRDVMLENYRNLVSLGVAISNPDLVTCLEQRKEPYNVKIHKIVARPPAMCSHFTQDHWPVQGIEDSFHKLILRRYEKCGHDNLQLRKGCKSLNECKLQKGGYNEFNECLSTTQSKILQCKASVKVVSKFSNSNKRKTRHTGEKHFKECGKSFQKFSHLTQHKNSSISMTTSPF

SEQ ID NO: 31026 - protein, 6 aa, Artificial Sequence
  Synthetic polypeptide
CVRGNS

SEQ ID NO: 31027 - protein, 116 aa, Artificial Sequence
  Synthetic polypeptide
VRAWELLTFRDVAIEFSPEEWKCLDPDQQNLYRDVMLENYRNLVSLGVAISNPDLVTCLEQRKEPYNVKIHKIVARPPEFFHLYDNKPILAFWRIASEKSQSASVYRQLTHRSRAT

SEQ ID NO: 31028 - protein, 477 aa, Artificial Sequence
  Synthetic polypeptide
VRAWELLTFRDVAIEFSPEEWKCLDPDQQNLYRDVMLENYRNLVSLGVAISNPDLVTCLEQRKEPYNVKIHKIVARPPAMCSHFTQDHWPVQGIEDSFHKLILRRYEKCGHDNLQLRKGCKSLNECKLQKGGYNEFNECLSTTQSKILQCKASVKVVSKFSNSNKRKTRHTGEKHFKECGKSFQKFSHLTQHKVIHAGEKPYTCEECGKAFKWSLIFNEHKRIHTGEKPFTCEECGSIFTTSSHFAKHKIIHTGEKPYKCEECGKAFNRFTTLTKHKRIHAGEKPITCEECRKIFTSSSNFAKHKRIHTGEKPYKCEECGKAFNRSTTLTKHKRIHTGEKPYTCEECGKAFRQSSKLNEHKKVHTGERPYKCDECGKAFGRSRVLNEHKKIHTGEKPYKCEECGKAFRRSTDRSQHKKIHSADKPYKCKECDKAFKQFSLLSQHKKIHTVDKPYKCKDCDKAFKRFSHLNKHKKIHT

SEQ ID NO: 31029 - protein, 231 aa, Artificial Sequence
  Synthetic polypeptide
PCPVRLLRVAVPEWHLLEYASVGAHSASLSSELLTFRDVAIEFSPEEWKCLDPDQQNLYRDVMLENYRNLVSLGVAISNPDLVTCLEQRKEPYNVKIHKIVARPPAMCSHFTQDHWPVQGIEDSFHKLILRRYEKCGHDNLQLRKGCKSLNECKLQKGGYNEFNECLSTTQSKILQCKASVKVVSKFSNSNKRKTRHTGEKHFKECGKSFQKFSHLTQHKNSSISMTTSPF

SEQ ID NO: 31030 - protein, 4 aa, Artificial Sequence
  Synthetic polypeptide
VLNS

SEQ ID NO: 31031 - protein, 143 aa, Artificial Sequence
  Synthetic polypeptide
PCPVRLLRVAVPEWHLLEYASVGAHSASLSSELLTFRDVAIEFSPEEWKCLDPDQQNLYRDVMLENYRNLVSLGVAISNPDLVTCLEQRKEPYNVKIHKIVARPPEFFHLYDNKPILAFWRIASEKSQSASVYRQLTHRSRAT

SEQ ID NO: 31032 - protein, 504 aa, Artificial Sequence
  Synthetic polypeptide
PCPVRLLRVAVPEWHLLEYASVGAHSASLSSELLTFRDVAIEFSPEEWKCLDPDQQNLYRDVMLENYRNLVSLGVAISNPDLVTCLEQRKEPYNVKIHKIVARPPAMCSHFTQDHWPVQGIEDSFHKLILRRYEKCGHDNLQLRKGCKSLNECKLQKGGYNEFNECLSTTQSKILQCKASVKVVSKFSNSNKRKTRHTGEKHFKECGKSFQKFSHLTQHKVIHAGEKPYTCEECGKAFKWSLIFNEHKRIHTGEKPFTCEECGSIFTTSSHFAKHKIIHTGEKPYKCEECGKAFNRFTTLTKHKRIHAGEKPITCEECRKIFTSSSNFAKHKRIHTGEKPYKCEECGKAFNRSTTLTKHKRIHTGEKPYTCEECGKAFRQSSKLNEHKKVHTGERPYKCDECGKAFGRSRVLNEHKKIHTGEKPYKCEECGKAFRRSTDRSQHKKIHSADKPYKCKECDKAFKQFSLLSQHKKIHTVDKPYKCKDCDKAFKRFSHLNKHKKIHT

SEQ ID NO: 31033 - protein, 49 aa, Artificial Sequence
  Synthetic polypeptide
VCLCRGVGQSFLSCFLFVPGLSTGTNTSELMGASSPLPAGSYRDGRGEL

SEQ ID NO: 31034 - protein, 27 aa, Artificial Sequence
  Synthetic polypeptide
AQGQTHQSSWEPVPHCQQGVTEMEEES

SEQ ID NO: 31035 - protein, 50 aa, Artificial Sequence
  Synthetic polypeptide
VGLSVQGCGSVVLKLLSVCARLEHRDKHIRAHGSQFPTASRELQRWKRRV

SEQ ID NO: 31036 - protein, 750 aa, Artificial Sequence
  Synthetic polypeptide
VCLCRGVGQSFLSCFLFVPGLSTGTNTSELMGASSPLPAGSYRDGRGELTGADLKDCVSNNSLSSNASLPSVQSCRRLRERRVASWAVSFERLLQDPVGVRYFSDFLRKEFSEENILFWQACEYFNHVPAHDKKELSYRAREIFSKFLCSKATTPVNIDSQAQLADDVLRAPHPDMFKEQQLQIFNLMKFDSYTRFLKSPLYQECILAEVEGRALPDSQQVPSSPASKHSLGSDHSSVSTPKKLSGKSKSGRSLNEELGDEDSEKKRKGAFFSWSRTRSTGRSQKKREHGDHADDALHANGGLCRRESQGSVSSAGSLDLSEACRTLAPEKDKATKHCCIHLPDGTSCVVAVKAGFSIKDILSGLCERHGINGAAADLFLVGGDKPLVLHQDSSILESRDLRLEKRTLFRLDLVPINRSVGLKAKPTKPVTEVLRPVVARYGLDLSGLLVRLSGEKEPLDLGAPISSLDGQRVVLEEKDPSRGKASADKQKGVPVKQNTAVNSSSRNHSATGEERTLGKSNSIKIKGENGKNARDPRLSKREESIAKIGKKKYQKINLDEAEEFFELISKAQSNRADDQRGLLRKEDLVLPEFLRLPPGSTELTLPTPAAVAKGFSKRSATGNGRESASQPGEQWEPVQESSDSPSTSPGSASSPPGPPGTTPPGQKSPSGPFCTPQSPVSLAQEGTAQIWKRQSQEVEAGGIQTVEDEHVAELTLMGEGDISSPNSTLLPPPSTPQEVPGPSRPGTSRF

SEQ ID NO: 31037 - protein, 80 aa, Artificial Sequence
  Synthetic polypeptide
VGLSVQGCGSVVLKLLSVCARLEHRDKHIRAHGSQFPTASRELQRWKRRVDGRRPEGLRQQQQPEQQCQPPQRAELPAPA

SEQ ID NO: 31038 - protein, 821 aa, Artificial Sequence
  Synthetic polypeptide
VCLCRGVGQSFLSCFLFVPGLSTGTNTSELMGASSPLPAGSYRDGRGELTGADLKDCVSNNSLSSNASLPSVQSCRRLRERRVASWAVSFERLLQDPVGVRYFSDFLRKEFSEENILFWQACEYFNHVPAHDKKELSYRAREIFSKFLCSKATTPVNIDSQAQLADDVLRAPHPDMFKEQQLQIFNLMKFDSYTRFLKSPLYQECILAEVEGRALPDSQQVPSSPASKHSLGSDHSSVSTPKKLSGKSKSGRSLNEELGDEDSEKKRKGAFFSWSRTRSTGRSQKKREHGDHADDALHANGGLCRRESQGSVSSAGSLDLSEACRTLAPEKDKATKHCCIHLPDGTSCVVAVKAGFSIKDILSGLCERHGINGAAADLFLVGGDKPLVLHQDSSILESRDLRLEKRTLFRLDLVPINRSVGLKAKPTKPVTEVLRPVVARYGLDLSGLLVRLSGEKEPLDLGAPISSLDGQRVVLEEKDPSRGKASADKQKGVPVKQNTAVNSSSRNHSATGEERTLGKSNSIKIKGENGKNARDPRLSKREESIAKIGKKKYQKINLDEAEEFFELISKAQSNRADDQRGLLRKEDLVLPEFLRLPPGSTELTLPTPAAVAKGFSKRSATGNGRESASQPGEQWEPVQESSDSPSTSPGSASSPPGPPGTTPPGQKSPSGPFCTPQSPVSLAQEGTAQIWKRQSQEVEAGGIQTVEDEHVAELTLMGEGDISSPNSTLLPPPSTPQEVPGPSRPGSGTHGSRDLPVNRIIDVDLVTGSAPGRDGGIAGAQAGPGRSQASGGPPTSDLPGLGPVPGEPAKPKTSAHHATFV

SEQ ID NO: 31039 - protein, 531 aa, Artificial Sequence
  Synthetic polypeptide
VCLCRGVGQSFLSCFLFVPGLSTGTNTSELMGASSPLPAGSYRDGRGELTGADLKDCVSNNSLSSNASLPSVQSCRRLRERRVASWAVSFERLLQDPVGVRYFSDFLRKEFSEENILFWQACEYFNHVPAHDKKELSYRAREIFSKFLCSKATTPVNIDSQAQLADDVLRAPHPDMFKEQQLQIFNLMKFDSYTRFLKSPLYQECILAEVEGRALPDSQQVPSSPASKHSLGSDHSSVSTPKKLSGKSKSGRSLNEELGDEDSEKKRKGAFFSWSRTRSTGRSQKKREHGDHADDALHANGGLCRRESQGSVSSAGSLDLSEACRTLAPEKDKATKHCCIHLPDGTSCVVAVKAGFSIKDILSGLCERHGINGAAADLFLVGGDKPLVLHQDSSILESRDLRLEKRTLFRLDLVPINRSVGLKAKPTKPVTEVLRPVVARYGLDLSGLLVRLSGEKEPLDLGAPISSLDGQRVVLEEKDPSRGKASADKQKGVPVKQNTAVNSSSRNHSATSFLSLFPKLRATEQMTNVGC

SEQ ID NO: 31040 - protein, 22 aa, Artificial Sequence
  Synthetic polypeptide
QGWGLCFVPCSIPVCRMHWQVS

SEQ ID NO: 31041 - protein, 7 aa, Artificial Sequence
  Synthetic polypeptide
NALAGEL

SEQ ID NO: 31042 - protein, 708 aa, Artificial Sequence
  Synthetic polypeptide
NALAGELTGADLKDCVSNNSLSSNASLPSVQSCRRLRERRVASWAVSFERLLQDPVGVRYFSDFLRKEFSEENILFWQACEYFNHVPAHDKKELSYRAREIFSKFLCSKATTPVNIDSQAQLADDVLRAPHPDMFKEQQLQIFNLMKFDSYTRFLKSPLYQECILAEVEGRALPDSQQVPSSPASKHSLGSDHSSVSTPKKLSGKSKSGRSLNEELGDEDSEKKRKGAFFSWSRTRSTGRSQKKREHGDHADDALHANGGLCRRESQGSVSSAGSLDLSEACRTLAPEKDKATKHCCIHLPDGTSCVVAVKAGFSIKDILSGLCERHGINGAAADLFLVGGDKPLVLHQDSSILESRDLRLEKRTLFRLDLVPINRSVGLKAKPTKPVTEVLRPVVARYGLDLSGLLVRLSGEKEPLDLGAPISSLDGQRVVLEEKDPSRGKASADKQKGVPVKQNTAVNSSSRNHSATGEERTLGKSNSIKIKGENGKNARDPRLSKREESIAKIGKKKYQKINLDEAEEFFELISKAQSNRADDQRGLLRKEDLVLPEFLRLPPGSTELTLPTPAAVAKGFSKRSATGNGRESASQPGEQWEPVQESSDSPSTSPGSASSPPGPPGTTPPGQKSPSGPFCTPQSPVSLAQEGTAQIWKRQSQEVEAGGIQTVEDEHVAELTLMGEGDISSPNSTLLPPPSTPQEVPGPSRPGTSRF

SEQ ID NO: 31043 - protein, 779 aa, Artificial Sequence
  Synthetic polypeptide
NALAGELTGADLKDCVSNNSLSSNASLPSVQSCRRLRERRVASWAVSFERLLQDPVGVRYFSDFLRKEFSEENILFWQACEYFNHVPAHDKKELSYRAREIFSKFLCSKATTPVNIDSQAQLADDVLRAPHPDMFKEQQLQIFNLMKFDSYTRFLKSPLYQECILAEVEGRALPDSQQVPSSPASKHSLGSDHSSVSTPKKLSGKSKSGRSLNEELGDEDSEKKRKGAFFSWSRTRSTGRSQKKREHGDHADDALHANGGLCRRESQGSVSSAGSLDLSEACRTLAPEKDKATKHCCIHLPDGTSCVVAVKAGFSIKDILSGLCERHGINGAAADLFLVGGDKPLVLHQDSSILESRDLRLEKRTLFRLDLVPINRSVGLKAKPTKPVTEVLRPVVARYGLDLSGLLVRLSGEKEPLDLGAPISSLDGQRVVLEEKDPSRGKASADKQKGVPVKQNTAVNSSSRNHSATGEERTLGKSNSIKIKGENGKNARDPRLSKREESIAKIGKKKYQKINLDEAEEFFELISKAQSNRADDQRGLLRKEDLVLPEFLRLPPGSTELTLPTPAAVAKGFSKRSATGNGRESASQPGEQWEPVQESSDSPSTSPGSASSPPGPPGTTPPGQKSPSGPFCTPQSPVSLAQEGTAQIWKRQSQEVEAGGIQTVEDEHVAELTLMGEGDISSPNSTLLPPPSTPQEVPGPSRPGSGTHGSRDLPVNRIIDVDLVTGSAPGRDGGIAGAQAGPGRSQASGGPPTSDLPGLGPVPGEPAKPKTSAHHATFV

SEQ ID NO: 31044 - protein, 489 aa, Artificial Sequence
  Synthetic polypeptide
NALAGELTGADLKDCVSNNSLSSNASLPSVQSCRRLRERRVASWAVSFERLLQDPVGVRYFSDFLRKEFSEENILFWQACEYFNHVPAHDKKELSYRAREIFSKFLCSKATTPVNIDSQAQLADDVLRAPHPDMFKEQQLQIFNLMKFDSYTRFLKSPLYQECILAEVEGRALPDSQQVPSSPASKHSLGSDHSSVSTPKKLSGKSKSGRSLNEELGDEDSEKKRKGAFFSWSRTRSTGRSQKKREHGDHADDALHANGGLCRRESQGSVSSAGSLDLSEACRTLAPEKDKATKHCCIHLPDGTSCVVAVKAGFSIKDILSGLCERHGINGAAADLFLVGGDKPLVLHQDSSILESRDLRLEKRTLFRLDLVPINRSVGLKAKPTKPVTEVLRPVVARYGLDLSGLLVRLSGEKEPLDLGAPISSLDGQRVVLEEKDPSRGKASADKQKGVPVKQNTAVNSSSRNHSATSFLSLFPKLRATEQMTNVGC

SEQ ID NO: 31045 - protein, 480 aa, Artificial Sequence
  Synthetic polypeptide
SQHFGRPRQADCLSSGVGDQPGQHDALHANGGLCRRESQGSVSSAGSLDLSEACRTLAPEKDKATKHCCIHLPDGTSCVVAVKAGFSIKDILSGLCERHGINGAAADLFLVGGDKPLVLHQDSSILESRDLRLEKRTLFRLDLVPINRSVGLKAKPTKPVTEVLRPVVARYGLDLSGLLVRLSGEKEPLDLGAPISSLDGQRVVLEEKDPSRGKASADKQKGVPVKQNTAVNSSSRNHSATGEERTLGKSNSIKIKGENGKNARDPRLSKREESIAKIGKKKYQKINLDEAEEFFELISKAQSNRADDQRGLLRKEDLVLPEFLRLPPGSTELTLPTPAAVAKGFSKRSATGNGRESASQPGEQWEPVQESSDSPSTSPGSASSPPGPPGTTPPGQKSPSGPFCTPQSPVSLAQEGTAQIWKRQSQEVEAGGIQTVEDEHVAELTLMGEGDISSPNSTLLPPPSTPQEVPGPSRPGTSRF

SEQ ID NO: 31046 - protein, 119 aa, Artificial Sequence
  Synthetic polypeptide
AQELVTSLGNMTPCMPMEACVAESRRALCPLRGAWTCRRPAGLWHPRRTRPPSTAAFISRMGHPAWWLSRRASPSKTSCPDSVSGMASTGRPRTSSWWAGTSLWCCTKTVASWSQGTCA

SEQ ID NO: 31047 - protein, 551 aa, Artificial Sequence
  Synthetic polypeptide
SQHFGRPRQADCLSSGVGDQPGQHDALHANGGLCRRESQGSVSSAGSLDLSEACRTLAPEKDKATKHCCIHLPDGTSCVVAVKAGFSIKDILSGLCERHGINGAAADLFLVGGDKPLVLHQDSSILESRDLRLEKRTLFRLDLVPINRSVGLKAKPTKPVTEVLRPVVARYGLDLSGLLVRLSGEKEPLDLGAPISSLDGQRVVLEEKDPSRGKASADKQKGVPVKQNTAVNSSSRNHSATGEERTLGKSNSIKIKGENGKNARDPRLSKREESIAKIGKKKYQKINLDEAEEFFELISKAQSNRADDQRGLLRKEDLVLPEFLRLPPGSTELTLPTPAAVAKGFSKRSATGNGRESASQPGEQWEPVQESSDSPSTSPGSASSPPGPPGTTPPGQKSPSGPFCTPQSPVSLAQEGTAQIWKRQSQEVEAGGIQTVEDEHVAELTLMGEGDISSPNSTLLPPPSTPQEVPGPSRPGSGTHGSRDLPVNRIIDVDLVTGSAPGRDGGIAGAQAGPGRSQASGGPPTSDLPGLGPVPGEPAKPKTSAHHATFV

SEQ ID NO: 31048 - protein, 261 aa, Artificial Sequence
  Synthetic polypeptide
SQHFGRPRQADCLSSGVGDQPGQHDALHANGGLCRRESQGSVSSAGSLDLSEACRTLAPEKDKATKHCCIHLPDGTSCVVAVKAGFSIKDILSGLCERHGINGAAADLFLVGGDKPLVLHQDSSILESRDLRLEKRTLFRLDLVPINRSVGLKAKPTKPVTEVLRPVVARYGLDLSGLLVRLSGEKEPLDLGAPISSLDGQRVVLEEKDPSRGKASADKQKGVPVKQNTAVNSSSRNHSATSFLSLFPKLRATEQMTNVGC

SEQ ID NO: 31049 - protein, 17 aa, Artificial Sequence
  Synthetic polypeptide
HSEQWFATVHKSAHHHC

SEQ ID NO: 31050 - protein, 17 aa, Artificial Sequence
  Synthetic polypeptide
TLNSGLLLSTKVLIITV

SEQ ID NO: 31051 - protein, 14 aa, Artificial Sequence
  Synthetic polypeptide
TVVCYCPQKCSSSL

SEQ ID NO: 31052 - protein, 21 aa, Artificial Sequence
  Synthetic polypeptide
NTVQKQLASLKFTSSVLTPKK

SEQ ID NO: 31053 - protein, 17 aa, Artificial Sequence
  Synthetic polypeptide
TCHSLLAEIQFRNNWPV

SEQ ID NO: 31054 - protein, 878 aa, Artificial Sequence
  Synthetic polypeptide
PATLCWLKYSSETIGQSEVYLISPDTKKIALEKNFKEISFCSQGIRHVDHFGFICRESSGGGGFHFVCYVFQCTNEALVDEIMMTLKQAFTVAAVQQTAKAPAQLCEGCPLQSLHKLCERIEGMNSSKTKLELQKHLTTLTNQEQATIFEEVQKLRPRNEQRENELIISFLRCLYEEKQKEHIHIGEMKQTSQMAAENIGSELPPSATRFRLDMLKNKAKRSLTESLESILSRGNKARGLQEHSISVDLDSSLSSTLSNTSKEPSVCEKEALPISESSFKLLGSSEDLSSDSESHLPEEPAPLSPQQAFRRRANTLSHFPIECQEPPQPARGSPGVSQRKLMRYHSVSTETPHERNVDPSPVGESKHRPGQSSAPAPPPRLNPSASSPNFFKYLKHNSSGEQSGNAVPKSISYRNALRKKLHSSSSVPNFLKFLAPVDENNTSDFMNTKRDFESKANHLGDSGGTPVKTRRHSWRQQIFLRVATPQKACDSSSRYEDYSELGELPPRSPLEPVCEDGPFGPPPEEKKRTSRELRELWQKAILQQILLLRMEKENQKLQASENDLLNKRLKLDYEEITPCLKEVTTVWEKMLSTPGRSKIKFDMEKMHSAVGQGVPRHHRGEIWKFLAEQFHLKHQFPSKQQPKDVPYKELLKQLTSQQHAILIDLGRTFPTHPYFSAQLGAGQLSLYNILKAYSLLDQEVGYCQGLSFVAGILLLHMSEEEAFKMLKFLMFDMGLRKQYRPDMIILQMEKTINQVFEMDIAKQLQAYEVEYHVLQEELIDSSPLSDNQRMDKLEKTNSSLRKQNLDLLEQLQVANGRIQSLEATIEKLLSSESKLKQAMLTLELERSALLQTVEELRRRSAEPSDREPECTQPEPTGD

SEQ ID NO: 31055 - protein, 887 aa, Artificial Sequence
  Synthetic polypeptide
PATLCWLKYSSETIGQSEVYLISPDTKKIALEKNFKEISFCSQGIRHVDHFGFICRESSGGGGFHFVCYVFQCTNEALVDEIMMTLKQAFTVAAVQQTAKAPAQLCEGCPLQSLHKLCERIEGMNSSKTKLELQKHLTTLTNQEQATIFEEVQKLRPRNEQRENELIISFLRCLYEEKQKEHIHIGEMKQTSQMAAENIGSELPPSATRFRLDMLKNKAKRSLTESLESILSRGNKARGLQEHSISVDLDSSLSSTLSNTSKEPSVCEKEALPISESSFKLLGSSEDLSSDSESHLPEEPAPLSPQQAFRRRANTLSHFPIECQEPPQPARGSPGVSQRKLMRYHSVSTETPHERKDFESKANHLGDSGGTPVKTRRHSWRQQIFLRVATPQKACDSSSRYEDYSELGELPPRSPLEPVCEDGPFGPPPEEKKRTSRELRELWQKAILQQILLLRMEKENQKLQASENDLLNKRLKLDYEEITPCLKEVTTVWEKMLSTPGRSKIKFDMEKMHSAVGQGVPRHHRGEIWKFLAEQFHLKHQFPSKQQPKDVPYKELLKQLTSQQHAILIDLGRTFPTHPYFSAQLGAGQLSLYNILKAYSLLDQEVGYCQGLSFVAGILLLHMSEEEAFKMLKFLMFDMGLRKQYRPDMIILQIQMYQLSRLLHDYHRDLYNHLEEHEIGPSLYAAPWFLTMFASQFPLGFVARVFDMIFLQGTEVIFKVALSLLGSHKPLILQHENLETIVDFIKSTLPNLGLVQMEKTINQVFEMDIAKQLQAYEVEYHVLQEELIDSSPLSDNQRMDKLEKTNSSLRKQNLDLLEQLQVANGRIQSLEATIEKLLSSESKLKQAMLTLELERSALLQTVEELRRRSAEPSDREPECTQPEPTGD

SEQ ID NO: 31056 - protein, 447 aa, Artificial Sequence
  Synthetic polypeptide
PATLCWLKYSSETIGQSEVYLISPDTKKIALEKNFKEISFCSQGIRHVDHFGFICRESSGGGGFHFVCYVFQCTNEALVDEIMMTLKQAFTVAAVQQTAKAPAQLCEGCPLQSLHKLCERIEGMNSSKTKLELQKHLTTLTNQEQATIFEEVQKLRPRNEQRENELIISFLRCLYEEKQKEHIHIGEMKQTSQMAAENIGSELPPSATRFRLDMLKNKAKRSLTESLESILSRGNKARGLQEHSISVDLDSSLSSTLSNTSKEPSVCEKEALPISESSFKLLGSSEDLSSDSESHLPEEPAPLSPQQAFRRRANTLSHFPIECQEPPQPARGSPGVSQRKLMRYHSVSTETPHERKDFESKANHLGDSGGTPVKTRRHSWRQQIFLRVATPQKACDSSSRYEDYSELGELPPRSPLEPVCEDGPFGPPPEEKKRTSRELRELWQKAI

SEQ ID NO: 31057 - protein, 39 aa, Artificial Sequence
  Synthetic polypeptide
GWARSLTPVIPALWEAEQRPRRGCLWIKSRKCFPQFQNY

SEQ ID NO: 31058 - protein, 30 aa, Artificial Sequence
  Synthetic polypeptide
SQHFGRLSRDHAEAAFGSSPGSASPNSRTI

SEQ ID NO: 31059 - protein, 22 aa, Artificial Sequence
  Synthetic polypeptide
WHTPVVPATQEAKFLSGEDQWK

SEQ ID NO: 31060 - protein, 20 aa, Artificial Sequence
  Synthetic polypeptide
SQLLRRLSSYQERINGSESK

SEQ ID NO: 31061 - protein, 1066 aa, Artificial Sequence
  Synthetic polypeptide
KRTENRRKFGTLRMKEEQQKCIKIQDLVDLKDMYVILNLDEENKGLGTLSWTDDGQLLALSTQRGSLHVFLTKLPILGDACSTRIAYLTSLLEVTVANPVEGELPITVSVDVEPNFVAVGLYHLAVGMNNRAWFYVLGENAVKKLKDMEYLGTVASICLHSDYAAALFEGKVQLHLIESEILDAQEERETRLFPAVDDKCRILCHALTSDFLIYGTDTGVVQYFYIEDWQFVNDYRHPVSVKKIFPDPNGTRLVFIDEKSDGFVYCPVNDATYEIPDFSPTIKGVLWENWPMDKGVFIAYDDDKVYTYVFHKDTIQGAKVILAGSTKVPFAHKPLLLYNGELTCQTQSGKVNNIYLSTHGFLSNLKDTGPDELRPMLAQNLMLKRFSDAWEMCRILNDEAAWNELARACLHHMEVEFAIRVYRRIGNVGIVMSLEQIKGIEDYNLLAGHLAMFTNDYNLAQDLYLASSCPIAALEMRRDLQHWDSALQLAKHLAPDQIPFISKEYAIQLEFAGDYVNALAHYEKGITGDNKEHDEACLAGVAQMSIRMGDIRRGVNQALKHPSRVLKRDCGAILENMKQFSEAAQLYEKGLYYDKAASVYIRSKNWAKVGDLLPHVSSPKIHLQYAKAKEADGRYKEAVVAYENAKQWQSVIRIYLDHLNNPEKAVNIVRETQSLDGAKMVARFFLQLGDYGSAIQFLVMSKCNNEAFTLAQQHNKMEIYADIIGSEDTTNEDYQSIALYFEGEKRYLQAGKFFLLCGQYSRALKHFLKCPSSEDNVAIEMAIETVGQAKDELLTNQLIDHLLGENDGMPKDAKYLFRLYMALKQYREAAQTAIIIAREEQSAGNYRNAHDVLFSMYAELKSQKIKIPSEMATNLMILHSYILVKIHVKNGDHMKGARMLIRVANNISKFPSHIVPILTSTVIECHRAGLKNSAFSFAAMLMRPEYRSKIDAKYKKKIEGMVRRPDISEIEEATTPCPFCKFLLPECELLCPGCKNSIPYCIATGRHMLKDDWTVCPHCDFPALYSELKIMLNTESTCPMCSERLNAAQLKKISDCTQYLRTEEEL

SEQ ID NO: 31062 - protein, 15 aa, Artificial Sequence
  Synthetic polypeptide
RKSNRNALKSKTWLT

SEQ ID NO: 31063 - protein, 18 aa, Artificial Sequence
  Synthetic polypeptide
EQKEIWDIKNEGRATEMH

SEQ ID NO: 31064 - protein, 205 aa, Artificial Sequence
  Synthetic polypeptide
KRTENRRKFGTLRMKEEQQKCIKIQDLVDLKDMYVILNLDEENKGLGTLSWTDDGQLLALSTQRGSLHVFLTKLPILGDACSTRIAYLTSLLEVTVANPVEGELPITVSVDVEPNFVAVGLYHLAVGMNNRAWFYVLGENAVKKLKDMEYLGTVASICLHSDYAAALFEGKVQLHLKAKSWMLKKNVRLGFSQQWMISAVSYAMP

SEQ ID NO: 31065 - protein, 788 aa, Artificial Sequence
  Synthetic polypeptide
IEKTVHSVSPEDSEKKRTNYQAYRSYLNREGPKALGSKEIPKGAENCLEGLIFVITGVLESIERDEAKSLIERYGGKVTGNVSKKTNYLVMGRDSGQSKSDKAAALGTKIIDEDGLLNLIRTMPGKKSKYEIAVETEMKKESKLERTPQKNVQGKRKISPSKKESESKKSRPTSKRDSLAKTIKKETDVFWKSLDFKEQVAEETSGDSKARNLADDSSENKVENLLWVDKYKPTSLKTIIGQQGDQSCANKLLRWLRNWQKSSSEDKKHAKFGKFSGKDDGSSFKAALLSGPPGVGKTTTASLVCQELGYSYVELNASDTRSKSSLKAIVAESLNNTSIKGFYSNGAASSVSTKHALIMDEVDGMAGNEDRGGIQELIGLIKHTKIPIICMCNDRNHPKIRSLVHYCFDLRFQRPRVEQIKGAMMSIAFKEGLKIPPPAMNEIILGANQDIRQVLHNLSMWCARSKALTYDQAKADSHRAKKDIKMGPFDVARKVFAAGEETAHMSLVDKSDLFFHDYSIAPLFVQENYIHVKPVAAGGDMKKHLMLLSRAADSICDGDLVDSQIRSKQNWSLLPAQAIYASVLPGELMRGYMTQFPTFPSWLGKHSSTGKHDRIVQDLALHMSLRTYSSKRTVNMDYLSLLRDALVQPLTSQGVDGVQDVVALMDTYYLMKEDFENIMEISSWGGKPSPFSKLDPKVKAAFTRAYNKEAHLTPYSLQAIKASRHSTSPSLDSEYNEELNEDDSQSDEKDQDAIETDAMIKKKTKSSKPSKPEKDKEPRKGKGKSSKK

SEQ ID NO: 31066 - protein, 6 aa, Artificial Sequence
  Synthetic polypeptide
KKQYIL

SEQ ID NO: 31067 - protein, 9 aa, Artificial Sequence
  Synthetic polypeptide
RKNSTFCKS

SEQ ID NO: 31068 - protein, 789 aa, Artificial Sequence
  Synthetic polypeptide
IEKTVHSVSPEDSEKKRTNYQAYRSYLNREGPKALGSKEIPKGAENCLEGLIFVITGVLESIERDEAKSLIERYGGKVTGNVSKKTNYLVMGRDSGQSKSDKAAALGTKIIDEDGLLNLIRTMPGKKSKYEIAVETEMKKESKLERTPQKNVQGKRKISPSKKESESKKSRPTSKRDSLAKTIKKETDVFWKSLDFKEQVAEETSGDSKARNLADDSSENKVENLLWVDKYKPTSLKTIIGQQGDQSCANKLLRWLRNWQKSSSEDKKHAAKFGKFSGKDDGSSFKAALLSGPPGVGKTTTASLVCQELGYSYVELNASDTRSKSSLKAIVAESLNNTSIKGFYSNGAASSVSTKHALIMDEVDGMAGNEDRGGIQELIGLIKHTKIPIICMCNDRNHPKIRSLVHYCFDLRFQRPRVEQIKGAMMSIAFKEGLKIPPPAMNEIILGANQDIRQVLHNLSMWCARSKALTYDQAKADSHRAKKDIKMGPFDVARKVFAAGEETAHMSLVDKSDLFFHDYSIAPLFVQENYIHVKPVAAGGDMKKHLMLLSRAADSICDGDLVDSQIRSKQNWSLLPAQAIYASVLPGELMRGYMTQFPTFPSWLGKHSSTGKHDRIVQDLALHMSLRTYSSKRTVNMDYLSLLRDALVQPLTSQGVDGVQDVVALMDTYYLMKEDFENIMEISSWGGKPSPFSKLDPKVKAAFTRAYNKEAHLTPYSLQAIKASRHSTSPSLDSEYNEELNEDDSQSDEKDQDAIETDAMIKKKTKSSKPSKPEKDKEPRKGKGKSSKK

SEQ ID NO: 31069 - protein, 15 aa, Artificial Sequence
  Synthetic polypeptide
ATRTAAAGTFGNSLE

SEQ ID NO: 31070 - protein, 63 aa, Artificial Sequence
  Synthetic polypeptide
PEGNRESLQSECEFPQAPPSRHLELKYPVVLDKLERSSRPQELQLLGHSEILWSNTKWKETCK

SEQ ID NO: 31071 - protein, 1167 aa, Artificial Sequence
  Synthetic polypeptide
STLWSWINLKDRLGHKNCSCWDIRKFFGVIPSGKKLVSETVKKNEKTKSDEETLKAKKGIKEIKVNSSRKEDDFKQKQPSKKKRIIYDSDSESEETLQVKNAKKPPEKLPVSSKPGKISRQDPVTYISETDEEDDFMCKKAASKSKENGRSTNSHLGTSNMKKNEENTKTKNKPLSPIKLTPTSVLDYFGTGSVQRSNKKMVASKRKELSQNTDESGLNDEAIAKQLQLDEDAELERQLHEDEEFARTLAMLDEEPKTKKARKDTEAGETFSSVQANLSKAEKHKYPHKVKTAQVSDERKSYSPRKQSKYESSKESQQHSKSSADKIGEVSSPKASSKLAIMKRKEESSYKEIEPVASKRKENAIKLKGETKTPKKTKSSPAKKESVSPEDSEKKRTNYQAYRSYLNREGPKALGSKEIPKGAENCLEGLIFVITGVLESIERDEAKSLIERYGGKVTGNVSKKTNYLVMGRDSGQSKSDKAAALGTKIIDEDGLLNLIRTMPGKKSKYEIAVETEMKKESKLERTPQKNVQGKRKISPSKKESESKKSRPTSKRDSLAKTIKKETDVFWKSLDFKEQVAEETSGDSKARNLADDSSENKVENLLWVDKYKPTSLKTIIGQQGDQSCANKLLRWLRNWQKSSSEDKKHAKFGKFSGKDDGSSFKAALLSGPPGVGKTTTASLVCQELGYSYVELNASDTRSKSSLKAIVAESLNNTSIKGFYSNGAASSVSTKHALIMDEVDGMAGNEDRGGIQELIGLIKHTKIPIICMCNDRNHPKIRSLVHYCFDLRFQRPRVEQIKGAMMSIAFKEGLKIPPPAMNEIILGANQDIRQVLHNLSMWCARSKALTYDQAKADSHRAKKDIKMGPFDVARKVFAAGEETAHMSLVDKSDLFFHDYSIAPLFVQENYIHVKPVAAGGDMKKHLMLLSRAADSICDGDLVDSQIRSKQNWSLLPAQAIYASVLPGELMRGYMTQFPTFPSWLGKHSSTGKHDRIVQDLALHMSLRTYSSKRTVNMDYLSLLRDALVQPLTSQGVDGVQDVVALMDTYYLMKEDFENIMEISSWGGKPSPFSKLDPKVKAAFTRAYNKEAHLTPYSLQAIKASRHSTSPSLDSEYNEELNEDDSQSDEKDQDAIETDAMIKKKTKSSKPSKPEKDKEPRKGKGKSSKK

SEQ ID NO: 31072 - protein, 1168 aa, Artificial Sequence
  Synthetic polypeptide
STLWSWINLKDRLGHKNCSCWDIRKFFGVIPSGKKLVSETVKKNEKTKSDEETLKAKKGIKEIKVNSSRKEDDFKQKQPSKKKRIIYDSDSESEETLQVKNAKKPPEKLPVSSKPGKISRQDPVTYISETDEEDDFMCKKAASKSKENGRSTNSHLGTSNMKKNEENTKTKNKPLSPIKLTPTSVLDYFGTGSVQRSNKKMVASKRKELSQNTDESGLNDEAIAKQLQLDEDAELERQLHEDEEFARTLAMLDEEPKTKKARKDTEAGETFSSVQANLSKAEKHKYPHKVKTAQVSDERKSYSPRKQSKYESSKESQQHSKSSADKIGEVSSPKASSKLAIMKRKEESSYKEIEPVASKRKENAIKLKGETKTPKKTKSSPAKKESVSPEDSEKKRTNYQAYRSYLNREGPKALGSKEIPKGAENCLEGLIFVITGVLESIERDEAKSLIERYGGKVTGNVSKKTNYLVMGRDSGQSKSDKAAALGTKIIDEDGLLNLIRTMPGKKSKYEIAVETEMKKESKLERTPQKNVQGKRKISPSKKESESKKSRPTSKRDSLAKTIKKETDVFWKSLDFKEQVAEETSGDSKARNLADDSSENKVENLLWVDKYKPTSLKTIIGQQGDQSCANKLLRWLRNWQKSSSEDKKHAAKFGKFSGKDDGSSFKAALLSGPPGVGKTTTASLVCQELGYSYVELNASDTRSKSSLKAIVAESLNNTSIKGFYSNGAASSVSTKHALIMDEVDGMAGNEDRGGIQELIGLIKHTKIPIICMCNDRNHPKIRSLVHYCFDLRFQRPRVEQIKGAMMSIAFKEGLKIPPPAMNEIILGANQDIRQVLHNLSMWCARSKALTYDQAKADSHRAKKDIKMGPFDVARKVFAAGEETAHMSLVDKSDLFFHDYSIAPLFVQENYIHVKPVAAGGDMKKHLMLLSRAADSICDGDLVDSQIRSKQNWSLLPAQAIYASVLPGELMRGYMTQFPTFPSWLGKHSSTGKHDRIVQDLALHMSLRTYSSKRTVNMDYLSLLRDALVQPLTSQGVDGVQDVVALMDTYYLMKEDFENIMEISSWGGKPSPFSKLDPKVKAAFTRAYNKEAHLTPYSLQAIKASRHSTSPSLDSEYNEELNEDDSQSDEKDQDAIETDAMIKKKTKSSKPSKPEKDKEPRKGKGKSSKK

SEQ ID NO: 31073 - protein, 150 aa, Artificial Sequence
  Synthetic polypeptide
STLWSWINLKDRLGHKNCSCWDIRKFFGVIPSGKKLVSETVKKNEKTKSDEETLKAKKGIKEIKVNSSRKEDDFKQKQPSKKKRIIYDSDSESEETLQVKNAKKPPEKLPVSSKPGKISRQDPVTYISETEETITGIIRDAVRERARPSA

SEQ ID NO: 31074 - protein, 152 aa, Artificial Sequence
  Synthetic polypeptide
STLWSWINLKDRLGHKNCSCWDIRKFFGVIPSGKKLVNSSRKEDDFKQKQPSKKKRIIYDSDSESEETLQVKNAKKPPEKLPVSSKPGKISRQDPVTYISETDEEDDFMCKKAASKSKENGRSTNSHLGTSNMKKNEENTKTKNKPLSPIKL

SEQ ID NO: 31075 - protein, 457 aa, Artificial Sequence
  Synthetic polypeptide
GQVWWLVRVIPELWEAKAGLKEVVESCRGKNLFFSTNIDDAIKEADLVFISVNTPTKTYGMGKGRAADLKYIEACARRIVQNSNGYKIVTEKSTVPVRAAESIRRIFDANTKPNLNLQVLSNPEFLAEGTAIKDLKNPDRVLIGGDETPEGQRAVQALCAVYEHWVPREKILTTNTWSSELSKLAANAFLAQRISSINSISALCEATGADVEEVATAIGMDQRIGNKFLKASVGFGGSCFQKDVLNLVYLCEALNLPEVARYWQQVIDMNDYQRRRFASRIIDSLFNTVTDKKIAILGFAFKKDTGDTRESSSIYISKYLMDEGAHLHIYDPKVPREQIVVDLSHPGVSEDDQVSRLVTISKDPYEACDGAHAVVICTEWDMFKELDYERIHKKMLKPAFIFDGRRVLDGLHNELQTIGFQIETIGKKVSSKRIPYAPSGEIPKFSLQDPPNKKPKV

SEQ ID NO: 31076 - protein, 10 aa, Artificial Sequence
  Synthetic polypeptide
SQNFGRPRQD

SEQ ID NO: 31077 - protein, 37 aa, Artificial Sequence
  Synthetic polypeptide
PGVVACACNPRTLGGQGRTKRSGRILSRKKSFFFYQY

SEQ ID NO: 31078 - protein, 390 aa, Artificial Sequence
  Synthetic polypeptide
GQVWWLVRVIPELWEAKAGLKEVVESCRGKNLFFSTNIDDAIKEADLVFISVLSNPEFLAEGTAIKDLKNPDRVLIGGDETPEGQRAVQALCAVYEHWVPREKILTTNTWSSELSKLAANAFLAQRISSINSISALCEATGADVEEVATAIGMDQRIGNKFLKASVGFGGSCFQKDVLNLVYLCEALNLPEVARYWQQVIDMNDYQRRRFASRIIDSLFNTVTDKKIAILGFAFKKDTGDTRESSSIYISKYLMDEGAHLHIYDPKVPREQIVVDLSHPGVSEDDQVSRLVTISKDPYEACDGAHAVVICTEWDMFKELDYERIHKKMLKPAFIFDGRRVLDGLHNELQTIGFQIETIGKKVSSKRIPYAPSGEIPKFSLQDPPNKKPKV

SEQ ID NO: 31079 - protein, 131 aa, Artificial Sequence
  Synthetic polypeptide
GQVWWLVRVIPELWEAKAGLKEVVESCRGKNLFFSTNIDDAIKEADLVFISVNTPTKTYGMGKGRAADLKYIEACARRIVQNSNGYKIVTEKSTVPVRAAESIRRIFDANTKPNLNLQVLSNPEFLAEGTA

SEQ ID NO: 31080 - protein, 116 aa, Artificial Sequence
  Synthetic polypeptide
GQVWWLVRVIPELWEAKAGLKEVVESCRGKNLFFSTNIDDAIKEADLVFISVNTPTKTYGMGKGRAADLKYIEACARRIVQNSNGYKIVTEKSTVPVRAAESIRRIFDANTKPNLN

SEQ ID NO: 31081 - protein, 20 aa, Artificial Sequence
  Synthetic polypeptide
GQVWWLVRVIPELWEAKAGL

SEQ ID NO: 31082 - protein, 19 aa, Artificial Sequence
  Synthetic polypeptide
PGVVACACNPRTLGGQGRT

SEQ ID NO: 31083 - protein, 93 aa, Artificial Sequence
  Synthetic polypeptide
GQVWWLVRVIPELWEAKAGLKEVVESCRGKNLFFSTNIDDAIKEADLVFISVNTPTKTYGMGKGRAADLKYIEACARRIVQNSNGYKIVTEKS

SEQ ID NO: 31084 - protein, 47 aa, Artificial Sequence
  Synthetic polypeptide
GQVWWLVRVIPELWEAKAGLKEVVESCRGKNLFFSTNIDDAIKEADL

SEQ ID NO: 31085 - protein, 442 aa, Artificial Sequence
  Synthetic polypeptide
GQPGLKEVVESCRGKNLFFSTNIDDAIKEADLVFISVNTPTKTYGMGKGRAADLKYIEACARRIVQNSNGYKIVTEKSTVPVRAAESIRRIFDANTKPNLNLQVLSNPEFLAEGTAIKDLKNPDRVLIGGDETPEGQRAVQALCAVYEHWVPREKILTTNTWSSELSKLAANAFLAQRISSINSISALCEATGADVEEVATAIGMDQRIGNKFLKASVGFGGSCFQKDVLNLVYLCEALNLPEVARYWQQVIDMNDYQRRRFASRIIDSLFNTVTDKKIAILGFAFKKDTGDTRESSSIYISKYLMDEGAHLHIYDPKVPREQIVVDLSHPGVSEDDQVSRLVTISKDPYEACDGAHAVVICTEWDMFKELDYERIHKKMLKPAFIFDGRRVLDGLHNELQTIGFQIETIGKKVSSKRIPYAPSGEIPKFSLQDPPNKKPKV

SEQ ID NO: 31086 - protein, 4 aa, Artificial Sequence
  Synthetic polypeptide
ASQD

SEQ ID NO: 31087 - protein, 22 aa, Artificial Sequence
  Synthetic polypeptide
PARTKRSGRILSRKKSFFFYQY

SEQ ID NO: 31088 - protein, 375 aa, Artificial Sequence
  Synthetic polypeptide
GQPGLKEVVESCRGKNLFFSTNIDDAIKEADLVFISVLSNPEFLAEGTAIKDLKNPDRVLIGGDETPEGQRAVQALCAVYEHWVPREKILTTNTWSSELSKLAANAFLAQRISSINSISALCEATGADVEEVATAIGMDQRIGNKFLKASVGFGGSCFQKDVLNLVYLCEALNLPEVARYWQQVIDMNDYQRRRFASRIIDSLFNTVTDKKIAILGFAFKKDTGDTRESSSIYISKYLMDEGAHLHIYDPKVPREQIVVDLSHPGVSEDDQVSRLVTISKDPYEACDGAHAVVICTEWDMFKELDYERIHKKMLKPAFIFDGRRVLDGLHNELQTIGFQIETIGKKVSSKRIPYAPSGEIPKFSLQDPPNKKPKV

SEQ ID NO: 31089 - protein, 116 aa, Artificial Sequence
  Synthetic polypeptide
GQPGLKEVVESCRGKNLFFSTNIDDAIKEADLVFISVNTPTKTYGMGKGRAADLKYIEACARRIVQNSNGYKIVTEKSTVPVRAAESIRRIFDANTKPNLNLQVLSNPEFLAEGTA

SEQ ID NO: 31090 - protein, 101 aa, Artificial Sequence
  Synthetic polypeptide
GQPGLKEVVESCRGKNLFFSTNIDDAIKEADLVFISVNTPTKTYGMGKGRAADLKYIEACARRIVQNSNGYKIVTEKSTVPVRAAESIRRIFDANTKPNLN

SEQ ID NO: 31091 - protein, 78 aa, Artificial Sequence
  Synthetic polypeptide
GQPGLKEVVESCRGKNLFFSTNIDDAIKEADLVFISVNTPTKTYGMGKGRAADLKYIEACARRIVQNSNGYKIVTEKS

SEQ ID NO: 31092 - protein, 32 aa, Artificial Sequence
  Synthetic polypeptide
GQPGLKEVVESCRGKNLFFSTNIDDAIKEADL

SEQ ID NO: 31093 - protein, 487 aa, Artificial Sequence
  Synthetic polypeptide
GQAQWLMPVIPALSEAEAGGSLKARSSRPAWPTWKNPVSTKNTKISQPGLKEVVESCRGKNLFFSTNIDDAIKEADLVFISVNTPTKTYGMGKGRAADLKYIEACARRIVQNSNGYKIVTEKSTVPVRAAESIRRIFDANTKPNLNLQVLSNPEFLAEGTAIKDLKNPDRVLIGGDETPEGQRAVQALCAVYEHWVPREKILTTNTWSSELSKLAANAFLAQRISSINSISALCEATGADVEEVATAIGMDQRIGNKFLKASVGFGGSCFQKDVLNLVYLCEALNLPEVARYWQQVIDMNDYQRRRFASRIIDSLFNTVTDKKIAILGFAFKKDTGDTRESSSIYISKYLMDEGAHLHIYDPKVPREQIVVDLSHPGVSEDDQVSRLVTISKDPYEACDGAHAVVICTEWDMFKELDYERIHKKMLKPAFIFDGRRVLDGLHNELQTIGFQIETIGKKVSSKRIPYAPSGEIPKFSLQDPPNKKPKV

SEQ ID NO: 31094 - protein, 40 aa, Artificial Sequence
  Synthetic polypeptide
SQHFRRLRRVDRLRPGVRDQPGQHGKTPSLPKIQKLASQD

SEQ ID NO: 31095 - protein, 22 aa, Artificial Sequence
  Synthetic polypeptide
PARTKRSGRILSRKKSFFFYQY

SEQ ID NO: 31096 - protein, 420 aa, Artificial Sequence
  Synthetic polypeptide
GQAQWLMPVIPALSEAEAGGSLKARSSRPAWPTWKNPVSTKNTKISQPGLKEVVESCRGKNLFFSTNIDDAIKEADLVFISVLSNPEFLAEGTAIKDLKNPDRVLIGGDETPEGQRAVQALCAVYEHWVPREKILTTNTWSSELSKLAANAFLAQRISSINSISALCEATGADVEEVATAIGMDQRIGNKFLKASVGFGGSCFQKDVLNLVYLCEALNLPEVARYWQQVIDMNDYQRRRFASRIIDSLFNTVTDKKIAILGFAFKKDTGDTRESSSIYISKYLMDEGAHLHIYDPKVPREQIVVDLSHPGVSEDDQVSRLVTISKDPYEACDGAHAVVICTEWDMFKELDYERIHKKMLKPAFIFDGRRVLDGLHNELQTIGFQIETIGKKVSSKRIPYAPSGEIPKFSLQDPPNKKPKV

SEQ ID NO: 31097 - protein, 161 aa, Artificial Sequence
  Synthetic polypeptide
GQAQWLMPVIPALSEAEAGGSLKARSSRPAWPTWKNPVSTKNTKISQPGLKEVVESCRGKNLFFSTNIDDAIKEADLVFISVNTPTKTYGMGKGRAADLKYIEACARRIVQNSNGYKIVTEKSTVPVRAAESIRRIFDANTKPNLNLQVLSNPEFLAEGTA

SEQ ID NO: 31098 - protein, 146 aa, Artificial Sequence
  Synthetic polypeptide
GQAQWLMPVIPALSEAEAGGSLKARSSRPAWPTWKNPVSTKNTKISQPGLKEVVESCRGKNLFFSTNIDDAIKEADLVFISVNTPTKTYGMGKGRAADLKYIEACARRIVQNSNGYKIVTEKSTVPVRAAESIRRIFDANTKPNLN

SEQ ID NO: 31099 - protein, 123 aa, Artificial Sequence
  Synthetic polypeptide
GQAQWLMPVIPALSEAEAGGSLKARSSRPAWPTWKNPVSTKNTKISQPGLKEVVESCRGKNLFFSTNIDDAIKEADLVFISVNTPTKTYGMGKGRAADLKYIEACARRIVQNSNGYKIVTEKS

SEQ ID NO: 31100 - protein, 77 aa, Artificial Sequence
  Synthetic polypeptide
GQAQWLMPVIPALSEAEAGGSLKARSSRPAWPTWKNPVSTKNTKISQPGLKEVVESCRGKNLFFSTNIDDAIKEADL

SEQ ID NO: 31101 - protein, 173 aa, Artificial Sequence
  Synthetic polypeptide
PTCTIMFEIKKICCIGAGYVGGPTCSVIAHMCPEIRVTVVDVNESRINAWNSPTLPIYEPGLKEVVESCRGKNLFFSTNIDDAIKEADLVFISVNTPTKTYGMGKGRAADLKYIEACARRIVQNSNGYKIVTEKSTVPVRAAESIRRIFDANTKPNLNLQVLSNPEFLAEGTA

SEQ ID NO: 31102 - protein, 50 aa, Artificial Sequence
  Synthetic polypeptide
GGWITRSRNPDHPDQHVQSCLKLRRSVASVQAMLEDPHVVSLLICVLKSG

SEQ ID NO: 31103 - protein, 34 aa, Artificial Sequence
  Synthetic polypeptide
WWLMPVIPALLEAEAGGSRGQEIQTILTNMYNHV

SEQ ID NO: 31104 - protein, 25 aa, Artificial Sequence
  Synthetic polypeptide
ISVFTAVPVLLHRHRVSSGITGTLW

SEQ ID NO: 31105 - protein, 111 aa, Artificial Sequence
  Synthetic polypeptide
EGTIYQPESGSSADTESTSALILDFLASRTVRSKFLFLRQSQSYCTDTECLQELPGPSGDNGISVTMILVAWMVIALILFLLRPPNLRGSSLPGKPTSPHNGQDPPAPPVD

SEQ ID NO: 31106 - protein, 35 aa, Artificial Sequence
  Synthetic polypeptide
EVNFCFYGSPSPTAQTQSVFRNYRDPLVIMASVLQ

SEQ ID NO: 31107 - protein, 33 aa, Artificial Sequence
  Synthetic polypeptide
ISVFTAVPVLLHRHRVSSGMDKIHQLLLWTNFV

SEQ ID NO: 31108 - protein, 66 aa, Artificial Sequence
  Synthetic polypeptide
EGTIYQPESGSSADTESTSALILDFLASRTVRSKFLFLRQSQSYCTDTECLQEWTRSTSSSCGLTL

SEQ ID NO: 31109 - protein, 32 aa, Artificial Sequence
  Synthetic polypeptide
EVNFCFYGSPSPTAQTQSVFRNGQDPPAPPVD

SEQ ID NO: 31110 - protein, 101 aa, Artificial Sequence
  Synthetic polypeptide
EGTIYQPESGSSADTESTSALILDFLASRTVRSKFLFLRQSQSYCTDTECLQELPGPSGDNGISVTMILVAWMVIALILFLLRPPNLRGSSLPGKPTSPHN

SEQ ID NO: 31111 - protein, 170 aa, Artificial Sequence
  Synthetic polypeptide
GQAQWLMPVIPALWEAEAGGSQGGRYQLEIKIPETYPFNPPKVRFITKIWHPNISSVTGAICLDILKDQWAAAMTLRTVLLSLQALLAAAEPDDPQDAVVANQYKQNPEMFKQTARLWAHVYAGAPVSSPEYTKKIENLCAMGFDRNAVIVALSSKSWDVETATELLLSN

SEQ ID NO: 31112 - protein, 18 aa, Artificial Sequence
  Synthetic polypeptide
SQLFGRPRRVDHKEEDTN

SEQ ID NO: 31113 - protein, 37 aa, Artificial Sequence
  Synthetic polypeptide
PGAVAHACNPSSLGGRGGWITRRKIPTRDKNTRNIPI

SEQ ID NO: 31114 - protein, 93 aa, Artificial Sequence
  Synthetic polypeptide
GQAQWLMPVIPALWEAEAGGSQGGRYQLEIKIPETYPFNPPKYKQNPEMFKQTARLWAHVYAGAPVSSPEYTKKIENLCAMGFDRNAVIVALS

SEQ ID NO: 31115 - protein, 109 aa, Artificial Sequence
  Synthetic polypeptide
GQAQWLMPVIPALWEAEAGGSQGGRYQLEIKIPETYPFNPPKYKQNPEMFKQTARLWAHVYAGAPVSSPEYTKKIENLCAMGFDRNAVIVALSSKSWDVETATELLLSN

SEQ ID NO: 31116 - protein, 127 aa, Artificial Sequence
  Synthetic polypeptide
GQAQWLMPVIPALWEAEAGGSQGGRYQLEIKIPETYPFNPPKVRFITKIWHPNISSVTGAICLDILKDQWAAAMTLRTVLLSLQALLAAAEPDDPQDAVVANQNAVIVALSSKSWDVETATELLLSN

SEQ ID NO: 31117 - protein, 140 aa, Artificial Sequence
  Synthetic polypeptide
LTPVILALWEAEVRFITKIWHPNISSVTGAICLDILKDQWAAAMTLRTVLLSLQALLAAAEPDDPQDAVVANQYKQNPEMFKQTARLWAHVYAGAPVSSPEYTKKIENLCAMGFDRNAVIVALSSKSWDVETATELLLSN

SEQ ID NO: 31118 - protein, 29 aa, Artificial Sequence
  Synthetic polypeptide
HCGRLRSGLSLKYGILILVPSQGLFVWIS

SEQ ID NO: 31119 - protein, 97 aa, Artificial Sequence
  Synthetic polypeptide
LTPVILALWEAEVRFITKIWHPNISSVTGAICLDILKDQWAAAMTLRTVLLSLQALLAAAEPDDPQDAVVANQNAVIVALSSKSWDVETATELLLSN

SEQ ID NO: 31120 - protein, 3 aa, Artificial Sequence
  Synthetic polypeptide
PTW

SEQ ID NO: 31121 - protein, 34 aa, Artificial Sequence
  Synthetic polypeptide
GRAWWFMPVIPALWEAEAGRPRGLEFKTILTNMV

SEQ ID NO: 31122 - protein, 33 aa, Artificial Sequence
  Synthetic polypeptide
PGVVVHACNPSTLGGRGRQTTRSRVQDHPDQHG

SEQ ID NO: 31123 - protein, 40 aa, Artificial Sequence
  Synthetic polypeptide
CTVMSCFFTFTHHLLTDLPRSTCSPVSFIYERNSPETCKS

SEQ ID NO: 31124 - protein, 751 aa, Artificial Sequence
  Synthetic polypeptide
ASFMREIARKLANPKQPTNPFLEMVKFLLERIAPVHIDSEAISALVKLMNKSIEGTADDEEEGVSPDTAIRSGLELLKVLSFTHPTSFHSAETYESLLQCLRMEDDKVAEAAIQIFRNTGHKIETDLPQIRSTLIPILHQKAKRGTPHQAKQAVHCIHAIFTNKEVQLAQIFEPLSRSLNADVPEQLITPLVSLGHISMLAPDQFASPMKSVVANFIVKDLLMNDRSTGEKNGKLWSPDEEVSPEVLAKVQAIKLLVRWLLGMKNNQSKSANSTLRLLSAMLVSEGDLTEQKRISKSDMSRLRLAAGSAIMKLAQEPCYHEIITPEQFQLCALVINDECYQVRQIFAQKLHKALVKLLLPLEYMAIFALCAKDPVKERRAHARQCLLKNISIRREYIKQNPMATEKLLSLLPEYVVPYMIHLLAHDPDFTRSQDVDQLRDIKECLWFMLEVLMTKNENNSHAFMKKMAENIKLTRDAQSPDESKTNEKLYTVCDVALCVINSKSALCNADSPKDPVLPMKFFTQPEKDFCNDKSYISEETRVLLLTGKPKPAGVLGAVNKPLSATGRKPYVRSTGTETGSNINVNSELNPSTGNRSREQSSEAAETGVSENEENPVRIISVTPVKNIDPVKNKEINSDQATQGNISSDRGKKRTVTAAGAENIQQKTDEKVDESGPPAPSKPRRGRRPKSESQGNATKNDDLNKPINKGRKRAAVGQESPGGLEAGNAKAPKLQDLAKKAAPAERQIDLQR

SEQ ID NO: 31125 - protein, 45 aa, Artificial Sequence
  Synthetic polypeptide
GKVQWLMPIIPALGRLTREDCLSSGVQDQPGQNGRCQGLQRIHRA

SEQ ID NO: 31126 - protein, 39 aa, Artificial Sequence
  Synthetic polypeptide
AQEFKTSLGKMDAAKVCREFTEREQGEVRFSAVALCKAA

SEQ ID NO: 31127 - protein, 61 aa, Artificial Sequence
  Synthetic polypeptide
QGAVAHAYNPSTWEADAGGLLELRSSRPAWAKWTLPRSAENSPSVSKEKSASLPWLSARQP

SEQ ID NO: 31128 - protein, 69 aa, Artificial Sequence
  Synthetic polypeptide
QGAVAHAYNPSTWEADAGGLLELRSSRPAWAKWTLPRSAENSPSVSKEKSASLPWLSARQPNALWEGLC

SEQ ID NO: 31129 - protein, 55 aa, Artificial Sequence
  Synthetic polypeptide
VSCHEILWFYKGLPPLLSTHFSLLLPCEEFAFCHDCKFPEASPDSPTELTILSYS

SEQ ID NO: 31130 - protein, 986 aa, Artificial Sequence
  Synthetic polypeptide
GLPRQPYRTDNIILFLRGCKELGLKESQLFDPSDLQDTSNRVTVKSLDYSRKLKNVLVTIYWLGKAANSCTSYSGTTLNLKEFEGLLAQMRKDTDDIESPKRSIRDSGYIDCWDSERSDSLSPPRHGRDDSFDSLDSFGSRSRQTPSPDVVLRGSSDGRGSDSESDLPHRKLPDVKKDDMSARRTSHGEPKSAVPFNQYLPNKSNQTAYVPAPLRKKKAEREEYRKSWSTATSPLGGERPFRYGPRTPVSDDAESTSMFDMRCEEEAAVQPHSRARQEQLQLINNQLREEDDKWQDDLARWKSRRRSVSQDLIKKEEERKKMEKLLAGEDGTSERRKSIKTYREIVQEKERRERELHEAYKNARSQEEAEGILQQYIERFTISEAVLERLEMPKILERSHSTEPNLSSFLNDPNPMKYLRQQSLPPPKFTATVETTIARASVLDTSMSAGSGSPSKTVTPKAVPMLTPKPYSQPKNSQDVLKTFKVDGKVSVNGETVHREEEKERECPTVAPAHSLTKSQMFEGVARVHGSPLELKQDNGSIEINIKKPNSVPQELAATTEKTEPNSQEDKNDGGKSRKGNIELASSEPQHFTTTVTRCSPTVAFVEFPSSPQLKNDVSEEKDQKKPENEMSGKVELVLSQKVVKPKSPEPEATLTFPFLDKMPEANQLHLPNLNSQVDSPSSEKSPVMTPFKFWAWDPEEERRRQEKWQQEQERLLQERYQKEQDKLKEEWEKAQKEVEEEERRYYEEERKIIEDTVVPFTVSSSSADQLSTSSSMTEGSGTMNKIDLGNCQDEKQDRRWKKSFQGDDSDLLLKTRESDRLEEKGSLTEGALAHSGNPVSKGVHEDHQLDTEAGAPHCGTNPQLAQDPSQNQQTSNPTHSSEDVKPKTLPLDKSINHQIESPSERRKSISGKKLCSSCGLPLGKGAAMIIETLNLYFHIQCFRCGICKGQLGDAVSGTDVRIRNGLLNCNDCYMRSRSAGQPTTL

SEQ ID NO: 31131 - protein, 987 aa, Artificial Sequence
  Synthetic polypeptide
GLPRQPYRTDNIILFLRGCKELGLKESQLFDPSDLQDTSNRVTVKSLDYSRKLKNVLVTIYWLGKAANSCTSYSGTTLNLKEFEGLLAQMRKDTDDIESPKRSIRDSGYIDCWDSERSDSLSPPRHGRDDSFDSLDSFGSRSRQTPSPDVVLRGSSDGRGSDSESDLPHRKLPDVKKDDMSARRTSHGEPKSAVPFNQYLPNKSNQTAYVPAPLRKKKAEREEYRKSWSTATSPLGGERPFRYGPRTPVSDDAESTSMFDMRCEEEAAVQPHSRARQEQLQLINNQLREEDDKWQDDLARWKSRRRSVSQDLIKKEEERKKMEKLLAGEDGTSERRKSIKTYREIVQEKERRERELHEAYKNARSQEEAEGILQQYIERFTISEAVLERLEMPKILERSHSTEPNLSSFLNDPNPMKYLRQQSLPPPKFTATVETTIARASVLDTSMSAGSGSPSKTVTPKAVPMLTPKPYSQPKNSQDVLKTFKVDGKVSVNGETVHREEEKERECPTVAPAHSLTKSQMFEGVARVHGSPLELKQDNGSIEINIKKPNSVPQELAATTEKTEPNSQEDKNDGGKSRKGNIELASSEPQHFTTTVTRCSPTVAFVEFPSSPQLKNDVSEEKDQKKPENEMSGKVELVLSQKVVKPKSPEPEATLTFPFLDKMPEANQLHLPNLNSQVDSPSSEKSPVMTPQFKFWAWDPEEERRRQEKWQQEQERLLQERYQKEQDKLKEEWEKAQKEVEEEERRYYEEERKIIEDTVVPFTVSSSSADQLSTSSSMTEGSGTMNKIDLGNCQDEKQDRRWKKSFQGDDSDLLLKTRESDRLEEKGSLTEGALAHSGNPVSKGVHEDHQLDTEAGAPHCGTNPQLAQDPSQNQQTSNPTHSSEDVKPKTLPLDKSINHQIESPSERRKSISGKKLCSSCGLPLGKGAAMIIETLNLYFHIQCFRCGICKGQLGDAVSGTDVRIRNGLLNCNDCYMRSRSAGQPTTL

SEQ ID NO: 31132 - protein, 1013 aa, Artificial Sequence
  Synthetic polypeptide
GLPRQPYRTDNIILFLRGCKELGLKESQLFDPSDLQDTSNRVTVKSLDYSRKLKNVLVTIYWLGKAANSCTSYSGTTLNLKEFEGLLAQMRKDTDDIESPKRSIRDSGYIDCWDSERSDSLSPPRHGRDDSFDSLDSFGSRSRQTPSPDVVLRGSSDGRGSDSESDLPHRKLPDVKKDDMSARRTSHGEPKSAVPFNQYLPNKSNQTAYVPAPLRKKKAEREEYRKSWSTATSPLGGERPFRYGPRTPVSDDAESTSMFDMRCEEEAAVQPHSRARQEQLQLINNQLREEDDKWQDDLARWKSRRRSVSQDLIKKEEERKKMEKLLAGEDGTSERRKSIKTYREIVQEKERRERELHEAYKNARSQEEAEGILQQYIERFTISEAVLERLEMPKILERSHSTEPNLSSFLNDPNPMKYLRQQSLPPPKFTATVETTIARASVLDTSMSAGSGSPSKTVTPKAVPMLTPKPYSQPKNSQDVLKTFKVDGKVSVNGETVHREEEKERECPTVAPAHSLTKSQMFEGVARVHGSPLELKQDNGSIEINIKKPNSVPQELAATTEKTEPNSQEDKNDGGKSRKGNIELASSEPQHFTTTVTRCSPTVAFVEFPSSPQLKNDVSEEKDQKKPENEMSGKVELVLSQKVVKPKSPEPEATLTFPFLDKMPEANQLHLPNLNSQVDSPSSEKSPVMTPQFKFWAWDPEEERRRQEKWQQEQERLLQERYQKEQDKLKEEWEKAQKEVEEEERRYYEEERKIIEDTVVPFTVSSSSADQLSTSSSMTEGSGTMNKIDLGNCQDEKQDRRWKKSFQGDDSDLLLKTRESDRLEEKGSLTEGALAHSGNPVSKGVHEDHQLDTEAGAPHCGTNPQLAQDPSQNQQTSNPTHSSEDVKPKTLPLDKSINHQIESPSERRKKSPREHFQAGPFSPCSPTPPGQSPNRSISGKKLCSSCGLPLGKGAAMIIETLNLYFHIQCFRCGICKGQLGDAVSGTDVRIRNGLLNCNDCYMRSRSAGQPTTL

SEQ ID NO: 31133 - protein, 910 aa, Artificial Sequence
  Synthetic polypeptide
GLPRQPYRTDNIILFLRGCKELGLKESQLFDPSDLQDTSNRVTVKSLDYSRKLKNVLVTIYWLGKAANSCTSYSGTTLNLKEFEGLLAQMRKDTDDIESPKRSIRDSGYIDCWDSERSDSLSPPRHGRDDSFDSLDSFGSRSRQTPSPDVVLRGSSDGRGSDSESDLPHRKLPDVKKDDMSARRTSHGEPKSAVPFNQYLPNKSNQTAYVPAPLRKKKAEREEYRKSWSTATSPLGGERPFRYGPRTPVSDDAESTSMFDMRCEEEAAVQPHSRARQEQLQLINNQLREEDDKWQDDLARWKSRRRSVSQDLIKKEEERKKMEKLLAGEDGTSERRKSIKTYREIVQEKERRERELHEAYKNARSQEEAEGILQQYIERFTISEAVLERLEMPKILERSHSTEPNLSSFLNDPNPMKYLRQQSLPPPKFTATVETTIARASVLDTSMSAGSGSPSKTVTPKAVPMLTPKPYSQPKNSQDVLKTFKVDGKVSVNGETVHREEEKERECPTVAPAHSLTKSQMFEGVARVHGSPLELKQDNGSIEINIKKPNSVPQELAATTEKTEPNSQEDKNDGGKSRKGNIELASSEPQHFTTTVTRCSPTVAFVEFPSSPQLKNDVSEEKDQKKPENEMSGKVELVLSQKERYQKEQDKLKEEWEKAQKEVEEEERRYYEEERKIIEDTVVPFTVSSSSADQLSTSSSMTEGSGTMNKIDLGNCQDEKQDRRWKKSFQGDDSDLLLKTRESDRLEEKGSLTEGALAHSGNPVSKGVHEDHQLDTEAGAPHCGTNPQLAQDPSQNQQTSNPTHSSEDVKPKTLPLDKSINHQIESPSERRKSISGKKLCSSCGLPLGKGAAMIIETLNLYFHIQCFRCGICKGQLGDAVSGTDVRIRNGLLNCNDCYMRSRSAGQPTTL

SEQ ID NO: 31134 - protein, 999 aa, Artificial Sequence
  Synthetic polypeptide
GLPRQPYRTDNIILFLRGCKELGLKESQLFDPSDLQDTSNRVTVKSLDYSRKLKNVLVTIYWLGKAANSCTSYSGTTLNLKEFEGLLAQMRKDTDDIESPKRSIRDSGYIDCWDSERSDSLSPPRHGRDDSFDSLDSFGSRSRQTPSPDVVLRGSSDGRGSDSESDLPHRKLPDVKKDDMSARRTSHGEPKSAVPFNQYLPNKSNQTAYVPAPLRKKKAEREEYRKSWSTATSPLGGERPFRSTSMFDMRCEEEAAVQPHSRARQEQLQLINNQLREEDDKWQDDLARWKSRRRSVSQDLIKKEEERKKMEKLLAGEDGTSERRKSIKTYREIVQEKERRERELHEAYKNARSQEEAEGILQQYIERFTISEAVLERLEMPKILERSHSTEPNLSSFLNDPNPMKYLRQQSLPPPKFTATVETTIARASVLDTSMSAGSGSPSKTVTPKAVPMLTPKPYSQPKNSQDVLKTFKVDGKVSVNGETVHREEEKERECPTVAPAHSLTKSQMFEGVARVHGSPLELKQDNGSIEINIKKPNSVPQELAATTEKTEPNSQEDKNDGGKSRKGNIELASSEPQHFTTTVTRCSPTVAFVEFPSSPQLKNDVSEEKDQKKPENEMSGKVELVLSQKVVKPKSPEPEATLTFPFLDKMPEANQLHLPNLNSQESPGTASVPLRVQNSWRRSQFFSQSVDSPSSEKSPVMTPFKFWAWDPEEERRRQEKWQQEQERLLQERYQKEQDKLKEEWEKAQKEVEEEERRYYEEERKIIEDTVVPFTVSSSSADQLSTSSSMTEGSGTMNKIDLGNCQDEKQDRRWKKSFQGDDSDLLLKTRESDRLEEKGSLTEGALAHSGNPVSKGVHEDHQLDTEAGAPHCGTNPQLAQDPSQNQQTSNPTHSSEDVKPKTLPLDKSINHQIESPSERRKSISGKKLCSSCGLPLGKGAAMIIETLNLYFHIQCFRCGICKGQLGDAVSGTDVRIRNGLLNCNDCYMRSRSAGQPTTL

SEQ ID NO: 31135 - protein, 4 aa, Artificial Sequence
  Synthetic polypeptide
FSNS

SEQ ID NO: 31136 - protein, 33 aa, Artificial Sequence
  Synthetic polypeptide
FQPTFCRSRSRPGLTFSRKPPQIPSDLAIHDDQ

SEQ ID NO: 31137 - protein, 252 aa, Artificial Sequence
  Synthetic polypeptide
PVVEVRSYSPSIVPATQEAEQFMMTNKLDTAMWLSRLFTVYCSALFVLPLLGLHEAASFYQRALLANALTSALRLHQRLPHFQLSRAFLAQALLEDSCHYLLYSLIFVNSYPVTMSIFPVLLFSLLHAATYTKKVLDARGSNSLPLLRSVLDKLSANQQNILKFIACNEIFLMPATVFMLFSGQGSLLQPFIYYRFLTLRYSSRRNPYCRTLFNELRIVVEHIIMKPACPLFVRRLCLQSIAFISRLAPTVP

SEQ ID NO: 31138 - protein, 10 aa, Artificial Sequence
  Synthetic polypeptide
SQLLRRLSNS

SEQ ID NO: 31139 - protein, 227 aa, Artificial Sequence
  Synthetic polypeptide
PVVEVRSYSPSIVPATQEAEQFMMTNKLDTAMWLSRLFTVYCSALFVLPLLGLHEAASFYQRALLANALTSALRLHQRLPHFQLSRAFLAQALLEDSCHYLLYSLIFVNSYPVTMSIFPVLLFSLLHAATYTKKVLDARGSNSLPLLRSVLDKLSANQQNILKFIACNEIFLMPATVFMLFSGQGSLLQPFIYYRFLTLRYSSRRNPYCRTLFNELRIVVEHIIMKP

SEQ ID NO: 31140 - protein, 73 aa, Artificial Sequence
  Synthetic polypeptide
PVVEVRSYSPSIVPATQEAEQFMMTNKLDTAMWLSRLFTVYCSALFVLPLLGEYLPSLVILFASCCHIYEKGP

SEQ ID NO: 31141 - protein, 73 aa, Artificial Sequence
  Synthetic polypeptide
PVVEVRSYSPSIVPATQEAEQFMMTNKLDTAMWLSRLFTVYCSALFVLPLLGVQMSCFKKERSSALSILTPVN

SEQ ID NO: 31142 - protein, 19 aa, Artificial Sequence
  Synthetic polypeptide
DEIVHELIIVESRQWSGRI

SEQ ID NO: 31143 - protein, 24 aa, Artificial Sequence
  Synthetic polypeptide
SLLKVGNGVAEFSDIWKLFKHGSL

SEQ ID NO: 31144 - protein, 534 aa, Artificial Sequence
  Synthetic polypeptide
AMEWQNLVTFGSFSNMVPCSHPYIGTLSQVKLYSTNVQKEGQGSQTLRVEKVPSFETAEGIGTELKAPLKQEPLQVRVKAVLKKREYGSKYTQNNFITGVRAINEFCLKSSDLEQLRKIRRRSPHEDTESFTVYLRSDVEAKSLEVWGSPEALAREKKLRKEAEIEYRERLFRNQKILREYRDFLGNTKPRSRTASVFFKGPGKVVMVAICINGLNCFFKFLAWIYTGSASMFSEAIHSLSDTCNQGLLALGISKSVQTPDPSHPYGFSNMRYISSLISGVGIFMMGAGLSWYHGVMGLLHPQPIESLLWAYCILAGSLVSEGATLLVAVNELRRNARAKGMSFYKYVMESRDPSTNVILLEDTAAVLGVIIAATCMGLTSITGNPLYDSLGSLGVGTLLGMVSAFLIYTNTEALLGRSIQPEQVQRLTELLENDPSVRAIHDVKATDLGLGKVRFKAEVDFDGRVVTRSYLEKQDFDQMLQEIQEVKTPEELETFMLKHGENIIDTLGAEVDRLEKELKKRNPEVRHVDLEIL

SEQ ID NO: 31145 - protein, 85 aa, Artificial Sequence
  Synthetic polypeptide
AMEWQNLVTFGSFSNMVPCSHPYIGTLSQVKLYSTNVQKEGQGSQTLRVEKVPSFETAEGIGTELKAPLKQEPLQVRAQERNNGK

SEQ ID NO: 31146 - protein, 121 aa, Artificial Sequence
  Synthetic polypeptide
GWAWWLTPIIPALWKAETGGSLEVRNSRPAWPIWTCWFLCGSALLLVSLSIAFYCIVYLEWYCGIGEYDVKYPALIPITTASFIAAGICFNIALWHVWSFFTPLLLFTQFMGVVMFITLLG

SEQ ID NO: 31147 - protein, 46 aa, Artificial Sequence
  Synthetic polypeptide
SQHFGRLRQVDHLRSGIRDQPGQYGHAGFSVAVPCCLSVYQLHFTA

SEQ ID NO: 31148 - protein, 45 aa, Artificial Sequence
  Synthetic polypeptide
GQEFETSLANMDMLVSLWQCLVACQFINCILLHSLPGMVLWNWRI

SEQ ID NO: 31149 - protein, 88 aa, Artificial Sequence
  Synthetic polypeptide
GWAWWLTPIIPALWKAETGGSLEVRNSRPAWPIWTCWFLCGSALLLVSLSIAFYCIVYLEWYCGIGEYDVKYPALIPITTASFIAAGI

SEQ ID NO: 31150 - protein, 27 aa, Artificial Sequence
  Synthetic polypeptide
QRDPLGIFSYLEQQPLRINYKIKCLKP

SEQ ID NO: 31151 - protein, 15 aa, Artificial Sequence
  Synthetic polypeptide
NVIHWESSATWSNSH

SEQ ID NO: 31152 - protein, 78 aa, Artificial Sequence
  Synthetic polypeptide
SIGNLQLLGATAIEDKLQDQVPETIETLMKADIKIWILTGDKQETAINIGHSCKLLKKNMGMIVINEGSLDGFSSSKI

SEQ ID NO: 31153 - protein, 518 aa, Artificial Sequence
  Synthetic polypeptide
SIGNLQLLGATAIEDKLQDQVPETIETLMKADIKIWILTGDKQETAINIGHSCKLLKKNMGMIVINEGSLDGTRETLSRHCTTLGDALRKENDFALIIDGKTLKYALTFGVRQYFLDLALSCKAVICCRVSPLQKSEVVEMVKKQVKVVTLAIGDGANDVSMIQTAHVGVGISGNEGLQAANSSDYSIAQFKYLKNLLMIHGAWNYNRVSKCILYCFYKNIVLYIIEIWFAFVNGFSGQILFERWCIGLYNVMFTAMPPLTLGIFERSCRKENMLKYPELYKTSQNALDFNTKVFWVHCLNGLFHSVILFWFPLKALQYGTAFGNGKTSDYLLLGNFVYTFVVITVCLKAGLETSYWTWFSHIAIWGSIALWVVFFGIYSSLWPAIPMAPDMSGEAAMLFSSGVFWMGLLFIPVASLLLDVVYKVIKRTAFKTLVDEVQELEAKSQDPGAVVLGKSLTERAQLLKNVFKKNHVNLYRSESLQQNLLHGYAFSQDENGIVSQSEVIRAYDTTKQRPDEW

SEQ ID NO: 31154 - protein, 21 aa, Artificial Sequence
  Synthetic polypeptide
GDGYPIYSDVNSTGRELLKQF

SEQ ID NO: 31155 - protein, 12 aa, Artificial Sequence
  Synthetic polypeptide
MLEVMDTPFTLM

SEQ ID NO: 31156 - protein, 26 aa, Artificial Sequence
  Synthetic polypeptide
PRLEQPMCPAADEWVNSTGRELLKQF

SEQ ID NO: 31157 - protein, 90 aa, Artificial Sequence
  Synthetic polypeptide
CWRGCGEKGTLVHCWWECKLVQPLWRTAWRFLRNLRIELPSNPAAPLFGYIFRRKEIPVLKRYLHSRVCCSTIYNNQDWSNLCVQQQMNG

SEQ ID NO: 31158 - protein, 74 aa, Artificial Sequence
  Synthetic polypeptide
MGKFNWKGTIKAILKQAPDNEITIKKLRKKVLAQYYTVTDEHHRSEEELLVIFNKKISKNPTFKLLKDKVKLVK

SEQ ID NO: 31159 - protein, 26 aa, Artificial Sequence
  Synthetic polypeptide
SQHFGRPRQADHEVRGSRPSWLTWNP

SEQ ID NO: 31160 - protein, 29 aa, Artificial Sequence
  Synthetic polypeptide
HGTLNIQGCGHRILSRRVEMPGPCPAEFV

SEQ ID NO: 31161 - protein, 92 aa, Artificial Sequence
  Synthetic polypeptide
RARWLMPVIPALWEAEAGGSRGPGIKTILANMEPLTFRDVAIEFSPEEWKCLDPAQQNLYRDVMLENYRNLVSLEEGTEPQRKMTCSQQKSQ

SEQ ID NO: 31162 - protein, 163 aa, Artificial Sequence
  Synthetic polypeptide
RARWLMPVIPALWEAEAGGSRGPGIKTILANMEPLTFRDVAIEFSPEEWKCLDPAQQNLYRDVMLENYRNLVSLAMCSHFTQDFLPVQGIEDSFHKLILRRYEKFSSLISSCRVISHGLSRGRNRATEKNDLLTTEEPVVKHRFDLQYPEEMWRNTVVQKGRK

SEQ ID NO: 31163 - protein, 191 aa, Artificial Sequence
  Synthetic polypeptide
RARWLMPVIPALWEAEAGGSRGPGIKTILANMEPLTFRDVAIEFSPEEWKCLDPAQQNLYRDVMLENYRNLVSLAMCSHFTQDFLPVQGIEDSFHKLILRRYEKCGHDNLQLRKGCKSMNVCKVQKGVYNGINKCLSNTQSKIFQCNARVKVFSKFANSNKDKTRHTGEKHFKCNECGKSFQKFSDLTQHK

SEQ ID NO: 31164 - protein, 7 aa, Artificial Sequence
  Synthetic polypeptide
LSNKRNP

SEQ ID NO: 31165 - protein, 38 aa, Artificial Sequence
  Synthetic polypeptide
NGERADSPTKGTLNIQGCGHRILSRRVEMPGPCPAEFV

SEQ ID NO: 31166 - protein, 70 aa, Artificial Sequence
  Synthetic polypeptide
MGKGLTLQQKEPLTFRDVAIEFSPEEWKCLDPAQQNLYRDVMLENYRNLVSLEEGTEPQRKMTCSQQKSQ

SEQ ID NO: 31167 - protein, 141 aa, Artificial Sequence
  Synthetic polypeptide
MGKGLTLQQKEPLTFRDVAIEFSPEEWKCLDPAQQNLYRDVMLENYRNLVSLAMCSHFTQDFLPVQGIEDSFHKLILRRYEKFSSLISSCRVISHGLSRGRNRATEKNDLLTTEEPVVKHRFDLQYPEEMWRNTVVQKGRK

SEQ ID NO: 31168 - protein, 169 aa, Artificial Sequence
  Synthetic polypeptide
MGKGLTLQQKEPLTFRDVAIEFSPEEWKCLDPAQQNLYRDVMLENYRNLVSLAMCSHFTQDFLPVQGIEDSFHKLILRRYEKCGHDNLQLRKGCKSMNVCKVQKGVYNGINKCLSNTQSKIFQCNARVKVFSKFANSNKDKTRHTGEKHFKCNECGKSFQKFSDLTQHK

SEQ ID NO: 31169 - protein, 181 aa, Artificial Sequence
  Synthetic polypeptide
LTPAIPELWEAVDHMKLRVQDQPGQHIFGAMCVTCNPPSNPYWIMQEHMLDPVFYLVCILTTSIALLPRFVYRVLQGSLFPSPILRAKHFDRLTPEERTKALKKWRGAGKMNQVTSKYANQSAGKSGRRPMPGPSAVFAMKSASSCAIEQGNLSLCETALDQGYSETKAFEMAGPSKGKES

SEQ ID NO: 31170 - protein, 15 aa, Artificial Sequence
  Synthetic polypeptide
EFKTSLGNIFLEPCV

SEQ ID NO: 31171 - protein, 91 aa, Artificial Sequence
  Synthetic polypeptide
PGAVTHTCNSRALGGCGSHEAKSSRPAWATYFWSHVCNLQPTIQPLLDYAGAHAGSSILLSLYPHDVHCSSAQVCIQSSSGIPVSISNSES

SEQ ID NO: 31172 - protein, 6 aa, Artificial Sequence
  Synthetic polypeptide
ITQSQI

SEQ ID NO: 31173 - protein, 38 aa, Artificial Sequence
  Synthetic polypeptide
TSFLYKLPSLRYETIHEEQYYQYTAVFCNHAQCDCTRY

SEQ ID NO: 31174 - protein, 746 aa, Artificial Sequence
  Synthetic polypeptide
WFYKGEFCCTSSLACCHVRCVFASPLLSAMIVRLPLAMWSYKSIKPLSFINYPVSDMKLSMKNNIINTQQSFVTMPNVIVPDIEKEIRRMENGACSSFSEDDDSASTSEESENENPHARGSFSYKSLRKGGPSQREQYLPGAIALFNVNNSSNKDQEPEEKKKKKKEKKSKSDDKNENKNDPEKKKKKKDKEKKKKEEKSKDKKEEEKKEVVVIDPSGNTYYNWLFCITLPVMYNWTMVIARACFDELQSDYLEYWLILDYVSDIVYLIDMFVRTRTGYLEQGLLVKEELKLINKYKSNLQFKLDVLSLIPTDLLYFKLGWNYPEIRLNRLLRFSRMFEFFQRTETRTNYPNIFRISNLVMYIVIIIHWNACVFYSISKAIGFGNDTWVYPDINDPEFGRLARKYVYSLYWSTLTLTTIGETPPPVRDSEYVFVVVDFLIGVLIFATIVGNIGSMISNMNAARAEFQARIDAIKQYMHFRNVSKDMEKRVIKWFDYLWTNKKTVDEKEVLKYLPDKLRAEIAINVHLDTLKKVRIFADCEAGLLVELVLKLQPQVYSPGDYICKKGDIGREMYIIKEGKLAVVADDGVTQFVVLSDGSYFGEISILNIKGSKAGNRRTANIKSIGYSDLFCLSKDDLMEALTEYPDAKTMLEEKGKQILMKDGLLDLNIANAGSDPKDLEEKVTRMEGSVDLLQTRFARILAEYESMQQKLKQRLTKVEKFLKPLIDTEFSSIEGPGAESGPIDST

SEQ ID NO: 31175 - protein, 21 aa, Artificial Sequence
  Synthetic polypeptide
GWVRWLTAVILALWEAKKSGR

SEQ ID NO: 31176 - protein, 13 aa, Artificial Sequence
  Synthetic polypeptide
HFGRQRKVGDRSI

SEQ ID NO: 31177 - protein, 282 aa, Artificial Sequence
  Synthetic polypeptide
MGAVAHSCNPSTLGGKEKWEIDPSELAFIKEIGSGQFGVVHLGEWRSHIQVAIKAINEGSMSEEDFIEEAKVMMKLSHSKLVQLYGVCIQRKPLYIVTEFMENGCLLNYLRENKGKLRKEMLLSVCQDICEGMEYLERNGYIHRDLAARNCLVSSTCIVKISDFGMTRYVLDDEYVSSFGAKFPIKWSPPEVFLFNKYSSKSDVWSFGVLMWEVFTEGKMPFENKSNLQVVEAISEGFRLYRPHLAPMSIYEVMYSCWHEKPEGRPTFAELLRAVTEIAETW

SEQ ID NO: 31178 - protein, 15 aa, Artificial Sequence
  Synthetic polypeptide
VIQVKMLFSASQQSK

SEQ ID NO: 31179 - protein, 127 aa, Artificial Sequence
  Synthetic polypeptide
KCSSAPVSKVNKYCASSNFHSTWGKKNIIMSNITIDPDVKPGEYVIKSLFAEFAVQAEKKIEVVMAEPLEKLLSRSLQRGEDLQFDQLISSMSSVAEHCLPSLLRTLFDWYRRQNGTEDESYEYRPR

SEQ ID NO: 31180 - protein, 26 aa, Artificial Sequence
  Synthetic polypeptide
HLHLSKWHHYPMSDSSKNALQRQSAK

SEQ ID NO: 31181 - protein, 27 aa, Artificial Sequence
  Synthetic polypeptide
SQHFGRLSCWSLGIWPWKGIIHRSMPE

SEQ ID NO: 31182 - protein, 30 aa, Artificial Sequence
  Synthetic polypeptide
QVWWLTSVIPALWEAELLVSWDLALERYHT

SEQ ID NO: 31183 - protein, 106 aa, Artificial Sequence
  Synthetic polypeptide
SSVLAWHLIAQTGRMIAEIWDLVPPGIPDLPTFFGGGSEVYLLLKNSFFGSSHSLHQGRQACLLLHRQIAVFSLSPITSYVFSFHPRLFASAGDRRFIPQTYTEKI

SEQ ID NO: 31184 - protein, 93 aa, Artificial Sequence
  Synthetic polypeptide
APSLAMCSHFTQDFLPVQGIEDSFHKLILRRYEKFSSLISSCRVISHGLSRGRNRATEKNDLLTTEEPVVKHRFDLQYPEEMWRNTVVQKGRK

SEQ ID NO: 31185 - protein, 916 aa, Artificial Sequence
  Synthetic polypeptide
APSLAMCSHFTQDFLPVQGIEDSFHKLILRRYEKCGHDNLQLRKGCKSMNVCKVQKGVYNGINKCLSNTQSKIFQCNARVKVFSKFANSNKDKTRHTGEKHFKCNECGKSFQKFSDLTQHKGIHAGEKPYTCEERGKDFGWYTDLNQHKKIHTGEKPYKCEECGKAFNRSTNLTAHKRIHNREKAYTGEDRDRAFGWSTNLNEYKKIHTGDKPYKCKECGKAFMHSSHLNKHEKIHTGEKPYKCKECGKVISSSSSFAKHKRIHTGEKPFKCLECGKAFNISTTLTKHRRIHTGEKPYTCEVCGKAFRQSANLYVHRRIHTGEKPYTCGECGKTFRQSANLYVHRRIHTGEKPYKCEDCGKAFGRYTALNQHKKIHTGEKPYKCEECGKAFNSSTNLTAHKRIHTREKPYTCEDRGRAFGLSTNLNEYKKIHTGDKPYKCKECGKAFIHSLHLNKHEKIHTGKKPYKCKQCGKVITSSSSFAKHKRIHTGEKPFECLECGKAFTSSTTLTKHRRIHTGEKPYTCEVCGKAFRQSAILYVHRRIHTGEKPYTCEECGKTFRQSANLYVHRRIHTGEKPYKCEECGKAFGRYTDLNQHKKIHTGEKLYKCEECGKDFVWYTDLNQQKKIYTGEKPYKCEECGKAFAPSTDLNQHTKILTGEQSYKCEECGKAFGWSIALNQHKKIHTGEKPYKCEECGKAFSRSRNLTTHRRVHTREKPYKCEDRGRSFGWSTNLNEYKKIHTGDKLYKCKECGKVFKQSSHLNRHEKIHTGKKPYKCKECGKVITSSSSFAKHKRIHTGEKPFKCLECGKAFTSSTTLTKHRRIHTGEKPYTCEECGKAFRQSAILYVHRRIHTGEKPYTCGECGKTFRQSANLYAHKKIHTGEKPYTCGDCGKTFRQSANLYAHKKIHTGDKTIQV

SEQ ID NO: 31186 - protein, 121 aa, Artificial Sequence
  Synthetic polypeptide
APSLAMCSHFTQDFLPVQGIEDSFHKLILRRYEKCGHDNLQLRKGCKSMNVCKVQKGVYNGINKCLSNTQSKIFQCNARVKVFSKFANSNKDKTRHTGEKHFKCNECGKSFQKFSDLTQHK

SEQ ID NO: 31187 - protein, 416 aa, Artificial Sequence
  Synthetic polypeptide
LCSSVTFHHDCEASPAMWDFNFDHFQILRAIGKGSFGKVCIVQKRDTKKMYAMKYMNKQKCIERDEVRNVFRELQIMQGLEHPFLVNLWYSFQDEEDMFMVVDLLLGGDLRYHLQQNVHFTEGTVKLYICELALALEYLQRYHIIHRDIKPDNILLDEHGHVHITDFNIATVVKGAERASSMAGTKPYMAPEVFQVYMDRGPGYSYPVDWWSLGITAYELLRGWRPYEIHSVTPIDEILNMFKVERVHYSSTWCKGMVALLRKLLTKDPESRVSSLHDIQSVPYLADMNWDAVFKKALMPGFVPNKGRLNCDPTFELEEMILESKPLHKKKKRLAKNRSRDGTKDSCPLNGHLQHCLETVREEFIIFNREKLRRQQGQGSQLLDTDSRGGGQAQSKLQDGCNNNLLTHTCTRGCSS

SEQ ID NO: 31188 - protein, 73 aa, Artificial Sequence
  Synthetic polypeptide
WFYKGEFPYTSSLACYHIRCDFAPQSPSTMIVRPPQPCGTSTLTIFRFCGPLVKGVLERYASCRSETLRKCMQ

SEQ ID NO: 31189 - protein, 10 aa, Artificial Sequence
  Synthetic polypeptide
GLPSHVGLQL

SEQ ID NO: 31190 - protein, 53 aa, Artificial Sequence
  Synthetic polypeptide
LCSSVTFHHDCEASPAMWDFNFDHFQILRAIGKGSFGKDCQCRLFLENLSEES

SEQ ID NO: 31191 - protein, 69 aa, Artificial Sequence
  Synthetic polypeptide
WFYKGEFPYTSSLACYHIRCDFAPQSPSTMIVRPPQPCGTSTLTIFRFCGPLVKGVLERIANAVCSLRI

SEQ ID NO: 31192 - protein, 48 aa, Artificial Sequence
  Synthetic polypeptide
CFLLGSLSPAAMCKCVYFSFAFRHDCKFPEASPAMPPVTACGTVLLPG

SEQ ID NO: 31193 - protein, 332 aa, Artificial Sequence
  Synthetic polypeptide
QLVELYSFQDEEDMFMVVDLLLGGDLRYHLQQNVHFTEGTVKLYICELALALEYLQRYHIIHRDIKPDNILLDEHGHVHITDFNIATVVKGAERASSMAGTKPYMAPEVFQVYMDRGPGYSYPVDWWSLGITAYELLRGWRPYEIHSVTPIDEILNMFKVERVHYSSTWCKGMVALLRKLLTKDPESRVSSLHDIQSVPYLADMNWDAVFKKALMPGFVPNKGRLNCDPTFELEEMILESKPLHKKKKRLAKNRSRDGTKDSCPLNGHLQHCLETVREEFIIFNREKLRRQQGQGSQLLDTDSRGGGQAQSKLQDGCNNNLLTHTCTRGCSS

SEQ ID NO: 31194 - protein, 49 aa, Artificial Sequence
  Synthetic polypeptide
GLPSHASCNSLWNCTPSRMRRTCSWWWTCSWEATCATICSRMCISQRGL

SEQ ID NO: 31195 - protein, 302 aa, Artificial Sequence
  Synthetic polypeptide
QLVELYSFQDEEDMFMVVDLLLGGDLRYHLQQNVHFTEGTVKLYICELALALEYLQRYHIIHRDIKPDNILLDEHAPEVFQVYMDRGPGYSYPVDWWSLGITAYELLRGWRPYEIHSVTPIDEILNMFKVERVHYSSTWCKGMVALLRKLLTKDPESRVSSLHDIQSVPYLADMNWDAVFKKALMPGFVPNKGRLNCDPTFELEEMILESKPLHKKKKRLAKNRSRDGTKDSCPLNGHLQHCLETVREEFIIFNREKLRRQQGQGSQLLDTDSRGGGQAQSKLQDGCNNNLLTHTCTRGCSS

SEQ ID NO: 31196 - protein, 43 aa, Artificial Sequence
  Synthetic polypeptide
GAGAGGDAAGGVGRGRAWGEGTGLRGGRRFSAELSSLNTGKYS

SEQ ID NO: 31197 - protein, 66 aa, Artificial Sequence
  Synthetic polypeptide
GPGRAVTLRAAWGGGGRGGKGPACGEGGDFQLNSHLSTLANIHKIYHTLNKLEVCGLAVLQTALIK

SEQ ID NO: 31198 - protein, 25 aa, Artificial Sequence
  Synthetic polypeptide
RCGRRGAGAGVGGRDRPAGRAEIFS

SEQ ID NO: 31199 - protein, 312 aa, Artificial Sequence
  Synthetic polypeptide
GPGRAVTLRAAWGGGGRGGKGPACGEGGDFQLNSHLSTLANIHKIYHTLNKLNLTEDIGQDDHQTGSLRSCSSSDCFNKVMPPRKKRRPASGDDLSAKKSRHDSMYRKYDSTRIKTEEEAFSSKRCLEWFYEYAGTDDVVGPEGMEKFCEDIGVEPENVVMLVLAWKLDAQNMGYFTLQEWLKGMTSLQCDTTEKLRNTLDYLRSFLNDSTNFKLIYRYAFDFAREKDQRSLDINTAKCMLGLLLGKIWPLFPVFHQFLEQSKYKVINKDQWCNVLEFSRTINLDLSNYDEDGAWPVLLDEFVEWYKDKQMS

SEQ ID NO: 31200 - protein, 277 aa, Artificial Sequence
  Synthetic polypeptide
GPGRAVTLRAAWGGGGRGGKGPACGEGGDFQLNSHLSTLANIHKIYHTLNKLNLTEDIGQDDHQTGSLRSCSSSDCFNKVMPPRKKRRPASGDDLSAKKSRHDSMYRKYDSTRIKTEEEAFSSKRCLEWFYEYAGTDDVVGPEGMEKFCEDIGVEPENVVMLVLAWKLDAQNMGYFTLQEWLKGMTSLQCDTTEKLRNTLDYLRSFLNDSTNFKLIYRYAFDFARQSKYKVINKDQWCNVLEFSRTINLDLSNYDEDGAWPVLLDEFVEWYKDKQMS

SEQ ID NO: 31201 - protein, 43 aa, Artificial Sequence
  Synthetic polypeptide
GPGRAVTLRAAWGGGGRGGKGPACGEGGDFQLNSHLSTLANIH

SEQ ID NO: 31202 - protein, 163 aa, Artificial Sequence
  Synthetic polypeptide
GPGRAVTLRAAWGGGGRGGKGPACGEGGDFQLNSHLSTLANIHKIYHTLNKLNLTEDIGQDDHQTGSLRSCSSSDCFNKVMPPRKKRRPASGDDLSAKKSRHDSMYRKYDSTRIKTEEEAFSSKRCLEWFYEYAGTDDVVGPEGMEKFCEDIGVEPENVSQTY

SEQ ID NO: 31203 - protein, 183 aa, Artificial Sequence
  Synthetic polypeptide
GPGRAVTLRAAWGGGGRGGKGPACGEGGDFQLNSHLSTLANIHKIYHTLNKLNLTEDIGQDDHQTGSLRSCSSSDCFNKVMPPRKKRRPASGDDLSAKKSRHDSMYRKYDSTRIKTEEEAFSSKRCLEWFYEYAGTDDVVGPEGMEKFCEDIGVEPENMESRTVARLECNGMMSAHCNLCLPG

SEQ ID NO: 31204 - protein, 188 aa, Artificial Sequence
  Synthetic polypeptide
GPGRAVTLRAAWGGGGRGGKGPACGEGGDFQLNSHLSTLANIHKIYHTLNKLNLTEDIGQDDHQTGSLRSCSSSDCFNKVMPPRKKRRPASGDDLSAKKSRHDSMYRKYDSTRIKTEEEAFSSKRCLEWFYEYAGTDDVVGPEGMEKFCEDIGVEPENVVMLVLAWKLDAQNMGYFTLQEWLKGMTSL

SEQ ID NO: 31205 - protein, 252 aa, Artificial Sequence
  Synthetic polypeptide
QLTVEQYKFKLHKSTSVDFFQPNRDGKYTIEGCETPPVWSTDFCMYRKYDSTRIKTEEEAFSSKRCLEWFYEYAGTDDVVGPEGMEKFCEDIGVEPENVVMLVLAWKLDAQNMGYFTLQEWLKGMTSLQCDTTEKLRNTLDYLRSFLNDSTNFKLIYRYAFDFAREKDQRSLDINTAKCMLGLLLGKIWPLFPVFHQFLEQSKYKVINKDQWCNVLEFSRTINLDLSNYDEDGAWPVLLDEFVEWYKDKQMS

SEQ ID NO: 31206 - protein, 51 aa, Artificial Sequence
  Synthetic polypeptide
LLNNTSLNCTSLLLWIFFSRTEMENILLRDVKPHLYGALTFACIENMIRLE

SEQ ID NO: 31207 - protein, 4 aa, Artificial Sequence
  Synthetic polypeptide
LLHV

SEQ ID NO: 31208 - protein, 217 aa, Artificial Sequence
  Synthetic polypeptide
QLTVEQYKFKLHKSTSVDFFQPNRDGKYTIEGCETPPVWSTDFCMYRKYDSTRIKTEEEAFSSKRCLEWFYEYAGTDDVVGPEGMEKFCEDIGVEPENVVMLVLAWKLDAQNMGYFTLQEWLKGMTSLQCDTTEKLRNTLDYLRSFLNDSTNFKLIYRYAFDFARQSKYKVINKDQWCNVLEFSRTINLDLSNYDEDGAWPVLLDEFVEWYKDKQMS

SEQ ID NO: 31209 - protein, 103 aa, Artificial Sequence
  Synthetic polypeptide
QLTVEQYKFKLHKSTSVDFFQPNRDGKYTIEGCETPPVWSTDFCMYRKYDSTRIKTEEEAFSSKRCLEWFYEYAGTDDVVGPEGMEKFCEDIGVEPENVSQTY

SEQ ID NO: 31210 - protein, 123 aa, Artificial Sequence
  Synthetic polypeptide
QLTVEQYKFKLHKSTSVDFFQPNRDGKYTIEGCETPPVWSTDFCMYRKYDSTRIKTEEEAFSSKRCLEWFYEYAGTDDVVGPEGMEKFCEDIGVEPENMESRTVARLECNGMMSAHCNLCLPG

SEQ ID NO: 31211 - protein, 128 aa, Artificial Sequence
  Synthetic polypeptide
QLTVEQYKFKLHKSTSVDFFQPNRDGKYTIEGCETPPVWSTDFCMYRKYDSTRIKTEEEAFSSKRCLEWFYEYAGTDDVVGPEGMEKFCEDIGVEPENVVMLVLAWKLDAQNMGYFTLQEWLKGMTSL

SEQ ID NO: 31212 - protein, 179 aa, Artificial Sequence
  Synthetic polypeptide
HGTDDVVGPEGMEKFCEDIGVEPENVVMLVLAWKLDAQNMGYFTLQEWLKGMTSLQCDTTEKLRNTLDYLRSFLNDSTNFKLIYRYAFDFAREKDQRSLDINTAKCMLGLLLGKIWPLFPVFHQFLEQSKYKVINKDQWCNVLEFSRTINLDLSNYDEDGAWPVLLDEFVEWYKDKQMS

SEQ ID NO: 31213 - protein, 16 aa, Artificial Sequence
  Synthetic polypeptide
DQEIETILANTELMML

SEQ ID NO: 31214 - protein, 33 aa, Artificial Sequence
  Synthetic polypeptide
MGMVTHACNPNTGRSRRVDHEIRRSRLSWLTRN

SEQ ID NO: 31215 - protein, 144 aa, Artificial Sequence
  Synthetic polypeptide
HGTDDVVGPEGMEKFCEDIGVEPENVVMLVLAWKLDAQNMGYFTLQEWLKGMTSLQCDTTEKLRNTLDYLRSFLNDSTNFKLIYRYAFDFARQSKYKVINKDQWCNVLEFSRTINLDLSNYDEDGAWPVLLDEFVEWYKDKQMS

SEQ ID NO: 31216 - protein, 30 aa, Artificial Sequence
  Synthetic polypeptide
HGTDDVVGPEGMEKFCEDIGVEPENVSQTY

SEQ ID NO: 31217 - protein, 50 aa, Artificial Sequence
  Synthetic polypeptide
HGTDDVVGPEGMEKFCEDIGVEPENMESRTVARLECNGMMSAHCNLCLPG

SEQ ID NO: 31218 - protein, 55 aa, Artificial Sequence
  Synthetic polypeptide
HGTDDVVGPEGMEKFCEDIGVEPENVVMLVLAWKLDAQNMGYFTLQEWLKGMTSL

SEQ ID NO: 31219 - protein, 117 aa, Artificial Sequence
  Synthetic polypeptide
HGTDDVVGPEGMEKFCEDIGVEPENVVMLVLAWKLDAQNMGYFTLQEWLKGMTSLQCDTTEKLRNTLDYLRSFLNDSTNFKLIYRYAFDFARAEDGVSDCELLAGTLAEQEKRTSAA

SEQ ID NO: 31220 - protein, 292 aa, Artificial Sequence
  Synthetic polypeptide
SIIKTYFCHAHFPKNFTSHTLLRSHWRMCSTKRKMRIQETGCLSEEKDKRKFSMNITLVIWAVIRIGPNGCDSMEFHESGLLRFKQVSDMGVIHPLYKSTVGGRRNENLVITGNNQPIVFQQGTTKLSVENNKTSITSDIGMQFFDPRTQNILFSTDYETHEFHLPSGVKSLNVQKASTERITSNATSDLNIKVDGRAIVRGNEGVFIMGKTIEFHMGGNMELKAENSIILNGSVMVSTTRLPSSSSGDQLGSGDWVRYKLCMCADGTLFKVQVTSQNMGCQISDNPCGNTH

SEQ ID NO: 31221 - protein, 48 aa, Artificial Sequence
  Synthetic polypeptide
KPLEDVLYQKKDEDTGNWVSIRRERQKEVQHEHNTCYLGRDSHWTKWL

SEQ ID NO: 31222 - protein, 24 aa, Artificial Sequence
  Synthetic polypeptide
RYCHLASPDNTCYLGRDSHWTKWL

SEQ ID NO: 31223 - protein, 284 aa, Artificial Sequence
  Synthetic polypeptide
DSLSHALFSSFSTSSSLAARQETEEPSLGFLMHIEKRSEDTVIWQVPITLVIWAVIRIGPNGCDSMEFHESGLLRFKQVSDMGVIHPLYKSTVGGRRNENLVITGNNQPIVFQQGTTKLSVENNKTSITSDIGMQFFDPRTQNILFSTDYETHEFHLPSGVKSLNVQKASTERITSNATSDLNIKVDGRAIVRGNEGVFIMGKTIEFHMGGNMELKAENSIILNGSVMVSTTRLPSSSSGDQLGSGDWVRYKLCMCADGTLFKVQVTSQNMGCQISDNPCGNTH

SEQ ID NO: 31224 - protein, 13 aa, Artificial Sequence
  Synthetic polypeptide
KKDLKILSFGKSR

SEQ ID NO: 31225 - protein, 14 aa, Artificial Sequence
  Synthetic polypeptide
GLPRHVELKVPMVL

SEQ ID NO: 31226 - protein, 47 aa, Artificial Sequence
  Synthetic polypeptide
KREFSLHKLAAAHIRCYLLLLASHHDCEASLAMWNSKFQWSCKEVHA

SEQ ID NO: 31227 - protein, 328 aa, Artificial Sequence
  Synthetic polypeptide
DVTCSSLPPTMIVRPPSPCGTQSSNGPVKKSMREKAVERRSVNKEHNSNFKAGYIPIDEDRLHKTGLRGRKGNLAICVIILLFILAVINLIITLVIWAVIRIGPNGCDSMEFHESGLLRFKQVSDMGVIHPLYKSTVGGRRNENLVITGNNQPIVFQQGTTKLSVENNKTSITSDIGMQFFDPRTQNILFSTDYETHEFHLPSGVKSLNVQKASTERITSNATSDLNIKVDGRAIVRGNEGVFIMGKTIEFHMGGNMELKAENSIILNGSVMVSTTRLPSSSSGDQLGSGDWVRYKLCMCADGTLFKVQVTSQNMGCQISDNPCGNTH

SEQ ID NO: 31228 - protein, 114 aa, Artificial Sequence
  Synthetic polypeptide
DVTCSSLPPTMIVRPPSPCGTQSSNGPVKKSMREKAVERRSVNKEHNSNFKAGYIPIDEDRLHKTGLRGRKGNLAICVIILLFILAVINLILPGSQARDRRAFSGIPDAYRKKI

SEQ ID NO: 31229 - protein, 208 aa, Artificial Sequence
  Synthetic polypeptide
EKYYCLKAKNEAFHVAKMAFRHFKIHVRKSLTPSYVGSNDFENAVLDYVICHLDLYDSQSSVNDVIRAMNVNPKISFPPVVDFCLLSDFIQEICCIAFAMQALEPPLDIAYGADGEVFNDCKYRRSYDSDFTAPLVLYHVWPALMENDCVIMKGEAVTRRGAFWNSVRSVSRCRSRSLSPICPRSQIGLNTMSRSRSPSPIRCGLPRF

SEQ ID NO: 31230 - protein, 8 aa, Artificial Sequence
  Synthetic polypeptide
KLRMRHSM

SEQ ID NO: 31231 - protein, 186 aa, Artificial Sequence
  Synthetic polypeptide
EKYYCLKAKNEAFHVAKMAFRHFKIHVRKSLTPSYVGSNDFENAVLDYVICHLDLYDSQSSVNDVIRAMNVNPKISFPPVVDFCLLSDFIQEICCIAFAMQALEPPLDIAYGADGEVFNDCKYRRSYDSDFTAPLVLYHVWPALMENDCVIMKGEAVTRRGAFVRWPCIVTIHPKCLIHNGIRCDL

SEQ ID NO: 31232 - protein, 97 aa, Artificial Sequence
  Synthetic polypeptide
NTLVSVRTALLSSELVTFRDVAIEFSPEEWKCLDPAQQNLYRDVMLENYRNLVSLGFVISNPDLVTCLEQIKEPCNLKIHETAAKPPVVQHFWSLQF

SEQ ID NO: 31233 - protein, 20 aa, Artificial Sequence
  Synthetic polypeptide
VTSFRIRWCRCARRFSVLNS

SEQ ID NO: 31234 - protein, 104 aa, Artificial Sequence
  Synthetic polypeptide
NTLVSVRTALLSSELVTFRDVAIEFSPEEWKCLDPAQQNLYRDVMLENYRNLVSLGFVISNPDLVTCLEQIKEPCNLKIHETAAKPPGSDLQVYKESQCPLYRL

SEQ ID NO: 31235 - protein, 295 aa, Artificial Sequence
  Synthetic polypeptide
SESGPGTSLLHRLSCPLAMPYLPPCYDAARRPSPDAGTMLLDFSGSRISIGESAMSVVLNQLLPMIKPVTQRTNEDYSPEELLILLIYIYSVTGELTVDKDLCEAEEKVKKALAQVFCEESGLSPLLQKITDWDSSINLTFHKSKIAVDELFTSLRDIAGARSLLKQFKSVYVPGNHTHQASYKPLLKQVVEEIFHPERPDSVDIEHMSSGLTDLLKTGFSMFMKVSRPHPSDYPLLILFVVGGVTVSEVKMVKDLVASLKPGTQVIVLSTRLLKPLNIPELLFATDRLHPDLGF

SEQ ID NO: 31236 - protein, 64 aa, Artificial Sequence
  Synthetic polypeptide
TVGCYKVSLALVPLFCTGSHALSPCHTCHHVMMQQGGPHQMLEPCSWTSQAPELALGSQQCPLC

SEQ ID NO: 31237 - protein, 250 aa, Artificial Sequence
  Synthetic polypeptide
SESGPGTSLLHRLSCPLAMPYLPPCYDAARRPSPDAGTMLLDFSGSRISIGESAMSVVLNQLLPMIKPVTQRTNEDYSPEELLILLIYIYSVTGELTVDKDLCEAEEKVKKALAQVFCEESGLSPLLQKITDWDSSINLTFHKSKIAVDELFTSLRDIAGARSLLKQFKSVYVPGNHTHQVSRPHPSDYPLLILFVVGGVTVSEVKMVKDLVASLKPGTQVIVLSTRLLKPLNIPELLFATDRLHPDLGF

SEQ ID NO: 31238 - protein, 87 aa, Artificial Sequence
  Synthetic polypeptide
GGSQDGRIGTAPVYSFQHQRRRRRVISAFPSELNLGRKEHAKIFTFFFQLDTMDGNPGELTLELQTLQIKQSQNALLPAGPLTQTPV

SEQ ID NO: 31239 - protein, 7 aa, Artificial Sequence
  Synthetic polypeptide
FLHFHLS

SEQ ID NO: 31240 - protein, 94 aa, Artificial Sequence
  Synthetic polypeptide
GGSQDGRIGTAPVYSFQHQRRRRRVISAFPSELNLGRKEHAKIFTFFFQLDTMDGNPGELTLPSSLYIQELQTLQIKQSQNALLPAGPLTQTPV

SEQ ID NO: 31241 - protein, 17 aa, Artificial Sequence
  Synthetic polypeptide
DPGLALYDLAQSGMLSL

SEQ ID NO: 31242 - protein, 1172 aa, Artificial Sequence
  Synthetic polypeptide
TLDLPCMIWPKVECCHFKTAVEAPLGMKLDKKMEVFIPLSTSAASSGPWAHSLFAFIPSWPKKNLFKRESPITHRLYGDISREVQGTSENGVIFQKCALVSGSSEAQTARIWLLVNNTKTTSSANLSELLLLDSIAGLTIWDSVGNRTSEGFQAFSKKFLQVGDAFAVSYAATLQAGDLGNGESLKLPAQLTFQSSSRNRTQLKVLFSITAEENVTVLPHHGLHAAGFFIAFLLSLVLTWAALFLMVRYQCLKGNMLTRHRVWQYESKLEPLPFTSADGVNEDLSLNDQMIDILSSEDPGSMLQALEELEIATLNRADADLEACRTQISKDIIALLLKNLTSSGHLSPQVERKMSAVFKKQFLLLENEIQEEYDRKMVALTAECDLETRKKMENQYQREMMAMEEAEELLKRAGERSAVECSNLLRTLHGLEQEHLRKSLALQQEEDFAKAHRQLAVFQRNELHSIFFTQIKSAIFKGELKPEAAKMLLQNYSKIQENVEELMDFFQASKRYHLSKRFGHREYLVQNLQSSETRVQGLLSTAAAQLTHLIQKHERAGYLDEDQMEMLLERAQTEVFSIKQKLDNDLKQEKKKLHQKLITKRRRELLQKHREQRREQASVGEAFRTVEDAGQYLHQKRSLMEEHGATLEELQERLDQAALDDLRTLTLSLFEKATDELRRLQNSAMTQELLKRGVPWLFLQQILEEHGKEMAARAEQLEGEERDRDQEGVQSVRQRLKDDAPEAVTEEQAELRRWEHLIFMKLCSSVFSLSEEELLRMRQEVHGCFAQMDRSLALPKIRARVLLQQFQTAWREAEFVKLDQAVAAPELQQQSKVRKSRSKSKSKGELLKKCIEDKIHLCEEQASEDLVEKVRGELLRERVQRMEAQEGGFAQSLVALQFQKASRVTETLSAYTALLSIQDLLLEELSASEMLTKSACTQILESHSRELQELERKLEDQLVQQEAAQQQQALASWQQWVADGPGILNEPGEVDSERQVSTVLHQALSKSQTLLEQHQQCLREEQQNSVVLEDLLENMEADTFATLCSQELRLASYLARMAMVPGATLRRLLSVVLPTASQPQLLALLDSATERHVDHAAESDGGAEQADVGRRRKHQSWWQALDGKLRGDLISRGLEKMLWARKRKQRSGNQESFWQYLVGTPEIGLIEWMSEK

SEQ ID NO: 31243 - protein, 6 aa, Artificial Sequence
  Synthetic polypeptide
PWTCPV

SEQ ID NO: 31244 - protein, 1234 aa, Artificial Sequence
  Synthetic polypeptide
TLDLPCMIWPKVECCHFKTAVEAPLGMKLDKKMEVFIPLSTSAASSGPWAHSLFAFIPSWPKKNLFKRESPITHRLYGDISREVQGTSENGVIFQKCALVSGSSEAQTARIWLLVNNTKTTSSANLSELLLLDSIAGLTIWDSVGNRTSEGFQAFSKKFLQVGDAFAVSYAATLQAGDLGNGESLKLPAQLTFQSSSRNRTQLKVLFSITAEENVTVLPHHGLHAAGFFIAFLLSLVLTWAALFLMVRYQCLKGNMLTRHRVWQYESKLEPLPFTSADGVNEDLSLNDQMIDILSSEDPGSMLQALEELEIATLNRADADLEACRTQISKDIIALLLKNLTSSGHLSPQVERKMSAVFKKQFLLLENEIQEEYDRKMVALTAECDLETRKKMENQYQREMMAMEEAEELLKRAGERSAVECSNLLRTLHGLEQEHLRKSLALQQEEDFAKAHRQLAVFQRNELHSIFFTQIKSAIFKGELKPEAAKMLLQNYSKIQENVEELMDFFQASKRYHLSKRFGHREYLVQNLQSSETRVQGLLSTAAAQLTHLIQKHERAGYLDEDQMEMLLERAQTEVFSIKQKLDNDLKQEKKKLHQKLITKRRRELLQKHREQRREQASVGEAFRTVEDAGQYLHQKRSLMEEHGATLEELQERLDQAALDDLRTLTLSLFEKATDELRRLQNSAMTQELLKRGVPWLFLQQILEEHGKEMAARAEQLEGEERDRDQEGVQSVRQRLKDDAPEAVTEEQAELRRWEHLIFMKLCSSVFSLSEEELLRMRQEVHGCFAQMDRSLALPKIRARVLLQQFQTAWREAEFVKLDQAVAAPELQQQSKVRKSRSKSKSKGELLKKCIEDKIHLCEEQASEDLVEKVRGELLRERVQRMEAQEGGFAQSLVALQFQKASRVTETLSAYTALLSIQDLLLEELSASEMLTKSACTQILESHSRELQELERKLEDQLVQQEAAQQQQALASWQQWVADGPGILNEPGEVDSERQVSTVLHQALSKSQTLLEQHQQCLREEQQNSVVLEDLLENMEADTFATLCSQELRLASYLARMAMVPGATLRRLLSVVLPTASQPQLLALLDSATERHVDHAAESDGGAEQADVGRRRKHQSWWQALDGKLRGDLISRGLEKMLWARKRKQSILKKTCLPLRERMIFSGKGSWPHLSLEPIGELAPVPIVGAETIDLLNTGEKLFIFRNPKEPEISLHVPPRKKKNFLNAKKAMRALGMD

SEQ ID NO: 31245 - protein, 24 aa, Artificial Sequence
  Synthetic polypeptide
PLWQGPWKLGEVARLPTAISQHSP

SEQ ID NO: 31246 - protein, 918 aa, Artificial Sequence
  Synthetic polypeptide
LHLSVTHFLCLEVETVTSVAGSLEAWGGSPPSNSNITAFALKAKVIYPINQKFRPLADGSSNPSLHENLKQAVLPHQPVEASPSSSLGSLSQGEKDDCSSSSSVHSATSDDRFLSRTFLRVNAFPEVLACESVDVDLCIYSLHLKDLLHLDTALRQEKHMMFIQIFKMCLLDLLPKKKSDDELYQKILSKQEKDLEELEKGLQVKLSNTEMSGAGDSEYITLADVEKKEREYSEQLIDNMEAFWKQMANIQHFLVDQFKCSSSKARQLMMTLTERMIAAEGLLCDSQELQALDALERTMGRAHMAKVIEFLKLQVQEETRCRLAAISHGLELLAGEGKLSGRQKEELLTQQHKAFWQEAERFSREFVQRGKDLVTASLAHQVEGTAKLTLAQEEEQRSFLAEAQPTADPEKFLEAFHEVLERQRLMQCDLEEEENVRATEAVVALCQELYFSTVDTFQKFVDALFLQTLPGMTGLPPEECDYLRQEVQENAAWQLGKSNRFRRQQWKLFQELLEQDQQVWMEECALSSVLQTHLREDHEGTIRGVLGRLGGLTEESTRCVLQGHDLLLRSALRRLALRGNALATLTQMRLSGKKHLLQELREQRALEQGSSQCLDEHQWQLLRALEARVLEEASRLEEEAQQTRLQLQQRLLAEAQEVGQLLQQHMECAIGQALLVHARNAATKSRAKDRDDFKRTLMEAAVESVYVTSAGVSRLVQAYYQQIGRIMEDHEERKLQHLKTLQGERMENYKLRKKQELSNPSSGSRTAGGAHETSQAVHQRMLSQQKRFLAQFPVHQQMRLHAQQQQAGVMDLLEAQLETQLQEAEQNFISELAALARVPLAESKLLPAKRGLLEKPLRTKRKKPLPQERGDLGVPNNEDLASGDQTSGSLSSKRLSQQESEAGDSGNSKKMLKRRSNL

SEQ ID NO: 31247 - protein, 461 aa, Artificial Sequence
  Synthetic polypeptide
LHLSVTHFLCLEVETVTSVAGSLEAWGGSPPSNSNITAFALKAKVIYPINQKFRPLADGSSNPSLHENLKQAVLPHQPVEASPSSSLGSLSQGEKDDCSSSSSVHSATSDDRFLSRTFLRVNAFPEVLACESVDVDLCIYSLHLKDLLHLDTALRQEKHMMFIQIFKMCLLDLLPKKKSDDELYQKILSKQEKDLEELEKGLQVKLSNTEMSGAGDSEYITLADVEKKEREYSEQLIDNMEAFWKQMANIQHFLVDQFKCSSSKARQLMMTLTERMIAAEGLLCDSQELQALDALERTMGRAHMAKVIEFLKLQVQEETRCRLAAISHGLELLAGEGKLSGRQKEELLTQQHKAFWQEAERFSREFVQRGKDLVTASLAHQVEGTAKLTLAQEEEQRSFLAEAQPTADPEKFLEAFHEVLERQRLMQCDLEEEENVRATEAVVALCQKAMRRHRDTGKEAV

SEQ ID NO: 31248 - protein, 30 aa, Artificial Sequence
  Synthetic polypeptide
LQENKLRAPTDSRLCFCVMVLVCLQVLIVK

SEQ ID NO: 31249 - protein, 40 aa, Artificial Sequence
  Synthetic polypeptide
SVTVSHHPQMGLSSCRKTSSGLPLILDYASASWYWSVYKF

SEQ ID NO: 31250 - protein, 385 aa, Artificial Sequence
  Synthetic polypeptide
IMLLRHGIGLSTSSDSEMITQLLAYTPPQEQDDTPDWVARIKNLMKEAPTAYSLLIMHRDVIYAVRDPYGNRPLCIGRLIPVSDINDKEKKTSETEGWVVSSESCSFLSIGARYYREVLPGEIVEISRHNVQTLDIISRSEGNPVAFCIFEYVYFARPDSMFEDQMVYTVRYRCGQQLAIEAPVDADLVSTVPESATPAALAYAGKCGLPYVEVLCKNRYVGRTFIQPNMRLRQLGVAKKFGVLSDNFKGKRIVLVDDSIVRGNTISPIIKLLKESGAKEVHIRVASPPIKYPCFMGINIPTKEELIANKPEFDHLAEYLGANSVVYLSVEGLVSSVQEGIKFKKQKEKKHDIMIQENGNGLECFEKSGHCTACLTGKYPVELEW

SEQ ID NO: 31251 - protein, 27 aa, Artificial Sequence
  Synthetic polypeptide
LQENKLRAPTDSRLCFCVMVLVCLQVL

SEQ ID NO: 31252 - protein, 14 aa, Artificial Sequence
  Synthetic polypeptide
IMLLRHGIGLSTSS

SEQ ID NO: 31253 - protein, 12 aa, Artificial Sequence
  Synthetic polypeptide
SQLLGRLREWVL

SEQ ID NO: 31254 - protein, 473 aa, Artificial Sequence
  Synthetic polypeptide
KYKISQAWWRMPVIPATWEAEGMGLVNHVFTEDNLKKLYVSNLGIGHTRYATTGKCELENCQPFVVETLHGKIAVAHNGELVNAARLRKKLLRHGIGLSTSSDSEMITQLLAYTPPQEQDDTPDWVARIKNLMKEAPTAYSLLIMHRDVIYAVRDPYGNRPLCIGRLIPVSDINDKEKKTSETEGWVVSSESCSFLSIGARYYREVLPGEIVEISRHNVQTLDIISRSEGNPVAFCIFEYVYFARPDSMFEDQMVYTVRYRCGQQLAIEAPVDADLVSTVPESATPAALAYAGKCGLPYVEVLCKNRYVGRTFIQPNMRLRQLGVAKKFGVLSDNFKGKRIVLVDDSIVRGNTISPIIKLLKESGAKEVHIRVASPPIKYPCFMGINIPTKEELIANKPEFDHLAEYLGANSVVYLSVEGLVSSVQEGIKFKKQKEKKHDIMIQENGNGLECFEKSGHCTACLTGKYPVELEW

SEQ ID NO: 31255 - protein, 148 aa, Artificial Sequence
  Synthetic polypeptide
KYKISQAWWRMPVIPATWEAEGMGLVNHVFTEDNLKKLYVSNLGIGHTRYATTGKCELENCQPFVVETLHGKIAVAHNGELVNAARLRKKISYCLQPWSSVISIYILLAQESPTPVLGTSTSLWLVRNQATQQEVSASASWYWSVYKF

SEQ ID NO: 31256 - protein, 803 aa, Artificial Sequence
  Synthetic polypeptide
GWAPWLMPVIPTFGRPSVDVDLCIYSLHLKDLLHLDTALRQEKHMMFIQIFKMCLLDLLPKKKSDDELYQKILSKQEKDLEELEKGLQVKLSNTEMSGAGDSEYITLADVEKKEREYSEQLIDNMEAFWKQMANIQHFLVDQFKCSSSKARQLMMTLTERMIAAEGLLCDSQELQALDALERTMGRAHMAKVIEFLKLQVQEETRCRLAAISHGLELLAGEGKLSGRQKEELLTQQHKAFWQEAERFSREFVQRGKDLVTASLAHQVEGTAKLTLAQEEEQRSFLAEAQPTADPEKFLEAFHEVLERQRLMQCDLEEEENVRATEAVVALCQELYFSTVDTFQKFVDALFLQTLPGMTGLPPEECDYLRQEVQENAAWQLGKSNRFRRQQWKLFQELLEQDQQVWMEECALSSVLQTHLREDHEGTIRGVLGRLGGLTEESTRCVLQGHDLLLRSALRRLALRGNALATLTQMRLSGKKHLLQELREQRALEQGSSQCLDEHQWQLLRALEARVLEEASRLEEEAQQTRLQLQQRLLAEAQEVGQLLQQHMECAIGQALLVHARNAATKSRAKDRDDFKRTLMEAAVESVYVTSAGVSRLVQAYYQQIGRIMEDHEERKLQHLKTLQGERMENYKLRKKQELSNPSSGSRTAGGAHETSQAVHQRMLSQQKRFLAQFPVHQQMRLHAQQQQAGVMDLLEAQLETQLQEAEQNFISELAALARVPLAESKLLPAKRGLLEKPLRTKRKKPLPQERGDLGVPNNEDLASGDQTSGSLSSKRLSQQESEAGDSGNSKKMLKRRSNL

SEQ ID NO: 31257 - protein, 8 aa, Artificial Sequence
  Synthetic polypeptide
SQHLGGQV

SEQ ID NO: 31258 - protein, 19 aa, Artificial Sequence
  Synthetic polypeptide
MGTMAHACNPNIWEAKCRR

SEQ ID NO: 31259 - protein, 346 aa, Artificial Sequence
  Synthetic polypeptide
GWAPWLMPVIPTFGRPSVDVDLCIYSLHLKDLLHLDTALRQEKHMMFIQIFKMCLLDLLPKKKSDDELYQKILSKQEKDLEELEKGLQVKLSNTEMSGAGDSEYITLADVEKKEREYSEQLIDNMEAFWKQMANIQHFLVDQFKCSSSKARQLMMTLTERMIAAEGLLCDSQELQALDALERTMGRAHMAKVIEFLKLQVQEETRCRLAAISHGLELLAGEGKLSGRQKEELLTQQHKAFWQEAERFSREFVQRGKDLVTASLAHQVEGTAKLTLAQEEEQRSFLAEAQPTADPEKFLEAFHEVLERQRLMQCDLEEEENVRATEAVVALCQKAMRRHRDTGKEAV

SEQ ID NO: 31260 - protein, 18 aa, Artificial Sequence
  Synthetic polypeptide
GAAKSQGLESDWLRIWRN

SEQ ID NO: 31261 - protein, 738 aa, Artificial Sequence
  Synthetic polypeptide
RSKESGLGVRLVEDLEELEKGLQVKLSNTEMSGAGDSEYITLADVEKKEREYSEQLIDNMEAFWKQMANIQHFLVDQFKCSSSKARQLMMTLTERMIAAEGLLCDSQELQALDALERTMGRAHMAKVIEFLKLQVQEETRCRLAAISHGLELLAGEGKLSGRQKEELLTQQHKAFWQEAERFSREFVQRGKDLVTASLAHQVEGTAKLTLAQEEEQRSFLAEAQPTADPEKFLEAFHEVLERQRLMQCDLEEEENVRATEAVVALCQELYFSTVDTFQKFVDALFLQTLPGMTGLPPEECDYLRQEVQENAAWQLGKSNRFRRQQWKLFQELLEQDQQVWMEECALSSVLQTHLREDHEGTIRGVLGRLGGLTEESTRCVLQGHDLLLRSALRRLALRGNALATLTQMRLSGKKHLLQELREQRALEQGSSQCLDEHQWQLLRALEARVLEEASRLEEEAQQTRLQLQQRLLAEAQEVGQLLQQHMECAIGQALLVHARNAATKSRAKDRDDFKRTLMEAAVESVYVTSAGVSRLVQAYYQQIGRIMEDHEERKLQHLKTLQGERMENYKLRKKQELSNPSSGSRTAGGAHETSQAVHQRMLSQQKRFLAQFPVHQQMRLHAQQQQAGVMDLLEAQLETQLQEAEQNFISELAALARVPLAESKLLPAKRGLLEKPLRTKRKKPLPQERGDLGVPNNEDLASGDQTSGSLSSKRLSQQESEAGDSGNSKKMLKRRSNL

SEQ ID NO: 31262 - protein, 281 aa, Artificial Sequence
  Synthetic polypeptide
RSKESGLGVRLVEDLEELEKGLQVKLSNTEMSGAGDSEYITLADVEKKEREYSEQLIDNMEAFWKQMANIQHFLVDQFKCSSSKARQLMMTLTERMIAAEGLLCDSQELQALDALERTMGRAHMAKVIEFLKLQVQEETRCRLAAISHGLELLAGEGKLSGRQKEELLTQQHKAFWQEAERFSREFVQRGKDLVTASLAHQVEGTAKLTLAQEEEQRSFLAEAQPTADPEKFLEAFHEVLERQRLMQCDLEEEENVRATEAVVALCQKAMRRHRDTGKEAV

SEQ ID NO: 31263 - protein, 531 aa, Artificial Sequence
  Synthetic polypeptide
RHREGGCLKTEGGTGVMQPQAEEHLQPPKARRAQEGPLPEPLEGARLCQHLGFILMPSGTELYFSTVDTFQKFVDALFLQTLPGMTGLPPEECDYLRQEVQENAAWQLGKSNRFRRQQWKLFQELLEQDQQVWMEECALSSVLQTHLREDHEGTIRGVLGRLGGLTEESTRCVLQGHDLLLRSALRRLALRGNALATLTQMRLSGKKHLLQELREQRALEQGSSQCLDEHQWQLLRALEARVLEEASRLEEEAQQTRLQLQQRLLAEAQEVGQLLQQHMECAIGQALLVHARNAATKSRAKDRDDFKRTLMEAAVESVYVTSAGVSRLVQAYYQQIGRIMEDHEERKLQHLKTLQGERMENYKLRKKQELSNPSSGSRTAGGAHETSQAVHQRMLSQQKRFLAQFPVHQQMRLHAQQQQAGVMDLLEAQLETQLQEAEQNFISELAALARVPLAESKLLPAKRGLLEKPLRTKRKKPLPQERGDLGVPNNEDLASGDQTSGSLSSKRLSQQESEAGDSGNSKKMLKRRSNL

SEQ ID NO: 31264 - protein, 29 aa, Artificial Sequence
  Synthetic polypeptide
CPPERSCTSAPWTLSRSSWMPCSFRRSLA

SEQ ID NO: 31265 - protein, 96 aa, Artificial Sequence
  Synthetic polypeptide
EDIETQGRRLFEDRRRDWSDAATSRGTPAATKSQKSPGRAPPRAFGGGEALPTPWFHTNALRNGAVLQHRGHFPEVRGCPVPSDAPWHDWPPPGRV

SEQ ID NO: 31266 - protein, 2 aa, Artificial Sequence
  Synthetic polypeptide
QS

SEQ ID NO: 31267 - protein, 887 aa, Artificial Sequence
  Synthetic polypeptide
TLIMPPHSSLGDRVKPSLDEAFVIQEQNVALNFIGSRGAKPGVTKEKRIKYAKEVLQKEMLPHVGVSDFCETKKAYFLGYMVHRLLLAALGRRELDDRDHYGNKRLDLAGPLLAFLFRGMFKNLLKEVRIYAQKFIDRGKDFNLELAIKTRIISDGLKYSLATGNWGDQKKAHQARAGVSQVLNRLTFASTLSHLRRLNSPIGRDGKLAKPRQLHNTLWGMVCPAETPEGHAVGLVKNLALMAYISVGSQPSPILEFLEEWSMENLEEISPAAIADATKIFVNGCWVGIHKDPEQLMNTLRKLRRQMDIIVSEVSMIRDIREREIRIYTDAGRICRPLLIVEKQKLLLKKRHIDQLKEREYNNYSWQDLVASGVVEYIDTLEEETVMLAMTPDDLQEKEVAYCSTYTHCEIHPSMILGVCASIIPFPDHNQSPRNTYQSAMGKQAMGVYITNFHVRMDTLAHVLYYPQKPLVTTRSMEYLRFRELPAGINSIVAIASYTGYNQEDSVIMNRSAVDRGFFRSVFYRSYKEQESKKGFDQEEVFEKPTRETCQGMRHAIYDKLDDDGLIAPGVRVSGDDVIIGKTVTLPENEDELESTNRRYTKRDCSTFLRTSETGIVDQVMVTLNQEGYKFCKIRVRSVRIPQIGDKFASRHGQKGTCGIQYRQEDMPFTCEGITPDIIINPHAIPSRMTIGHLIECLQGKVSANKGEIGDATPFNDAVNVQKISNLLSDYGYHLRGNEVLYNGFTGRKITSQIFIGPTYYQRLKHMVDDKIHSRARGPIQILNRQPMEGRSRDGGLRFGEMERDCQIAHGAAQFLRERLFEASDPYQVHVCNLCGIMAIANTRTHTYECRGCRNKTQISLVRMPYACKLLFQELMSMSIAPRMMSV

SEQ ID NO: 31268 - protein, 28 aa, Artificial Sequence
  Synthetic polypeptide
SCLPTPAWVTELNLLSMKLLSSKNRMLH

SEQ ID NO: 31269 - protein, 78 aa, Artificial Sequence
  Synthetic polypeptide
QRKIIFRIKATRCGWRSVRCPACCRHTCGRTTRAPSAASWADWAASLKSPRGVSCRGMTCCCAQPSGGWHSAATPWPP

SEQ ID NO: 31270 - protein, 38 aa, Artificial Sequence
  Synthetic polypeptide
KPQGVDGGVCAVQRAADTPAGGPRGHHPRRLGPTGRPH

SEQ ID NO: 31271 - protein, 460 aa, Artificial Sequence
  Synthetic polypeptide
FMDNMNVSIEKPKGSTNCHNYEDCSEMSPYTKSVSQTSRFPPYQQHPVTKKDHLQNKSHKVWMEECALSSVLQTHLREDHEGTIRGVLGRLGGLTEESTRCVLQGHDLLLRSALRRLALRGNALATLTQMRLSGKKHLLQELREQRALEQGSSQCLDEHQWQLLRALEARVLEEASRLEEEAQQTRLQLQQRLLAEAQEVGQLLQQHMECAIGQALLVHARNAATKSRAKDRDDFKRTLMEAAVESVYVTSAGVSRLVQAYYQQIGRIMEDHEERKLQHLKTLQGERMENYKLRKKQELSNPSSGSRTAGGAHETSQAVHQRMLSQQKRFLAQFPVHQQMRLHAQQQQAGVMDLLEAQLETQLQEAEQNFISELAALARVPLAESKLLPAKRGLLEKPLRTKRKKPLPQERGDLGVPNNEDLASGDQTSGSLSSKRLSQQESEAGDSGNSKKMLKRRSNL

SEQ ID NO: 31272 - protein, 26 aa, Artificial Sequence
  Synthetic polypeptide
GWVWWLTSVIPALWEAEVHAVCPAGA

SEQ ID NO: 31273 - protein, 371 aa, Artificial Sequence
  Synthetic polypeptide
SQHFGRLRSTRCVLQGHDLLLRSALRRLALRGNALATLTQMRLSGKKHLLQELREQRALEQGSSQCLDEHQWQLLRALEARVLEEASRLEEEAQQTRLQLQQRLLAEAQEVGQLLQQHMECAIGQALLVHARNAATKSRAKDRDDFKRTLMEAAVESVYVTSAGVSRLVQAYYQQIGRIMEDHEERKLQHLKTLQGERMENYKLRKKQELSNPSSGSRTAGGAHETSQAVHQRMLSQQKRFLAQFPVHQQMRLHAQQQQAGVMDLLEAQLETQLQEAEQNFISELAALARVPLAESKLLPAKRGLLEKPLRTKRKKPLPQERGDLGVPNNEDLASGDQTSGSLSSKRLSQQESEAGDSGNSKKMLKRRSNL

SEQ ID NO: 31274 - protein, 18 aa, Artificial Sequence
  Synthetic polypeptide
PFFSATPELFSTSGLFSS

SEQ ID NO: 31275 - protein, 22 aa, Artificial Sequence
  Synthetic polypeptide
PSYDLSSQQPQSCSALLVSSVL

SEQ ID NO: 31276 - protein, 26 aa, Artificial Sequence
  Synthetic polypeptide
QHPCDPAMTFLLSNPRVVQHFWSLQF

SEQ ID NO: 31277 - protein, 63 aa, Artificial Sequence
  Synthetic polypeptide
GSMIARAPPTFRSAWASDSHRSVNPTVSCALGSGLRSGQQEDQEEGRGCPPGPESLIQCLLQL

SEQ ID NO: 31278 - protein, 182 aa, Artificial Sequence
  Synthetic polypeptide
AAHLDLDCALASRKTKKKEGGALRAQRASSNVFSNFEQTQIQEFKEAFTLMDQNRDGFIDKEDLKDTYASLGKTNVKDDELDAMLKEASGPINFTMFLNLFGEKLSGTDAEETILNAFKMLDPDGKGKINKEYIKRLLMSQADKMTAEEVDQMFQFASIDVAGNLDYKALSYVITHGEEKEE

SEQ ID NO: 31279 - protein, 70 aa, Artificial Sequence
  Synthetic polypeptide
EREPYCELRTWIWIALWPAGRPRRRKGVPSGPREPHPMSSPTLSRLRSRSSRRHSHSWIRTEMASLTRRT

SEQ ID NO: 31280 - protein, 114 aa, Artificial Sequence
  Synthetic polypeptide
AAHLDLDCALASRKTKKKEGGALRAQRASSNVFSNFEQTQIQEFKEAFTLMDQNRDGFIDKEDLKDTYASLGRYPGRTPQSPWRRRTQRSSSSRRRGPSSNGARARASEAHQRP

SEQ ID NO: 31281 - protein, 130 aa, Artificial Sequence
  Synthetic polypeptide
AAHLDLDCALASRKTKKKEGGALRAQRASSNVFSNFEQTQIQEFKEAFTLMDQNRDGFIDKEDLKDTYASLGKTNVKDDELDAMLKEASGPINFTMFLNLFGEKLSGTDAEETILNAFKMLDPDGKGKIN

SEQ ID NO: 31282 - protein, 237 aa, Artificial Sequence
  Synthetic polypeptide
KKFCYDSKQSKVIPKNRIHHKLVLPSNTPNVRRTKRTRLKPLEYWRGERIDYQGRPSGGFVISGVLSPDTISSKRKAKENIGKVNKKSNKKRICLDNDERKTNLMVNLGIPLGDPLQPTRVKDPETREIILMDLVRPQDTYQFFVKHGELKVYKTLDTPFFSTGKLILGPQEEKGKQHVGQDILVFYVNFGDLLCTLHETPYILSTGDSFYVPSGNYYNIKNLRNEESVLLFTQIKR

SEQ ID NO: 31283 - protein, 42 aa, Artificial Sequence
  Synthetic polypeptide
TLEMTKKDLGYSMNLVGKAATEFERIDCGFERSSAMTQNNLK

SEQ ID NO: 31284 - protein, 20 aa, Artificial Sequence
  Synthetic polypeptide
LVKQRQSLRGLIAVLKEVLL

SEQ ID NO: 31285 - protein, 115 aa, Artificial Sequence
  Synthetic polypeptide
KKFCYDSKQSKVIPKNRIHHKLVLPSNTPNVRRTKRTRLKPLEYWRGERIDYQGRPSGGFVISGVLSPDTISSKRKAKENIGKVNKKSNKKRICLDNDERSMNLFLKVTFRFYFK

SEQ ID NO: 31286 - protein, 722 aa, Artificial Sequence
  Synthetic polypeptide
AIMKDGELNVLDDILTEVPEQDDELYNPESEQDKNEKKGSKRKSDRMESTDTKRQKPSVHSRQLVSKPLSSSVSNNKRIVSTKGKSATEYKNEEYQRSERNKRLDADRKIRLSSSASREPYKNQPEKTCVRKRDPERRAKSPTPDGSERIGLEVDRRASRSSQSSKEEVNSEEYGSDHETGSSGSSDEQGNNTENEEEGVEEDVEEDEEVEEDAEEDEEVDEDGEEEEEEEEEEEEEEEEEEEEYEQDERDQKEEGNDYDTRSEASDSGSESVSFTDGSVRSGSGTDGSDEKKKERKRARGISPIVFDRSGSSASESYAGSEKKHEKLSSSVRAVRKDQTSKLKYVLQDARFFLIKSNNHENVSLAKAKGVWSTLPVNEKKLNLAFRSARSVILIFSVRESGKFQGFARLSSESHHGGSPIHWVLPAGMSAKMLGGVFKIDWICRRELPFTKSAHLTNPWNEHKPVKIGRDGQEIELECGTQLCLLFPPDESIDLYQVIHKMRHKRRMHSQPRSRGRPSRREPVRDVGRRRPEDYDIHNSRKKPRIDYPPEFHQRPGYLKDPRYQEVDRRFSGVRRDVFLNGSYNDYVREFHNMGPPPPWQGMPPYPGMEQPPHHPYYQHHAPPPQAHPPYSGHHPVPHEARYRDKRVHDYDMRVDDFLRRTQAVVSGRRSRPRERDRERERDRPRDNRRDRERDRGRDRERERERLCDRDRDRGERGRYRR

SEQ ID NO: 31287 - protein, 11 aa, Artificial Sequence
  Synthetic polypeptide
KMENLMFWMIF

SEQ ID NO: 31288 - protein, 15 aa, Artificial Sequence
  Synthetic polypeptide
RLSPGTMSHNERWRT

SEQ ID NO: 31289 - protein, 704 aa, Artificial Sequence
  Synthetic polypeptide
AIMKDGELNVLDDILTEVPEQDDELYNPESEQDKNEKKGSKRKSDRMESTDTKRQKPSVHSRQLVSKPLSSSVSNNKRIVSTKGKSATEYKNEEYQRSERNKRLDADRKIRLSSSASREPYKNQPEKTCVRKRDPERRAKSPTPDGSERIGLEVDRRASRSSQSSKEEVNSEEYGSDHETGSSGSSDEQGNNTENEEEGVEEDVEEDEEVEEDAEEDEEVDEDGEEEEEEEEEEEEEEEEEEEEYEQDERDQKEEGNDYDTRSEASDSGSESVSFTDGSVRSGSGTDGSDEKKKERKRARGISPIVFDRSGSSASESYADQTSKLKYVLQDARFFLIKSNNHENVSLAKAKGVWSTLPVNEKKLNLAFRSARSVILIFSVRESGKFQGFARLSSESHHGGSPIHWVLPAGMSAKMLGGVFKIDWICRRELPFTKSAHLTNPWNEHKPVKIGRDGQEIELECGTQLCLLFPPDESIDLYQVIHKMRHKRRMHSQPRSRGRPSRREPVRDVGRRRPEDYDIHNSRKKPRIDYPPEFHQRPGYLKDPRYQEVDRRFSGVRRDVFLNGSYNDYVREFHNMGPPPPWQGMPPYPGMEQPPHHPYYQHHAPPPQAHPPYSGHHPVPHEARYRDKRVHDYDMRVDDFLRRTQAVVSGRRSRPRERDRERERDRPRDNRRDRERDRGRDRERERERLCDRDRDRGERGRYRR

SEQ ID NO: 31290 - protein, 730 aa, Artificial Sequence
  Synthetic polypeptide
AIMKDGELNVLDDILTEVPEQDDELYNPESEQDKNEKKGSKRKSDRMESTDTKRQKPSVHSRQLVSKPLSSSVSNNKRIVSTKGKSATEYKNEEYQRSERNKRLDADRKIRLSSSASREPYKNQPEKTCVRKRDPERRAKSPTPDGSERIGLEVDRRASRSSQSSKEEVNSEEYGSDHETGSSGSSDEQGNNTENEEEGVEEDVEEDEEVEEDAEEDEEVDEDGEEEEEEEEEEEEEEEEEEEEYEQDERDQKEEGNDYDTRSEASDSGSESVSFTDGSVRSGSGTDGSDEKKKERKRARGISPIVFDRSGSSASESYAGSEKKHEKLSSSVRAVRKDQTSKLKYVLQDARFFLIKSNNHENVSLAKAKGVWSTLPVNEKKLNLAFRSARSVILIFSVRESGKFQGFARLSSESHHGGSPIHWVLPAGMSAKMLGGVFKIDWICRRELPFTKSAHLTNPWNEHKPVKIGRDGQEIELECGTQLCLLFPPDESIDLYQVIHKMRHKRRMHSQPRSRGRPSRREPVRDVGRRRPEDYDIHNSRKKPRIDYPPEFHQRPGYLKDPRYQEVDSFTNLIPNRRFSGVRRDVFLNGSYNDYVREFHNMGPPPPWQGMPPYPGMEQPPHHPYYQHHAPPPQAHPPYSGHHPVPHEARYRDKRVHDYDMRVDDFLRRTQAVVSGRRSRPRERDRERERDRPRDNRRDRERDRGRDRERERERLCDRDRDRGERGRYRR

SEQ ID NO: 31291 - protein, 319 aa, Artificial Sequence
  Synthetic polypeptide
TPGRNWHLESGHLELAYDLKKWDQFYSEVLGRPTTLFETMGKAEMWLIRTYWDFEFPRPFLPNVDFVGGLHCKPAKPLPKEMEEFVQSSGENGIVVFSLGSMISNMSEESANMIASALAQIPQKVLWRFDGKKPNTLGSNTRLYKWLPQNDLLGHPKTKAFITHGGTNGIYEAIYHGIPMVGIPLFADQHDNIAHMKAKGAALSVDIRTMSSRDLLNALKSVINDPIYKENIMKLSRIHHDQPVKPLDRAVFWIEFVMRHKGAKHLRVAAHNLTWIQYHSLDVIAFLLACVATMIFMITKCCLFCFRKLAKTGKKKKRD

SEQ ID NO: 31292 - protein, 43 aa, Artificial Sequence
  Synthetic polypeptide
EIAPVEHLTRSTRSRPPWRINTVAEHREGTGTWSLDIWNLHMI

SEQ ID NO: 31293 - protein, 74 aa, Artificial Sequence
  Synthetic polypeptide
GSPLGGLSLPCGASLWGTPGSLSDEIQRALLGRKLPQWNTSPDQHVAGPRGGLTQWLNTGKELALGVWTSGTCI

SEQ ID NO: 31294 - protein, 21 aa, Artificial Sequence
  Synthetic polypeptide
TPGRNWHLESRHLKFDIKRML

SEQ ID NO: 31295 - protein, 3 aa, Artificial Sequence
  Synthetic polypeptide
NLI

SEQ ID NO: 31296 - protein, 379 aa, Artificial Sequence
  Synthetic polypeptide
CWKSAWSLHLEGDRAGSTGGTSRVPVTFGCFDQDELKEAQRRKKQLEERCRVEESIGNAVLTWNNEILPNWETMWCSRKVRDLWWQGIPPSVRGKVWSLAIGNELNITHELFDICLARAKERWRSLSTGGSEVENEDAGFSAADREASLELIKLDISRTFPNLCIFQQGGPYHDMLHSILGAYTCYRPDVGYVQGMSFIAAVLILNLDTADAFIAFSNLLNKPCQMAFFRVDHGLMLTYFAAFEVFFEENLPKLFAHFKKNNLTPDIYLIDWIFTLYSKSLPLDLACRIWDVFCRDGEEFLFRTALGILKLFEDILTKMDFIHMAQFLTRLPEDLPAEELFASIATIQMQSRNKKWAQVLTALQKDSREMEKGSPSLRH

SEQ ID NO: 31297 - protein, 9 aa, Artificial Sequence
  Synthetic polypeptide
RSVVLIRMS

SEQ ID NO: 31298 - protein, 162 aa, Artificial Sequence
  Synthetic polypeptide
SQHFGRPRRVDHLRSGVRDQPNQHAQEDERIVLVDNKCKCARITSRIIRSSEDPNEDIVERNIRIIVPLNNRENISDPTSPLRTRFVYHLSDLCKKCDPTEVELDNQIVTATQSNICDEDSATETCYTYDRNKCYTAVVPLVYGGETKMVETALTPDACYPD

SEQ ID NO: 31299 - protein, 55 aa, Artificial Sequence
  Synthetic polypeptide
GQEFETSLTNMPKKMKGLFLLTTNVSVPGLLPGSSVLPKILMRTLWRETSELLFL

SEQ ID NO: 31300 - protein, 6 aa, Artificial Sequence
  Synthetic polypeptide
PTCPRR

SEQ ID NO: 31301 - protein, 151 aa, Artificial Sequence
  Synthetic polypeptide
SQHFGRPRRVDHLRSGVRDQPNQHAQEDERIVLVDNKCKCARITSRIIRSSEDPNEDIVERNIRIIVPLNNRENISDPTSPLRTRFVYHLSDLCKKCDPTEVELDNQIVTATQSNICDEDSATETCYTYDRNKCYTAVVPLVYGGETKMVE

SEQ ID NO: 31302 - protein, 144 aa, Artificial Sequence
  Synthetic polypeptide
SQHFGRPRRVDHLRSGVRDQPNQHAQEDERIVLVDNKCKCARITSRIIRSSEDPNEDIVERNIRIIVPLNNRENISDPTSPLRTRFVYHLSDLCKKCDPTEVELDNQIVTATQSNICDEDSATETCYTYDRNKCYTAVVPLVYG

SEQ ID NO: 31303 - protein, 73 aa, Artificial Sequence
  Synthetic polypeptide
SQHFGRPRRVDHLRSGVRDQPNQHAQEDERIVLVDNKCKCARITSRIIRSSEDPNEDIVERNIRIIVPLNNRE

SEQ ID NO: 31304 - protein, 51 aa, Artificial Sequence
  Synthetic polypeptide
TQEAEVAPKKMKGLFLLTTNVSVPGLLPGSSVLPKILMRTLWRETSELLFL

SEQ ID NO: 31305 - protein, 13 aa, Artificial Sequence
  Synthetic polypeptide
SLEPRKRRLRPRR

SEQ ID NO: 31306 - protein, 158 aa, Artificial Sequence
  Synthetic polypeptide
FQLLRRLRQDNRLNPGSGGCAQEDERIVLVDNKCKCARITSRIIRSSEDPNEDIVERNIRIIVPLNNRENISDPTSPLRTRFVYHLSDLCKKCDPTEVELDNQIVTATQSNICDEDSATETCYTYDRNKCYTAVVPLVYGGETKMVETALTPDACYPD

SEQ ID NO: 31307 - protein, 147 aa, Artificial Sequence
  Synthetic polypeptide
FQLLRRLRQDNRLNPGSGGCAQEDERIVLVDNKCKCARITSRIIRSSEDPNEDIVERNIRIIVPLNNRENISDPTSPLRTRFVYHLSDLCKKCDPTEVELDNQIVTATQSNICDEDSATETCYTYDRNKCYTAVVPLVYGGETKMVE

SEQ ID NO: 31308 - protein, 140 aa, Artificial Sequence
  Synthetic polypeptide
FQLLRRLRQDNRLNPGSGGCAQEDERIVLVDNKCKCARITSRIIRSSEDPNEDIVERNIRIIVPLNNRENISDPTSPLRTRFVYHLSDLCKKCDPTEVELDNQIVTATQSNICDEDSATETCYTYDRNKCYTAVVPLVYG

SEQ ID NO: 31309 - protein, 69 aa, Artificial Sequence
  Synthetic polypeptide
FQLLRRLRQDNRLNPGSGGCAQEDERIVLVDNKCKCARITSRIIRSSEDPNEDIVERNIRIIVPLNNRE

SEQ ID NO: 31310 - protein, 1137 aa, Artificial Sequence
  Synthetic polypeptide
MLREESRRLALAAKREKRKEKRRKKKEEQRRKLEEIEAKNKENFELQAAQEKEKLKVEDEPEVLTEPPSATTTTTIGISATWTTLAGSHGKRNNTITTTSSKRKNRKNKITPENVQIIFDDPLPISYSQPEKVNGESKSSSTSESGDSDNMRISSCSDESSNSNSSRKSDNHSPAVVTTTVSSKKQPSVLVTFPKEERKSVSGKASIKLSETISEGTSNSLSTCTKSGPSPLSSPNGKLTVASPKRGQKREEGWKEVVRRSKKVSVPSTVISRVIGRGGCNINAIREFTGAHIDIDKQKDKTGDRIITIRGGTESTRQATQLINALIKDPDKEIDELIPKNRLKSSSANSKIGSSAPTTTAANTSLMGIKMTTVALSSTSQTATALTVPAISSASTHKTIKNPVNNVRPGFPVSLPLAYPPPQFAHALLAAQTFQQIRPPRLPMTHFGGTFPPAQSTWGPFPVRPLSPARATNSPKPHMVPRHSNQNSSGSQVNSAGSLTSSPTTTTSSSASTVPGTSTNGSPSSPSVRRQLFVTVVKTSNATTTTVTTTASNNNTAPTNATYPMPTAKEHYPVSSPSSPSPPAQPGGVSRNSPLDCGSASPNKVASSSEQEAGSPPVVETTNTRPPNSSSSSGSSSAHSNQQQPPGSVSQEPRPPLQQSQVPPPEVRMTVPPLATSSAPVAVPSTAPVTYPMPQTPMGCPQPTPKMETPAIRPPPHGTTAPHKNSASVQNSSVAVLSVNHIKRPHSVPSSVQLPSTLSTQSACQNSVHPANKPIAPNFSAPLPFGPFSTLFENSPTSAHAFWGGSVVSSQSTPESMLSGKSSYLPNSDPLHQSDTSKAPGFRPPLQRPAPSPSGIVNMDSPYGSVTPSSTHLGNFASNISGGQMYGPGAPLGGAPAAANFNRQHFSPLSLLTPCSSASNDSSAQSVSSGVRAPSPAPSSVPLGSEKPSNVSQDRKVPVPIGTERSARIRQTGTSAPSVIGSNLSTSVGHSGIWSFEGIGGNQDKVDWCNPGMGNPMIHRPMSDPGVFSQHQAMERDSTGIVTPSGTFHQHVPAGYMDFPKVGGMPFSVYGNAMIPPVAPIPDGAGGPIFNGPHAADPSWNSLIKMVSSSTENNGPQTVWTGPWAPHMNSVHMNQLG

SEQ ID NO: 31311 - protein, 41 aa, Artificial Sequence
  Synthetic polypeptide
NLSHSRFHTFHSLIIAFYLFNFTPSRILLLIILPTPPTNKC

SEQ ID NO: 31312 - protein, 44 aa, Artificial Sequence
  Synthetic polypeptide
SCQHHRPINVKGRKSEAGFGCEKRKKKREEKEEKGRTKKETRRN

SEQ ID NO: 31313 - protein, 29 aa, Artificial Sequence
  Synthetic polypeptide
MLREESRRLALAAKREKRKEKRRKKKEEQ

SEQ ID NO: 31314 - protein, 37 aa, Artificial Sequence
  Synthetic polypeptide
SCQHHRPINVKGRKSEAGFGCEKRKKKREEKEEKGRT

SEQ ID NO: 31315 - protein, 1269 aa, Artificial Sequence
  Synthetic polypeptide
SQLLWRLRGAHIDVRNKKGNTPLWLAANGGHLDVVQLLVQAGADVDAADNRKITPLMAAFRKGHVKVVRYLVKEVNQFPSDSECMRYIATITDKEMLKKCHLCMESIVQAKDRQAAEANKNASILLEELDLEKLREESRRLALAAKREKRKEKRRKKKEEQRRKLEEIEAKNKENFELQAAQEKEKLKVEDEPEVLTEPPSATTTTTIGISATWTTLAGSHGKRNNTITTTSSKRKNRKNKITPENVQIIFDDPLPISYSQPEKVNGESKSSSTSESGDSDNMRISSCSDESSNSNSSRKSDNHSPAVVTTTVSSKKQPSVLVTFPKEERKSVSGKASIKLSETISEGTSNSLSTCTKSGPSPLSSPNGKLTVASPKRGQKREEGWKEVVRRSKKVSVPSTVISRVIGRGGCNINAIREFTGAHIDIDKQKDKTGDRIITIRGGTESTRQATQLINALIKDPDKEIDELIPKNRLKSSSANSKIGSSAPTTTAANTSLMGIKMTTVALSSTSQTATALTVPAISSASTHKTIKNPVNNVRPGFPVSLPLAYPPPQFAHALLAAQTFQQIRPPRLPMTHFGGTFPPAQSTWGPFPVRPLSPARATNSPKPHMVPRHSNQNSSGSQVNSAGSLTSSPTTTTSSSASTVPGTSTNGSPSSPSVRRQLFVTVVKTSNATTTTVTTTASNNNTAPTNATYPMPTAKEHYPVSSPSSPSPPAQPGGVSRNSPLDCGSASPNKVASSSEQEAGSPPVVETTNTRPPNSSSSSGSSSAHSNQQQPPGSVSQEPRPPLQQSQVPPPEVRMTVPPLATSSAPVAVPSTAPVTYPMPQTPMGCPQPTPKMETPAIRPPPHGTTAPHKNSASVQNSSVAVLSVNHIKRPHSVPSSVQLPSTLSTQSACQNSVHPANKPIAPNFSAPLPFGPFSTLFENSPTSAHAFWGGSVVSSQSTPESMLSGKSSYLPNSDPLHQSDTSKAPGFRPPLQRPAPSPSGIVNMDSPYGSVTPSSTHLGNFASNISGGQMYGPGAPLGGAPAAANFNRQHFSPLSLLTPCSSASNDSSAQSVSSGVRAPSPAPSSVPLGSEKPSNVSQDRKVPVPIGTERSARIRQTGTSAPSVIGSNLSTSVGHSGIWSFEGIGGNQDKVDWCNPGMGNPMIHRPMSDPGVFSQHQAMERDSTGIVTPSGTFHQHVPAGYMDFPKVGGMPFSVYGNAMIPPVAPIPDGAGGPIFNGPHAADPSWNSLIKMVSSSTENNGPQTVWTGPWAPHMNSVHMNQLG

SEQ ID NO: 31316 - protein, 19 aa, Artificial Sequence
  Synthetic polypeptide
AWWHGTVVPATLEAEGSSY

SEQ ID NO: 31317 - protein, 161 aa, Artificial Sequence
  Synthetic polypeptide
SQLLWRLRGAHIDVRNKKGNTPLWLAANGGHLDVVQLLVQAGADVDAADNRKITPLMAAFRKGHVKVVRYLVKEVNQFPSDSECMRYIATITDKEMLKKCHLCMESIVQAKDRQAAEANKNASILLEELDLEKLREESRRLALAAKREKRKEKRRKKKEEQ

SEQ ID NO: 31318 - protein, 16 aa, Artificial Sequence
  Synthetic polypeptide
YLGLFQGCVSSRCTQE

SEQ ID NO: 31319 - protein, 93 aa, Artificial Sequence
  Synthetic polypeptide
YLGLFQGCVSSRCTYLYEIARRHPYFYAPELLFFAKRYKAAFTECCQAADKAACLLPKLDELRDEGKASSAKQRLKCASLQKFGERAFKAWAV

SEQ ID NO: 31320 - protein, 17 aa, Artificial Sequence
  Synthetic polypeptide
HMLARLQKKGKNPQGTT

SEQ ID NO: 31321 - protein, 385 aa, Artificial Sequence
  Synthetic polypeptide
SDQKTWADTSQKKTYKQPTNMKKCSSSLIREMQVKTTVRHHLTPDRMAFIKKSKNNICWRGCRKKGKILREQLNSLLKTYNIFYENQKNLHILYGETEDGKLIVEGMLDIFWGVKRPIQLKIQDEKPFSSFTSMKSSDVFSSKGMTRWGEFDDLYRISELDRTQIPMSEKRNSQEDYLSYHSNTLKPHAKDEPDSPVLYRTMSEAALVRKRMKPLMMDRKERQKNRASINGHFYNHETSIFIPAFESETKVRVNSNMRTEEVIKQLLQKFKIENSPQDFALHIIFATGEQRRLKKTDIPLLQRLLQGPSEKNARIFLMDKDAEEISSDVAQYINFHFSLLESILQRLNEEEKREIQRIVTKFNKEKAIILKCLQNKLVIKTETTV

SEQ ID NO: 31322 - protein, 26 aa, Artificial Sequence
  Synthetic polypeptide
KSQKITYVGEAAEKREKSSGNNLILY

SEQ ID NO: 31323 - protein, 351 aa, Artificial Sequence
  Synthetic polypeptide
SDQKTWADTSQKKTYKQPTNMKKCSSSLIREMQVKTTVRHHLTPDRMAFIKKSKNNICWRGCRKKGKILREQLNSLLKTYNIFYENQKNLHILYGETEDGKLIVEGMLDIFWGVKRPIQLKIQDEKPFSSFTSMKSSDVFSSKGMTRWGEFDDLYRISELDRTQIPMSEKRNSQEDYLSYHSNTLKPHAKDEPDSPVLYRTMSEAALVRKRMKPLMMDRKERQKNRASINGHFYNHEIENSPQDFALHIIFATGEQRRLKKTDIPLLQRLLQGPSEKNARIFLMDKDAEEISSDVAQYINFHFSLLESILQRLNEEEKREIQRIVTKFNKEKAIILKCLQNKLVIKTETTV

SEQ ID NO: 31324 - protein, 95 aa, Artificial Sequence
  Synthetic polypeptide
VRRQRLLRGDEVVFFEGIPKLITSDMVKEGAAVIDVGINYVHDPVTGKTKLVGDVDFEAVKKKAGFITPVPGGVGPMTVAMLLKNTLLAAKKIIY

SEQ ID NO: 31325 - protein, 13 aa, Artificial Sequence
  Synthetic polypeptide
EETRWCSLKVFQS

SEQ ID NO: 31326 - protein, 58 aa, Artificial Sequence
  Synthetic polypeptide
VRRQRLLRGDEVVFFEGIPKLITSDMVKEGAAVIDVGINYVHDPVTGKTKLVGDVDFE

SEQ ID NO: 31327 - protein, 34 aa, Artificial Sequence
  Synthetic polypeptide
GRTRWLMPVIPALWEAEAGGSRGQEIKTILANTV

SEQ ID NO: 31328 - protein, 100 aa, Artificial Sequence
  Synthetic polypeptide
SQHFGRPRRADHGVRRSRPSWRTRCEVGYTGVRCEHFFLTVHQPLSKEYVALTVILIILFLITVVGSTYYFCRWYRNRKSKEPKKEYERVTSGDPELPQV

SEQ ID NO: 31329 - protein, 47 aa, Artificial Sequence
  Synthetic polypeptide
PDALAHACNPSTLGGRGGRITGSGDQDHPGEHGVKWVILVSDVNTSF

SEQ ID NO: 31330 - protein, 15 aa, Artificial Sequence
  Synthetic polypeptide
CWHPPRGHPCQLLTQ

SEQ ID NO: 31331 - protein, 952 aa, Artificial Sequence
  Synthetic polypeptide
GADAGILLVVILVSSSLSDRDQSLFLSADEGATFQKQPIPFFVETLIFHPKEEDKVLAYTKESKLYVSSDLGKKWTLLQERVTKDHVFWSVSGVDADPDLVHVEAQDLGGDFRYVTCAIHNCSEKMLTAPFAGPIDHGSLTVQDDYIFFKATSANQTKYYVSYRRNEFVLMKLPKYALPKDLQIISTDESQVFVAVQEWYQMDTYNLYQSDPRGVRYALVLQDVRSSRQAEESVLIDILEVRGVKGVFLANQKIDGKVMTLITYNKGRDWDYLRPPSMDMNGKPTNCKPPDCHLHLHLRWADNPYVSGTVHTKDTAPGLIMGAGNLGSQLVEYKEEMYITSDCGHTWRQVFEEEHHILYLDHGGVIVAIKDTSIPLKILKFSVDEGLTWSTHNFTSTSVFVDGLLSEPGDETLVMTVFGHISFRSDWELVKVDFRPSFSRQCGEEDYSSWELSNLQGDRCIMGQQRSFRKRKSTSWCIKGRSFTSALTSRVCECRDSDFLCDYGFERSSSSESSTNKCSANFWFNPLSPPDDCALGQTYTSSLGYRKVVSNVCEGGVDMQQSQVQLQCPLTPPRGLQVSIQGEAVAVRPGEDVLFVVRQEQGDVLTTKYQVDLGDGFKAMYVNLTLTGEPIRHRYESPGIYRVSVRAENTAGHDEAVLFVQVNSPLQALYLEVVPVIGLNQEVNLTAVLLPLNPNLTVFYWWIGHSLQPLLSLDNSVTTRFSDTGDVRVTVQAACGNSVLQDSRVLRVLDQFQVMPLQFSKELDAYNPNTPEWREDVGLVVTRLLSKETSVPQELLVTVVKPGLPTLADLYVLLPPPRPTRKRSLSSDKRLAAIQQVLNAQKISFLLRGGVRVLVALRDTGTGAEQLGGGGGYWAVVVLFVIGLFAAGAFILYKFKRKRPGRTVYAQMHNEKEQEMTSPVSHSEDVQGAVQGNHSGVVLSINSREMHSYLVS

SEQ ID NO: 31332 - protein, 104 aa, Artificial Sequence
  Synthetic polypeptide
EASSSVPGQPSELTRSSSTRKVPRLPQPKMYCGVLVGSWDRKRKYWWKLNKAWHLENTKVLMLASSSWSSLSAPHSVTGTRAYSSAQTKAPPFRSSPFPSSWKL

SEQ ID NO: 31333 - protein, 967 aa, Artificial Sequence
  Synthetic polypeptide
GADAGILLVVILVSSSLSDRDQSLFLSADEGATFQKQPIPFFVETLIFHPKEEDKVLAYTKESKLYVSSDLGKKWTLLQERVTKDHVFWSVSGVDADPDLVHVEAQDLGGDFRYVTCAIHNCSEKMLTAPFAGPIDHGSLTVQDDYIFFKATSANQTKYYVSYRRNEFVLMKLPKYALPKDLQIISTDESQVFVAVQEWYQMDTYNLYQSDPRGVRYALVLQDVRSSRQAEESVLIDILEVRGVKGVFLANQKIDGKVMTLITYNKGRDWDYLRPPSMDMNGKPTNCKPPDCHLHLHLRWADNPYVSGTVHTKDTAPGLIMGAGNLGSQLVEYKEEMYITSDCGHTWRQVFEEEHHILYLDHGGVIVAIKDTSIPLKILKFSVDEGLTWSTHNFTSTSVFVDGLLSEPGDETLVMTVFGHISFRSDWELVKVDFRPSFSRQCGEEDYSSWELSNLQGDRCIMGQQRSFRKRKSTSWCIKGRSFTSALTSRVCECRDSDFLCDYGFERSSSSESSTNKCSANFWFNPLSPPDDCALGQTYTSSLGYRKVVSNVCEGGVDMQQSQVQLQCPLTPPRGLQVSIQGEAVAVRPGEDVLFVVRQEQGDVLTTKYQVDLGDGFKAMYVNLTLTGEPIRHRYESPGIYRVSVRAENTAGHDEAVLFVQVNSPLQALYLEVVPVIGLNQEVNLTAVLLPLNPNLTVFYWWIGHSLQPLLSLDNSVTTRFSDTGDVRVTVQAACGNSVLQDSRVLRVLDQFQVMPLQFSKELDAYNPNTPEWREDVGLVVTRLLSKETSVPQELLVTVVKPGLPTLADLYVLLPPPRPTRKRSLSSDKRLAAIQQVLNAQKISFLLRGGVRVLVALRDTGTGAEQLGGGGGYWAVVVLFVIGLFAAGAFILYKFKSRKRPGRTVYAQMHNEKEQEMTSPVSHSEDVQGAVQGEEFIDDDLDSQTLGNHSGVVLSINSREMHSYLVS

SEQ ID NO: 31334 - protein, 43 aa, Artificial Sequence
  Synthetic polypeptide
DATFFSLHSAMIVRPPPPRGTKHRKRKQEQEEEQKPRREKCIS

SEQ ID NO: 31335 - protein, 30 aa, Artificial Sequence
  Synthetic polypeptide
GLPRHVELNTGKGNKNRKKNKNQEERNAFH

SEQ ID NO: 31336 - protein, 42 aa, Artificial Sequence
  Synthetic polypeptide
LKSPWALNNQQPIPRNPSSEKGSLFLHQHQPRDYPPTILERP

SEQ ID NO: 31337 - protein, 111 aa, Artificial Sequence
  Synthetic polypeptide
ITSSQYPGTPVVRKGRCSCISTNQGTIHLQSLKDLKQFAPSPSCEKIEIIATLKNGVQTCLNPDSADVKELIKKWEKQVSQKKKQKNGKKHQKKKVLKVRKSQRSRQKKTT

SEQ ID NO: 31338 - protein, 9 aa, Artificial Sequence
  Synthetic polypeptide
PAANTQEPQ

SEQ ID NO: 31339 - protein, 17 aa, Artificial Sequence
  Synthetic polypeptide
CTPVISPTQETEAEKWD

SEQ ID NO: 31340 - protein, 283 aa, Artificial Sequence
  Synthetic polypeptide
SHLLRRLRQKNGTNDGDYVFLTGEDSYLNFTKIVEWNGKTSLDWWITDKCNMINGTDGDSFHPLITKDEVLYVFPSDFCRSVYITFSDYESVQGLPAFRYKVPAEILANTSDNAGFCIPEGNCLGSGVLNVSICKNGAPIIMSFPHFYQADERFVSAIEGMHPNQEDHETFVDINPLTGIILKAAKRFQINIYVKKLDDFVETGDIRTMVFPVMYLNESVHIDKETASRLKSMINTTLIITNIPYIIMALGVFFGLVFTWLACKGQGSMDEGTADERAPLIRT

SEQ ID NO: 31341 - protein, 13 aa, Artificial Sequence
  Synthetic polypeptide
GRKMGLMMETMFF

SEQ ID NO: 31342 - protein, 29 aa, Artificial Sequence
  Synthetic polypeptide
KLLCFLYSLQNRRRRGQSRHPELQTAGWG

SEQ ID NO: 31343 - protein, 1957 aa, Artificial Sequence
  Synthetic polypeptide
GLCRSKSCYASCTACRTVEEGGKADTLSSKLQAGDEVVHINEVTLSSSRKEAVSLVKGSYKTLRLVVRRDVCTDPGHADTGASNFVSPEHLTSGPQHRKAAWSGGVKLRLKHRRSEPAGRPHSWHTTKSGEKQPDASMMQISQGMIGPPWHQSYHSSSSTSDLSNYDHAYLRRSPDQCSSQGSMESLEPSGAYPPCHLSPAKSTGSIDQLSHFHNKRDSAYSSFSTSSSILEYPHPGISGRERSGSMDNTSARGGLLEGMRQADIRYVKTVYDTRRGVSAEYEVNSSALLLQGREARASANGQGYDKWSNIPRGKGVPPPSWSQQCPSSLETATDNLPPKVGAPLPPARSDSYAAFRHRERPSSWSSLDQKRLCRPQANSLGSLKSPFIEEQLHTVLEKSPENSPPVKPKHNYTQKAQPGQPLLPTSIYPVPSLEPHFAQVPQPSVSSNGMLYPALAKESGYIAPQGACNKMATIDENGNQNGSGRPGFAFCQPLEHDLLSPVEKKPEATAKYVPSKVHFCSVPENEEDASLKRHLTPPQGNSPHSNERKSTHSNKPSSHPHSLKCPQAQAWQAGEDKRSSRLSEPWEGDFQEDHNANLWRRLEREGLGQSLSGNFGKTKSAFSSLQNIPESLRRHSSLELGRGTQEGYPGGRPTCAVNTKAEDPGRKAAPDLGSHLDRQVSYPRPEGRTGASASFNSTDPSPEEPPAPSHPHTSSLGRRGPGPGSASALQGFQYGKPHCSVLEKVSKFEQREQGSQRPSVGGSGFGHNYRPHRTVSTSSTSGNDFEETKAHIRFSESAEPLGNGEQHFKNGELKLEEASRQPCGQQLSGGASDSGRGPQRPDARLLRSQSTFQLSSEPEREPEWRDRPGSPESPLLDAPFSRAYRNSIKDAQSRVLGATSFRRRDLELGAPVASRSWRPRPSSAHVGLRSPEASASASPHTPRERHSVTPAEGDLARPVPPAARRGARRRLTPEQKKRSYSEPEKMNEVGIVEEAEPAPLGPQRNGMRFPESSVADRRRLFERDGKACSTLSLSGPELKQFQQSALADYIQRKTGKRPTSAAGCSLQEPGPLRERAQSAYLQPGPAALEGSGLASASSLSSLREPSLQPRREATLLPATVAETQQAPRDRSSSFAGGRRLGERRRGDLLSGANGGTRGTQRGDETPREPSSWGARAGKSMSAEDLLERSDVLAGPVHVRSRSSPATADKRQDVLLGQDSGFGLVKDPCYLAGPGSRSLSCSERGQEEMLPLFHHLTPRWGGSGCKAIGDSSVPSECPGTLDHQRQASRTPCPRPPLAGTQGLVTDTRAAPLTPIGTPLPSAIPSGYCSQDGQTGRQPLPPYTPAMMHRSNGHTLTQPPGPRGCEGDGPEHGVEEGTRKRVSLPQWPPPSRAKWAHAAREDSLPEESSAPDFANLKHYQKQQSLPSLCSTSDPDTPLGAPSTPGRISLRISESVLRDSPPPHEDYEDEVFVRDPHPKATSSPTFEPLPPPPPPPPSQETPVYSMDDFPPPPPHTVCEAQLDSEDPEGPRPSFNKLSKVTIARERHMPGAAHVVGSQTLASRLQTSIKGSEAESTPPSFMSVHAQLAGSLGGQPAPIQTQSLSHDPVSGTQGLEKKVSPDPQKSSEDIRTEALAKEIVHQDKSLADILDPDSRLKTTMDLMEGLFPRDVNLLKENSVKRKAIQRTVSSSGCEGKRNEDKEAVSMLVNCPAYYSVSAPKAELLNKIKEMPAEVNEEEEQADVNEKKAELIGSLTHKLETLQEAKGSLLTDIKLNNALGEEVEALISELCKPNEFDKYRMFIGDLDKVVNLLLSLSGRLARVENVLSGLGEDASNEERSSLYEKRKILAGQHEDARELKENLDRRERVVLGILANYLSEEQLQDYQHFVKMKSTLLIEQRKLDDKIKLGQEQVKCLLESLPSDFIPKAGALALPPNLTSEPIPAGGCTFSGIFPTLTSPL

SEQ ID NO: 31344 - protein, 30 aa, Artificial Sequence
  Synthetic polypeptide
KLPEASAEVKAAMLPVQPAEPSKKGAKQTP

SEQ ID NO: 31345 - protein, 4 aa, Artificial Sequence
  Synthetic polypeptide
QRKE

SEQ ID NO: 31346 - protein, 442 aa, Artificial Sequence
  Synthetic polypeptide
NKKGWKLLLRADDIMLSDDKEKNEELRNLSLSGHVGFDSLPDQLVNKSTSQGFCFNILCVGETGIGKSTLMDTLFNTKFESDPATHNEPGVRLKARSYELQESNVRLKLTIVDTVGFGDQINKDDSYKPIVEYIDAQFEAYLQEELKIKRSLFNYHDTRIHACLYFIAPTGHSLKSLDLVTMKKLDSKVNIIPIIAKADTIAKNELHKFKSKIMSELVSNGVQIYQFPTDEETVAEINATMSVHLPFAVVGSTEEVKIGNKMAKARQYPWGVVQVENENHCDFVKLREMLIRVNMEDLREQTHTRHYELYRRCKLEEMGFKDTDPDSKPFSLQETYEAKRNEFLGELQKKEEEMRQMFVMRVKEKEAELKEAEKELHEKFDLLKRTHQEEKKKVEDKKKELEEEVNNFQKKKAAAQLLQSQAQQSGAQQTKKDKDKKNASFT

SEQ ID NO: 31347 - protein, 55 aa, Artificial Sequence
  Synthetic polypeptide
CYQMTKKRMKSFETCLCLAMWDLTASLTSWSTSLLLKDSVSTSFVLVRQALANPR

SEQ ID NO: 31348 - protein, 438 aa, Artificial Sequence
  Synthetic polypeptide
NKKGWKLLLRADDIMLSDDKEKNEELRNLSLSGHVGFDSLPDQLVNKSTSQGFCFNILCVGETGIGKSTLMDTLFNTKFESDPATHNEPGVRLKARSYELQESNVRLKLTIVDTVGFGDQINKDDSYKPIVEYIDAQFEAYLQEELKIKRSLFNYHDTRIHACLYFIAPTGHSLKSLDLVTMKKLDSKVNIIPIIAKADTIAKNELHKFKSKIMSELVSNGVQIYQFPTDEETVAEINATMSVHLPFAVVGSTEEVKIGNKMAKARQYPWGVVQVENENHCDFVKLREMLIRVNMEDLREQTHTRHYELYRRCKLEEMGFKDTDPDSKPFSLQETYEAKRNEFLGELQKKEEEMRQMFVMRVKEKEAELKEAEKELHEKFDLLKRTHQEEKKKVEDKKKELEEEVNNFQKKKAAAQLLQSQAQQSGAQQTKKDKDKKK

SEQ ID NO: 31349 - protein, 393 aa, Artificial Sequence
  Synthetic polypeptide
NKKGWKLLLRADDIMLSDDKEKNEELRNLSLSGHVGFDSLPDQLVNKSTSQGFCFNILCVGETGIGKSTLMDTLFNTKFESDPATHNEPGVRLKARSYELQESNVRLKLTIVDTVGFGDQINKDDSYKPIVEYIDAQFEAYLQEELKIKRSLFNYHDTRIHACLYFIAPTGHSLKSLDLVTMKKLDSKVNIIPIIAKADTIAKNELHKFKSKIMSELVSNGVQIYQFPTDEETVAEINATMSVHLPFAVVGSTEEVKIGNKMAKARQYPWGVVQVENENHCDFVKLREMLIRVNMEDLREQTHTRHYELYRRCKLEEMGFKDTDPDSKPFSLQETYEAKRNEFLGELQKKEEEMRQMFVMRVKEKEAELKEAEKELHEKFDLLKRTHQEEKKK

SEQ ID NO: 31350 - protein, 445 aa, Artificial Sequence
  Synthetic polypeptide
NKKGWKLLLRADDIMLSDDKEKNEELRNLSLSGHVGFDSLPDQLVNKSTSQGFCFNILCVGETGIGKSTLMDTLFNTKFESDPATHNEPGVRLKARSYELQESNVRLKLTIVDTVGFGDQINKDDSYKPIVEYIDAQFEAYLQEELKIKRSLFNYHDTRIHACLYFIAPTGHSLKSLDLVTMKKLDSKVNIIPIIAKADTIAKNELHKFKSKIMSELVSNGVQIYQFPTDEETVAEINATMSVHLPFAVVGSTEEVKIGNKMAKARQYPWGVVQVENENHCDFVKLREMLIRVNMEDLREQTHTRHYELYRRCKLEEMGFKDTDPDSKPFSLQETYEAKRNEFLGELQKKEEEMRQMFVMRVKEKEAELKEAEKELHEKFDLLKRTHQEEKKKVEDKKKELEEEVNNFQKKKAAAQLLQSQAQQSGAQQTKKDKDKKNSPWLCTE

SEQ ID NO: 31351 - protein, 129 aa, Artificial Sequence
  Synthetic polypeptide
NKKGWKLLLRADDIMLSDDKEKNEELRNLSLSGHVGFDSLPDQLVNKSTSQGFCFNILCVGETGIGKSTLMDTLFNTKFESDPATHNEPGVRLKARSYELQESNVRLKLTIVDTVGFGDQINKDDSYKP

SEQ ID NO: 31352 - protein, 139 aa, Artificial Sequence
  Synthetic polypeptide
NKKGWKLLLRADDIMLSDDKEKNEELRNLSLSGHVGFDSLPDQLVNKSTSQGFCFNILCVGETGIGKSTLMDTLFNTKFESDPATHNEPGVRLKARSYELQESNVRLKLTIVDTVGFGDQINKDDSYKPIVEYIDAQFE

SEQ ID NO: 31353 - protein, 332 aa, Artificial Sequence
  Synthetic polypeptide
QYLPRIPLGGVAVSSTYKPIVEYIDAQFEAYLQEELKIKRSLFNYHDTRIHACLYFIAPTGHSLKSLDLVTMKKLDSKVNIIPIIAKADTIAKNELHKFKSKIMSELVSNGVQIYQFPTDEETVAEINATMSVHLPFAVVGSTEEVKIGNKMAKARQYPWGVVQVENENHCDFVKLREMLIRVNMEDLREQTHTRHYELYRRCKLEEMGFKDTDPDSKPFSLQETYEAKRNEFLGELQKKEEEMRQMFVMRVKEKEAELKEAEKELHEKFDLLKRTHQEEKKKVEDKKKELEEEVNNFQKKKAAAQLLQSQAQQSGAQQTKKDKDKKNASFT

SEQ ID NO: 31354 - protein, 34 aa, Artificial Sequence
  Synthetic polypeptide
GPVLAQQERMPQSLSNIFHGYPLGEWQSAPPISR

SEQ ID NO: 31355 - protein, 45 aa, Artificial Sequence
  Synthetic polypeptide
GEAITVTFLRWIFEAQFWPSRKECHSLLAISSTDTPWGSGSQLHL

SEQ ID NO: 31356 - protein, 328 aa, Artificial Sequence
  Synthetic polypeptide
QYLPRIPLGGVAVSSTYKPIVEYIDAQFEAYLQEELKIKRSLFNYHDTRIHACLYFIAPTGHSLKSLDLVTMKKLDSKVNIIPIIAKADTIAKNELHKFKSKIMSELVSNGVQIYQFPTDEETVAEINATMSVHLPFAVVGSTEEVKIGNKMAKARQYPWGVVQVENENHCDFVKLREMLIRVNMEDLREQTHTRHYELYRRCKLEEMGFKDTDPDSKPFSLQETYEAKRNEFLGELQKKEEEMRQMFVMRVKEKEAELKEAEKELHEKFDLLKRTHQEEKKKVEDKKKELEEEVNNFQKKKAAAQLLQSQAQQSGAQQTKKDKDKKK

SEQ ID NO: 31357 - protein, 283 aa, Artificial Sequence
  Synthetic polypeptide
QYLPRIPLGGVAVSSTYKPIVEYIDAQFEAYLQEELKIKRSLFNYHDTRIHACLYFIAPTGHSLKSLDLVTMKKLDSKVNIIPIIAKADTIAKNELHKFKSKIMSELVSNGVQIYQFPTDEETVAEINATMSVHLPFAVVGSTEEVKIGNKMAKARQYPWGVVQVENENHCDFVKLREMLIRVNMEDLREQTHTRHYELYRRCKLEEMGFKDTDPDSKPFSLQETYEAKRNEFLGELQKKEEEMRQMFVMRVKEKEAELKEAEKELHEKFDLLKRTHQEEKKK

SEQ ID NO: 31358 - protein, 335 aa, Artificial Sequence
  Synthetic polypeptide
QYLPRIPLGGVAVSSTYKPIVEYIDAQFEAYLQEELKIKRSLFNYHDTRIHACLYFIAPTGHSLKSLDLVTMKKLDSKVNIIPIIAKADTIAKNELHKFKSKIMSELVSNGVQIYQFPTDEETVAEINATMSVHLPFAVVGSTEEVKIGNKMAKARQYPWGVVQVENENHCDFVKLREMLIRVNMEDLREQTHTRHYELYRRCKLEEMGFKDTDPDSKPFSLQETYEAKRNEFLGELQKKEEEMRQMFVMRVKEKEAELKEAEKELHEKFDLLKRTHQEEKKKVEDKKKELEEEVNNFQKKKAAAQLLQSQAQQSGAQQTKKDKDKKNSPWLCTE

SEQ ID NO: 31359 - protein, 19 aa, Artificial Sequence
  Synthetic polypeptide
QYLPRIPLGGVAVSSTYKP

SEQ ID NO: 31360 - protein, 33 aa, Artificial Sequence
  Synthetic polypeptide
GPVLAQQERMPQSLSNIFHGYPLGEWQSAPPIS

SEQ ID NO: 31361 - protein, 29 aa, Artificial Sequence
  Synthetic polypeptide
QYLPRIPLGGVAVSSTYKPIVEYIDAQFE

SEQ ID NO: 31362 - protein, 499 aa, Artificial Sequence
  Synthetic polypeptide
LLSASVSSSVKVIKEAYSGCSGPVDSECPPPPSSPVHKAELEKKLSSERPSSDGEGVVENGITTCNGKEQVKRKKSSKSEAKGTVSKVTGKKITKIISLGKKKPSTDEQTSSAEEDVPTCGYLNVLSNSRWRERWCRVKDNKLIFHKDRTDLKTHIVSIPLRGCEVIPGLDSKHPLTFRLLRNGQEVAVLEASSSEDMGRWIGILLAETGSSTDPEALHYDYIDVEMSASVIQTAKQTFCFMNRRVISANPYLGGTSNGYAHPSGTALHYDDVPCINGSLKGKKPPVASNGVTGKGKTLSSQPKKADPAAVVKRTGSNAAQYKYGKNRVEADAKRLQTKEEELLKRKEALRNRLAQLRKERKDLRAAIEVNAGRKPQAILEEKLKQLEEECRQKEAERVSLELELTEVKESLKKALAGGVTLGLAIEPKSGTSSPQSPVFRHRTLENSPISSCDTSDTEGPVPVNSAAVLKKSQAAPGSSPCRGHVLRKAKEWELKNGT

SEQ ID NO: 31363 - protein, 34 aa, Artificial Sequence
  Synthetic polypeptide
ALAVRHCVSWTSYVTSQCLCFFICKGDQRSLQWL

SEQ ID NO: 31364 - protein, 583 aa, Artificial Sequence
  Synthetic polypeptide
LLSASVSSSVKVIKEAYSGCSGPVDSECPPPPSSPVHKAELEKKLSSERPSSDGEGVVENGITTCNGKEQVKRKKSSKSEAKGTVSKVTGKKITKIISLGKKKPSTDEQTSSAEEDVPTCGYLNVLSNSRWRERWCRVKDNKLIFHKDRTDLKTHIVSIPLRGCEVIPGLDSKHPLTFRLLRNGQEVAVLEASSSEDMGRWIGILLAETGSSTDPEALHYDYIDVEMSASVIQTAKQTFCFMNRRVISANPYLGGTSNGYAHPSGTALHYDDVPCINGSWEPEDGFPASCSRGLGEEVLYDNAGLYDNLPPPHIFARYSPADRKASRLSADKLSSNHYKYPASAQSVTNTSSVGRASLGLNSQLKGKKPPVASNGVTGKGKTLSSQPKKADPAAVVKRTGSNAAQYKYGKNRVEADAKRLQTKEEELLKRKEALRNRLAQLRKERKDLRAAIEVNAGRKPQAILEEKLKQLEEECRQKEAERVSLELELTEVKESLKKALAGGVTLGLAIEPKSGTSSPQSPVFRHRTLENSPISSCDTSDTEGPVPVNSAAVLKKSQAAPGSSPCRGHVLRKAKEWELKNGT

SEQ ID NO: 31365 - protein, 596 aa, Artificial Sequence
  Synthetic polypeptide
TQWNTSAIKNEIRLQKEWNPVILGNLDGTRGHCVKWNKPGTERLIGMPKEKYDPPDPRRIYTIMSAEEVANGKKSHWAELEISGRVRSLSTSLWSLTHLTALHLNDNYLSRIPPDIAKLHNLVYLDLSSNKLRSLPAELGNMVSLRELLLNNNLLRVLPYELGRLFQLQTLGLKGNPLSQDILNLYQDPDGTRKLLNFMLDNLAVHPEQLPPRPWITLKERDQILPSASFTVMCYNVLCDKYATRQLYGYCPSWALNWEYRKKGIMEEIVNCDADIISLQEVETEQYFTLFLPALKERGYDGFFSPKSRAKIMSEQERKHVDGCAIFFKTEKFTLVQKHTVEFNQVAMANSDGSEAMLNRVMTKDNIGVAVVLEVHKELFGAGMKPIHAADKQLLIVANAHMHWDPEYSDVKLIQTMMFVSEVKNILEKASSRPGSPTADPNSIPLVLCADLNSLPDSGVVEYLSNGGVADNHKDFKELRYNECLMNFSCNGKNGSSEGRITHGFQLKSAYENNLMPYTNYTFDFKGVIDYIFYSKTHMNVLGVLGPLDPQWLVENNITGCPHPHIPSDHFSLLTQLELHPPLLPLVNGVHLPNRR

SEQ ID NO: 31366 - protein, 35 aa, Artificial Sequence
  Synthetic polypeptide
RMKSVFKKNGILSFLATWMELEDTVLSGISQEQKD

SEQ ID NO: 31367 - protein, 14 aa, Artificial Sequence
  Synthetic polypeptide
ARNRKTNRDAKGKI

SEQ ID NO: 31368 - protein, 481 aa, Artificial Sequence
  Synthetic polypeptide
TQWNTSAIKNEIRLQKEWNPVILGNLDGTRGHCVKWNKPGTERLIGMPKEKYDPPDPRRIYTIMSAEEVANGKKSHWAELEISGRVRSLSTSLWSLTHLTALHLNDNYLSRIPPDIAKLHNLVYLDLSSNKLRSLPAELGNMVSLRELLLNNNLLRVLPYELGRLFQLQTLGLKGNPLSQDILNLYQDPDGTRKLLNFMLDNLAVHPEQLPPRPWITLKERDQILPSASFTVMCYNVLCDKYATRQLYGYCPSWALNWEYRKKGIMEEIVNCDADIISLQEVETEQYFTLFLPALKERGYDGFFSPKSRAKIMSEQERKHVDGCAIFFKTEKFTLVQKHTVEFNQVAMANSDGSEAMLNRVMTKDNIGVAVVLEVHKELFGAGMKPIHAADKQLLIVANAHMHWDPEYSDVKLIQTMMFVSEVKNILEKASSRPGSPTADPNSIPLVLCADLNSLPDSGVVEYLSNGGVADNHKDFKELRA

SEQ ID NO: 31369 - protein, 87 aa, Artificial Sequence
  Synthetic polypeptide
TQWNTSAIKNEIRLQKEWNPVILGNLDGTRGHCVKWNKPGTERLIGMPKEKYDPPDPRRIYTIMSAEEVANGKKSHWAELEISECGA

SEQ ID NO: 31370 - protein, 204 aa, Artificial Sequence
  Synthetic polypeptide
TQWNTSAIKNEIRLQKEWNPVILGNLDGTRGHCVKWNKPGTERLIGMPKEKYDPPDPRRIYTIMSAEEVANGKKSHWAELEISGRVRSLSTSLWSLTHLTALHLNDNYLSRIPPDIAKLHNLVYLDLSSNKLRSLPAELGNMVSLRELLLNNNLLRVLPYELGRLFQLQTLGLKGNPLSQDILNLYQDPDGTRKLLNFMLDNLA

SEQ ID NO: 31371 - protein, 36 aa, Artificial Sequence
  Synthetic polypeptide
FPLYHALADPRAHGCSRLVGCTLPHQHAPHSSRKVD

SEQ ID NO: 31372 - protein, 18 aa, Artificial Sequence
  Synthetic polypeptide
WAAPSHTSTLLILPGRWM

SEQ ID NO: 31373 - protein, 27 aa, Artificial Sequence
  Synthetic polypeptide
SQGSWLLKISGLHPPTPARSSFFQEGG

SEQ ID NO: 31374 - protein, 58 aa, Artificial Sequence
  Synthetic polypeptide
ISLTRSDGFIRWSFPAQALSLPATIHVRCDFSSFPSTMIVRLPQPHGTELMRKCSSAF

SEQ ID NO: 31375 - protein, 9 aa, Artificial Sequence
  Synthetic polypeptide
GFPSHMELN

SEQ ID NO: 31376 - protein, 21 aa, Artificial Sequence
  Synthetic polypeptide
LIHFFCSLQPPTWSRIHTLIV

SEQ ID NO: 31377 - protein, 17 aa, Artificial Sequence
  Synthetic polypeptide
SIFFAPYSPQHGPGYTH

SEQ ID NO: 31378 - protein, 105 aa, Artificial Sequence
  Synthetic polypeptide
SFWARILTDPFFLLPTAPNMVQDTHINCVRNTPAFLAERLHRALKGIGTDEFTLNRIMVSRSEIDLLDIRTEFKKHYGYSLYSAIKSDTSGDYEITLLKICGGDD

SEQ ID NO: 31379 - protein, 32 aa, Artificial Sequence
  Synthetic polypeptide
GLSSHDELWILHSFPRAYSRWNPMCIEANVCQ

SEQ ID NO: 31380 - protein, 328 aa, Artificial Sequence
  Synthetic polypeptide
HFCLLLPCEEGRVCFPFCHDCKFPEASPAMMNCGFSTVFLVRTHGGIRCALKRMYVNNMPDLNVCKREITIMKELSGHKNIVGYLDCAVNSISDNVWEVLILMEYCRAGQVVNQMNKKLQTGFTEPEVLQIFCDTCEAVARLHQCKTPIIHRDLKVENILLNDGGNYVLCDFGSATNKFLNPQKDGVNVVEEEIKKYTTLSYRAPEMINLYGGKPITTKADIWALGCLLYKLCFFTLPFGESQVAICDGNFTIPDNSRYSRNIHCLIRFMLEPDPEHRPDIFQVSYFAFKFAKKDCPVSNINKCCKQLLRHGALLTEILLFLQLFLNR

SEQ ID NO: 31381 - protein, 19 aa, Artificial Sequence
  Synthetic polypeptide
TVDSPQFSSCVLTVESDVH

SEQ ID NO: 31382 - protein, 635 aa, Artificial Sequence
  Synthetic polypeptide
HFCLLLPCEEGRVCFPFCHDCKFPEASPAMMNCGFSTVFLVRTHGGIRCALKRMYVNNMPDLNVCKREITIMKELSGHKNIVGYLDCAVNSISDNVWEVLILMEYCRAGQVVNQMNKKLQTGFTEPEVLQIFCDTCEAVARLHQCKTPIIHRDLKVENILLNDGGNYVLCDFGSATNKFLNPQKDGVNVVEEEIKKYTTLSYRAPEMINLYGGKPITTKADIWALGCLLYKLCFFTLPFGESQVAICDGNFTIPDNSRYSRNIHCLIRFMLEPDPEHRPDIFQVSYFAFKFAKKDCPVSNINNSSIPSALPEPMTASEAAARKSQIKARITDTIGPTETSIAPRQRPKANSATTATPSVLTIQSSATPVKVLAPGEFGNHRPKGALRPGNGPEILLGQGPPQQPPQQHRVLQQLQQGDWRLQQLHLQHRHPHQQQQQQQQQQQQQQQQQQQQQQQQQQQHHHHHHHHLLQDAYMQQYQHATQQQQMLQQQFLMHSVYQPQPSASQYPTMMPQYQQAFFQQQMLAQHQPSQQQASPEYLTSPQEFSPALVSYTSSLPAQVGTIMDSSYSANRSVADKEAIANFTNQKNISNPPDMSGWNPFGEDNFSKLTEEELLDREFDLLRSSKGHLKAYFASQ

SEQ ID NO: 31383 - protein, 1134 aa, Artificial Sequence
  Synthetic polypeptide
HFCLLLPCEEGRVCFPFCHDCKFPEASPAMMNCGFSTVFLVRTHGGIRCALKRMYVNNMPDLNVCKREITIMKELSGHKNIVGYLDCAVNSISDNVWEVLILMEYCRAGQVVNQMNKKLQTGFTEPEVLQIFCDTCEAVARLHQCKTPIIHRDLKVENILLNDGGNYVLCDFGSATNKFLNPQKDGVNVVEEEIKKYTTLSYRAPEMINLYGGKPITTKADIWALGCLLYKLCFFTLPFGESQVAICDGNFTIPDNSRYSRNIHCLIRFMLEPDPEHRPDIFQVSYFAFKFAKKDCPVSNINNSSIPSALPEPMTASEAAARKSQIKARITDTIGPTETSIAPRQRPKANSATTATPSVLTIQSSATPVKVLAPGEFGNHRPKGALRPGNGPEILLGQGPPQQPPQQHRVLQQLQQGDWRLQQLHLQHRHPHQQQQQQQQQQQQQQQQQQQQQQQQQQQHHHHHHHHLLQDAYMQQYQHATQQQQMLQQQFLMHSVYQPQPSASQYPTMMPQYQQAFFQQQMLAQHQPSQQQASPEYLTSPQEFSPALVSYTSSLPAQVGTIMDSSYSANRSVADKEAIANFTNQKNISNPPDMSGWNPFGEDNFSKLTEEELLDREFDLLRSNRLEERASSDKNVDSLSAPHNHPPEDPFGSVPFISHSGSPEKKAEHSSINQENGTANPIKNGKTSPASKDQRTGKKTSVQGQVQKGNDESESDFESDPPSPKSSEEEEQDDEEVLQGEQGDFNDDDTEPENLGHRPLLMDSEDEEEEEKHSSDSDYEQAKAKYSDMSSVYRDRSGSGPTQDLNTILLTSAQLSSDVAVETPKQEFDVFGAVPFFAVRAQQPQQEKNEKNLPQHRFPAAGLEQEEFDVFTKAPFSKKVNVQECHAVGPEAHTIPGYPKSVDVFGSTPFQPFLTSTSKSESNEDLFGLVPFDEITGSQQQKVKQRSLQKLSSRQRRTKQDMSKSNGKRHHGTPTSTKKTLKPTYRTPERARRHKKVGRRDSQSSNEFLTISDSKENISVALTDGKDRGNVLQPEESLLDPFGAKPFHSPDLSWHPPHQGLSDIRADHNTVLPGRPRQNSLHGSFHSADVLKMDDFGAVPFTELVVQSITPHQSQQSQPVELDPFGAAPFPSKQ

SEQ ID NO: 31384 - protein, 541 aa, Artificial Sequence
  Synthetic polypeptide
QSILEQHGFELCGFLYTLIFFRLCYPYLLLCLNAYSKNNPSSLLLSLLNVKTMRMRTFMMIYFHLISSSPEKKAEHSSINQENGTANPIKNGKTSPASKDQRTGKKTSVQGQVQKGNDESESDFESDPPSPKSSEEEEQDDEEVLQGEQGDFNDDDTEPENLGHRPLLMDSEDEEEEEKHSSDSDYEQAKAKYSDMSSVYRDRSGSGPTQDLNTILLTSAQLSSDVAVETPKQEFDVFGAVPFFAVRAQQPQQEKNEKNLPQHRFPAAGLEQEEFDVFTKAPFSKKVNVQECHAVGPEAHTIPGYPKSVDVFGSTPFQPFLTSTSKSESNEDLFGLVPFDEITGSQQQKVKQRSLQKLSSRQRRTKQDMSKSNGKRHHGTPTSTKKTLKPTYRTPERARRHKKVGRRDSQSSNEFLTISDSKENISVALTDGKDRGNVLQPEESLLDPFGAKPFHSPDLSWHPPHQGLSDIRADHNTVLPGRPRQNSLHGSFHSADVLKMDDFGAVPFTELVVQSITPHQSQQSQPVELDPFGAAPFPSKQ

SEQ ID NO: 31385 - protein, 13 aa, Artificial Sequence
  Synthetic polypeptide
LVVLLKRKLNIHL

SEQ ID NO: 31386 - protein, 51 aa, Artificial Sequence
  Synthetic polypeptide
LRGLRQLNYLGSSHQIWHILAVVMLYWWHQSTVYVMQYRHSKPCPDYVSHL

SEQ ID NO: 31387 - protein, 59 aa, Artificial Sequence
  Synthetic polypeptide
NFSSGVRLLGFKTHINHFLVTWAKTTKLPRIKPPNMAYPCSSDVILVASVNSVCHAVQT

SEQ ID NO: 31388 - protein, 21 aa, Artificial Sequence
  Synthetic polypeptide
LQENKPRAPSDSTLCTGVRCT

SEQ ID NO: 31389 - protein, 170 aa, Artificial Sequence
  Synthetic polypeptide
ALPPVRSAAALDSHSSANPIVNCTCKGFRLCNVMLDDLSLSPITPRGGPSSCRKTSPGLPVILHYVLASGVLDHSACYDPGSVLCADSSQLPHAAMAKAPFYHLLFCFGIWSDSYSSLGLAQWRNWCSYCTGLCTPCNCDVYDCSSCFPILHFQSPRAVLSRKYFQMENN

SEQ ID NO: 31390 - protein, 127 aa, Artificial Sequence
  Synthetic polypeptide
FYIMYWRQVYLITVLAMILAVFFAQIHPNYLTQQWQRLRSIIFCSVSGYGVIPTLHWVWLNGGIGAPIVQDFAPRVIVMYMIALLAFLFYISKVPERYFPENIFRWKITKRTLGGVNNSLQNLYLLV

SEQ ID NO: 31391 - protein, 197 aa, Artificial Sequence
  Synthetic polypeptide
ALPPVRSAAALDSHSSANPIVNCTCKGFRLCNVMLDDLSLSPITPRGGPSSCRKTSPGLPVILHYVLASGVLDHSACYDPGSVLCADSSQLPHAAMAKAPFYHLLFCFGIWSDSYSSLGLAQWRNWCSYCTGLCTPCNCDVYDCSSCFPILHFQSPRAVLSRTTKLPRIKPPNMAYPCSSDVILVASVNSVCHAVQT

SEQ ID NO: 31392 - protein, 147 aa, Artificial Sequence
  Synthetic polypeptide
FYIMYWRQVYLITVLAMILAVFFAQIHPNYLTQQWQRLRSIIFCSVSGYGVIPTLHWVWLNGGIGAPIVQDFAPRVIVMYMIALLAFLFYISKVPERYFPGQLNYLGSSHQIWHILAVVMLYWWHQSTVYVMQYRHSKPCPDYVSHL

SEQ ID NO: 31393 - protein, 167 aa, Artificial Sequence
  Synthetic polypeptide
ALPPVRSAAALDSHSSANPIVNCTCKGFRLCNVMLDDLSLSPITPRGGPSSCRKTSPGLPVILHYVLASGVLDHSACYDPGSVLCADSSQLPHAAMAKAPFYHLLFCFGIWSDSYSSLGLAQWRNWCSYCTGLCTPCNCDVYDCSSCFPILHFQSPRAVLSRITSTV

SEQ ID NO: 31394 - protein, 105 aa, Artificial Sequence
  Synthetic polypeptide
FYIMYWRQVYLITVLAMILAVFFAQIHPNYLTQQWQRLRSIIFCSVSGYGVIPTLHWVWLNGGIGAPIVQDFAPRVIVMYMIALLAFLFYISKVPERYFPESLPR

SEQ ID NO: 31395 - protein, 28 aa, Artificial Sequence
  Synthetic polypeptide
GSPYNCLGVWQITGLKFIISYSNLRRDL

SEQ ID NO: 31396 - protein, 15 aa, Artificial Sequence
  Synthetic polypeptide
MVTEEAPIIVWECGK

SEQ ID NO: 31397 - protein, 31 aa, Artificial Sequence
  Synthetic polypeptide
NVNTLCKDPSLGFFTAGFLVPGVDLPQRRTH

SEQ ID NO: 31398 - protein, 32 aa, Artificial Sequence
  Synthetic polypeptide
TPCVKTLRLASSLQDFWFLVWTCHRGEHTRNL

SEQ ID NO: 31399 - protein, 27 aa, Artificial Sequence
  Synthetic polypeptide
RPFAWLLHCRISGSWCGPATEENTLET

SEQ ID NO: 31400 - protein, 205 aa, Artificial Sequence
  Synthetic polypeptide
TSKLQTPLKDETLARQLVELGYRGTGERVKREDFEARKAAIEIARLAERAQQKTLTSAGKDLQDNFLTALAMREEDNRSGKLSSVIFIRDRNSHGQEISGYIDYAHRLKTEDFEVYFTGKKRLLPRPTDISFYNWDADIAVSNSSPNYQVIADNPEGLLFRYKRDRKILNVDPKAQPGDNSTRITILTELYVQAVIFDHISRRKT

SEQ ID NO: 31401 - protein, 9 aa, Artificial Sequence
  Synthetic polypeptide
KQTSDPFKG

SEQ ID NO: 31402 - protein, 58 aa, Artificial Sequence
  Synthetic polypeptide
TSKLQTPLKDETLARQLVELGYRGTGERVKREDFEARKAAIEIARLAERAQQKCQTLS

SEQ ID NO: 31403 - protein, 128 aa, Artificial Sequence
  Synthetic polypeptide
TSKLQTPLKDETLARQLVELGYRGTGERVKREDFEARKAAIEIARLAERAQQKTLTSAGKDLQDNFLTALAMREEDNRSGKLSAGVQWHHLGSLQPLPPGFKEFSCFSLPSSWDYRHAPPHPVRDLYS

SEQ ID NO: 31404 - protein, 222 aa, Artificial Sequence
  Synthetic polypeptide
TSKLQTPLKDETLARQLVELGYRGTGERVKREDFEARKAAIEIARLAERAQQKTLTSAGKDLQDNFLTALAMREEDNRSGKLSLNQQETDAAHILKKQLASVIFIRDRNSHGQEISGYIDYAHRLKTEDFEVYFTGKKRLLPRPTDISFYNWDADIAVSNSSPNYQVIADNPEGLLFRYKRDRKILNVDPKAQPGDNSTRITILTELYVQAVIFDHISRRKT

SEQ ID NO: 31405 - protein, 168 aa, Artificial Sequence
  Synthetic polypeptide
GLKGATCHGMLVTSRRTLTSAGKDLQDNFLTALAMREEDNRSGKLSSVIFIRDRNSHGQEISGYIDYAHRLKTEDFEVYFTGKKRLLPRPTDISFYNWDADIAVSNSSPNYQVIADNPEGLLFRYKRDRKILNVDPKAQPGDNSTRITILTELYVQAVIFDHISRRKT

SEQ ID NO: 31406 - protein, 5 aa, Artificial Sequence
  Synthetic polypeptide
PLEGR

SEQ ID NO: 31407 - protein, 7 aa, Artificial Sequence
  Synthetic polypeptide
KDANKCW

SEQ ID NO: 31408 - protein, 91 aa, Artificial Sequence
  Synthetic polypeptide
GLKGATCHGMLVTSRRTLTSAGKDLQDNFLTALAMREEDNRSGKLSAGVQWHHLGSLQPLPPGFKEFSCFSLPSSWDYRHAPPHPVRDLYS

SEQ ID NO: 31409 - protein, 185 aa, Artificial Sequence
  Synthetic polypeptide
GLKGATCHGMLVTSRRTLTSAGKDLQDNFLTALAMREEDNRSGKLSLNQQETDAAHILKKQLASVIFIRDRNSHGQEISGYIDYAHRLKTEDFEVYFTGKKRLLPRPTDISFYNWDADIAVSNSSPNYQVIADNPEGLLFRYKRDRKILNVDPKAQPGDNSTRITILTELYVQAVIFDHISRRKT

SEQ ID NO: 31410 - protein, 160 aa, Artificial Sequence
  Synthetic polypeptide
TPHVLTHRTLTSAGKDLQDNFLTALAMREEDNRSGKLSSVIFIRDRNSHGQEISGYIDYAHRLKTEDFEVYFTGKKRLLPRPTDISFYNWDADIAVSNSSPNYQVIADNPEGLLFRYKRDRKILNVDPKAQPGDNSTRITILTELYVQAVIFDHISRRKT

SEQ ID NO: 31411 - protein, 38 aa, Artificial Sequence
  Synthetic polypeptide
NDEFMSFVGTRMKLEIIILSKLSQGQKTERRMFSLIGR

SEQ ID NO: 31412 - protein, 83 aa, Artificial Sequence
  Synthetic polypeptide
TPHVLTHRTLTSAGKDLQDNFLTALAMREEDNRSGKLSAGVQWHHLGSLQPLPPGFKEFSCFSLPSSWDYRHAPPHPVRDLYS

SEQ ID NO: 31413 - protein, 177 aa, Artificial Sequence
  Synthetic polypeptide
TPHVLTHRTLTSAGKDLQDNFLTALAMREEDNRSGKLSLNQQETDAAHILKKQLASVIFIRDRNSHGQEISGYIDYAHRLKTEDFEVYFTGKKRLLPRPTDISFYNWDADIAVSNSSPNYQVIADNPEGLLFRYKRDRKILNVDPKAQPGDNSTRITILTELYVQAVIFDHISRRKT

SEQ ID NO: 31414 - protein, 44 aa, Artificial Sequence
  Synthetic polypeptide
MHGFSSASTTSETARSAPPPLSLLNAKKTRMKTFMMIHFHLMNK

SEQ ID NO: 31415 - protein, 210 aa, Artificial Sequence
  Synthetic polypeptide
INDIFEWSRDHRAHHKYSETDADPHNARRGFFFSHIGWLFVRKHRDVIEKGRKLDVTDLLADPVVRIQRKYYKISVVLMCFVVPTLVPWYIWGESLWNSYFLASILRYTISLNISWLVNSAAHMYGNRPYDKHISPRQNPLVALGAIGEGFHNYHHTFPFDYSASEFGLNFNPTTWFIDFMCWLGLATDRKRATKPMIEARKARTGDSSA

SEQ ID NO: 31416 - protein, 136 aa, Artificial Sequence
  Synthetic polypeptide
INDIFEWSRDHRAHHKYSETDADPHNARRGFFFSHIGWLFVRKHRDVIEKGRKLDVTDLLADPVVRIQRNTQHIQKEGRALNQEAACEMLREWHQGHILKVTLPGLHILALLHTHCNHSEKCCLMLRALSVSLEVF

SEQ ID NO: 31417 - protein, 264 aa, Artificial Sequence
  Synthetic polypeptide
AFTFTHNSPRASSSPLRFICENQSIQDQAPMLEGPQNGWNDPPALNRVPKKKKMPENFMPPVPITSPIMNPLGDPQSQMLQQQPSAPVPLSSQSSFPQPHLPGGQPFHGVQQPLGQTGMPPSFSKPNIEGAPGAPIGNTFQHVQSLPTKKITKKPIPDEHLILKTTFEDLIQRCLSSATDPQTKRKLDDASKRLEFLYDKLREQTLSPTITSGLHNIARSIETRNYSEGLTMHTHIVSTSNFSETSAFMPVLKVVLTQANKLGV

SEQ ID NO: 31418 - protein, 28 aa, Artificial Sequence
  Synthetic polypeptide
GSFVKTSLSKTRHLCWKVLRMVGMTLQL

SEQ ID NO: 31419 - protein, 26 aa, Artificial Sequence
  Synthetic polypeptide
PQPGEQRKTPSLQKKNVKIRSSEWLE

SEQ ID NO: 31420 - protein, 233 aa, Artificial Sequence
  Synthetic polypeptide
KLGPQNGWNDPPALNRVPKKKKMPENFMPPVPITSPIMNPLGDPQSQMLQQQPSAPVPLSSQSSFPQPHLPGGQPFHGVQQPLGQTGMPPSFSKPNIEGAPGAPIGNTFQHVQSLPTKKITKKPIPDEHLILKTTFEDLIQRCLSSATDPQTKRKLDDASKRLEFLYDKLREQTLSPTITSGLHNIARSIETRNYSEGLTMHTHIVSTSNFSETSAFMPVLKVVLTQANKLGV

SEQ ID NO: 31421 - protein, 135 aa, Artificial Sequence
  Synthetic polypeptide
KLGPQNGWNDPPALNRVPKKKKMPENFMPPVPITSPIMNPLGDPQSQMLQQQPSAPVPLSSQSSFPQPHLPGGQPFHGVQQPLGQTGMPPSFSKPNIEGAPGAPIGNTFQHVQSLPTKKITKKPIPDEHLILKTT

SEQ ID NO: 31422 - protein, 42 aa, Artificial Sequence
  Synthetic polypeptide
GWAPWLTLIILPLWEAKAGGSLEVRSSKPAWPIWLQEQPIVQ

SEQ ID NO: 31423 - protein, 98 aa, Artificial Sequence
  Synthetic polypeptide
SCHFGKPRQVDHLRSGVRNQLGQYGYKNSQSSNSRWRHFNFSVLCFSWGTANPGTGCSSVSKLLQYSSGSRILTSCHHLPTNEKNFILASTSLGTKEM

SEQ ID NO: 31424 - protein, 84 aa, Artificial Sequence
  Synthetic polypeptide
GQEFETSLANMVTRTANRPIAAGDISTFQSFVFLGGQLTLALGVLLCLNYYSIALGAGSLLLVITYPLMKRISYWPQLALGQKR

SEQ ID NO: 31425 - protein, 97 aa, Artificial Sequence
  Synthetic polypeptide
SCHFGKPRQVDHLRSGVRNQLGQYGYKNSQSSNSRWRHFNFSVLCFSWGTANPGTGCSSVSKLLQYSSGSRILTSCHHLPTNEKNFILASTSLGLDI

SEQ ID NO: 31426 - protein, 199 aa, Artificial Sequence
  Synthetic polypeptide
GQEFETSLANMVTRTANRPIAAGDISTFQSFVFLGGQLTLALGVLLCLNYYSIALGAGSLLLVITYPLMKRISYWPQLALGLTFNWGALLGWSAIKGSCDPSVCLPLYFSGVMWTLIYDTIYAHQDKRDDVLIGLKSTALRFGENTKPWLSGFSVAMLGALSLVGVNSGQTAPYYAALGAVGAHLTHQKWGLEILPRLV

SEQ ID NO: 31427 - protein, 242 aa, Artificial Sequence
  Synthetic polypeptide
GQEFETSLANMVTRTANRPIAAGDISTFQSFVFLGGQLTLALGVLLCLNYYSIALGAGSLLLVITYPLMKRISYWPQLALGLTFNWGALLGWSAIKGSCDPSVCLPLYFSGVMWTLIYDTIYAHQDKRDDVLIGLKSTALRFGENTKPWLSGFSVAMLGALSLVGVNSGQTAPYYAALGAVGAHLTHQIYTLDIHRPEDCWNKFISNRTLGLIVFLGIVLGNLWKEKKTDKTKKGIENKIEN

SEQ ID NO: 31428 - protein, 29 aa, Artificial Sequence
  Synthetic polypeptide
NEDTINDNMDVMRNLASVFTMYLEHWFGS

SEQ ID NO: 31429 - protein, 41 aa, Artificial Sequence
  Synthetic polypeptide
YGRYEEPGFCIYHVPGALVWQLNQVVFQIGTCSPSLALELF

SEQ ID NO: 31430 - protein, 30 aa, Artificial Sequence
  Synthetic polypeptide
GLMMWLMLQSQHFGRPRVEQNSYTVQVTKV

SEQ ID NO: 31431 - protein, 31 aa, Artificial Sequence
  Synthetic polypeptide
CGSCCNHSTLGGQGSSKTVIQCRLQKSNALS

SEQ ID NO: 31432 - protein, 96 aa, Artificial Sequence
  Synthetic polypeptide
PDDVAHAAITALWEAKGRAKQLYSAGYKSLMHLANANPEVLVRTIDHLSRRQAKQIVSSAKMLLHEKAEALQEEVEELLRLPSDFPGAVASSTDKA

SEQ ID NO: 31433 - protein, 387 aa, Artificial Sequence
  Synthetic polypeptide
AWEVKAAEGFLLGEVKGEAKNSITDSQMDDVEVVYTIDIQKYIPCYQLFSFYNSSGEVNEQALKKILSNVKKNVVGWYKFRRHSDQIMTFRERLLHKNLQEHFSNQDLVFLLLTPSIITESCSTHRLEHSLYKPQKGLFHRVPLVVANLGMSEQLGYKTVSGSCMSTGFSRAVQTHSSKFFEEDGSLKEVHKINEMYASLQEELKSICKKVEDSEQAVDKLVKDVNRLKREIEKRRGAQIQAAREKNIQKDPQENIFLCQALRTFFPNSEFLHSCVMSLKNRHVSKSSCNYNHHLDVVDNLTLMVEHTDIPEASPASTPQIIKHKALDLDDRWQFKRSRLLDTQDKRSKADTGSSNQDKASKMSSPETDEEIEKMKGFGEYSRSPTF

SEQ ID NO: 31434 - protein, 60 aa, Artificial Sequence
  Synthetic polypeptide
AQEFKTSVGNIRRPHVYKKILKISPAWWHVPVDPATWKAEAAGLFEPGRSKLQKVFFLGK

SEQ ID NO: 31435 - protein, 30 aa, Artificial Sequence
  Synthetic polypeptide
TQLLGRLRQQDCLSLGGQSCRRFSSWGSKR

SEQ ID NO: 31436 - protein, 52 aa, Artificial Sequence
  Synthetic polypeptide
AWEVKAAEGFLLGEVKGEAKNSITDSQMDDVEVVYTIDIQKYIPCYQLFRMW

SEQ ID NO: 31437 - protein, 439 aa, Artificial Sequence
  Synthetic polypeptide
GRVRWLMPVIPALWEAEETDIDDRYGDLDSRTDSDIPEIPPSSDRTPEILKKALSGLSSRWKNWWIRGILTLTMISLFFLIIYMGSFMLMLLVLGIQVKCFHEIITIGYRVYHSYDLPWFRTLSWYFLLCVNYFFYGETVADYFATFVQREEQLQFLIRYHRFISFALYLAGFCMFVLSLVKKHYRLQFYMFAWTHVTLLITVTQSHLVIQNLFEGMIWFLVPISSVICNDITAYLFGFFFGRTPLIKLSPKKTWEGFIGGFFSTVVFGFIAAYVLSKYQYFVCPVEYRSDVNSFVTECEPSELFQLQTYSLPPFLKAVLRQERVSLYPFQIHSIALSTFASLIGPFGGFFASGFKRAFKIKDFANTIPGHGGIMDRFDCQYLMATFVHVYITSFIRGPNPSKVLQQLLVLQPEQQLNIYKTLKTHLIEKGILQPTLKV

SEQ ID NO: 31438 - protein, 62 aa, Artificial Sequence
  Synthetic polypeptide
SQHFGRPRKQILMTDMEIWIPEQILIFRKFHHPQIEPLRFSKKLYLVYLQGGKTGGYVEFSL

SEQ ID NO: 31439 - protein, 20 aa, Artificial Sequence
  Synthetic polypeptide
PGAVAHACNPSTLGGRGNRY

SEQ ID NO: 31440 - protein, 44 aa, Artificial Sequence
  Synthetic polypeptide
SAQPPAWTCSSGPAVMPPTTTPPSPTCFSTGHGRWWRPAPSTSC

SEQ ID NO: 31441 - protein, 27 aa, Artificial Sequence
  Synthetic polypeptide
DGFKSDVGANQCEVLSHLRGPAAQDLQ

SEQ ID NO: 31442 - protein, 655 aa, Artificial Sequence
  Synthetic polypeptide
VWGLGESPPPPGPDFLLVTGGVLNESCEMVSKVTWEPTNVKCSATCVDLQLRTCSDAAYNHTTFPNLLQHRSWEVVEASSEYILLSVLHQLLEGQCNPDLRLLGCAVLAPRCEGGWVRRPCRHICEGLREVCQPAFDAIDMAWPYFLDCHRYFTREDEGCYDPLEKLRGGLEADEALPSGLPPTFIRFSHHSYAQMVRVLRRTASRCAHVARTYSIGRSFDGRELLVIEFSSRPGQHELMEPEVKLIGNIHGNEVAGREMLIYLAQYLCSEYLLGNPRIQRLLNTTRIHLLPSMNPDGYEVAAAEGAGYNGWTSGRQNAQNLDLNRNFPDLTSEYYRLAETRGARSDHIPIPQHYWWGKVAPETKAIMKWMQTIPFVLSASLHGGDLVVSYPFDFSKHPQEEKMFSPTPDEKMFKLLSRAYADVHPMMMDRSENRCGGNFLKRGSIINGADWYSFTGGMSDFNYLHTNCFEITVELGCVKFPPEEALYILWQHNKESLLNFVETVHRGIKGVVTDKFGKPVKNARISVKGIRHDITTAPDGDYWRLLPPGIHIVIAQAPGYAKVIKKVIIPARMKRAGRVDFILQPLGMGPKNFIHGLRRTGPHDPLGGASSLGEATEPDPLRARRQPSADGSKPWWWSYFTSLSTHRPRWLLKY

SEQ ID NO: 31443 - protein, 49 aa, Artificial Sequence
  Synthetic polypeptide
GEIAPLHSSLGDRARLHLKKKKKVLFFCLEIKFLSIPAMKRTQGSSFLK

SEQ ID NO: 31444 - protein, 52 aa, Artificial Sequence
  Synthetic polypeptide
YHLLRRLRQENGANPGGGACSEERSRHCTPAWATERDSISKKKKRYYFSAWK

SEQ ID NO: 31445 - protein, 725 aa, Artificial Sequence
  Synthetic polypeptide
GRKMARTREAELAVRRDRATALQPGRQSETPSQKKKKGTIFLPGNKVSEHPCNEENPGKFLFEVVPGGDRDRMTANHESYLLMASTQNDMEDWVKSIRRVIWGPFGGGIFGQKLEDTVRYEKRYGNRLAPMLVEQCVDFIRQRGLKEEGLFRLPGQANLVKELQDAFDCGEKPSFDSNTDVHTVASLLKLYLRELPEPVIPYAKYEDFLSCAKLLSKEEEAGVKELAKQVKSLPVVNYNLLKYICRFLDEVQSYSGVNKMSVQNLATVFGPNILRPKVEDPLTIMEGTVVVQQLMSVMISKHDCLFPKDAELQSKPQDGVSNNNEIQKKATMGQLQNKENNNTKDSPSRQCSWDKSESPQRSSMNNGSPTALSGSKTNSPKNSVHKLDVSRSPPLMVKKNPAFNKGSGIVTNGSFSSSNAEGLEKTQTTPNGSLQARRSSSLKVSGTKMGTHSVQNGTVRMGILNSDTLGNPTNVRNMSWLPNGYVTLRDNKQKEQAGELGQHNRLSTYDNVHQQFSMMNLDDKQSIDSATWSTSSCEISLPENSNSCRSSTTTCPEQDFFGGNFEDPVLDGPPQDDLSHPRDYESKSDHRSVGGRSSRATSSSDNSETFVGNSSSNHSALHSLVSSLKQEMTKQKIEYESRIKSLEQRNLTLETEMMSLHDELDQERKKFTMIEIKMRNAERAKEDAEKRNDMLQKEMEQFFSTFGELTVEPRRTERGNTIWIQ

SEQ ID NO: 31446 - protein, 223 aa, Artificial Sequence
  Synthetic polypeptide
GRKMARTREAELAVRRDRATALQPGRQSETPSQKKKKGTIFLPGNKVSEHPCNEENPGKFLFEVVPGGDRDRMTANHESYLLMASTQNDMEDWVKSIRRVIWGPFGGGIFGQKLEDTVRYEKRYGNRLAPMLVEQCVDFIRQRGLKEEGLFRLPGQANLVKELQDAFDCGEKPSFDSNTDVHTVASLLKLYLRELPEPVIPYAKYEDFLSCAKLLSKEEEAVS

SEQ ID NO: 31447 - protein, 54 aa, Artificial Sequence
  Synthetic polypeptide
THENPLGCIPVRTPANRAQRKCWRWPEEDASGTSSTCVTWWRRSPSHPTASPSW

SEQ ID NO: 31448 - protein, 41 aa, Artificial Sequence
  Synthetic polypeptide
KQDEHMKTHSGAYRSELLQTEHRGSVGGGQKKMHQVHRVHV

SEQ ID NO: 31449 - protein, 786 aa, Artificial Sequence
  Synthetic polypeptide
KPTRVHTGQNSCKPSTEEVLEVARRRCIRYIEYMCDMVAEEPITPHSKPILVRAVVMTPVPLFSKQRSGCRPFCEVYVGDERVASTSQEYDKMRDFKIEDGKAVIPLGVTVQGDVLIVIYHARSTLGGRLQAKMASMKMFQIQFHTGFVPRNATTVKFAKYDLDACDIQEKYPDLFQVNLEVEVEPRDRPSREAPPWENSSMRGLNPKILFSSREEQQDILSKFGKPELPRQPGSTAQYDAGAGSPEAEPTDSDSPPSSSADASRFLHTLDWQEEKEAETGAENASSKESESALMEDRDESEVSDEGGSPISSEGQEPRADPEPPGLAAGLVQQDLVFEVETPAVLPEPVPQEDGVDLLGLHSEVGAGPAVPPQACKAPSSNTDLLSCLLGPPEAASQGPPEDLLSEDPLLLASPAPPLSVQSTPRGGPPAAADPFGPLLPSSGNNSQPCSNPDLFGEFLNSDSVTVPPSFPSAHSAPPPSCSADFLHLGDLPGEPSKMTASSSNPDLLGGWAAWTETAASAVAPTPATEGPLFSPGGQPAPCGSQASWTKSQNPDPFADLGDLSSGLQGSPAGFPPGGFIPKTATTPKGSSSWQTSRPPAQGASWPPQAKPPPKACTQPRPNYASNFSVIGAREERGVRAPSFAQKPKVSENDFEDLLSNQGFSSRSDKKGPKTIAEMRKQDLAKDTDPLKLKLLDWIEGKERNIRALLSTLHTVLWDGESRWTPVGMADLVAPEQVKKHYRRAVLAVHPDKAAGQPYEQHAKMIFMELNDAWSEFENQGSRPLF

SEQ ID NO: 31450 - protein, 37 aa, Artificial Sequence
  Synthetic polypeptide
VHVLCTDMDEAGNHHSKQTITRTENQTPHVLTHRPPK

SEQ ID NO: 31451 - protein, 60 aa, Artificial Sequence
  Synthetic polypeptide
IKKMWHIYTMEYYAAIKQDEFMSFAQTWMKLETIILSKLSQGQKTKHHMFSLIGHQNEWL

SEQ ID NO: 31452 - protein, 23 aa, Artificial Sequence
  Synthetic polypeptide
LSETCVGLLTYKTKLVFIFLVSS

SEQ ID NO: 31453 - protein, 318 aa, Artificial Sequence
  Synthetic polypeptide
PTKLNSFSSSWFHLNTNVMSGSNGSKENSHNKARTSPYPGSKVERSQVPNEKVGWLVEWQDYKPVEYTAVSVLAGPRWADPQISESNFSPKFNEKDGHVERKSKNGLYEIENGRPRNPAGRTGLVGRGLLGRWGPNHAADPIITRWKRDSSGNKIMHPVSGKHILQFVAIKRKDCGEWAIPGGMVDPGEKISATLKREFGEEALNSLQKTSAEKREIEEKLHKLFSQDHLVIYKGYVDDPRNTDNAWMETEAVNYHDETGEIMDNLMLEAGDDAGKVKWVDINDKLKLYASHSQFIKLVAEKRDAHWSEDSEADCHAL

SEQ ID NO: 31454 - protein, 252 aa, Artificial Sequence
  Synthetic polypeptide
PTKLNSFSSSWFHLNTNVMSGSNGSKENSHNKARTSPYPGSKVERSQVPNEKVGWLVEWQDYKPVEYTAVSVLAGPRWADPQIRNPAGRTGLVGRGLLGRWGPNHAADPIITRWKRDSSGNKIMHPVSGKHILQFVAIKRKDCGEWAIPGGMVDPGEKISATLKREFGEEALNSLQKTSAEKREIEEKLHKLFSQDHLVIYKGYVDDPRNTDNAWMETEAVNYHDETGEIMDNLMLEAGDDAGKVKWVDIND

SEQ ID NO: 31455 - protein, 15 aa, Artificial Sequence
  Synthetic polypeptide
SVSFTTNTQMLWPHG

SEQ ID NO: 31456 - protein, 291 aa, Artificial Sequence
  Synthetic polypeptide
TLPGSAISYHLTALWLSFLICKLYNKYPDAVATWLNPDPSQKQNLLAPQTLPSKSNESHDHMDDMDDEDDDDHVDSQDSIDSNDSDDVDDTDDSHQSDESHHSDESDELVTDFPTDLPATEVFTPVVPTVDTYDGRGDSVVYGLRSKSKKFRRPDIQYPDATDEDITSHMESEELNGAYKAIPVAQDLNAPSDWDSRGKDSYETSQLDDQSAETHSHKQSRLYKRKANDESNEHSDVIDSQELSKVSREFHSHEFHSHEDMLVVDPKSKEEDKHLKFRISHELDSASSEVN

SEQ ID NO: 31457 - protein, 305 aa, Artificial Sequence
  Synthetic polypeptide
TLPGSAISYHLTALWLSFLICKLYNKYPDAVATWLNPDPSQKQNLLAPQNAVSSEETNDFKQETLPSKSNESHDHMDDMDDEDDDDHVDSQDSIDSNDSDDVDDTDDSHQSDESHHSDESDELVTDFPTDLPATEVFTPVVPTVDTYDGRGDSVVYGLRSKSKKFRRPDIQYPDATDEDITSHMESEELNGAYKAIPVAQDLNAPSDWDSRGKDSYETSQLDDQSAETHSHKQSRLYKRKANDESNEHSDVIDSQELSKVSREFHSHEFHSHEDMLVVDPKSKEEDKHLKFRISHELDSASSEVN

SEQ ID NO: 31458 - protein, 768 aa, Artificial Sequence
  Synthetic polypeptide
YTFYRNHTFNFEFWSFSRLPYSKDRATDPSQPCDYEVTYGMMSSNVYYYTRMMSQLFLDTPVSKTEKTNFKTLSSMEDFWKFTEGSLLDGLYWKMQPSNQTEADNRSFIFYENLLLGVPRIRQLRVRNGSCSIPQDLRDEIKECYDVYSVSSEDRAPFGPRNGTAWIYTSEKDLNGSSHWGIIATYSGAGYYLDLSRTREETAAQVASLKKNVWLDRGTRATFIDFSVYNANINLFCVVRLLVEFPATGGVIPSWQFQPLKLIRYVTTFDFFLAACEIIFCFFIFYYVVEEILEIRIHKLHYFRSFWNCLDVVIVVLSVVAIGINIYRTSNVEVLLQFLEDQNTFPNFEHLAYWQIQFNNIAAVTVFFVWIKLFKFINFNRTMSQLSTTMSRCAKDLFGFAIMFFIIFLAYAQLAYLVFGTQVDDFSTFQECIFTQFRIILGDINFAEIEEANRVLGPIYFTTFVFFMFFILLNMFLAIINDTYSEVKSDLAQQKAEMELSDLIRKGYHKALVKLKLKKNTVDDISESLRQGGGKLNFDELRQDLKGKGHTDAEIEAIFTKYDQDGDQELTEHEHQQMRDDLEKEREDLDLDHSSLPRPMSSRSFPRSLDDSEEDDDEDSGHSSRRRGSISSGVSYEEFQVLVRRVDRMEHSIGSIVSKIDAVIVKLEIMERAKLKRREVLGRLLDGVAEDERLGRDSEIHREQMERLVREELERWESDDAASQISHGLGTPVGLNGQPRPRSSRPSSSQSTEGMEGAGGNGSSNVHV

SEQ ID NO: 31459 - protein, 86 aa, Artificial Sequence
  Synthetic polypeptide
ADLLSFLAFIFLPCWMLPALKHQAPNSSAFGLLDIHQWIARDSPAFGHRLKAALSASLLLRFWDSDWLPCSSACRWPAVGLHLVTI

SEQ ID NO: 31460 - protein, 159 aa, Artificial Sequence
  Synthetic polypeptide
WLIMCQLDWIEGYRVLFLGVSVRVLPKEINISVSGLGDADSSSMWVGTIQSPASVGRIKQAEEGGMSRPAEFSGLHLSPMLDASCPQTSGPKFFSFWTLGHTSVDRQGFSGLRPQAEGCAVGFPTFEVLGLRLASLLFSLQMACCGTSPGDHMKHQQTN

SEQ ID NO: 31461 - protein, 11 aa, Artificial Sequence
  Synthetic polypeptide
SNAKCVTCEQI

SEQ ID NO: 31462 - protein, 4 aa, Artificial Sequence
  Synthetic polypeptide
PVNK

SEQ ID NO: 31463 - protein, 983 aa, Artificial Sequence
  Synthetic polypeptide
SNAKCVTCEQIGALADQHIIHVACGESHSLALSDRGQLFSWGAGSDGQLGLMTTEDSVAVPRLIQKLNQQTILQVSCGNWHCLALAADGQFFTWGKNSHGQLGLGKEFPSQASPQRVRSLEGIPLAQVAAGGAHSFALSLSGAVFGWGMNNAGQLGLSDEKDRESPCHVKLLRTQKVVYISCGEEHTAVLTKSGGVFTFGAGSCGQLGHDSMNDEVNPRRVLELMGSEVTQIACGRQHTLAFVPSSGLIYAFGCGARGQLGTGHTCNVKCPSPVKGYWAAHSGQLSARADRFKYHIVKQIFSGGDQTFVLCSKYENYSPAVDFRTMNQAHYTSLINDETIAVWRQKLSEHNNANTINGVVQILSSAACWNGSFLEKKIDEHFKTSPKIPGIDLNSTRVLFEKLMNSQHSMILEQILNSFESCLIPQLSSSPPDVEAMRIYLILPEFPLLQDSKYYITLTIPLAMAILRLDTNPSKVLDNWWSQVCPKYFMKLVNLYKGAVLYLLRGRKTFLIPVLFNNYITAALKLLEKLYKVNLKVKHVEYDTFYIPEISNLVDIQEDYLMWFLHQAGMKARPSIIQDTVTLCSYPFIFDAQAKTKMLQTDAELQMQVAVNGANLQNVFMLLTLEPLLARSPFLVLHVRRNNLVGDALRELSIHSDIDLKKPLKVIFDGEEAVDAGGVTKEFFLLLLKELLNPIYGMFTYYQDSNLLWFSDTCFVEHNWFHLIGITCGLAIYNSTVVDLHFPLALYKKLLNVKPGLEDLKELSPTEGRSLQELLDYPGEDVEETFCLNFTICRESYGVIEQKKLIPGGDNVTVCKDNRQEFVDAYVNYVFQISVHEWYTAFSSGFLKVCGGKVLELFQPSELRAMMVGNSNYNWEELEETAIYKGDYSATHPTVKLFWETFHEFPLEKKKKFLLFLTGSDRIPIYGMASLQIVIQSTASGEEYLPVAHTCYNLLDLPKYSSKEILSARLTQALDNYEGFSLA

SEQ ID NO: 31464 - protein, 42 aa, Artificial Sequence
  Synthetic polypeptide
PVNKLELWQISISFMWHVASPTVWPSVTEASCFLGVQGVMVS

SEQ ID NO: 31465 - protein, 64 aa, Artificial Sequence
  Synthetic polypeptide
SNAKCVTCEQIGALADQHIIHVACGESHSLALSDRGQLFSWGAGSDGQLGLMTTEDSVAVPRLI

SEQ ID NO: 31466 - protein, 27 aa, Artificial Sequence
  Synthetic polypeptide
SNAKCVTCEQIGALADQHIIHVACGES

SEQ ID NO: 31467 - protein, 20 aa, Artificial Sequence
  Synthetic polypeptide
PVNKLELWQISISFMWHVAS

SEQ ID NO: 31468 - protein, 301 aa, Artificial Sequence
  Synthetic polypeptide
SNAKCVTCEQIGALADQHIIHVACGESHSLALSDRGQLFSWGAGSDGQLGLMTTEDSVAVPRLIQKLNQQTILQVSCGNWHCLALAADGQFFTWGKNSHGQLGLGKEFPSQASPQRVRSLEGIPLAQVAAGGAHSFALSLSGAVFGWGMNNAGQLGLSDEKDRESPCHVKLLRTQKVVYISCGEEHTAVLTKSGGVFTFGAGSCGQLGHDSMNDEVNPRRVLELMGSEVTQIACGRQHTLAFVPSSGLIYAFGCGARGQLGTGHTCNVKCPSPVKGYWAAHSGQLSARAGKNDCLWNLKVF

SEQ ID NO: 31469 - protein, 61 aa, Artificial Sequence
  Synthetic polypeptide
SNAKCVTCEQIGALADQHIIHVACGESHSLALSDRGQLFSWGAGSDGQLGLMTTEDSVAVP

SEQ ID NO: 31470 - protein, 160 aa, Artificial Sequence
  Synthetic polypeptide
SNAKCVTCEQIGALADQHIIHVACGESHSLALSDRGQLFSWGAGSDGQLGLMTTEDSVAVPRLIQKLNQQTILQVSCGNWHCLALAADGQFFTWGKNSHGQLGLGKEFPSQASPQRVRSLEGIPLAQVAAGGAHSFALSLSGAVFGWGMNNAGQLGLSDE

SEQ ID NO: 31471 - protein, 34 aa, Artificial Sequence
  Synthetic polypeptide
QGFSTRVILLPKGHLAISELMNILKRVPKSLGLT

SEQ ID NO: 31472 - protein, 12 aa, Artificial Sequence
  Synthetic polypeptide
FCSPKDIWQFLN

SEQ ID NO: 31473 - protein, 20 aa, Artificial Sequence
  Synthetic polypeptide
YLHGMYVDKMEQFDQCATWA

SEQ ID NO: 31474 - protein, 839 aa, Artificial Sequence
  Synthetic polypeptide
GHSICMECMWTRWSNLISVPPGLEGMKEQDLCNKIMAKILENYNTLFEVEYTENDHLRCENLARLIIVKEVYYKNSLPILLTRGLERDMPKPPPKTKIPKSRSEGSIQAHRVLQPELSDGIPQLSLRLSYRKACLEDMNSAEGAISAKLVPSSQEDERPLSPFYLSAHVPQVSNVSATGELLERTIRSAVEQHLFDVNNSGGQSSEDSESGTLSASSATSARQRRRQSKEQDEVRHGRDKGLINKENTPSGFNHLDDCILNTQEVEKVHKNTFGCAGERSKPKRQKSSTKLSELHDNQDGLVNMESLNSTRSHERTGPDDFEWMSDERKGNEKDGGHTQHFESPTMKIQEHPSLSDTKQQRNQDAGDQEESFVSEVPQSDLTALCDEKNWEEPIPAFSSWQRENSDSDEAHLSPQAGRLIRQLLDEDSDPMLSPRFYAYGQSRQYLDDTEVPPSPPNSHSFMRRRSSSLGSYDDEQEDLTPAQLTRRIQSLKKKIRKFEDRFEEEKKYRPSHSDKAANPEVLKWTNDLAKFRRQLKESKLKISEEDLTPRMRQRSNTLPKSFGSQLEKEDEKKQELVDKAIKPSVEATLESIQRKLQEKRAESSRPEDIKDMTKDQIANEKVALQKALLYYESIHGRPVTKNERQVMKPLYDRYRLVKQILSRANTIPIIGSPSSKRRSPLLQPIIEGETASFFKEIKEEEEGSEDDSNVKPDFMVTLKTDFSARCFLDQFEDDADGFISPMDDKIPSKCSQDTGLSNLHAASIPELLEHLQEMREEKKRIRKKLRDFEDNFFRQNGRNVQKEDRTPMAEEYSEYKHIKAKLRLLEVLISKRDTDSKSM

SEQ ID NO: 31475 - protein, 9 aa, Artificial Sequence
  Synthetic polypeptide
SVCHLGLKA

SEQ ID NO: 31476 - protein, 26 aa, Artificial Sequence
  Synthetic polypeptide
GHSICMECMWTRWSNLISVPPGLEGM

SEQ ID NO: 31477 - protein, 93 aa, Artificial Sequence
  Synthetic polypeptide
GHSICMECMWTRWSNLISVPPGLEGMKEQDLCNKIMAKILENYNTLFEVEYTENDHLRCENLARLIIVKVSNLVFNFQYCYNFGQKILFNSFS

SEQ ID NO: 31478 - protein, 17 aa, Artificial Sequence
  Synthetic polypeptide
HQTSKSMRDLPKKVFLG

SEQ ID NO: 31479 - protein, 958 aa, Artificial Sequence
  Synthetic polypeptide
PDFKVHEGLTQEGLFRVNGNVKVVEQLRLKFESGVPVELGKDGDVCSAASLLKLFLRELPDSLITSALQPRFIQLFQDGRNDVQESSLRDLIKELPDTHYCLLKYLCQFLTKVAKHHVQNRMNVHNLATVFGPNCFHVPPGLEGMKEQDLCNKIMAKILENYNTLFEVEYTENDHLRCENLARLIIVKEVYYKNSLPILLTRGLERDMPKPPPKTKIPKSRSEGSIQAHRVLQPELSDGIPQLSLRLSYRKACLEDMNSAEGAISAKLVPSSQEDERPLSPFYLSAHVPQVSNVSATGELLERTIRSAVEQHLFDVNNSGGQSSEDSESGTLSASSATSARQRRRQSKEQDEVRHGRDKGLINKENTPSGFNHLDDCILNTQEVEKVHKNTFGCAGERSKPKRQKSSTKLSELHDNQDGLVNMESLNSTRSHERTGPDDFEWMSDERKGNEKDGGHTQHFESPTMKIQEHPSLSDTKQQRNQDAGDQEESFVSEVPQSDLTALCDEKNWEEPIPAFSSWQRENSDSDEAHLSPQAGRLIRQLLDEDSDPMLSPRFYAYGQSRQYLDDTEVPPSPPNSHSFMRRRSSSLGSYDDEQEDLTPAQLTRRIQSLKKKIRKFEDRFEEEKKYRPSHSDKAANPEVLKWTNDLAKFRRQLKESKLKISEEDLTPRMRQRSNTLPKSFGSQLEKEDEKKQELVDKAIKPSVEATLESIQRKLQEKRAESSRPEDIKDMTKDQIANEKVALQKALLYYESIHGRPVTKNERQVMKPLYDRYRLVKQILSRANTIPIIGSPSSKRRSPLLQPIIEGETASFFKEIKEEEEGSEDDSNVKPDFMVTLKTDFSARCFLDQFEDDADGFISPMDDKIPSKCSQDTGLSNLHAASIPELLEHLQEMREEKKRIRKKLRDFEDNFFRQNGRNVQKEDRTPMAEEYSEYKHIKAKLRLLEVLISKRDTDSKSM

SEQ ID NO: 31480 - protein, 85 aa, Artificial Sequence
  Synthetic polypeptide
PDFKVHEGLTQEGLFRVNGNVKVVEQLRLKFESGVPVELGKDGDVCSAASLLKLFLRELPDSLITSALQPRFIQLFQVCHLGLKA

SEQ ID NO: 31481 - protein, 212 aa, Artificial Sequence
  Synthetic polypeptide
PDFKVHEGLTQEGLFRVNGNVKVVEQLRLKFESGVPVELGKDGDVCSAASLLKLFLRELPDSLITSALQPRFIQLFQDGRNDVQESSLRDLIKELPDTHYCLLKYLCQFLTKVAKHHVQNRMNVHNLATVFGPNCFHVPPGLEGMKEQDLCNKIMAKILENYNTLFEVEYTENDHLRCENLARLIIVKVSNLVFNFQYCYNFGQKILFNSFS

SEQ ID NO: 31482 - protein, 137 aa, Artificial Sequence
  Synthetic polypeptide
PDFKVHEGLTQEGLFRVNGNVKVVEQLRLKFESGVPVELGKDGDVCSAASLLKLFLRELPDSLITSALQPRFIQLFQDGRNDVQESSLRDLIKELPDTHYCLLKYLCQFLTKVAKHHVQNRMNVHNLATVFGPNCFQ

SEQ ID NO: 31483 - protein, 54 aa, Artificial Sequence
  Synthetic polypeptide
PDFKVHEGLTQEGLFRVNGNVKVVEQLRLKFESGVPVELGKDGDVCSAASLLKL

SEQ ID NO: 31484 - protein, 48 aa, Artificial Sequence
  Synthetic polypeptide
GTERKGSEAADVAGISLEPGGTPHCGEKLSHLEKSPFWKLMDLLFTRA

SEQ ID NO: 31485 - protein, 44 aa, Artificial Sequence
  Synthetic polypeptide
WETSEAQKEKEAKQLMWLESAWSREGLPIVGKSSPIWKNPHFGS

SEQ ID NO: 31486 - protein, 172 aa, Artificial Sequence
  Synthetic polypeptide
CGWNQLGAGRDSPLWGKALPFGKIPILEVDGLTLHQSLAIARYLTKNTDLAGNTEMEQCHVDAIVDTLDDFMSCFPWAEKKQDVKEQMFNELLTYNAPHLMQDLDTYLGGREWLIGNSVTWADFYWEICSTTLLVFKPDLLDNHPRLVTLRKKVQAIPAVANWIKRRPQTKL

SEQ ID NO: 31487 - protein, 171 aa, Artificial Sequence
  Synthetic polypeptide
FGEIPFYHVWSGSQRNLHCTFTLERFSLNTVELVCKLCVRQVEGEGQIFQLNCTVSEEPTGIDLPLLDPANTITTVTGPSAFSIPLPIRQKLCSSLDAPQTRGHDWRMLAHKLNLDRYLNYFATKSSPTGVILDLWEAQNFPDGNLSMLAAVLEEMGRHETVVSLAAEGQY

SEQ ID NO: 31488 - protein, 55 aa, Artificial Sequence
  Synthetic polypeptide
VADWLGTWILEADSLGSNLSPATYLLCDLGKFHFTMFGVDLKETCTAPSLWKDLA

SEQ ID NO: 31489 - protein, 38 aa, Artificial Sequence
  Synthetic polypeptide
VQISALLLTCCVIWGNSILPCLEWISKKPALHLHSGKI

SEQ ID NO: 31490 - protein, 126 aa, Artificial Sequence
  Synthetic polypeptide
PVAATDSPGNLLHANSWIHSPRLTESGTQEWAQPSVLTSPLEFMRIPCVDAGLISPLVQLLNSKDQEVLLQTGRALGNICYDSHSLQAQLINMGVIPTLVKLLGIHCQNAALTEMCLVAFGNLAEL

SEQ ID NO: 31491 - protein, 37 aa, Artificial Sequence
  Synthetic polypeptide
IRDSRVGPTICFNKSSRVYANSMCGCWIDFTTGAAAK

SEQ ID NO: 31492 - protein, 521 aa, Artificial Sequence
  Synthetic polypeptide
PVAATDSPGNLLHANSWIHSPRLTESGTQEWAQPSVLTSPLEFMRIPCVDAGLISPLVQLLNSKDQEVLLQTGRALGNICYDSHSLQAQLINMGVIPTLVKLLGIHCQNAALTEMCLVAFGNLAELESSKEQFASTNIAEELVKLFKKQIEHDKREMIFEVLAPLAENDAIKLQLVEAGLVECLLEIVQQKVDSDKEDDITELKTGSDLMVLLLLGDESMQKLFEGGKGSVFQRVLSWIPSNNHQLQLAGALAIANFARNDANCIHMVDNGIVEKLMDLLDRHVEDGNVTVQHAALSALRNLAIPVINKAKMLSAGVTEAVLKFLKSEMPPVQFKLLGTLRMLIDAQAEAAEQLGKNVKLVERLVEWCEAKDHAGVMGESNRLLSALIRHSKSKDVIKTIVQSGGIKHLVTMATSEHVIMQNEALVALALIAALELGTAEKDLESAKLVQILHRLLADERSAPEIKYNSMVLICALMGSECLHKEVQDLAFLDVVSKLRSHENKSVAQQASLTEQRLTVES

SEQ ID NO: 31493 - protein, 478 aa, Artificial Sequence
  Synthetic polypeptide
PVAATDSPGNLLHANSWIHSPRLTESGTQEWAQPSVLTSPLEFMRIPCVDAGLISPLVQLLNSKDQEVLLQTGRALGNICYDSQSSKEQFASTNIAEELVKLFKKQIEHDKREMIFEVLAPLAENDAIKLQLVEAGLVECLLEIVQQKVDSDKEDDITELKTGSDLMVLLLLGDESMQKLFEGGKGSVFQRVLSWIPSNNHQLQLAGALAIANFARNDANCIHMVDNGIVEKLMDLLDRHVEDGNVTVQHAALSALRNLAIPVINKAKMLSAGVTEAVLKFLKSEMPPVQFKLLGTLRMLIDAQAEAAEQLGKNVKLVERLVEWCEAKDHAGVMGESNRLLSALIRHSKSKDVIKTIVQSGGIKHLVTMATSEHVIMQNEALVALALIAALELGTAEKDLESAKLVQILHRLLADERSAPEIKYNSMVLICALMGSECLHKEVQDLAFLDVVSKLRSHENKSVAQQASLTEQRLTVES

SEQ ID NO: 31494 - protein, 151 aa, Artificial Sequence
  Synthetic polypeptide
PVAATDSPGNLLHANSWIHSPRLTESGTQEWAQPSVLTSPLEFMRIPCVDAGLISPLVQLLNSKDQEVLLQTGRALGNICYDSHEGRSAVDQAGGAQIVIDHLRSLCSITDPANEKLLTVFCGMLMNYSNENDSLQAQLINMGVIPTLVKL

SEQ ID NO: 31495 - protein, 570 aa, Artificial Sequence
  Synthetic polypeptide
PVAATDSPGNLLHANSWIHSPRLTESGTQEWAQPSVLTSPLEFMRIPCVDAGLISPLVQLLNSKDQEVLLQTGRALGNICYDSHEGRSAVDQAGGAQIVIDHLRSLCSITDPANEKLLTVFCGMLMNYSNENDSLQAQLINMGVIPTLVKLLGIHCQNAALTEMCLVAFGNLAELESSKEQFASTNIAEELVKLFKKQIEHDKREMIFEVLAPLAENDAIKLQLVEAGLVECLLEIVQQKVDSDKEDDITELKTGSDLMVLLLLGDESMQKLFEGGKGSVFQRVLSWIPSNNHQLQLAGALAIANFARNDANCIHMVDNGIVEKLMDLLDRHVEDGNVTVQHAALSALRNLAIPVINKAKMLSAGVTEAVLKFLKSEMPPVQFKLLGTLRMLIDAQAEAAEQLGKNVKLVERLVEWCEAKDHAGVMGESNRLLSALIRHSKSKDVIKTIVQSGGIKHLVTMATSEHVIMQNEALVALALIAALELGTAEKDLESAKLVQILHRLLADERSAPEIKYNSMVLICALMGSECLHKEVQDLAFLDVVSKLRSHENKSVAQQASLTEQRLTVES

SEQ ID NO: 31496 - protein, 569 aa, Artificial Sequence
  Synthetic polypeptide
PVAATDSPGNLLHANSWIHSPRLTESGTQEWAQPSVLTSPLEFMRIPCVDAGLISPLVQLLNSKDQEVLLQTGRALGNICYDSHEGRSAVDQAGGAQIVIDHLRSLCSITDPANEKLLTVFCGMLMNYSNENDSLQAQLINMGVIPTLVKLLGIHCQNAALTEMCLVAFGNLAELESSKEQFASTNIAEELVKLFKKQIEHDKREMIFEVLAPLAENDAIKLQLVEAGLVECLLEIVQQKVDSDKEDDITELKTGSDLMVLLLLGDESMQKLFEGGKGSVFQRVLSWIPSNNHQLQLAGALAIANFARNDANCIHMVDNGIVEKLMDLLDRHVEDGNVTVQHAALSALRNLAIPVINKAKMLSAGVTEAVLKFLKSEMPPVQFKLLGTLRMLIDAQEAAEQLGKNVKLVERLVEWCEAKDHAGVMGESNRLLSALIRHSKSKDVIKTIVQSGGIKHLVTMATSEHVIMQNEALVALALIAALELGTAEKDLESAKLVQILHRLLADERSAPEIKYNSMVLICALMGSECLHKEVQDLAFLDVVSKLRSHENKSVAQQASLTEQRLTVES

SEQ ID NO: 31497 - protein, 62 aa, Artificial Sequence
  Synthetic polypeptide
PVAATDSPGNLLHANSWIHSPRLTESGTQEWAQPSVLTSPLEFMRIPCVDAGLISPLVQLLN

SEQ ID NO: 31498 - protein, 80 aa, Artificial Sequence
  Synthetic polypeptide
SHDCEAFPTTWNYEGRSAVDQAGGAQIVIDHLRSLCSITDPANEKLLTVFCGMLMNYSNENDSLQAQLINMGVIPTLVKL

SEQ ID NO: 31499 - protein, 37 aa, Artificial Sequence
  Synthetic polypeptide
RHDLLLLAFEAMIVRLSQPRGTMRAEVQLTKQVVHRL

SEQ ID NO: 31500 - protein, 8 aa, Artificial Sequence
  Synthetic polypeptide
GFPNHVEL

SEQ ID NO: 31501 - protein, 499 aa, Artificial Sequence
  Synthetic polypeptide
SHDCEAFPTTWNYEGRSAVDQAGGAQIVIDHLRSLCSITDPANEKLLTVFCGMLMNYSNENDSLQAQLINMGVIPTLVKLLGIHCQNAALTEMCLVAFGNLAELESSKEQFASTNIAEELVKLFKKQIEHDKREMIFEVLAPLAENDAIKLQLVEAGLVECLLEIVQQKVDSDKEDDITELKTGSDLMVLLLLGDESMQKLFEGGKGSVFQRVLSWIPSNNHQLQLAGALAIANFARNDANCIHMVDNGIVEKLMDLLDRHVEDGNVTVQHAALSALRNLAIPVINKAKMLSAGVTEAVLKFLKSEMPPVQFKLLGTLRMLIDAQAEAAEQLGKNVKLVERLVEWCEAKDHAGVMGESNRLLSALIRHSKSKDVIKTIVQSGGIKHLVTMATSEHVIMQNEALVALALIAALELGTAEKDLESAKLVQILHRLLADERSAPEIKYNSMVLICALMGSECLHKEVQDLAFLDVVSKLRSHENKSVAQQASLTEQRLTVES

SEQ ID NO: 31502 - protein, 498 aa, Artificial Sequence
  Synthetic polypeptide
SHDCEAFPTTWNYEGRSAVDQAGGAQIVIDHLRSLCSITDPANEKLLTVFCGMLMNYSNENDSLQAQLINMGVIPTLVKLLGIHCQNAALTEMCLVAFGNLAELESSKEQFASTNIAEELVKLFKKQIEHDKREMIFEVLAPLAENDAIKLQLVEAGLVECLLEIVQQKVDSDKEDDITELKTGSDLMVLLLLGDESMQKLFEGGKGSVFQRVLSWIPSNNHQLQLAGALAIANFARNDANCIHMVDNGIVEKLMDLLDRHVEDGNVTVQHAALSALRNLAIPVINKAKMLSAGVTEAVLKFLKSEMPPVQFKLLGTLRMLIDAQEAAEQLGKNVKLVERLVEWCEAKDHAGVMGESNRLLSALIRHSKSKDVIKTIVQSGGIKHLVTMATSEHVIMQNEALVALALIAALELGTAEKDLESAKLVQILHRLLADERSAPEIKYNSMVLICALMGSECLHKEVQDLAFLDVVSKLRSHENKSVAQQASLTEQRLTVES

SEQ ID NO: 31503 - protein, 91 aa, Artificial Sequence
  Synthetic polypeptide
SHDCEAFPTTWNYEGRSAVDQAGGAQIVIDHLRSLCSITDPANEKLLTVFCGMLMNYSNENDSLQAQLINMGVIPTLVKLLGIHCQNAALT

SEQ ID NO: 31504 - protein, 639 aa, Artificial Sequence
  Synthetic polypeptide
CPGTAQLRTLKGILVSLWVRVPSSKQSLPEPHGASYPMISTLILSQAHQLPPCCLIVMCAFLFQSLCTGDAICCLDVFLLAGPVAWGSTGRGLSYNFTHLDGYLDLLRENQLLPGFELMGSASGHFTDFEDKQQVFEWKDLVSSLARRYIGRYGLAHVSKWNFETWNEPDHHDFDNVSMTMQGFLNYYDACSEGLRAASPALRLGGPGDSFHTPPRSPLSWGLLRHCHDGTNFFTGEAGVRLDYISLHRKGARSSISILEQEKVVAQQIRQLFPKFADTPIYNDEADPLVGWSLPQPWRADVTYAAMVVKVIAQHQNLLLANTTSAFPYALLSNDNAFLSYHPHPFAQRTLTARFQVNNTRPPHVQLLRKPVLTAMGLLALLDEEQLWAEVSQAGTVLDSNHTVGVLASAHRPQGPADAWRAAVLIYASDDTRAHPNRSVAVTLRLRGVPPGPGLVYVTRYLDNGLCSPDGEWRRLGRPVFPTAEQFRRMRAAEDPVAAAPRPLPAGGRLTLRPALRLPSLLLVHVCARPEKPPGQVTRLRALPLTQGQLVLVWSDEHVGSKCLWTYEIQFSQDGKAYTPVSRKPSTFNLFVFSPDTGAVSGSYRVRALDYWARPGPFSDPVPYLEVPVPRGPPSPGNP

SEQ ID NO: 31505 - protein, 37 aa, Artificial Sequence
  Synthetic polypeptide
LSCVHSCSRAFALAMPSAAWMSSCWLVPLHGGPLDGA

SEQ ID NO: 31506 - protein, 115 aa, Artificial Sequence
  Synthetic polypeptide
PWHCSAQNLERDPCFALGQGPILKAVTSRAPWSLISHDIHPYSVSGPPAASLLPDCHVCIPVPEPLHWRCHLLPGCLPAGWSRCMGVHWTGPELQLHPPGRVPGPSQGEPAPPRV

SEQ ID NO: 31507 - protein, 708 aa, Artificial Sequence
  Synthetic polypeptide
CPGTAQLRTLKGILVSLWVRVPSSKQSLPEPHGASYPMISTLILSQAHQLPPCCLIVMCAFLFQSLCTGDAICCLDVFLLAGPVAWGSTGRGLSYNFTHLDGYLDLLRENQLLPGFELMGSASGHFTDFEDKQQVFEWKDLVSSLARRYIGRYGLAHVSKWNFETWNEPDHHDFDNVSMTMQGFLNYYDACSEGLRAASPALRLGGPGDSFHTPPRSPLSWGLLRHCHDGTNFFTGEAGVRLDYISLHRKVRPAPPSAPVFCALSRCAPGRADPGGAEAAPPAGCAQLHLHPGAGEGRRAADPAALPQVRGHPHLQRRGGPAGGLVPATAVEGGRDLRGHGGEGGPAQRPARPPATFLPRRDRRAVAAPPGPSCPGHPQVIAQHQNLLLANTTSAFPYALLSNDNAFLSYHPHPFAQRTLTARFQVNNTRPPHVQLLRKPVLTAMGLLALLDEEQLWAEVSQAGTVLDSNHTVGVLASAHRPQGPADAWRAAVLIYASDDTRAHPNRSVAVTLRLRGVPPGPGLVYVTRYLDNGLCSPDGEWRRLGRPVFPTAEQFRRMRAAEDPVAAAPRPLPAGGRLTLRPALRLPSLLLVHVCARPEKPPGQVTRLRALPLTQGQLVLVWSDEHVGSKCLWTYEIQFSQDGKAYTPVSRKPSTFNLFVFSPDTGAVSGSYRVRALDYWARPGPFSDPVPYLEVPVPRGPPSPGNP

SEQ ID NO: 31508 - protein, 257 aa, Artificial Sequence
  Synthetic polypeptide
CPGTAQLRTLKGILVSLWVRVPSSKQSLPEPHGASYPMISTLILSQAHQLPPCCLIVMCAFLFQSLCTGDAICCLDVFLLAGPVAWGSTGRGLSYNFTHLDGYLDLLRENQLLPGFELMGSASGHFTDFEDKQQVFEWKDLVSSLARRYIGRYGLAHVSKWNFETWNEPDHHDFDNVSMTMQGFLNYYDACSEGLRAASPALRLGGPGDSFHTPPRSPLSWGLLRHCHDGTNFFTGEAGVRLDYISLHRKGARSSIS

SEQ ID NO: 31509 - protein, 194 aa, Artificial Sequence
  Synthetic polypeptide
CPGTAQLRTLKGILVSLWVRVPSSKQSLPEPHGASYPMISTLILSQAHQLPPCCLIVMCAFLFQSLCTGDAICCLDVFLLAGPVAWGSTGRGLSYNFTHLDGYLDLLRENQLLPGFELMGSASGHFTDFEDKQQVFEWKDLVSSLARRYIGRYGLAHVSKWNFETWNEPDHHDFDNVSMTMQGFLNYYDACSEG

SEQ ID NO: 31510 - protein, 279 aa, Artificial Sequence
  Synthetic polypeptide
CPGTAQLRTLKGILVSLWVRVPSSKQSLPEPHGASYPMISTLILSQAHQLPPCCLIVMCAFLFQSLCTGDAICCLDVFLLAGPVAWGSTGRGLSYNFTHLDGYLDLLRENQLLPGFELMGSASGHFTDFEDKQQVFEWKDLVSSLARRYIGRYGLAHVSKWNFETWNEPDHHDFDNVSMTMQGFLNYYDACSEGLRAASPALRLGGPGDSFHTPPRSPLSWGLLRHCHDGTNFFTGEAGVRLDYISLHRKGARSSISILEQEKVVAQQIRQLFPKFADT

SEQ ID NO: 31511 - protein, 231 aa, Artificial Sequence
  Synthetic polypeptide
CPGTAQLRTLKGILVSLWVRVPSSKQSLPEPHGASYPMISTLILSQAHQLPPCCLIVMCAFLFQSLCTGDAICCLDVFLLAGPVAWGSTGRGLSYNFTHLDGYLDLLRENQLLPGFELMGSASGHFTDFEDKQQVFEWKDLVSSLARRYIGRYGLAHVSKWNFETWNEPDHHDFDNVSMTMQGFLNYYDACSEGLRAASPALRLGGPGDSFHTPPRSPLSWGLLRHCHDGT

SEQ ID NO: 31512 - protein, 587 aa, Artificial Sequence
  Synthetic polypeptide
LSCVHSCSRAFALAMPSAAWMSSCWLVPLHGSLRGSTGRGLSYNFTHLDGYLDLLRENQLLPGFELMGSASGHFTDFEDKQQVFEWKDLVSSLARRYIGRYGLAHVSKWNFETWNEPDHHDFDNVSMTMQGFLNYYDACSEGLRAASPALRLGGPGDSFHTPPRSPLSWGLLRHCHDGTNFFTGEAGVRLDYISLHRKGARSSISILEQEKVVAQQIRQLFPKFADTPIYNDEADPLVGWSLPQPWRADVTYAAMVVKVIAQHQNLLLANTTSAFPYALLSNDNAFLSYHPHPFAQRTLTARFQVNNTRPPHVQLLRKPVLTAMGLLALLDEEQLWAEVSQAGTVLDSNHTVGVLASAHRPQGPADAWRAAVLIYASDDTRAHPNRSVAVTLRLRGVPPGPGLVYVTRYLDNGLCSPDGEWRRLGRPVFPTAEQFRRMRAAEDPVAAAPRPLPAGGRLTLRPALRLPSLLLVHVCARPEKPPGQVTRLRALPLTQGQLVLVWSDEHVGSKCLWTYEIQFSQDGKAYTPVSRKPSTFNLFVFSPDTGAVSGSYRVRALDYWARPGPFSDPVPYLEVPVPRGPPSPGNP

SEQ ID NO: 31513 - protein, 95 aa, Artificial Sequence
  Synthetic polypeptide
PWHCSAQNLERDPCFALGQGPILKAVTSRAPWSLISHDIHPYSVSGPPAASLLPDCHVCIPVPEPLHWRCHLLPGCLPAGWSRCMVALGGPLDGA

SEQ ID NO: 31514 - protein, 656 aa, Artificial Sequence
  Synthetic polypeptide
LSCVHSCSRAFALAMPSAAWMSSCWLVPLHGSLRGSTGRGLSYNFTHLDGYLDLLRENQLLPGFELMGSASGHFTDFEDKQQVFEWKDLVSSLARRYIGRYGLAHVSKWNFETWNEPDHHDFDNVSMTMQGFLNYYDACSEGLRAASPALRLGGPGDSFHTPPRSPLSWGLLRHCHDGTNFFTGEAGVRLDYISLHRKVRPAPPSAPVFCALSRCAPGRADPGGAEAAPPAGCAQLHLHPGAGEGRRAADPAALPQVRGHPHLQRRGGPAGGLVPATAVEGGRDLRGHGGEGGPAQRPARPPATFLPRRDRRAVAAPPGPSCPGHPQVIAQHQNLLLANTTSAFPYALLSNDNAFLSYHPHPFAQRTLTARFQVNNTRPPHVQLLRKPVLTAMGLLALLDEEQLWAEVSQAGTVLDSNHTVGVLASAHRPQGPADAWRAAVLIYASDDTRAHPNRSVAVTLRLRGVPPGPGLVYVTRYLDNGLCSPDGEWRRLGRPVFPTAEQFRRMRAAEDPVAAAPRPLPAGGRLTLRPALRLPSLLLVHVCARPEKPPGQVTRLRALPLTQGQLVLVWSDEHVGSKCLWTYEIQFSQDGKAYTPVSRKPSTFNLFVFSPDTGAVSGSYRVRALDYWARPGPFSDPVPYLEVPVPRGPPSPGNP

SEQ ID NO: 31515 - protein, 205 aa, Artificial Sequence
  Synthetic polypeptide
LSCVHSCSRAFALAMPSAAWMSSCWLVPLHGSLRGSTGRGLSYNFTHLDGYLDLLRENQLLPGFELMGSASGHFTDFEDKQQVFEWKDLVSSLARRYIGRYGLAHVSKWNFETWNEPDHHDFDNVSMTMQGFLNYYDACSEGLRAASPALRLGGPGDSFHTPPRSPLSWGLLRHCHDGTNFFTGEAGVRLDYISLHRKGARSSIS

SEQ ID NO: 31516 - protein, 142 aa, Artificial Sequence
  Synthetic polypeptide
LSCVHSCSRAFALAMPSAAWMSSCWLVPLHGSLRGSTGRGLSYNFTHLDGYLDLLRENQLLPGFELMGSASGHFTDFEDKQQVFEWKDLVSSLARRYIGRYGLAHVSKWNFETWNEPDHHDFDNVSMTMQGFLNYYDACSEG

SEQ ID NO: 31517 - protein, 227 aa, Artificial Sequence
  Synthetic polypeptide
LSCVHSCSRAFALAMPSAAWMSSCWLVPLHGSLRGSTGRGLSYNFTHLDGYLDLLRENQLLPGFELMGSASGHFTDFEDKQQVFEWKDLVSSLARRYIGRYGLAHVSKWNFETWNEPDHHDFDNVSMTMQGFLNYYDACSEGLRAASPALRLGGPGDSFHTPPRSPLSWGLLRHCHDGTNFFTGEAGVRLDYISLHRKGARSSISILEQEKVVAQQIRQLFPKFADT

SEQ ID NO: 31518 - protein, 179 aa, Artificial Sequence
  Synthetic polypeptide
LSCVHSCSRAFALAMPSAAWMSSCWLVPLHGSLRGSTGRGLSYNFTHLDGYLDLLRENQLLPGFELMGSASGHFTDFEDKQQVFEWKDLVSSLARRYIGRYGLAHVSKWNFETWNEPDHHDFDNVSMTMQGFLNYYDACSEGLRAASPALRLGGPGDSFHTPPRSPLSWGLLRHCHDGT

SEQ ID NO: 31519 - protein, 10 aa, Artificial Sequence
  Synthetic polypeptide
FLHFHLSFWE

SEQ ID NO: 31520 - protein, 198 aa, Artificial Sequence
  Synthetic polypeptide
GRSQDGRIGTAPVYSSQRERRRRRVISAFPSEFLGITFLGIGLWAWNEKGVLSNISSITDLGGFDPVWLFLVVGGVMFILGFAGCIGALRENTFLLKFFSVFLGIIFFLELTAGVLAFVFKDWIKDQLYFFINNNIRAYRDDIDLQNLIDFTQEYIPMQVESDVAFHSPAALKIPQKMSSTLSVAMMPGKNQKLTSRL

SEQ ID NO: 31521 - protein, 273 aa, Artificial Sequence
  Synthetic polypeptide
GRSQDGRIGTAPVYSSQRERRRRRVISAFPSEFLGITFLGIGLWAWNEKGVLSNISSITDLGGFDPVWLFLVVGGVMFILGFAGCIGALRENTFLLKFFSVFLGIIFFLELTAGVLAFVFKDWIKDQLYFFINNNIRAYRDDIDLQNLIDFTQEYWQCCGAFGADDWNLNIYFNCTDSNASRERCGVPFSCCTKDPAEDVINTQCGYDARQKPEVDQQIVIYTKGCVPQFEKWLQDNLTIVAGIFIGIALLQIFGICLAQNLVSDIEAVRASW

SEQ ID NO: 31522 - protein, 101 aa, Artificial Sequence
  Synthetic polypeptide
GRSQDGRIGTAPVYSSQRERRRRRVISAFPSEFLGITFLGIGLWAWNEKGVLSNISSITDLGGFDPVWLFLVVGGVMFILGFAGCIGALRENTFLLKFDKQ

SEQ ID NO: 31523 - protein, 186 aa, Artificial Sequence
  Synthetic polypeptide
ASPDAESAGALILDLPTSRTFLGITFLGIGLWAWNEKGVLSNISSITDLGGFDPVWLFLVVGGVMFILGFAGCIGALRENTFLLKFFSVFLGIIFFLELTAGVLAFVFKDWIKDQLYFFINNNIRAYRDDIDLQNLIDFTQEYIPMQVESDVAFHSPAALKIPQKMSSTLSVAMMPGKNQKLTSRL

SEQ ID NO: 31524 - protein, 12 aa, Artificial Sequence
  Synthetic polypeptide
FWTSPPPELFWE

SEQ ID NO: 31525 - protein, 29 aa, Artificial Sequence
  Synthetic polypeptide
ICWSLDFGPPHLQNFFGNNISWNWTVGME

SEQ ID NO: 31526 - protein, 261 aa, Artificial Sequence
  Synthetic polypeptide
ASPDAESAGALILDLPTSRTFLGITFLGIGLWAWNEKGVLSNISSITDLGGFDPVWLFLVVGGVMFILGFAGCIGALRENTFLLKFFSVFLGIIFFLELTAGVLAFVFKDWIKDQLYFFINNNIRAYRDDIDLQNLIDFTQEYWQCCGAFGADDWNLNIYFNCTDSNASRERCGVPFSCCTKDPAEDVINTQCGYDARQKPEVDQQIVIYTKGCVPQFEKWLQDNLTIVAGIFIGIALLQIFGICLAQNLVSDIEAVRASW

SEQ ID NO: 31527 - protein, 89 aa, Artificial Sequence
  Synthetic polypeptide
ASPDAESAGALILDLPTSRTFLGITFLGIGLWAWNEKGVLSNISSITDLGGFDPVWLFLVVGGVMFILGFAGCIGALRENTFLLKFDKQ

SEQ ID NO: 31528 - protein, 27 aa, Artificial Sequence
  Synthetic polypeptide
FLYCDTHFIMMIWNWTHNISKMGTLVF

SEQ ID NO: 31529 - protein, 185 aa, Artificial Sequence
  Synthetic polypeptide
SGTGLTIYPRWALWFFKNDKSKTWQANLRLISKFDTVEDFWALYNHIQLSSNLMPGCDYSLFKDGIEPMWEDEKNKRGGRWLITLNKQQRRSDLDRFWLETLLCLIGESFDDYSDDVCGAVVNVRAKGDKIAIWTTECENREAVTHIGRVYKERLGLPPKIVIGYQSHADTATKSGSTTKNRFVV

SEQ ID NO: 31530 - protein, 36 aa, Artificial Sequence
  Synthetic polypeptide
YSLYYDDLELDSQYIQDGHSGFLKMIKAKLGKQTCG

SEQ ID NO: 31531 - protein, 126 aa, Artificial Sequence
  Synthetic polypeptide
SGTGLTIYPRWALWFFKNDKSKTWQANLRLISKFDTVEDFWALYNHIQLSSNLMPGCDYSLFKDGIEPMWEDEKNKRGGRWLITLNKQQRRSDLDRFWLETEGIQGKVRTSSKDSDWLSVPRRHSY

SEQ ID NO: 31532 - protein, 216 aa, Artificial Sequence
  Synthetic polypeptide
SGTGLTIYPRWALWFFKNDKSKTWQANLRLISKFDTVEDFWALYNHIQLSSNLMPGCDYSLFKDGIEPMWEDEKNKRGGRWLITLNKQQRRSDLDRFWLETRWDLAMLPRLVSNFWPQVILPLQPPKVLELQLLCLIGESFDDYSDDVCGAVVNVRAKGDKIAIWTTECENREAVTHIGRVYKERLGLPPKIVIGYQSHADTATKSGSTTKNRFVV

SEQ ID NO: 31533 - protein, 77 aa, Artificial Sequence
  Synthetic polypeptide
PWEAKVGGLLELRSLRPAWPTWKPPLLLIPRLQKRRKRNLIRRLLTQNTILNIPYRTDGHSGFLKMIKAKLGKQTCG

SEQ ID NO: 31534 - protein, 12 aa, Artificial Sequence
  Synthetic polypeptide
DQPGQHGNHPYS

SEQ ID NO: 31535 - protein, 222 aa, Artificial Sequence
  Synthetic polypeptide
AQEFETSLANMETTPTPNPPTTEEEKTESNQEVANPEHYIKHPLQNRWALWFFKNDKSKTWQANLRLISKFDTVEDFWALYNHIQLSSNLMPGCDYSLFKDGIEPMWEDEKNKRGGRWLITLNKQQRRSDLDRFWLETLLCLIGESFDDYSDDVCGAVVNVRAKGDKIAIWTTECENREAVTHIGRVYKERLGLPPKIVIGYQSHADTATKSGSTTKNRFVV

SEQ ID NO: 31536 - protein, 58 aa, Artificial Sequence
  Synthetic polypeptide
PWEAKVGGLLELRSLRPAWPTWKPPLLLIPRLQKRRKRNLIRRLLTQNTILNIPYRTD

SEQ ID NO: 31537 - protein, 47 aa, Artificial Sequence
  Synthetic polypeptide
AQEFETSLANMETTPTPNPPTTEEEKTESNQEVANPEHYIKHPLQNR

SEQ ID NO: 31538 - protein, 163 aa, Artificial Sequence
  Synthetic polypeptide
AQEFETSLANMETTPTPNPPTTEEEKTESNQEVANPEHYIKHPLQNRWALWFFKNDKSKTWQANLRLISKFDTVEDFWALYNHIQLSSNLMPGCDYSLFKDGIEPMWEDEKNKRGGRWLITLNKQQRRSDLDRFWLETEGIQGKVRTSSKDSDWLSVPRRHSY

SEQ ID NO: 31539 - protein, 253 aa, Artificial Sequence
  Synthetic polypeptide
AQEFETSLANMETTPTPNPPTTEEEKTESNQEVANPEHYIKHPLQNRWALWFFKNDKSKTWQANLRLISKFDTVEDFWALYNHIQLSSNLMPGCDYSLFKDGIEPMWEDEKNKRGGRWLITLNKQQRRSDLDRFWLETRWDLAMLPRLVSNFWPQVILPLQPPKVLELQLLCLIGESFDDYSDDVCGAVVNVRAKGDKIAIWTTECENREAVTHIGRVYKERLGLPPKIVIGYQSHADTATKSGSTTKNRFVV

SEQ ID NO: 31540 - protein, 634 aa, Artificial Sequence
  Synthetic polypeptide
GHSEKMDICKPGREASPETEYAGTRILDLAGLQNSVVFGLIDVSIGDFQKEYQLKTIEKLALEKSYDISSGLVAIFIAFYGDRKKVIWFVASSFLIGLGSLLCAFPSINEENKQSKVGIEDICEEIKVVSGCQSSGISFQSKYLSFFILGQTVQGIAGMPLYILGITFIDENVATHSAGIYLGIAECTSMIGYALGYVLGAPLVKVPENTTSATNTTVNNGSPEWLWTWWINFLFAAVVAWCTLIPLSCFPNNMPGSTRIKARKRKQLHFFDSRLKDLKLGTNIKDLCAALWILMKNPVLICLALSKATEYLVIIGASEFLPIYLENQFILTPTVATTLAGLVLIPGGALGQLLGGVIVSTLEMSCKALMRFIMVTSVISLILLVFIIFVRCNPVQFAGINEDYDGTGKLGNLTAPCNEKCRCSSSIYSSICGRDDIEYFSPCFAGCTYSKAQNQKKMYYNCSCIKEGLITADAEGDFIDARPGKCDAKCYKLPLFIAFIFSTLIFSGFSGVPIVLAMTRVVPDKLRSLALGVSYVILRIFGTIPGPSIFKMSGETSCILRDVNKCGHTGRCWIYNKTKMAFLLVGICFLCKLCTIIFTTIAFFIYKRRLNENTDFPDVTVKNPKVKKKEETDL

SEQ ID NO: 31541 - protein, 43 aa, Artificial Sequence
  Synthetic polypeptide
PCEDTVRRWTSASREERPHQKQSMLAPESWTWPVSKTVWCLVL

SEQ ID NO: 31542 - protein, 53 aa, Artificial Sequence
  Synthetic polypeptide
EDGHLQAGKRGLTRNRVCWHQNLGLGRSPKQCGVWSYRCQHWRFSEGISTENH

SEQ ID NO: 31543 - protein, 572 aa, Artificial Sequence
  Synthetic polypeptide
GHSEKMDICKPGREASPETEYAGTRILDLAGLQNSVVFGLIDVSIGDFQKEYQLKTIEKLALEKSYDISSGLVAIFIAFYGDRKKVIWFVASSFLIGLGSLLCAFPSINEENKQSKVGIEGIAECTSMIGYALGYVLGAPLVKVPENTTSATNTTVNNGSPEWLWTWWINFLFAAVVAWCTLIPLSCFPNNMPGSTRIKARKRKQLHFFDSRLKDLKLGTNIKDLCAALWILMKNPVLICLALSKATEYLVIIGASEFLPIYLENQFILTPTVATTLAGLVLIPGGALGQLLGGVIVSTLEMSCKALMRFIMVTSVISLILLVFIIFVRCNPVQFAGINEDYDGTGKLGNLTAPCNEKCRCSSSIYSSICGRDDIEYFSPCFAGCTYSKAQNQKKMYYNCSCIKEGLITADAEGDFIDARPGKCDAKCYKLPLFIAFIFSTLIFSGFSGVPIVLAMTRVVPDKLRSLALGVSYVILRIFGTIPGPSIFKMSGETSCILRDVNKCGHTGRCWIYNKTKMAFLLVGICFLCKLCTIIFTTIAFFIYKRRLNENTDFPDVTVKNPKVKKKEETDL

SEQ ID NO: 31544 - protein, 381 aa, Artificial Sequence
  Synthetic polypeptide
GHSEKMDICKPGREASPETEYAGTRILDLAGLQNSVVFGLIDVSIGDFQKEYQLKTIEKLALEKSYDISSGLVAIFIAFYGDRKKVIWFVASSFLIGLGSLLCAFPSINEENKQSKVGIEGIAECTSMIGYALGYVLGAPLVKVPENTTSATKTGKLGNLTAPCNEKCRCSSSIYSSICGRDDIEYFSPCFAGCTYSKAQNQKKMYYNCSCIKEGLITADAEGDFIDARPGKCDAKCYKLPLFIAFIFSTLIFSGFSGVPIVLAMTRVVPDKLRSLALGVSYVILRIFGTIPGPSIFKMSGETSCILRDVNKCGHTGRCWIYNKTKMAFLLVGICFLCKLCTIIFTTIAFFIYKRRLNENTDFPDVTVKNPKVKKKEETDL

SEQ ID NO: 31545 - protein, 120 aa, Artificial Sequence
  Synthetic polypeptide
QDLHHPKASPHKLLIIKAKIATAQWRHRIPPSLCGYCHHQEQKGLLGVCGALMLQLEKKLERELEDDARVIACRFPFPHWTPDHVTGEGIDTVWAYDASTFRGREKRPCTSMHFQLPIQA

SEQ ID NO: 31546 - protein, 61 aa, Artificial Sequence
  Synthetic polypeptide
VTGFTSSQSISPQTTHYKSKNSNCTMETPDPTFTVWLLPSSRAEGPPGCLWSPDAAVGEET

SEQ ID NO: 31547 - protein, 36 aa, Artificial Sequence
  Synthetic polypeptide
LKETMPDNGKPRQLLKPKWRTNPPPQNCRRCKRNRN

SEQ ID NO: 31548 - protein, 13 aa, Artificial Sequence
  Synthetic polypeptide
RKRCLTMVSRGSC

SEQ ID NO: 31549 - protein, 22 aa, Artificial Sequence
  Synthetic polypeptide
ARHSGAHLQSQLLRKWSYKWTF

SEQ ID NO: 31550 - protein, 53 aa, Artificial Sequence
  Synthetic polypeptide
PGIVVPTCNPSYSGSGATSGPSSAVVPNTSSRKKNITSKTETHEHKKNTGKKK

SEQ ID NO: 31551 - protein, 32 aa, Artificial Sequence
  Synthetic polypeptide
WCPPAIPATQEVELQVDLLVQLFLIPHLGKRI

SEQ ID NO: 31552 - protein, 18 aa, Artificial Sequence
  Synthetic polypeptide
HYEEKVELLHMCHRLRHM

SEQ ID NO: 31553 - protein, 35 aa, Artificial Sequence
  Synthetic polypeptide
IETYVECVGQKEHLRNRFIILVYVLAVLSLSIKNA

SEQ ID NO: 31554 - protein, 14 aa, Artificial Sequence
  Synthetic polypeptide
HSPRGSAASFLKHM

SEQ ID NO: 31555 - protein, 77 aa, Artificial Sequence
  Synthetic polypeptide
ASETTNPPEGRNSEHVRTSEGTNSRRDTLRAVTLTARVRGFILETYVECVGQKEHLRNRFIILVYVLAVLSLSIKNA

SEQ ID NO: 31556 - protein, 5 aa, Artificial Sequence
  Synthetic polypeptide
PVRHM

SEQ ID NO: 31557 - protein, 861 aa, Artificial Sequence
  Synthetic polypeptide
RANQLDICRVCRSEGTPEKPLYHPCVCTGSIKFIHQECLVQWLKHSRKEYCELCKHRFAFTPSRIYKCLFTGSVSSLLTLPLDMLSTENLLADCLQGCFVVTCTLCAFISLVWLREQIVHGGAPIWLEHAAPPFNAAGHHQNEAPAGGNGAENVAADQPANPPAENAVVGENPDAQDDQAEEEEEDNEEEDDAGVEDAADANNGAQDDMNWNALEWDRAAEELTWERMLGLDGSLVFLEHVFWVVSLNTLFILVFAFCPYHIGHFSLVGLGFEEHVQASHFEGLITTIVGYILLAITLIICHGLATLVKFHRSRRLLGVCYIVVKVSLLVVVEIGVFPLICGWWLDICSLEMFDATLKDRELSFQSAPGTTMFLHWLVGMVYVFYFASFILLLREVLRPGVLWFLRNLNDPDFNPVQEMIHLPIYRHLRRFILSVIVFGSIVLLMLWLPIRIIKSVLPNFLPYNVMLYSDAPVSELSLELLLLQVVLPALLEQGHTRQWLKGLVRAWTVTAGYLLDLHSYLLGDQEENENSANQQVNNNQHARNNNAIPVVGEGLHAAHQAILQQGGPVGFQPYRRPLNFPLRIFLLIVFMCITLLIASLICLTLPVFAGRWLMSFWTGTAKIHELYTAACGLYVCWLTIRAVTVMVAWMPQGRRVIFQKVKEWSLMIMKTLIVAVLLAGVVPLLLGLLFELVIVAPLRVPLDQTPLFYPWQDWALGVLHAKIIAAITLMGPQWWLKTVIEQVYANGIRNIDLHYIVRKLAAPVISVLLLSLCVPYVIASGVVPLLGVTAEMQNLVHRRIYPFLLMVVVLMAILSFQVRQFKRLYEHIKNDKYLVGQRLVNYERKSGKQGSSPPPPQSSQE

SEQ ID NO: 31558 - protein, 76 aa, Artificial Sequence
  Synthetic polypeptide
RANQLDICRVCRSEGTPEKPLYHPCVCTGSIKFIHQECLVQWLKHSRKEYCELCKHRFAFTPRKICWQIVCRVVLW

SEQ ID NO: 31559 - protein, 909 aa, Artificial Sequence
  Synthetic polypeptide
RANQLDICRVCRSEGTPEKPLYHPCVCTGSIKFIHQECLVQWLKHSRKEYCELCKHRFAFTPIYSPDMPSRLPIQDIFAGLVTSIGTAIRYWFHYTLVAFAWLGVVPLTACRIYKCLFTGSVSSLLTLPLDMLSTENLLADCLQGCFVVTCTLCAFISLVWLREQIVHGGAPIWLEHAAPPFNAAGHHQNEAPAGGNGAENVAADQPANPPAENAVVGENPDAQDDQAEEEEEDNEEEDDAGVEDAADANNGAQDDMNWNALEWDRAAEELTWERMLGLDGSLVFLEHVFWVVSLNTLFILVFAFCPYHIGHFSLVGLGFEEHVQASHFEGLITTIVGYILLAITLIICHGLATLVKFHRSRRLLGVCYIVVKVSLLVVVEIGVFPLICGWWLDICSLEMFDATLKDRELSFQSAPGTTMFLHWLVGMVYVFYFASFILLLREVLRPGVLWFLRNLNDPDFNPVQEMIHLPIYRHLRRFILSVIVFGSIVLLMLWLPIRIIKSVLPNFLPYNVMLYSDAPVSELSLELLLLQVVLPALLEQGHTRQWLKGLVRAWTVTAGYLLDLHSYLLGDQEENENSANQQVNNNQHARNNNAIPVVGEGLHAAHQAILQQGGPVGFQPYRRPLNFPLRIFLLIVFMCITLLIASLICLTLPVFAGRWLMSFWTGTAKIHELYTAACGLYVCWLTIRAVTVMVAWMPQGRRVIFQKVKEWSLMIMKTLIVAVLLAGVVPLLLGLLFELVIVAPLRVPLDQTPLFYPWQDWALGVLHAKIIAAITLMGPQWWLKTVIEQVYANGIRNIDLHYIVRKLAAPVISVLLLSLCVPYVIASGVVPLLGVTAEMQNLVHRRIYPFLLMVVVLMAILSFQVRQFKRLYEHIKNDKYLVGQRLVNYERKSGKQGSSPPPPQSSQE

SEQ ID NO: 31560 - protein, 848 aa, Artificial Sequence
  Synthetic polypeptide
LHVCEILKQVTFIYSGRDLNSGYLLQGLLPGKKLEGAFWGAGSVEHLDLGRIYKCLFTGSVSSLLTLPLDMLSTENLLADCLQGCFVVTCTLCAFISLVWLREQIVHGGAPIWLEHAAPPFNAAGHHQNEAPAGGNGAENVAADQPANPPAENAVVGENPDAQDDQAEEEEEDNEEEDDAGVEDAADANNGAQDDMNWNALEWDRAAEELTWERMLGLDGSLVFLEHVFWVVSLNTLFILVFAFCPYHIGHFSLVGLGFEEHVQASHFEGLITTIVGYILLAITLIICHGLATLVKFHRSRRLLGVCYIVVKVSLLVVVEIGVFPLICGWWLDICSLEMFDATLKDRELSFQSAPGTTMFLHWLVGMVYVFYFASFILLLREVLRPGVLWFLRNLNDPDFNPVQEMIHLPIYRHLRRFILSVIVFGSIVLLMLWLPIRIIKSVLPNFLPYNVMLYSDAPVSELSLELLLLQVVLPALLEQGHTRQWLKGLVRAWTVTAGYLLDLHSYLLGDQEENENSANQQVNNNQHARNNNAIPVVGEGLHAAHQAILQQGGPVGFQPYRRPLNFPLRIFLLIVFMCITLLIASLICLTLPVFAGRWLMSFWTGTAKIHELYTAACGLYVCWLTIRAVTVMVAWMPQGRRVIFQKVKEWSLMIMKTLIVAVLLAGVVPLLLGLLFELVIVAPLRVPLDQTPLFYPWQDWALGVLHAKIIAAITLMGPQWWLKTVIEQVYANGIRNIDLHYIVRKLAAPVISVLLLSLCVPYVIASGVVPLLGVTAEMQNLVHRRIYPFLLMVVVLMAILSFQVRQFKRLYEHIKNDKYLVGQRLVNYERKSGKQGSSPPPPQSSQE

SEQ ID NO: 31561 - protein, 41 aa, Artificial Sequence
  Synthetic polypeptide
IVVTFCRGCCLGRSLREPSGELEVLNILIWAASTSACLLAP

SEQ ID NO: 31562 - protein, 81 aa, Artificial Sequence
  Synthetic polypeptide
FGPHLQVLVYWLRELTTDAAIRYAVNGKFVGRLFAGLFCGDVHTVCIHQPGVVERADSPWGSTNLVGACCPTVQCCGASPK

SEQ ID NO: 31563 - protein, 849 aa, Artificial Sequence
  Synthetic polypeptide
LHVCEILKQVTFIYSGRDLNSGYLLQGLLPGKKLEGAFWGAGSVEHLDLGGRIYKCLFTGSVSSLLTLPLDMLSTENLLADCLQGCFVVTCTLCAFISLVWLREQIVHGGAPIWLEHAAPPFNAAGHHQNEAPAGGNGAENVAADQPANPPAENAVVGENPDAQDDQAEEEEEDNEEEDDAGVEDAADANNGAQDDMNWNALEWDRAAEELTWERMLGLDGSLVFLEHVFWVVSLNTLFILVFAFCPYHIGHFSLVGLGFEEHVQASHFEGLITTIVGYILLAITLIICHGLATLVKFHRSRRLLGVCYIVVKVSLLVVVEIGVFPLICGWWLDICSLEMFDATLKDRELSFQSAPGTTMFLHWLVGMVYVFYFASFILLLREVLRPGVLWFLRNLNDPDFNPVQEMIHLPIYRHLRRFILSVIVFGSIVLLMLWLPIRIIKSVLPNFLPYNVMLYSDAPVSELSLELLLLQVVLPALLEQGHTRQWLKGLVRAWTVTAGYLLDLHSYLLGDQEENENSANQQVNNNQHARNNNAIPVVGEGLHAAHQAILQQGGPVGFQPYRRPLNFPLRIFLLIVFMCITLLIASLICLTLPVFAGRWLMSFWTGTAKIHELYTAACGLYVCWLTIRAVTVMVAWMPQGRRVIFQKVKEWSLMIMKTLIVAVLLAGVVPLLLGLLFELVIVAPLRVPLDQTPLFYPWQDWALGVLHAKIIAAITLMGPQWWLKTVIEQVYANGIRNIDLHYIVRKLAAPVISVLLLSLCVPYVIASGVVPLLGVTAEMQNLVHRRIYPFLLMVVVLMAILSFQVRQFKRLYEHIKNDKYLVGQRLVNYERKSGKQGSSPPPPQSSQE

SEQ ID NO: 31564 - protein, 42 aa, Artificial Sequence
  Synthetic polypeptide
IVVTFCRGCCLGRSLREPSGELEVLNILIWVAASTSACLLAP

SEQ ID NO: 31565 - protein, 82 aa, Artificial Sequence
  Synthetic polypeptide
FGWPHLQVLVYWLRELTTDAAIRYAVNGKFVGRLFAGLFCGDVHTVCIHQPGVVERADSPWGSTNLVGACCPTVQCCGASPK

SEQ ID NO: 31566 - protein, 121 aa, Artificial Sequence
  Synthetic polypeptide
PHKGSNPQAPPFLVPHLLVEGAGPGWLLPSSLWSCQGCCPLPSRPTGLIVACYHGFVDTVVALAECPHVDVNWQDSEGNTALITAAQAGAAPVPMGIVSLDTGSQSCASGVSITWAGSCEH

SEQ ID NO: 31567 - protein, 75 aa, Artificial Sequence
  Synthetic polypeptide
TNPTVLWETHLGNPIKDPTHRPLRFSFPTCWSKEQVLDGSSPLLFGLARGAVLFLPDLPALLSPATTALWIPWWP

SEQ ID NO: 31568 - protein, 66 aa, Artificial Sequence
  Synthetic polypeptide
RIQPTGPSVSRSPPAGRRSRSWMAPPLFSLVLPGVLSSSFQTYRPYCRLLPRLCGYRGGLSRVPPR

SEQ ID NO: 31569 - protein, 417 aa, Artificial Sequence
  Synthetic polypeptide
PHKGSNPQAPPFLVPHLLVEGAGPGWLLPSSLWSCQGCCPLPSRPTGLIVACYHGFVDTVVALAECPHVDVNWQDSEGNTALITAAQAGHAIITNYLLNYFPGLDLERRNAFGFTALMKAAMQGRTDCIRALMLAGADVHARDPRRGMSPQEWATYTGRVDAVRLMQRLLERPCPEQFWEKYRPELPPPPEAARKPAGSKNCLQRLTDCVLSVLTPRSVRGPEDGGVLDHMVRMTTSLYSPAVAIVCQTVCPESPPSVGKRRLAVQEILAARAARGPQAQEEDEVGGAGQRGRTGQEDADSREGSPRAGLPPALGSRGPAAPAPRKASLLPLQRLRRRSVRPGVVVPRVRVSKAPAPTFQPERPARKGSTKDSGHLQIPKWRYKEAKEEKRKAEEAEKKRQAEAQKERRTAPWKKRT

SEQ ID NO: 31570 - protein, 54 aa, Artificial Sequence
  Synthetic polypeptide
PHKGSNPQAPPFLVPHLLVEGAGPGWLLPSSLWSCQGCCPLPSRPGTLSSLTTC

SEQ ID NO: 31571 - protein, 63 aa, Artificial Sequence
  Synthetic polypeptide
TNPTVLWETHLGNPIKDPTHRPLRFSFPTCWSKEQVLDGSSPLLFGLARGAVLFLPDLARYHH

SEQ ID NO: 31572 - protein, 371 aa, Artificial Sequence
  Synthetic polypeptide
RIQPTGPSVSRSPPAGRRSRSWMAPPLFSLVLPGVLSSSFQTWHAIITNYLLNYFPGLDLERRNAFGFTALMKAAMQGRTDCIRALMLAGADVHARDPRRGMSPQEWATYTGRVDAVRLMQRLLERPCPEQFWEKYRPELPPPPEAARKPAGSKNCLQRLTDCVLSVLTPRSVRGPEDGGVLDHMVRMTTSLYSPAVAIVCQTVCPESPPSVGKRRLAVQEILAARAARGPQAQEEDEVGGAGQRGRTGQEDADSREGSPRAGLPPALGSRGPAAPAPRKASLLPLQRLRRRSVRPGVVVPRVRVSKAPAPTFQPERPARKGSTKDSGHLQIPKWRYKEAKEEKRKAEEAEKKRQAEAQKERRTAPWKKRT

SEQ ID NO: 31573 - protein, 11 aa, Artificial Sequence
  Synthetic polypeptide
TPRVLTHREGN

SEQ ID NO: 31574 - protein, 248 aa, Artificial Sequence
  Synthetic polypeptide
RHMHMYVYCGTIHNSKDLEPTQCPTVIDWIKKIWHIYTMEYYAAIKKDEFMSFVGTWMKLETIILSRLSQGQKTKHRVFSPIGKETEKAKERYDKATMKLHMLHNQYVLALKGAQLHQNQYYDITLPLLLDSLQKMQEEMIKALKGIFDEYSQITSLVTEEIVNVHKEIQMSVEQIDPSTEYNNFIDVHRTTAAKEQEIEFDTSLLEENENLQANEIMWNNLTAESLQVMKERRGYPNLNLFVIQLLE

SEQ ID NO: 31575 - protein, 744 aa, Artificial Sequence
  Synthetic polypeptide
RHMHMYVYCGTIHNSKDLEPTQCPTVIDWIKKIWHIYTMEYYAAIKKDEFMSFVGTWMKLETIILSRLSQGQKTKHRVFSPIGKETEKAKERYDKATMKLHMLHNQYVLALKGAQLHQNQYYDITLPLLLDSLQKMQEEMIKALKGIFDEYSQITSLVTEEIVNVHKEIQMSVEQIDPSTEYNNFIDVHRTTAAKEQEIEFDTSLLEENENLQANEIMWNNLTAESLQVMLKTLAEELMQTQQMLLNKEEAVLELEKRIEESSETCEKKSDIVLLLSQKQALEELKQSVQQLRCTEAKFSAQKELLEQKVQENDGKEPPPVVNYEEDARSVTSMERKERLSKFESIRHSIAGIIRSPKSALGSSALSDMISISEKPLAEQDWYHGAIPRIEAQELLKKQGDFLVRESHGKPGEYVLSVYSDGQRRHFIIQYVDNMYRFEGTGFSNIPQLIDHHYTTKQVITKKSGVVLLNPIPKDKKWILSHEDVILGELLGKGNFGEVYKGTLKDKTSVAVKTCKEDLPQELKIKFLQEAKILKQYDHPNIVKLIGVCTQRQPVYIIMELVSGGDFLTFLRRKKDELKLKQLVKFSLDAAAGMLYLESKNCIHRDLAARNCLVGENNVLKISDFGMSRQEDGGVYSSSGLKQIPIKWTAPEALNYGRYSSESDVWSFGILLWETFSLGVCPYPGMTNQQAREQVERGYRMSAPQHCPEDISKIMMKCWDYKPENRPKFSELQKELTIIKRKLT

SEQ ID NO: 31576 - protein, 98 aa, Artificial Sequence
  Synthetic polypeptide
RHMHMYVYCGTIHNSKDLEPTQCPTVIDWIKKIWHIYTMEYYAAIKKDEFMSFVGTWMKLETIILSRLSQGQKTKHRVFSPIGKETEKAKERYDKATM

SEQ ID NO: 31577 - protein, 40 aa, Artificial Sequence
  Synthetic polypeptide
ASFLYKLPSLWTRNGFSVMKMSYWENYWAREILVKYIRAH

SEQ ID NO: 31578 - protein, 59 aa, Artificial Sequence
  Synthetic polypeptide
TGVPLQVFSCLPPCETSLCFFFAFHHDCEASPAMWNCECIKPLSFINYPVFGQEMDSQS

SEQ ID NO: 31579 - protein, 275 aa, Artificial Sequence
  Synthetic polypeptide
ITQSLDKKWILSHEDVILGELLGKGNFGEVYKGTLKDKTSVAVKTCKEDLPQELKIKFLQEAKILKQYDHPNIVKLIGVCTQRQPVYIIMELVSGGDFLTFLRRKKDELKLKQLVKFSLDAAAGMLYLESKNCIHRDLAARNCLVGENNVLKISDFGMSRQEDGGVYSSSGLKQIPIKWTAPEALNYGRYSSESDVWSFGILLWETFSLGVCPYPGMTNQQAREQVERGYRMSAPQHCPEDISKIMMKCWDYKPENRPKFSELQKELTIIKRKLT

SEQ ID NO: 31580 - protein, 60 aa, Artificial Sequence
  Synthetic polypeptide
LLQEWLCYKNELSCTLLPFHHVIMQQEGPHQMPVPCSWNSQPPELKKKRSRSVILLSLAT

SEQ ID NO: 31581 - protein, 186 aa, Artificial Sequence
  Synthetic polypeptide
ALLHSLAFSPCDNAARRPSPDASAMLLEFPASRTEEEKKSVSYPSLLSHITSSLMNHPVIPMANKFSSPTLELQGEFSPLQSSLPCDIHLVNLRTIQSKVGNGHSNEAALILHRKGFDCRFSSKGTGLFCSTTQGKILVQKLLNKFIVESLTPSSLSLMHSPPGTQNISEINLSPMEISTFRIQLR

SEQ ID NO: 31582 - protein, 472 aa, Artificial Sequence
  Synthetic polypeptide
GLPSHVELPTFSITKEFILRFNQTQNSKEKEELLELARKIILRCKRKLGLKTLGSGRHVHLPAAWTEVIYLAQCKGEIQDESLNMLYASLDHASFDYDHLPALFFVAESVLYRLCCDASLKTYLYSVEIKLAKIGYLVFLRLFIFFLHGHLESFKQHLLRLQPYLYALSFSGASYHKYPNIFSNVQFILKASEIIGKRELRSESIFRPVEDKKRYENTDSDMGGYEINHLLWHCVAAWSCVQNNSPQLNNVLEHLVFHKTQLQKKCWLDSVLALLVLGEAAKLNMACLKALMDVVRDFVSSIMSVQNQEESCKVDDFSWAWNVVYIYTVILAEICLYAATSDLRKTALIGFCHCKSSQKNILYLDKSVPPELKETSILSLLEYFSSKMSENCDQVVWTGYYGLVYNLVKISWELQGDEEQDGLRNMIWQTLQKTKDYEEDVRIQNAINIAQGTSFCIRNSHVSISRFLHQGR

SEQ ID NO: 31583 - protein, 29 aa, Artificial Sequence
  Synthetic polypeptide
EVPFTSRHDSEASLAMWNCQHFQSQKNSS

SEQ ID NO: 31584 - protein, 33 aa, Artificial Sequence
  Synthetic polypeptide
PCGTANIFNHKRIHLEIQSNTKFQREGRIVGTS

SEQ ID NO: 31585 - protein, 623 aa, Artificial Sequence
  Synthetic polypeptide
GLPSHVELPTFSITKEFILRFNQTQNSKEKEELLELARKIILRCKRKLGLKTLGSGRHVHLPAAWTEVIYLAQCKGEIQDESLNMLYASLDHASFDYDHLPALFFVAESVLYRLCCDASLKTYLYSVEIKLAKIGYLVFLRLFIFFLHGHLESFKQHLLRLQPYLYALSFSGASYHKYPNIFSNVQFILKASEIIGKRELRSESIFRPVEDKKRYENTDSDMGGYEINHLLWHCVAAWSCVQNNSPQLNNVLEHLVFHKTQLQKKCWLDSVLALLVLGEAAKLNMACLKALMDVVRDFVSSIMSVQNQEESCKVDDFSWAWNVVYIYTVILAEICLYAATSDLRKTALIGFCHCKSSQKNILYLDKSVPPELKETSILSLLEYFSSKMSENCDQVVWTGYYGLVYNLVKISWELQGDEEQDGLRNMIWQTLQKTKDYEEDVRIQNAINIAQAELNDPTDPFTRYSTNISSNVGEEVFSKYIGWRIANTLSKLFFPPIEAHFLPLKKPSIKKDQTKYPNKKLESVKKQVLHFTVREHPSVSEIPMFPYPDFFTKADKELAKIIDHHWQEELKIREKEDAICKAQELKDKKLAEKNHFQEVMKKREEKLHKQTKPYELPYRKEVI

SEQ ID NO: 31586 - protein, 213 aa, Artificial Sequence
  Synthetic polypeptide
GLPSHVELPTFSITKEFILRFNQTQNSKEKEELLELARKIILRCKRKLGLKTLGSGRHVHLPAAWTEVIYLAQCKGEIQDESLNMLYASLDHASFDYDHLPALFFVAESVLYRLCCDASLKTYLYSVEIKLAKIGYLVFLRLFIFFLHGHLESFKQHLLRLQPYLYALSFSGASYHKYPNIFSNVQFILKASEIIGKRELRSESIFRPVEDKK

SEQ ID NO: 31587 - protein, 130 aa, Artificial Sequence
  Synthetic polypeptide
GLPSHVELPTFSITKEFILRFNQTQNSKEKEELLELARKIILRCKRKLGLKTLGSGRHVHLPAAWTEVIYLAQCKGEIQDESLNMLYASLDHASFDYDHLPALFFVAESVLYRLCCDASLKTYLYSVEIK

SEQ ID NO: 31588 - protein, 85 aa, Artificial Sequence
  Synthetic polypeptide
GLPSHVELPTFSITKEFILRFNQTQNSKEKEELLELARKIILRCKRKLGLKTLGSGRHVHLPAAWTEVIYLAQCKGEIQDGTYFK

SEQ ID NO: 31589 - protein, 64 aa, Artificial Sequence
  Synthetic polypeptide
SQDGRIGTAPVYSSQRERRRRRVISAFPSEGCYIHCVQMQTEGDPEALCSQSVKENSGQKNRKN

SEQ ID NO: 31590 - protein, 95 aa, Artificial Sequence
  Synthetic polypeptide
FLHFHLRGATSIVYRCKQKGTQKPYALKVLKKTVDKKIVRTEIGVLLRLSHPNIIKLKEIFETPTEISLVLELVTGGELFDRIVEKGYYSERDAA

SEQ ID NO: 31591 - protein, 426 aa, Artificial Sequence
  Synthetic polypeptide
FLHFHLRGATSIVYRCKQKGTQKPYALKVLKKTVDKKIVRTEIGVLLRLSHPNIIKLKEIFETPTEISLVLELVTGGELFDRIVEKGYYSERDAADAVKQILEAVAYLHENGIVHRDLKPENLLYATPAPDAPLKIADFGLSKIVEHQVLMKTVCGTPGYCAPEILRGCAYGPEVDMWSVGIITYILLCGFEPFYDERGDQFMFRRILNCEYYFISPWWDEVSLNAKDLVRKLIVLDPKKRLTTFQALQHPWVTGKAANFVHMDTAQKKLQEFNARRKLKAAVKAVVASSRLGSASSSHGSIQESHKASRDPSPIQDGNEDMKAIPEGEKIQGDGAQAAVKGAQAELMKVQALEKVKGADINAEEAPKMVPKAVEDGIKVADLELEEGLAEEKLKTVEEAAAPREGQGSSAVGFEVPQQDVILPEY

SEQ ID NO: 31592 - protein, 65 aa, Artificial Sequence
  Synthetic polypeptide
SQDGRIGTAPVYSSQRERRRRRVISAFPSEGCYIHCVQMQTEGDPEALCSQSVKENRLWKRDITV

SEQ ID NO: 31593 - protein, 41 aa, Artificial Sequence
  Synthetic polypeptide
FLHFHLRGATSIVYRCKQKGTQKPYALKVLKKTDCGKGILQ

SEQ ID NO: 31594 - protein, 62 aa, Artificial Sequence
  Synthetic polypeptide
FLHFHLRGATSIVYRCKQKGTQKPYALKVLKKTVDKKIVRTEIGVLLRLSHPNIDCGKGILQ

SEQ ID NO: 31595 - protein, 40 aa, Artificial Sequence
  Synthetic polypeptide
LVITYLNRISFEALRKIRHQFEKSPYQSNMNSSKIEGRAM

SEQ ID NO: 31596 - protein, 697 aa, Artificial Sequence
  Synthetic polypeptide
ILLKLKAGRCRPGICFRLFSRLRFQNMLEFQTPELLRMPLQELCLHTKLLAPVNCPIADFLMKAPEPPPALIVRNAVQMLKTIDAMDTWEDLTELGYHLADLPVEPHLGKMVLCAVVLKCLDPILTIACTLAYRDPFVLPTQASQKRAAMLCRKRFTAGAFSDHMALLRAFQAWQKARSDGWERAFCEKNFLSQATMEIIIGMRTQLLGQLRASGFVRARGGGDIRDVNTNSENWAVVKAALVAGMYPNLVHVDRENLVLTGPKEKKVRFHPASVLSQPQYKKIPPANGQAAAIKALPTDWLIYDEMTRAHRIANIRCCSAVTPVTILVFCGPARLASNALQEPSSFRVDGIPNDSSDSEMEDKTTANLAALKLDEWLHFTLEPEAASLLLQLRQKWHSLFLRRMRAPSKPWSQVDEATIRAIIAVLSTEEQSAGLQQPSGIGQRPRPMSSEELPLASSWRSNNSRKSSADTEFSDECTTAERVLMKSPSPALHPPQKYKDRGILHPKRGTEDRSDQSSLKSTDSSSYPSPCASPSPPSSGKGSKSPSPRPNMPVRYFIMKSSNLRNLEISQQKGIWSTTPSNERKLNRAFWESSIVYLVFSVQGSGHFQGFSRMSSEIGREKSQDWGSAGLGGVFKVEWIRKESLPFQFAHHLLNPWNDNKKVQISRDGQELEPLVGEQLLQLWERLPLGEKNTTD

SEQ ID NO: 31597 - protein, 54 aa, Artificial Sequence
  Synthetic polypeptide
LPRGRSGPVKAKADWRSWQQFFGMRQGDVDLEFVFVCSVDSDSRICWNFRLRNF

SEQ ID NO: 31598 - protein, 36 aa, Artificial Sequence
  Synthetic polypeptide
TQRTTKTDYQEVEVVQSKQKRTGGHGNSFLGCGRAM

SEQ ID NO: 31599 - protein, 711 aa, Artificial Sequence
  Synthetic polypeptide
KWSSQSKSGLEVMATVFWDAAGRCRPGICFRLFSRLRFQNMLEFQTPELLRMPLQELCLHTKLLAPVNCPIADFLMKAPEPPPALIVRNAVQMLKTIDAMDTWEDLTELGYHLADLPVEPHLGKMVLCAVVLKCLDPILTIACTLAYRDPFVLPTQASQKRAAMLCRKRFTAGAFSDHMALLRAFQAWQKARSDGWERAFCEKNFLSQATMEIIIGMRTQLLGQLRASGFVRARGGGDIRDVNTNSENWAVVKAALVAGMYPNLVHVDRENLVLTGPKEKKVRFHPASVLSQPQYKKIPPANGQAAAIKALPTDWLIYDEMTRAHRIANIRCCSAVTPVTILVFCGPARLASNALQEPSSFRVDGIPNDSSDSEMEDKTTANLAALKLDEWLHFTLEPEAASLLLQLRQKWHSLFLRRMRAPSKPWSQVDEATIRAIIAVLSTEEQSAGLQQPSGIGQRPRPMSSEELPLASSWRSNNSRKSSADTEFSDECTTAERVLMKSPSPALHPPQKYKDRGILHPKRGTEDRSDQSSLKSTDSSSYPSPCASPSPPSSGKGSKSPSPRPNMPVRYFIMKSSNLRNLEISQQKGIWSTTPSNERKLNRAFWESSIVYLVFSVQGSGHFQGFSRMSSEIGREKSQDWGSAGLGGVFKVEWIRKESLPFQFAHHLLNPWNDNKKVQISRDGQELEPLVGEQLLQLWERLPLGEKNTTD

SEQ ID NO: 31600 - protein, 10 aa, Artificial Sequence
  Synthetic polypeptide
AIQHSSIKVP

SEQ ID NO: 31601 - protein, 259 aa, Artificial Sequence
  Synthetic polypeptide
IHRIFEQYSTLQLRYHDQQDVTSNFLGAMWLISITFLSIGYGDMVPNTYCGKGVCLLTGIMGAGCTALVVAVVARKLELTKAEKHVHNFMMDTQLTKRVKNAAANVLRETWLIYKNTKLVKKIDHAKVRKHQRKFLQAIHQLRSVKMEQRKLNDQANTLVDLAKTQNIMYDMISDLNERSEDFEKRIVTLETKLETLIGSIHALPGLISQTIRQQQRDFIEAQMESYDKHVTYNAERSRSSSRRRRSSSTAPPTSSESS

SEQ ID NO: 31602 - protein, 240 aa, Artificial Sequence
  Synthetic polypeptide
GLARWLTPVISALWEAKSIQIWKTKKQQKREEIFKLKEKADNTPVLFHNKQEDNQKQKEEQRKKQKLAVEAWKKQKSIEMSMKCASQLKEEEEKEKKHQKERQRQFKLKLLLESYTQQKKEQEEFLRLEKEIREKAEKAEKRKNAADEISRFQERDLHKLELKILDRQAKEDEKSQKQRRLAKLKEKVENNVSRDPSRLYKPTKGWEERTKKIGPTGSGPLLHIPHRAIPTWRQGIQRRV

SEQ ID NO: 31603 - protein, 26 aa, Artificial Sequence
  Synthetic polypeptide
SQHFGRPSQFRFGKLKSSKKGRKFSS

SEQ ID NO: 31604 - protein, 23 aa, Artificial Sequence
  Synthetic polypeptide
PGTVAHTCNLSTLGGQVNSDLEN

SEQ ID NO: 31605 - protein, 208 aa, Artificial Sequence
  Synthetic polypeptide
GLARWLTPVISALWEAKSIQIWKTKKQQKREEIFKLKEKADNTPVLFHNKQEDNQKQKEEQRKKQKLAVEAWKKQKSIEMSMKCASQLKEEEEKEKKHQKERQRQFKLKLLLESYTQQKKEQEEFLRLEKEIREKAEKAEKRKNAADEISRFQERVENNVSRDPSRLYKPTKGWEERTKKIGPTGSGPLLHIPHRAIPTWRQGIQRRV

SEQ ID NO: 31606 - protein, 235 aa, Artificial Sequence
  Synthetic polypeptide
RAPTPDLISTVRSIQIWKTKKQQKREEIFKLKEKADNTPVLFHNKQEDNQKQKEEQRKKQKLAVEAWKKQKSIEMSMKCASQLKEEEEKEKKHQKERQRQFKLKLLLESYTQQKKEQEEFLRLEKEIREKAEKAEKRKNAADEISRFQERDLHKLELKILDRQAKEDEKSQKQRRLAKLKEKVENNVSRDPSRLYKPTKGWEERTKKIGPTGSGPLLHIPHRAIPTWRQGIQRRV

SEQ ID NO: 31607 - protein, 10 aa, Artificial Sequence
  Synthetic polypeptide
HCEVNSDLEN

SEQ ID NO: 31608 - protein, 203 aa, Artificial Sequence
  Synthetic polypeptide
RAPTPDLISTVRSIQIWKTKKQQKREEIFKLKEKADNTPVLFHNKQEDNQKQKEEQRKKQKLAVEAWKKQKSIEMSMKCASQLKEEEEKEKKHQKERQRQFKLKLLLESYTQQKKEQEEFLRLEKEIREKAEKAEKRKNAADEISRFQERVENNVSRDPSRLYKPTKGWEERTKKIGPTGSGPLLHIPHRAIPTWRQGIQRRV

SEQ ID NO: 31609 - protein, 29 aa, Artificial Sequence
  Synthetic polypeptide
QKRVKIHNSKSSGRLSIWYLREMKMFVIS

SEQ ID NO: 31610 - protein, 23 aa, Artificial Sequence
  Synthetic polypeptide
LHRIYDTTNQRNHGRDCECSKKE

SEQ ID NO: 31611 - protein, 202 aa, Artificial Sequence
  Synthetic polypeptide
RKPCLYVEHDFTGFMTQPIKEIMEEIVNVAKKSEDTQQQIIRETFHLVSKRDENVCNFLEGGLLIGGSDNKLIYRHYATLYFVFCVDSSESELGILDLIQVFVETLDKCFENVCELDLIFHVDKVHNILAEMVMGGMVLETNMNEIVTQIDAQNKLEKSEAGLAGAPARAVSAVKNMNLPEIPRNINIGDISIKVPNLPSFK

SEQ ID NO: 31612 - protein, 171 aa, Artificial Sequence
  Synthetic polypeptide
RKPCLYVEHDFTGFMTQPIKEIMEEIVNVAKKSEDTQQQIIRETFHLVSKRDENVCNFLEGGLLIGGSDNKLIYRHYATLYFVFCVDSSESELGILDLIQVFVETLDKCFENVCELDLIFHVDKVHNILAEMVMGGMVLETNMNEIVTQIDAQNKLEKSETFIFQSPRQDR

SEQ ID NO: 31613 - protein, 64 aa, Artificial Sequence
  Synthetic polypeptide
ASGISPACIHSVLLPCEESTFLPLSSPSSPAMTISFLRPSQPCRTGPVSVPAGTNICQVCFPLF

SEQ ID NO: 31614 - protein, 477 aa, Artificial Sequence
  Synthetic polypeptide
GLPSHAELALLASQLEPTFARYVFPCFDEPALKATFNITMIHHPSYVALSNMPKLGQSEKEDVNGSKWTVTTFSTTPHMPTYLVAFVICDYDHVNRTERGKEIRIWARKDAIANGSADFALNITGPIFSFLEDLFNISYSLPKTDIIALPSFDNHAMENWGLMIFDESGLLLEPKDQLTEKKTLISYVVSHEIGHQWFGNLVTMNWWNNIWLNEGFASYFEFEVINYFNPKLPRNEIFFSNILHNILREDHALVTRAVAMKVENFKTSEIQELFDIFTYSKGASMARMLSCFLNEHLFVSALKSYLKTFSYSNAEQDDLWRHFQMAIDDQSTVILPATIKNIMDSWTHQSGFPVITLNVSTGVMKQEPFYLENIKNRTLLTSNDTWIVPILWIKNGTTQPLVWLDQSSKVFPEMQVSDSDHDWVILNLNMTGYYRVNYDKLGWKKLNQQLEKDPKAIPVIHRLQLIDDAFSLSKGTY

SEQ ID NO: 31615 - protein, 31 aa, Artificial Sequence
  Synthetic polypeptide
RKYLSSPFFPFISCHDYKFPEAFPAMQNWPC

SEQ ID NO: 31616 - protein, 766 aa, Artificial Sequence
  Synthetic polypeptide
GLPSHAELALLASQLEPTFARYVFPCFDEPALKATFNITMIHHPSYVALSNMPKLGQSEKEDVNGSKWTVTTFSTTPHMPTYLVAFVICDYDHVNRTERGKEIRIWARKDAIANGSADFALNITGPIFSFLEDLFNISYSLPKTDIIALPSFDNHAMENWGLMIFDESGLLLEPKDQLTEKKTLISYVVSHEIGHQWFGNLVTMNWWNNIWLNEGFASYFEFEVINYFNPKLPRNEIFFSNILHNILREDHALVTRAVAMKVENFKTSEIQELFDIFTYSKGASMARMLSCFLNEHLFVSALKSYLKTFSYSNAEQDDLWRHFQMAIDDQSTVILPATIKNIMDSWTHQSGFPVITLNVSTGVMKQEPFYLENIKNRTLLTSNDTWIVPILWIKNGTTQPLVWLDQSSKVFPEMQVSDSDHDWVILNLNMTGYYRVNYDKLGWKKLNQQLEKDPKAIPVIHRLQLIDDAFSLSKNNYIEIETALELTKYLAEEDEIIVWHTVLVNLVTRDLVSEVNIYDIYSLLKRYLLKRLNLIWNIYSTIIRENVLALQDDYLALISLEKLFVTACWLGLEDCLQLSKELFAKWVDHPENEIPYPIKDVVLCYGIALGSDKEWDILLNTYTNTTNKEEKIQLAYAMSCSKDPWILNRYMEYAISTSPFTSNETNIIEVVASSEVGRYVAKDFLVNNWQAVSKRYGTQSLINLIYTIGRTVTTDLQIVELQQFFSNMLEEHQRIRVHANLQTIKNENLKNKKLSARIAAWLRRNT

SEQ ID NO: 31617 - protein, 122 aa, Artificial Sequence
  Synthetic polypeptide
PFYIIIRSQQIERQLKCLAFRNPGPQVADFNPETRQQKKKARMSKMNEYFSTKYKIMRKYDKSGRLICNDADLCDCLEKNCLGCFYPCPKCNSNKCGPECRCNRRWVYDAIVTESGEVISTL

SEQ ID NO: 31618 - protein, 4 aa, Artificial Sequence
  Synthetic polypeptide
EANK

SEQ ID NO: 31619 - protein, 48 aa, Artificial Sequence
  Synthetic polypeptide
TSQYLCYCPHFIPSRSHLTILHHHKKPTNRAAVKMLGISKPWTTGSRL

SEQ ID NO: 31620 - protein, 128 aa, Artificial Sequence
  Synthetic polypeptide
PFYIIIRSQQIERQLKCLAFRNPGPQVADFNPETRQQKKKARMSKMNEYFSTKYKIMRKYDKSGRLICNDADLCDCLEKNCLGCFYPCPKCNSNKCGPECRCNRRWVYDAIVTESGEVISTLPFNVPD

SEQ ID NO: 31621 - protein, 32 aa, Artificial Sequence
  Synthetic polypeptide
GKGSRCCWRVFNSQHVLIPLLNQYRIGDRIFA

SEQ ID NO: 31622 - protein, 36 aa, Artificial Sequence
  Synthetic polypeptide
GTEFLHEESSVTDKCNRYRKISTVAHSDSSKTSPEG

SEQ ID NO: 31623 - protein, 207 aa, Artificial Sequence
  Synthetic polypeptide
PTCVNTPFKSVSNRGPNFCMKKAVSLINAIDTGRFPRLLTRILQKLHLKAESSFSEEEEEKLQAAFSLEKQDLHLVLETISFILEQAVYHNVKPAALQQQLENIHLRQDKAEAFVNTWSSMGQETVEKFRQRILAPCKLETVGWQLNLQMAHSAQAKLKSPQAVLQLGVNNEDSKSLEKVLVEFSHKELFDFYNKLETIQAQLDSLT

SEQ ID NO: 31624 - protein, 144 aa, Artificial Sequence
  Synthetic polypeptide
PTCVNTPFKSVSNRGPNFCMKKAVSLINAIDTGRFPRLLTRILQKLHLKAESSFSEEEEEKLQAAFSLEKQDLHLVLETISFILEQAVYHNVKPAALQQQLENIHLRQDKAEAFVNTWSSMGQETVEKFRQRILAPSRDRWMAA

SEQ ID NO: 31625 - protein, 195 aa, Artificial Sequence
  Synthetic polypeptide
KNLAWLCMKKAVSLINAIDTGRFPRLLTRILQKLHLKAESSFSEEEEEKLQAAFSLEKQDLHLVLETISFILEQAVYHNVKPAALQQQLENIHLRQDKAEAFVNTWSSMGQETVEKFRQRILAPCKLETVGWQLNLQMAHSAQAKLKSPQAVLQLGVNNEDSKSLEKVLVEFSHKELFDFYNKLETIQAQLDSLT

SEQ ID NO: 31626 - protein, 4 aa, Artificial Sequence
  Synthetic polypeptide
PGFA

SEQ ID NO: 31627 - protein, 59 aa, Artificial Sequence
  Synthetic polypeptide
PTCVNTPFKSVSNRGPNFWLVEESSLALHEESSVTDKCNRYRKISTVAHSDSSKTSPEG

SEQ ID NO: 31628 - protein, 132 aa, Artificial Sequence
  Synthetic polypeptide
KNLAWLCMKKAVSLINAIDTGRFPRLLTRILQKLHLKAESSFSEEEEEKLQAAFSLEKQDLHLVLETISFILEQAVYHNVKPAALQQQLENIHLRQDKAEAFVNTWSSMGQETVEKFRQRILAPSRDRWMAA

SEQ ID NO: 31629 - protein, 65 aa, Artificial Sequence
  Synthetic polypeptide
LFYKGLLPLCSALLLPANLRRRCLASSSPSAMISLEKVLVEFSHKELFDFYNKLETIQAQLDSLT

SEQ ID NO: 31630 - protein, 33 aa, Artificial Sequence
  Synthetic polypeptide
TSLEKVLVEFSHKELFDFYNKLETIQAQLDSLT

SEQ ID NO: 31631 - protein, 23 aa, Artificial Sequence
  Synthetic polypeptide
TKLAWRKFLWNSVTRSCLISITS

SEQ ID NO: 31632 - protein, 2255 aa, Artificial Sequence
  Synthetic polypeptide
AEGSSLVSDDTLDLDFWVNAKYVGEVFNIVSQQSTARPGCIIALDPITKLHGRKTQLLHVFEEDFILNNLEKKSLGKDSILSNAGSSPNGFSEKFYLIVIECTQDNRSLLHMWNLHLKSIPVSLDEKVDTKLSEAVWQPEEHYSSSPEKILSPFSQKYQACRANLQSTSRLTLFSEMVYSQELHLPEGVEIISIKPSAGHLSSSSIYPACSAPYLLATSCSDEKVRFWRCRVTDGESATSKNGKIDLAYIWEEWPLLIEDGLQSNSSITVPGRPVEVSCAHTNRLAVAYKQPASNSRSSQDFVMHVSIFECESTGGSCWVLEQTIHLDELSTVLDSGISVDSNLVAYNKQDMYLSSKENITSNTKHLVHLDWMSREDGSHILTVGIGSKLFMYGPLAGKVQDQTGKETLAFPLWESTKVVPLSKFVLLRSVDLVSSVDGSPPFPVSLSWVRDGILVVGMDCEMHVYCQWQPSSKQEPVITDSYSGSTPSITSLIKQSNSSSGLHPPKKTLTRSMTSLAQKICGKKTAFDPSVDMEDSGLFEAAHVLSPTLPQYHPLQLLELMDLGKVRRAKAILSHLVKCIAGEVVALNEAESNHERRLRSLTISASGSTTRDPQAFNKAENTDYTEIDSVPPLPLYALLAADDDSCYSSLEKSSNESTLSKSNQLSKESYDELFQTQLLMTDTHMLETDEENTKPRVIDLSQYSPTYFGPEHAQVLSGHLLHSSLPGLSRMEQMSLMALADTIATTSTDIGESRDRSQGGETLDECGLKFLLAVRLHTFLTTSLPAYRAQLLHQGLSTSHFAWAFHSVAEEELLNMLPAMQKDDPTWSELRAMGVGWWVRNTRILRKCIEKVAKAAFYRKNDPLDAAIFYLAMKKKAVIWGLYRAEKNTRMTQFFGHNFEDERWRKAALKNAFSLLGKQRFEHSAAFFLLAGCLRDAIEVCLEKLNDIQLALVIARLYESEFDTSAAYKSILRKKVLGIDSPVSELCSLNINMHHDPFLRSMAYWILEDYSGALETLIKQPIRENDDQVLSASNPTVFNFYNYLRTHPLLLRRHFGSSDTFSTHMSLTGKSGLAGTINLSERRLFFTTASAHLKAGCPMLALEVLSKMPKVIKKTRPFYRASSFLDTSKDCSPSSPLKLDAREDKSSAVDWSQSLINGFGSSSEGSSEKQSNSTLSFDWSQPSVVFQDDSLELKWDSDNDEENEDVPISMKELKPLQRKTDKKLDDISSNYTESFSTLDENDLLNPSEDIIAVQLKFRACLKILTVELRTLSTGYEIDGGKLRYQLYHWLEKEVIALQRTCDFCSDAEELQSAFGRNEDEFGLNEDAEDLPHQTKVKQLRENFQEKRQWLLKYQSLLRMFLSYCILHGSHGGGLASVRMELILLLQESQQETSEPLFSSPLSEQTSVPLLFACTANAKTVVANPLLHLSNLTHDILHAIINFDSPPHPDIQSNKVYVMHTLAASLSACIYQCLCGSHNYSSFQTNQFTGMVYQTVLLPHRPSLKTGSLDEALTPNTSPAQWPGITCLIRLLNSSGEEAQSGLTVLLCEILTAVYLSLFIHGLATHSSNELFRIVAHPLNEKMWSAVFGGGAHVPSKEQTHSKTLPVSSLVEEGEKQNKRFRPSKMSCRESAPLTPSSAPVSQESLAVKEKFIPPELSIWDYFIAKPFLPSSQSRAEYDSEESLGSDDDDNDDDDDVLASDFHLQEHSNSNSYSWSLMRLAMVQLVLNNLKTFYPFAGHDLAELPVSSPLCHAVLKTLQCWEQVLLRRLEIHGGPPQNYIASHTAEESLSAGPAILRHKALLEPTNTPFKSKHHLALSVKRLWQYLVKQEEIQETFIKNIFTKKRCLNEIEADLGYPGGKARIIHKESDIITAFAVNKANRNCIAIASSHDVQELDVSGILATQVYTWVDDDIEVETKGSEDFLVIHARDDLTAVQGTTPYTHSNPGTPINMPWLGSTQTGRGASVMIKKAINNVRRMTSHPTLPYYLTGAQDGSVRMFEWGHSQQITCFRSGGNSRVTRMRFNYQGNKFGIVDADGYLSLYQTNWKCCPVTGSMPKPYLTWQCHNKTANDFVFVSSSSLIATAGLSTDNRNVCLWDTLVAPANSLVHAFTCHDSGATVLAYAPKHQLLISGGRKGFTYVFDLCQRQQRQLFQSHDSPVKAVAVDPTEEYFVTGSAEGNIKIWSLSTFGLLHTFVSEHARQSIFRNIGTGVMQIETGPANHIFSCGADGTMKMRILPDQFSPLNEVLKNDVKFML

SEQ ID NO: 31633 - protein, 139 aa, Artificial Sequence
  Synthetic polypeptide
KQPQALYPAEPQGQSFPRPWEPTPVSMCPGCKTCSQRRFWSLRFNDCLARFQTCMGLMAPLFWPVSSIWNRTFTQCLCSHCILEVTNLLLILQAHRQKGVPLSQMILWTWTFGLMLNMLVKSLTSSVNNQQPGQDALLH

SEQ ID NO: 31634 - protein, 2276 aa, Artificial Sequence
  Synthetic polypeptide
AEGSSLVSDDTLDLDFWVNAKYVGEVFNIVSQQSTARPGCIIALDPITKLHGRKTQLLHVFEEDFILNNLEKKSLGKDSILSNAGSSPNGFSEKFYLIVIECTQDNRSLLHMWNLHLKSIPVSLDEKVDTKLSEAVWQPEEHYSSSPEKILSPFSQKYQACRANLQSTSRLTLFSEMVYSQELHLPEGVEIISIKPSAGHLSSSSIYPACSAPYLLATSCSDEKVRFWRCRVTDGESATSKNGKIDLAYIWEEWPLLIEDGLQSNSSITVPGRPVEVSCAHTNRLAVAYKQPASNSRSSQDFVMHVSIFECESTGGSCWVLEQTIHLDELSTVLDSGISVDSNLVAYNKQDMYLSSKENITSNTKHLVHLDWMSREDGSHILTVGIGSKLFMYGPLAGKVQDQTGKETLAFPLWESTKVVPLSKFVLLRSVDLVSSVDGSPPFPVSLSWVRDGILVVGMDCEMHVYCQWQPSSKQEPVITDSYSGSTPSITSLIKQSNSSSGLHPPKKTLTRSMTSLAQKICGKKTAFDPSVDMEDSGLFEAAHVLSPTLPQYHPLQLLELMDLGKVRRAKAILSHLVKCIAGEVVALNEAESNHERRLRSLTISASGSTTRDPQAFNKAENTDYTEIDSVPPLPLYALLAADDDSCYSSLEKSSNESTLSKSNQLSKESYDELFQTQLLMTDTHMLETDEENTKPRVIDLSQYSPTYFGPEHAQVLSGHLLHSSLPGLSRMEQMSLMALADTIATTSTDIGESRDRSQGGETLDECGLKFLLAVRLHTFLTTSLPAYRAQLLHQGLSTSHFAWAFHSVAEEELLNMLPAMQKDDPTWSELRAMGVGWWVRNTRILRKCIEKVAKAAFYRKNDPLDAAIFYLAMKKKAVIWGLYRAEKNTRMTQFFGHNFEDERWRKAALKNAFSLLGKQRFEHSAAFFLLAGCLRDAIEVCLEKLNDIQLALVIARLYESEFDTSAAYKSILRKKVLGIDSPVSELCSLNINMHHDPFLRSMAYWILEDYSGALETLIKQPIRENDDQVLSASNPTVFNFYNYLRTHPLLLRRHFGSSDTFSTHMSLTGKSGLAGTINLSERRLFFTTASAHLKAGCPMLALEVLSKMPKVIKKTRPFYRASSFLDTSKDCSPSSPLKLDAREDKSSAVDWSQSLINGFGSSSEGSSEKQSNSTLSFDWSQPSVVFQDDSLELKWDSDNDEENEDVPISMKELKPLQRKTDKKLDDISSNYTESFSTLDENDLLNPSEDIIAVQLKFRACLKILTVELRTLSTGYEIDGGKLRYQLYHWLEKEVIALQRTCDFCSDAEELQSAFGRNEDEFGLNEDAEDLPHQTKVKQLRENFQEKRQWLLKYQSLLRMFLSYCILHGSHGGGLASVRMELILLLQESQQETSEPLFSSPLSEQTSVPLLFACTANAKTVVANPLLHLSNLTHDILHAIINFDSPPHPDIQSNKVYVMHTLAASLSACIYQCLCGSHNYSSFQTNQFTGMVYQTVLLPHRPSLKTGSLDEALTPNTSPAQWPGITCLIRLLNSSGEEAQSGLTVLLCEILTAVYLSLFIHGLATHSSNELFRIVAHPLNEKMWSAVFGGGAHVPSKEQTHSKTLPVSSLVEEGEKQNKRFRPSKMSCRESAPLTPSSAPVSQESLAVKEKFIPPELSIWDYFIAKPFLPSSQSRAEYDSEESLGSDDDDNDDDDDVLASDFHLQEHSNSNSYSWSLMRLAMVQLVLNNLKTFYPFAGHDLAELPVSSPLCHAVLKTLQCWEQVLLRRLEIHGGPPQNYIASHTAEESLSAGPAILRHKALLEPTNTPFKSKHHLALSVKRLWQYLVKQEEIQETFIKNIFTKKRCLNESLEDNSETIKNSMMEEPNINKIEADLGYPGGKARIIHKESDIITAFAVNKANRNCIAIASSHDVQELDVSGILATQVYTWVDDDIEVETKGSEDFLVIHARDDLTAVQGTTPYTHSNPGTPINMPWLGSTQTGRGASVMIKKAINNVRRMTSHPTLPYYLTGAQDGSVRMFEWGHSQQITCFRSGGNSRVTRMRFNYQGNKFGIVDADGYLSLYQTNWKCCPVTGSMPKPYLTWQCHNKTANDFVFVSSSSLIATAGLSTDNRNVCLWDTLVAPANSLVHAFTCHDSGATVLAYAPKHQLLISGGRKGFTYVFDLCQRQQRQLFQSHDSPVKAVAVDPTEEYFVTGSAEGNIKIWSLSTFGLLHTFVSEHARQSIFRNIGTGVMQIETGPANHIFSCGADGTMKMRILPDQFSPLNEVLKNDVKFML

SEQ ID NO: 31635 - protein, 33 aa, Artificial Sequence
  Synthetic polypeptide
GQWPQMSLIPKTWPFRHKRRSWVKWCPNPSPPP

SEQ ID NO: 31636 - protein, 7 aa, Artificial Sequence
  Synthetic polypeptide
ASGHRCL

SEQ ID NO: 31637 - protein, 189 aa, Artificial Sequence
  Synthetic polypeptide
PVATDVFNSKNLAVQAQKKILGKMVSKSIATTLIDDTSSEVLDELYRVTREYTQNKKEAEKIIKNLIKTVIKLAILYRNNQFNQDELALMEKFKKKVHQLAMTVVSFHQVDYTFDRNVLSRLLNECREMLHQIIQRHLTAKSHGRVNNVFDHFSDCEFLAALYNPFGNFKPHLQKLCDGINKMLDEENI

SEQ ID NO: 31638 - protein, 20 aa, Artificial Sequence
  Synthetic polypeptide
DVPFTCRHDCETSPATWNCG

SEQ ID NO: 31639 - protein, 296 aa, Artificial Sequence
  Synthetic polypeptide
ISLMRSDGFKKERFPAQALFPCLPPCEMCLSPAAMIVRPPQPRGTVVDQIDTLTSDLQLEDEMTDSSKTDTLNSSSSGTTASSLEKIKVQANAPLIKPPAHPSAILTVLRKPNPPPPPPRLTPVKCEDPKRVVPTANPVKTNGTLLRNGGLPGGPNKIPNGDICCIPNSNLDKAPVQLLMHRPEKDRCPQAGPRERVRFNEKVQYHGYCPDCDTRYNIKNREVHLHSEPVHPPGKIPHQGPPLPPTPHLPPFPLENGGMGISHSNSFPPIRPATVPPPTAPKPQKTILRKSTTTTV

SEQ ID NO: 31640 - protein, 15 aa, Artificial Sequence
  Synthetic polypeptide
DLPSHVELWLTRLTP

SEQ ID NO: 31641 - protein, 60 aa, Artificial Sequence
  Synthetic polypeptide
LKLPTLVVRQIFWVCFLIIKIKRCERCERSFTQATQLSRHQRMPNECKPITESPESIEVD

SEQ ID NO: 31642 - protein, 15 aa, Artificial Sequence
  Synthetic polypeptide
RGARGVRGASRRPPS

SEQ ID NO: 31643 - protein, 7 aa, Artificial Sequence
  Synthetic polypeptide
NKEVREV

SEQ ID NO: 31644 - protein, 72 aa, Artificial Sequence
  Synthetic polypeptide
GRTQWLTPVIPALWEAKAGRSQAQRLRMVWRRKRKPAGRQQPNPLPHLWRRTPQTRRKSLAYGQNPVLMVPL

SEQ ID NO: 31645 - protein, 16 aa, Artificial Sequence
  Synthetic polypeptide
SQHFGRPRQADHKLRG

SEQ ID NO: 31646 - protein, 426 aa, Artificial Sequence
  Synthetic polypeptide
PDTVAHACNPSTLGGQGRQITSSEAENGVEEKKKACRSPTAQSPTPSVEADSPDQKKIISLWSKSSFDGASLASDKNDCKTESKNDPKTERKKSSSSSQYKANMHFHKLFLSVPTEEPLKQSFTCALQKEILYQGKLFVSENWICFHSKVFGKDTKISIPAFSVTLIKKTKTALLVPNALIIATVTDRYIFVSLLSRDSTYKLLKSVCGHLENTSVGNSPNPSSAENSFRADRPSSLPLDFNDEFSDLDGVVQQRRQDMEGYSSSGSQTPESENSRDFHATESQTVLNVSKGEAKPTRADAHVNRVPEGKAKSLPVQGLSETVGILHKVKSQKCPMLHHILIFYAIVVCALIISTFYMRYRINTLEEQLGLLTSIVDTHNTEQAAPSGLRSQVQFNVEVLCQELTANIVKLEKIQNNLQKLLENGD

SEQ ID NO: 31647 - protein, 268 aa, Artificial Sequence
  Synthetic polypeptide
PDTVAHACNPSTLGGQGRQITSSEAENGVEEKKKACRSPTAQSPTPSVEADSPDQKKIISLWSKSSFDGASLASDKNDCKTESKNDPKTERKKSSSSSQYKANMHFHKLFLSVPTEEPLKQSFTCALQKEILYQGKLFVSENWICFHSKVFGKDTKISIPAFSVTLIKKTKTALLVPNALIIATVTDRYIFVSLLSRDSTYKLLKSVCGHLENTSVGNSPNPSSAENSFRADRPSSLPLDFNDEFSDLDGVVQQRRQDMEGYSSSGSQ

SEQ ID NO: 31648 - protein, 96 aa, Artificial Sequence
  Synthetic polypeptide
GRTQWLTPVIPALWEAKAGRSQAQRLRMVWRRKRKPAGRQQPNPLPHLWRRTPQTRRKSLAYAHIFSPNLCFIQDQDTRPICTFTSCFLVSQRRNH

SEQ ID NO: 31649 - protein, 404 aa, Artificial Sequence
  Synthetic polypeptide
PDTVAHACNPSTLGGQGRQITSSEAENGVEEKKKACRSPTAQSPTPSVEADSPDQKKIISLCPYLLSKSMLHSGPRYKANMHFHKLFLSVPTEEPLKQSFTCALQKEILYQGKLFVSENWICFHSKVFGKDTKISIPAFSVTLIKKTKTALLVPNALIIATVTDRYIFVSLLSRDSTYKLLKSVCGHLENTSVGNSPNPSSAENSFRADRPSSLPLDFNDEFSDLDGVVQQRRQDMEGYSSSGSQTPESENSRVDFHATESQTVLNVSKGEAKPTRADAHVNRVPEGKAKSLPVQGLSETVGILHKVKSQKCPMLHHILIFYAIVVCALIISTFYMRYRINTLEEQLGLLTSIVDTHNTEQAAPSGLRSQVQFNVEVLCQELTANIVKLEKIQNNLQKLLENGD

SEQ ID NO: 31650 - protein, 441 aa, Artificial Sequence
  Synthetic polypeptide
GRTQWLTPVIPALWEAKAGRSQAQRLRMVWRRKRKPAGRQQPNPLPHLWRRTPQTRRKSLAYAHIFSPNLCFIQDQESKSSFDGASLASDKNDCKTESKNDPKTERKKSSSSSQYKANMHFHKLFLSVPTEEPLKQSFTCALQKEILYQGKLFVSENWICFHSKVFGKDTKISIPAFSVTLIKKTKTALLVPNALIIATVTDRYIFVSLLSRDSTYKLLKSVCGHLENTSVGNSPNPSSAENSFRADRPSSLPLDFNDEFSDLDGVVQQRRQDMEGYSSSGSQTPESENSRDFHATESQTVLNVSKGEAKPTRADAHVNRVPEGKAKSLPVQGLSETVGILHKVKSQKCPMLHHILIFYAIVVCALIISTFYMRYRINTLEEQLGLLTSIVDTHNTEQAAPSGLRSQVQFNVEVLCQELTANIVKLEKIQNNLQKLLENGD

SEQ ID NO: 31651 - protein, 81 aa, Artificial Sequence
  Synthetic polypeptide
PDTVAHACNPSTLGGQGRQITSSEAENGVEEKKKACRSPTAQSPTPSVEADSPDQKKIISLCPYLLSKSMLHSGPRVKIQF

SEQ ID NO: 31652 - protein, 365 aa, Artificial Sequence
  Synthetic polypeptide
PDTVAHACNPSTLGGQGRQITSSEAENGVEEKKKACRSPTAQSPTPSVEADSPDQKKIISLCPYLLSKSMLHSGPRYKANMHFHKLFLSVPTEEPLKQSFTCALQKEILYQGKLFVSENWICFHSKVFGKDTKISIPAFSVTLIKKTKTALLVPNALIIATVTDRYIFVSLLSRDSTYKLLKSVCGHLENTSVGNSPNPSSAENSFRADRPSSLPLDFNDEFSDLDGVVQQRRQDMEGYSSSGSQTPESENSRVDFHATESQTVLNVSKGEAKPTRADAHVNRVPEGKAKSLPVQGLSETVGILHKVKSQKCPMLHHILIFYAIVVCALIISTFYMRYRINTLEEQLGLLTSIVDTHNTEQHHLA

SEQ ID NO: 31653 - protein, 74 aa, Artificial Sequence
  Synthetic polypeptide
GRTQWLTPVIPALWEAKAGRSQAQRLRMVWRRKRKPAGRQQPNPLPHLWRRTPQTRRKSLAYVQGQYALSQVVS

SEQ ID NO: 31654 - protein, 81 aa, Artificial Sequence
  Synthetic polypeptide
PDTVAHACNPSTLGGQGRQITSSEAENGVEEKKKACRSPTAQSPTPSVEADSPDQKKIISLCTRPICTFTSCFLVSQRRNH

SEQ ID NO: 31655 - protein, 82 aa, Artificial Sequence
  Synthetic polypeptide
GRTQWLTPVIPALWEAKAGRSQAQRLRMVWRRKRKPAGRQQPNPLPHLWRRTPQTRRKSLAYAHIFSPNLCFIQDQESKSSF

SEQ ID NO: 31656 - protein, 39 aa, Artificial Sequence
  Synthetic polypeptide
GWAQWLTSVILALWEAEGEVCWNLEETMPLLPLKMQTSA

SEQ ID NO: 31657 - protein, 21 aa, Artificial Sequence
  Synthetic polypeptide
HFGRLREKSVGTWRKQCHYCL

SEQ ID NO: 31658 - protein, 30 aa, Artificial Sequence
  Synthetic polypeptide
ECRLSDPSPDLLNQNVHLPRRPGYYDLLPC

SEQ ID NO: 31659 - protein, 485 aa, Artificial Sequence
  Synthetic polypeptide
IRMCIYHDDQVITTYCPANNEPIARVRQASVADYEETVKKAREAWKIWADIPAPKRGEIVRQIGDALREKIQVLGSLVSLEMGKILVEGVGEVQEYVDICDYAVGLSRMIGGPILPSERSGHALIEQWNPVGLVGIITAFNFPVAVYGWNNAIAMICGNVCLWKGAPTTSLISVAVTKIIAKVLEDNKLPGAICSLTCGGADIGTAMAKDERVNLLSFTGSTQVGKQVGLMVQERFGRSLLELGGNNAIIAFEDADLSLVVPSALFAAVGTAGQRCTTARRLFIHESIHDEVVNRLKKAYAQIRVGNPWDPNVLYGPLHTKQAVSMFLGAVEEAKKEGGTVVYGGKVMDRPGNYVEPTIVTGLGHDASIAHTETFAPILYVFKFKNEEEVFAWNNEVKQGLSSSIFTKDLGRIFRWLGPKGSDCGIVNVNIPTSGAEIGGAFGGEKHTGGGRESGSDAWKQYMRRSTCTINYSKDLPLAQGIKFQ

SEQ ID NO: 31660 - protein, 27 aa, Artificial Sequence
  Synthetic polypeptide
PRLTESECAFTTTTRLLRPIALLTTSQ

SEQ ID NO: 31661 - protein, 421 aa, Artificial Sequence
  Synthetic polypeptide
IRMCIYHDDQVITTYCPANNEPIARVRQASVADYEETVKKAREAWKIWADIPAPKRGEIVRQIGDALREKIQVLGSLVSLEMGKILVEGVGEVQEYVDICDYAVGLSRMIGGPILPSERSGHALIEQWNPVGLVGIITAFNFPVAVYGWNNAIAMICGNVCLWKGAPTTSLISVAVTKIIAKVLEDNKLPGAICSLTCGGADIGTAMAKDERVNLLSFTGSTQVGKQVGLMVQERFGRSLLELGGNNAIIAFEDADLSLVVPSALFAAVGTAGQRCTTARRLVMDRPGNYVEPTIVTGLGHDASIAHTETFAPILYVFKFKNEEEVFAWNNEVKQGLSSSIFTKDLGRIFRWLGPKGSDCGIVNVNIPTSGAEIGGAFGGEKHTGGGRESGSDAWKQYMRRSTCTINYSKDLPLAQGIKFQ

SEQ ID NO: 31662 - protein, 187 aa, Artificial Sequence
  Synthetic polypeptide
IRMCIYHDDQVITTYCPANNEPIARVRQASVADYEETVKKAREAWKIWADVSLEMGKILVEGVGEVQEYVDICDYAVGLSRMIGGPILPSERSGHALIEQWNPVGLVGIITAFNFPVAVYGWNNAIAMICGNVCLWKGAPTTSLISVAVTKIIAKVLEDNKLPGAICSLTCGGADIGTAMAKDERVN

SEQ ID NO: 31663 - protein, 367 aa, Artificial Sequence
  Synthetic polypeptide
KWPYSKVLGGDSAMRAFQNTATACAPVSHYRAVESVDSSEESFSDSDDDSCLWKRKRQKCFNPPPKPEPFQFGQSSQKPPVAGGKKINNIWGAVLQEQNQDAVATELGILGMEGTIDRSRQSETYNYLLAKKLRKESQEHTKDLDKELDEYMHGGKKMGSKEEENGQGHLKRKRPVKDRLGNRPEMNYKGRYEITAEDSQEKVADEISFRLQEPKKDLIARVVRIIGNKKAIELLMETAEVEQNGGLFIMNGSRRRTPGGVFLNLLKNTPSISEEQIKDIFYIENQKEYENKKAARKRRTQVLGKKMKQAIKSLNFQEDDDTSRETFASDTNEALASLDESQEGHAEAKLEAEEAIEVDHSHDLDIF

SEQ ID NO: 31664 - protein, 38 aa, Artificial Sequence
  Synthetic polypeptide
TRQVINDPVSFCSVYSPGKTAGECTLSAESKNGLIQKC

SEQ ID NO: 31665 - protein, 58 aa, Artificial Sequence
  Synthetic polypeptide
MTLSPFVQCTLLAKLLASVPFLQKVKMALFKSARWRQCYEGLPEHGNCMCTSITLSSC

SEQ ID NO: 31666 - protein, 7 aa, Artificial Sequence
  Synthetic polypeptide
SATKPAV

SEQ ID NO: 31667 - protein, 22 aa, Artificial Sequence
  Synthetic polypeptide
LGRRYEFEVPPNQQYSLLEWNV

SEQ ID NO: 31668 - protein, 772 aa, Artificial Sequence
  Synthetic polypeptide
QADWEEDMNLKCHQTSSIAYLSGMCSEKRKCIIAEDNGLNLAFTIAHEMGHNMGINHDNDHPSCADGLHIMSGEWIKGQNLGDVSWSRCSKEDLERFLRSKASNCLLQTNPQSVNSVMVPSKLPGMTYTADEQCQILFGPLASFCQEMQHVICTGLWCKVEGEKECRTKLDPPMDGTDCDLGKWCKAGECTSRTSAPEHLAGEWSLWSPCSRTCSAGISSRERKCPGLDSEARDCNGPRKQYRICENPPCPAGLPGFRDWQCQAYSVRTSSPKHILQWQAVLDEEKPCALFCSPVGKEQPILLSEKVMDGTSCGYQGLDICANGRCQKVGCDGLLGSLAREDHCGVCNGNGKSCKIIKGDFNHTRGAGYVEVLVIPAGARRIKVVEEKPAHSYLALRDAGKQSINSDWKIEHSGAFNLAGTTVHYVRRGLWEKISAKGPTTAPLHLLVLLFQDQNYGLHYEYTIPSDPLPENQSSKAPEPLFMWTHTSWEDCDATCGGGERKTTVSCTKIMSKNISIVDNEKCKYLTKPEPQIRKCNEQPCQTRWMMTEWTPCSRTCGKGMQSRQVACTQQLSNGTLIRARERDCIGPKPASAQRCEGQDCMTVWEAGVWSECSVKCGKGIRHRTVRCTNPRKKCVLSTRPREAEDCEDYSKCYVWRMGDWSKCSITCGKGMQSRVIQCMHKITGRHGNECFSSEKPAAYRPCHLQPCNEKINVNTITSPRLAALTFKCLGDQWPVYCRVIREKNLCQDMRWYQRCCETCRDFYAQKLQQKS

SEQ ID NO: 31669 - protein, 57 aa, Artificial Sequence
  Synthetic polypeptide
SQLLGRLRQENRLNSGGGGCSEPRLCHCTPAWVTRFYSSLKHCTGPDNKFLKMMPEH

SEQ ID NO: 31670 - protein, 6 aa, Artificial Sequence
  Synthetic polypeptide
QGFTAL

SEQ ID NO: 31671 - protein, 111 aa, Artificial Sequence
  Synthetic polypeptide
AEIVSLHSSLGDKVLQLFKTLHRTRQQVFKNDARALEAARIKINEEFKNNKSETSSKKIEELMKIGSDVELLLRTSVIQGIHTDHNTLKLVPRKDLLVENVPYCDAPTQKQ

SEQ ID NO: 31672 - protein, 60 aa, Artificial Sequence
  Synthetic polypeptide
AEIVSLHSSLGDKVLQLFKTLHRTRQQVFKNDARALEELVPRKDLLVENVPYCDAPTQKQ

SEQ ID NO: 31673 - protein, 70 aa, Artificial Sequence
  Synthetic polypeptide
AEIVSLHSSLGDKVLQLFKTLHRTRQQVFKNDARALEAARIKINEEFKNNKSETSSKKIEENWSLGKTFL

SEQ ID NO: 31674 - protein, 31 aa, Artificial Sequence
  Synthetic polypeptide
ASTGCLHEPPFVIPRQESSLSPATGFPKAPG

SEQ ID NO: 31675 - protein, 26 aa, Artificial Sequence
  Synthetic polypeptide
VVSSPRKLFLTLYPELPQDACTSHRS

SEQ ID NO: 31676 - protein, 184 aa, Artificial Sequence
  Synthetic polypeptide
HYTLSFHRMLARATVRDPKTGVLTVASYRVSKSSWLEEDDDPVVARVNRRMQHITGLTVKTAELLQVANYGVGGQYEPHFDFSRNDERDTFKHLGTGNRVATFLNYMSDVEAGGATVFPDLGAAIWPKKGTAVFWYNLLRSGEGDYRTRHAACPVLVGCKWVSNKWFHERGQEFLRPCGSTEVD

SEQ ID NO: 31677 - protein, 182 aa, Artificial Sequence
  Synthetic polypeptide
HYTLSFHRMLARATVRDPKTGVLTVASYRVSKSSWLEEDDDPVVARVNRRMQHITGLTVKTAELLQVANYGVGGQYEPHFDFSRRPFDSGLKTEGNRLATFLNYMSDVEAGGATVFPDLGAAIWPKKGTAVFWYNLLRSGEGDYRTRHAACPVLVGCKWVSNKWFHERGQEFLRPCGSTEVD

SEQ ID NO: 31678 - protein, 59 aa, Artificial Sequence
  Synthetic polypeptide
LAAPAQTNRAVCGDSHPELLLQELLQEHTRKAKRIHRPFEGTGSLLQAPRDAKKLHFPL

SEQ ID NO: 31679 - protein, 98 aa, Artificial Sequence
  Synthetic polypeptide
QIGGRTSLQLLLRQTEQCVETHILNFCSKNYCRNIPGKPRESTDPLKELDHYCRLLEMQKNYTSLCDHETLGVCIADGLVWCPELCAGRILHLYWAHD

SEQ ID NO: 31680 - protein, 225 aa, Artificial Sequence
  Synthetic polypeptide
RNWITTAGSSRCKKTTLPSVTMKLWVSALLMAWFGVLSCVQAEFFTSIGHMTDLIYAEKELVQSLKEYILVEEAKLSKIKSWANKMEALTSKSAADAEGYLAHPVNAYKLVKRLNTDWPALEDLVLQDSAAGFIANLSVQRQFFPTDEDEIGAAKALMRLQDTYRLDPGTISRGELPGTKYQAMLSVDDCFGMGRSAYNEGDYYHTVLWMEQVLKQLDAGEEATT

SEQ ID NO: 31681 - protein, 101 aa, Artificial Sequence
  Synthetic polypeptide
AEIAPLRSSLGQQDHLCSLHSRAFGLLDARVTWALRRAPEPVPGKDRLLLAAFPAEASPVDTASVSVYGRAPRYMHKGVKKCVCTPVSKNSTAWLLLGGIS

SEQ ID NO: 31682 - protein, 98 aa, Artificial Sequence
  Synthetic polypeptide
SQYFGRPRQEDYVSSGVRDQHGQHGEILSLQKISWAWWYVPVVPASPEAEVGGSLEPVRSRLHRDCTKPRLHHCAPALVNRITSAACTAGPLDSWMLE

SEQ ID NO: 31683 - protein, 38 aa, Artificial Sequence
  Synthetic polypeptide
GRDYTEIALSRDCTTALQPWSTGSPLQPAQPGLWTPGC

SEQ ID NO: 31684 - protein, 45 aa, Artificial Sequence
  Synthetic polypeptide
LLGRLRQQNRLSLGGRGCSELRSRHCTPAWVTGSINQRSQKAAIM

SEQ ID NO: 31685 - protein, 3 aa, Artificial Sequence
  Synthetic polypeptide
QDQ

SEQ ID NO: 31686 - protein, 710 aa, Artificial Sequence
  Synthetic polypeptide
AEITPLHSSLGDRINKSEKPESCDNVKVVVRCRPLNEREKSMCYKQAVSVDEMRGTITVHKTDSSNEPPKTFTFDTVFGPESKQLDVYNLTARPIIDSVLEGYNGTIFAYGQTGTGKTFTMEGVRAIPELRGIIPNSFAHIFGHIAKAEGDTRFLVRVSYLEIYNEEVRDLLGKDQTQRLEVKERPDVGVYIKDLSAYVVNNADDMDRIMTLGHKNRSVGATNMNEHSSRSHAIFTITIECSEKGIDGNMHVRMGKLHLVDLAGSERQAKTGATGQRLKEATKINLSLSTLGNVISALVDGKSTHVPYRNSKLTRLLQDSLGGNSKTMMCANIGPADYNYDETISTLRYANRAKNIKNKARINEDPKDALLRQFQKEIEELKKKLEEGEEISGSDISGSEEDDDEEGEVGEDGEKRKKRRGKKKVSPDKMIEMQAKIDEERKALETKLDMEEEERNKARAELEKREKDLLKAQQEHQSLLEKLSALEKKVIVGGVDLLAKAEEQEKLLEESNMELEERRKRAEQLRRELEEKEQERLDIEEKYTSLQEEAQGKTKKLKKVWTMLMAAKSEMADLQQEHQREIEGLLENIRQLSRELRLQMLIIDNFIPRDYQEMIENYVHWNEDIGEWQLKCVAYTGNNMRKQTPVPDKKEKDPFEVDLSHVYLAYTEESLRQSLMKLERPRTSKGKARPKTGRRKRSAKPETVIDSLLQ

SEQ ID NO: 31687 - protein, 713 aa, Artificial Sequence
  Synthetic polypeptide
AEITPLHSSLGDRINKSEKPESCDNVKVVVRCRPLNEREKSMCYKQAVSVDEMRGTITVHKTDSSNEPPKTFTFDTVFGPESKQLDVYNLTARPIIDSVLEGYNGTIFAYGQTGTGKTFTMEGVRAIPELRGIIPNSFAHIFGHIAKAEGDTRFLVRVSYLEIYNEEVRDLLGKDQTQRLEVKERPDVGVYIKDLSAYVVNNADDMDRIMTLGHKNRSVGATNMNEHSSRSHAIFTITIECSEKGIDGNMHVRMGKLHLVDLAGSERQAKTGATGQRLKEATKINLSLSTLGNVISALVDGKSTHVPYRNSKLTRLLQDSLGGNSKTMMCANIGPADYNYDETISTLRYANRAKNIKNKARINEDPKDALLRQFQKEIEELKKKLEEGEEISGSDISGSEEDDDEEGEVGEDGEKRKKRRDQAGKKKVSPDKMIEMQAKIDEERKALETKLDMEEEERNKARAELEKREKDLLKAQQEHQSLLEKLSALEKKVIVGGVDLLAKAEEQEKLLEESNMELEERRKRAEQLRRELEEKEQERLDIEEKYTSLQEEAQGKTKKLKKVWTMLMAAKSEMADLQQEHQREIEGLLENIRQLSRELRLQMLIIDNFIPRDYQEMIENYVHWNEDIGEWQLKCVAYTGNNMRKQTPVPDKKEKDPFEVDLSHVYLAYTEESLRQSLMKLERPRTSKGKARPKTGRRKRSAKPETVIDSLLQ

SEQ ID NO: 31688 - protein, 737 aa, Artificial Sequence
  Synthetic polypeptide
AEITPLHSSLGDRINKSEKPESCDNVKVVVRCRPLNEREKSMCYKQAVSVDEMRGTITVHKTDSSNEPPKTFTFDTVFGPESKQLDVYNLTARPIIDSVLEGYNGTIFAYGQTGTGKTFTMEGVRAIPELRGIIPNSFAHIFGHIAKAEGDTRFLVRVSYLEIYNEEVRDLLGKDQTQRLEVKERPDVGVYIKDLSAYVVNNADDMDRIMTLGHKNRSVGATNMNEHSSRSHAIFTITIECSEKGIDGNMHVRMGKLHLVDLAGSERQAKTGATGQRLKEATKINLSLSTLGNVISALVDGKSTHVPYRNSKLTRLLQDSLGGNSKTMMCANIGPADYNYDETISTLRYANRAKNIKNKARINEDPKDALLRQFQKEIEELKKKLEEGEEISGSDISGSEEDDDEEGEVGEDGEKRKKRRGSSSSSSSDSTCSVIEKPLDKFLPNQAGKKKVSPDKMIEMQAKIDEERKALETKLDMEEEERNKARAELEKREKDLLKAQQEHQSLLEKLSALEKKVIVGGVDLLAKAEEQEKLLEESNMELEERRKRAEQLRRELEEKEQERLDIEEKYTSLQEEAQGKTKKLKKVWTMLMAAKSEMADLQQEHQREIEGLLENIRQLSRELRLQMLIIDNFIPRDYQEMIENYVHWNEDIGEWQLKCVAYTGNNMRKQTPVPDKKEKDPFEVDLSHVYLAYTEESLRQSLMKLERPRTSKGKARPKTGRRKRSAKPETVIDSLLQ

SEQ ID NO: 31689 - protein, 181 aa, Artificial Sequence
  Synthetic polypeptide
AEITPLHSSLGDRINKSEKPESCDNVKVVVRCRPLNEREKSMCYKQAVSVDEMRGTITVHKTDSSNEPPKTFTFDTVFGPESKQLDVYNLTARPIIDSVLEGYNGTIFAYGQTGTGKTFTMEGVRAIPELRGIIPNSFAHIFGHIAKAEGDTRFLVRVSYLEIYNEEVRDLLGKDQTQRLE

SEQ ID NO: 31690 - protein, 64 aa, Artificial Sequence
  Synthetic polypeptide
SKLLGRLRQEDSLNLGGGGCSEPRLRHCTPAWATRSLSSPILALENKKDIILLKLQMGTSLNLC

SEQ ID NO: 31691 - protein, 36 aa, Artificial Sequence
  Synthetic polypeptide
TWEVEVAVSRDCAIALQPGRQGVSAVQFWHWRTKKI

SEQ ID NO: 31692 - protein, 826 aa, Artificial Sequence
  Synthetic polypeptide
AEIAPLHSSLGDKESQQSNFGTGEQKRYNPSKTSNGHQSKSMLKDDLKLSSSEDSDGEQDCDKTMPRSTPGSNSEPSHHNSEGADNSRDDSSSHSGSESSSGSDSESESSSSDSEANEPSQSASPEPEPPPTNKWQLDNWLNKVNPHKVSPASSVDSNIPSSQGYKKEGREQGTGNSYTDTSGPKETSSATPGRDSKTIQKGSESGRGRQKSPAQSDSTTQRRTVGKKQPKKAEKAAAEEPRGGLKIESETPVDLASSMPSSRHKAATKGSRKPNIKKESKSSPRPTAEKKKYKSTSKSSQKSREIIETDTSSSDSDESESLPPSSQTPKYPESNRTPVKPSSVEEEDSFFRQRMFSPMEEKELLSPLSEPDDRYPLIVKIDLNLLTRIPGKPYKETEPPKGEKKNVPEKHTREAQKQASEKVSNKGKRKHKNEDDNRASESKKPKTEDKNSAGHKPSSNRESSKQSAAKEKDLLPSPAGPVPSKDPKTEHGSRKRTISQSSSLKSSSNSNKETSGSSKNSSSTSKQKKTEGKTSSSSKEVKEKAPSSSSNCPPSAPTLDSSKPRRTKLVFDDRNYSADHYLQEAKKLKHNADALSDRFEKAVYYLDAVVSFIECGNALEKNAQESKSPFPMYSETVDLIKYTMKLKNYLAPDATAADKRLTVLCLRCESLLYLRLFKLKKENALKYSKTLTEHLKNSYNNSQAPSPGLGSKAVGMPSPVSPKLSPGNSGNYSSGASSASASGSSVTIPQKIHQMAASYVQVTSNFLYATEIWDQAEQLSKEQKEFFAELDKVMGPLIFNASIMTDLVRYTRQGLHWLRQDAKLIS

SEQ ID NO: 31693 - protein, 563 aa, Artificial Sequence
  Synthetic polypeptide
AEIAPLHSSLGDKESQQSNFGTGEQKRYNPSKTSNGHQSKSMLKDDLKLSSSEDSDGEQDCDKTMPRSTPGSNSEPSHHNSEGADNSRDDSSSHSGSESSSGSDSESESSSSDSEANEPSQSASPEPEPPPTNKWQLDNWLNKVNPHKVSPASSVDSNIPSSQGYKKEGREQGTGNSYTDTSGPKETSSATPGRDSKTIQKGSESGRGRQKSPAQSDSTTQRRTVGKKQPKKAEKAAAEEPRGGLKIESETPVDLASSMPSSRHKAATKGSRKPNIKKESKSSPRPTAEKKKYKSTSKSSQKSREIIETDTSSSDSDESESLPPSSQTPKYPESNRTPVKPSSVEEEDSFFRQRMFSPMEEKELLSPLSEPDDRYPLIVKIDLNLLTRIPGKPYKETEPPKGEKKNVPEKHTREAQKQASEKVSNKGKRKHKNEDDNRASESKKPKTEDKNSAGHKPSSNRESSKQSAAKEKDLLPSPAGPVPSKDPKTEHGSRKRTISQSSSLKSSSNSNKETSGSSKNSSSTSKQKKTEGKTSSSSKEVKVKCWGPGAFENHSTCHVTFPG

SEQ ID NO: 31694 - protein, 138 aa, Artificial Sequence
  Synthetic polypeptide
AEIAPLHSSLGDKESQQSNFGTGEQKRYNPSKTSNGHQSKSMLKDDLKLSSSEDSDGEQDCDKTMPRSTPGSNSEPSHHNSEGADNSRDDSSSHSGSESSSGSDSESESSSSDSEANEPSQSASPEPEPPPTNKWQLD

SEQ ID NO: 31695 - protein, 13 aa, Artificial Sequence
  Synthetic polypeptide
DLIGQHMKQISNM

SEQ ID NO: 31696 - protein, 176 aa, Artificial Sequence
  Synthetic polypeptide
EAKEGGLLQPRSLRPDWATYEANKQHVRCQKCLEFGHWTYECTGKRKYLHRPSRTAELKKALKEKENRLLLQQSIGETNVERKAKKKRSKSVTSSSSSSSDSSASDSSSESEETSTSSSSEDSDTDESSSSSSSSASSTTSSSSSDSDSDSSSSSSSSTSTDSSSDDEPPKKKKKK

SEQ ID NO: 31697 - protein, 170 aa, Artificial Sequence
  Synthetic polypeptide
EAKEGGLLQPRSLRPDWATYEANKQHVRCQKCLEFGHWTYECTGKRKYLHRPSRTAELKKALKEKENRLLLQQSIGETNVERKAKKKSSSSSSSDSSASDSSSESEETSTSSSSEDSDTDESSSSSSSSASSTTSSSSSDSDSDSSSSSSSSTSTDSSSDDEPPKKKKKK

SEQ ID NO: 31698 - protein, 162 aa, Artificial Sequence
  Synthetic polypeptide
EAKEGGLLQPRSLRPDWATYEANKQHVRCQKCLEFGHWTYECTGKRKYLHRPSRTAELKKALKEKENRLLLQQRSKSVTSSSSSSSDSSASDSSSESEETSTSSSSEDSDTDESSSSSSSSASSTTSSSSSDSDSDSSSSSSSSTSTDSSSDDEPPKKKKKK

SEQ ID NO: 31699 - protein, 98 aa, Artificial Sequence
  Synthetic polypeptide
EAKEGGLLQPRSLRPDWATYEANKQHVRCQKCLEFGHWTYECTGKRKYLHRPSRTAELKKALKEKENRLLLQQRSFFPPRVYQHWRNQCRKKGQEKKV

SEQ ID NO: 31700 - protein, 50 aa, Artificial Sequence
  Synthetic polypeptide
GWTRWLTPVIPALWEAEAGRSRGQEIETILANTIWEWMMKEMMTQFLYQM

SEQ ID NO: 31701 - protein, 28 aa, Artificial Sequence
  Synthetic polypeptide
SQHFGRLKRVDHEVRRSRPSWLTRFGNG

SEQ ID NO: 31702 - protein, 132 aa, Artificial Sequence
  Synthetic polypeptide
HDLGMDDEGDDDPVPLPNVNAAILKKVIQWCTHHKDDPPPPEDDENKEKRTDDIPVWDQEFLKVDQGTLFELILAANYLDIKGLLDVTCKTVANMIKGKTPEEIRKTFNIKNDFTEEEEAQVRKENQWCEEK

SEQ ID NO: 31703 - protein, 129 aa, Artificial Sequence
  Synthetic polypeptide
HDLGMDDEGDDDPVPLPNVNAAILKKVIQWCTHHKDDPPPPEDDENKEKRTDDIPVWDQEFLKVDQGTLFELILAANYLDIKGLLDVTCKTVANMIKGKTPEEIRKTFNIKNDFTEEEEAQVGSTQFCL

SEQ ID NO: 31704 - protein, 132 aa, Artificial Sequence
  Synthetic polypeptide
HDLGMDDEGDDDPVPLPNVNAAILKKVIQWCTHHKDDPPPPEDDENKEKRTDDIPVWDQEFLKYTLRKTTVSLQAANYLDIKGLLDVTCKTVANMIKGKTPEEIRKTFNIKNDFTEEEEAQVRKENQWCEEK

SEQ ID NO: 31705 - protein, 127 aa, Artificial Sequence
  Synthetic polypeptide
HDLGMDDEGDDDPVPLPNVNAAILKKVIQWCTHHKDDPPPPEDDENKEKRTDDIPVWDQEFLKVDQGTLFELILAANYLDIKGLLDVTCKTVANMIKGKTPEEIRKTFNIKNDFTEEEEAQQGRIKT

SEQ ID NO: 31706 - protein, 111 aa, Artificial Sequence
  Synthetic polypeptide
HDLGMDDEGDDDPVPLPNVNAAILKKVIQWCTHHKDDPPPPEDDENKEKRTDDIPVWDQEFLKVDQGTLFELILAANYLDIKGLLDVTCKTVANMIKGKTPEEIRKTFNIK

SEQ ID NO: 31707 - protein, 71 aa, Artificial Sequence
  Synthetic polypeptide
HDLGMDDEGDDDPVPLPNVNAAILKKVIQWCTHHKDDPPPPEDDENKEKRTDDIPVWDQEFLKVDQGTLFE

SEQ ID NO: 31708 - protein, 26 aa, Artificial Sequence
  Synthetic polypeptide
HDLGMDDEGDDDPVPLPNVNAAILKK

SEQ ID NO: 31709 - protein, 5 aa, Artificial Sequence
  Synthetic polypeptide
GSSLP

SEQ ID NO: 31710 - protein, 235 aa, Artificial Sequence
  Synthetic polypeptide
ASINQGERPSEETNCADTLILDFCLWNSEEVRYRERITILRGNHESRQITQVYGFYDECLRKYGNANVWKYFTDLFDYLPLTALVDGQIFCLHGGLSPSIDTLDHIRALDRLQEVPHEGPMCDLLWSDPDDRGGWGISPRGAGYTFGQDISETFNHANGLTLVSRAHQLVMEGYNWCHDRNVVTIFSAPNYCYRCGNQAAIMELDDTLKYSFLQFDPAPRRGEPHVTRRTPDYFL

SEQ ID NO: 31711 - protein, 40 aa, Artificial Sequence
  Synthetic polypeptide
SWTSASGTVRKFVTVNASPFFEGIMRADRSHKFMVSMMNV

SEQ ID NO: 31712 - protein, 117 aa, Artificial Sequence
  Synthetic polypeptide
ASINQGERPSEETNCADTLILDFCLWNSEEVRYRERITILRGNHESRQITQVYGFYDECLRKYGNANVWKYFTDLFDYLPLTALVDGQIFCLHGGLSPSIDTLDHIRALDRLQEVPH

SEQ ID NO: 31713 - protein, 84 aa, Artificial Sequence
  Synthetic polypeptide
ASINQGERPSEETNCADTLILDFCLWNSEEVRYRERITILRGNHESRQITQVYGFYDECLRKYGNANVWKYFTDLFDYLPLTAL

SEQ ID NO: 31714 - protein, 40 aa, Artificial Sequence
  Synthetic polypeptide
HLDLGLLPLEQFVTVNASPFFEGIMRADRSHKFMVSMMNV

SEQ ID NO: 31715 - protein, 31 aa, Artificial Sequence
  Synthetic polypeptide
ASINQGERPSEETNCADTLILDFCLWNSSLP

SEQ ID NO: 31716 - protein, 213 aa, Artificial Sequence
  Synthetic polypeptide
SWTSASGTVRYRERITILRGNHESRQITQVYGFYDECLRKYGNANVWKYFTDLFDYLPLTALVDGQIFCLHGGLSPSIDTLDHIRALDRLQEVPHEGPMCDLLWSDPDDRGGWGISPRGAGYTFGQDISETFNHANGLTLVSRAHQLVMEGYNWCHDRNVVTIFSAPNYCYRCGNQAAIMELDDTLKYSFLQFDPAPRRGEPHVTRRTPDYFL

SEQ ID NO: 31717 - protein, 95 aa, Artificial Sequence
  Synthetic polypeptide
SWTSASGTVRYRERITILRGNHESRQITQVYGFYDECLRKYGNANVWKYFTDLFDYLPLTALVDGQIFCLHGGLSPSIDTLDHIRALDRLQEVPH

SEQ ID NO: 31718 - protein, 62 aa, Artificial Sequence
  Synthetic polypeptide
SWTSASGTVRYRERITILRGNHESRQITQVYGFYDECLRKYGNANVWKYFTDLFDYLPLTAL

SEQ ID NO: 31719 - protein, 38 aa, Artificial Sequence
  Synthetic polypeptide
AGQGGSHACNPSTLEGHGRRITRSGDQDQSWLTRLKKS

SEQ ID NO: 31720 - protein, 2 aa, Artificial Sequence
  Synthetic polypeptide
HG

SEQ ID NO: 31721 - protein, 297 aa, Artificial Sequence
  Synthetic polypeptide
HFGRPRQADHEVRRPRPILANTAKEILTKESNVQEVRCPVTVCGDVHGQFHDLMELFRIGGKSPDTNYLFMGDYVDRGYYSVETVTLLVALKVRYRERITILRGNHESRQITQVYGFYDECLRKYGNANVWKYFTDLFDYLPLTALVDGQIFCLHGGLSPSIDTLDHIRALDRLQEVPHEGPMCDLLWSDPDDRGGWGISPRGAGYTFGQDISETFNHANGLTLVSRAHQLVMEGYNWCHDRNVVTIFSAPNYCYRCGNQAAIMELDDTLKYSFLQFDPAPRRGEPHVTRRTPDYFL

SEQ ID NO: 31722 - protein, 146 aa, Artificial Sequence
  Synthetic polypeptide
HFGRPRQADHEVRRPRPILANTAKEILTKESNVQEVRCPVTVCGDVHGQFHDLMELFRIGGKSPDTNYLFMGDYVDRGYYSVETVTLLVALKVRYRERITILRGNHESRQITQVYGFYDECLRKYGNANVWKYFTDLFDYLPLTAL

SEQ ID NO: 31723 - protein, 109 aa, Artificial Sequence
  Synthetic polypeptide
HFGRPRQADHEVRRPRPILANTAKEILTKESNVQEVRCPVTVCGDVHGQFHDLMELFRIGGKSPDTNYLFMGDYVDRGYYSVETVTLLVALKVISILCWGMLKWVRQSS

SEQ ID NO: 31724 - protein, 58 aa, Artificial Sequence
  Synthetic polypeptide
MDFNCGSSTYEILNKLLDLSGPQSPHLYNEDNNNTYFVGLLLRWKEEKAGALSGLFTN

SEQ ID NO: 31725 - protein, 411 aa, Artificial Sequence
  Synthetic polypeptide
DCCCDGRKKKLERCLACLQIDPADRISSSDLLHHEYFTRDGFIEKFMPELKAKLLQEAKVNSLIKPKESSKENELRKDERKTVYTNTLLSSSVLGKEIEKEKKPKEIKVRVIKVKGGRGDISEPKKKEYEGGLGQQDANENVHPMSPDTKLVTIEPPNPINPSTNCNGLKENPHCGGSVTMPPINLTNSNLMAANLSSNLFHPSVRLTERAKKRRTSSQSIGQVMPNSRQEDPGPIQSQMEKGIFNERTGHSDQMANENKRKLNFSRSDRKEFHFPELPVTIQSKDTKGMEVKQIKMLKRESKKTESSKIPTLLNVDQNQEKQEAKEILTKESNVQEVRCPVTVCGDVHGQFHDLMELFRIGGKSPDTNYLFMGDYVDRGYYSVETVTLLVALKVISILCWGMLKWVRQSS

SEQ ID NO: 31726 - protein, 54 aa, Artificial Sequence
  Synthetic polypeptide
YLLCRIVVAMEGRKSWSVVWLVYKLILLTGYHLVIFCIMSILLEMDLLKNSCQN

SEQ ID NO: 31727 - protein, 46 aa, Artificial Sequence
  Synthetic polypeptide
DCCCDGRKKKLERCLACLQIDPADRISSSDLLHHEYFTRDGFIEKK

SEQ ID NO: 31728 - protein, 51 aa, Artificial Sequence
  Synthetic polypeptide
YLLCRIVVAMEGRKSWSVVWLVYKLILLTGYHLVIFCIMSILLEMDLLKRN

SEQ ID NO: 31729 - protein, 343 aa, Artificial Sequence
  Synthetic polypeptide
DCCCDGRKKKLERCLACLQIDPADRISSSDLLHHEYFTRDGFIEKFMPELKAKLLQEAKVNSLIKPKESSKENELRKDERKTVYTNTLLSSSVLGKEIEKEKKPKEIKVRVIKVKGGRGDISEPKKKEYEGGLGQQDANENVHPMSPDTKLVTIEPPNPINPSTNCNGLKENPHCGGSVTMPPINLTNSNLMAANLSSNLFHPSVRLTERAKKRRTSSQSIGQVMPNSRQEDPGPIQSQMEKGIFNERTGHSDQMANENKRKLNFSRSDRKEFHFPELPVTIQSKDTKGMEVKQIKMLKRESKKTESSKIPTLLNVDQNQEKQEGGDGHCEGKNLKRNRFFFW

SEQ ID NO: 31730 - protein, 341 aa, Artificial Sequence
  Synthetic polypeptide
DCCCDGRKKKLERCLACLQIDPADRISSSDLLHHEYFTRDGFIEKFMPELKAKLLQEAKVNSLIKPKESSKENELRKDERKTVYTNTLLSSSVLGKEIEKEKKPKEIKVRVIKVKGGRGDISEPKKKEYEGGLGQQDANENVHPMSPDTKLVTIEPPNPINPSTNCNGLKENPHCGGSVTMPPINLTNSNLMAANLSSNLFHPSVRLTERAKKRRTSSQSIGQVMPNSRQEDPGPIQSQMEKGIFNERTGHSDQMANENKRKLNFSRSDRKEFHFPELPVTIQSKDTKGMEVKQIKMLKRESKKTESSKIPTLLNVDQNQEKQENTGNAQTERKKNLPDVE

SEQ ID NO: 31731 - protein, 206 aa, Artificial Sequence
  Synthetic polypeptide
DCCCDGRKKKLERCLACLQIDPADRISSSDLLHHEYFTRDGFIEKFMPELKAKLLQEAKVNSLIKPKESSKENELRKDERKTVYTNTLLSSSVLGKEIEKEKKPKEIKVRVIKVKGGRGDISEPKKKEYEGGLGQQDANENVHPMSPDTKLVTIEPPNPINPSTNCNGLKENPHCGGSVTMPPINLTNSNLMAANLSSNLFHPSVR

SEQ ID NO: 31732 - protein, 38 aa, Artificial Sequence
  Synthetic polypeptide
SVTVSHNPQLGPSGCRKTSSGLPLILHYDLWISGLWAV

SEQ ID NO: 31733 - protein, 16 aa, Artificial Sequence
  Synthetic polypeptide
FYIMTCGYLGFGLYDH

SEQ ID NO: 31734 - protein, 36 aa, Artificial Sequence
  Synthetic polypeptide
SVTVSHNPQLGPSGCRKTSSGLPLILHYDHSSRYKT

SEQ ID NO: 31735 - protein, 476 aa, Artificial Sequence
  Synthetic polypeptide
FYIMIIHRDIKPENILVSQSGITKLCDFGFARTLAAPGDIYTDYVATRWYRAPELVLKDTSYGKPVDIWALGCMIIEMATGNPYLPSSSDLDLLHKIVLKVGNLSPHLQNIFSKSPIFAGVVLPQVQHPKNARKKYPKLNGLLADIVHACLQIDPADRISSSDLLHHEYFTRDGFIEKFMPELKAKLLQEAKVNSLIKPKESSKENELRKDERKTVYTNTLLSSSVLGKEIEKEKKPKEIKVRVIKVKGGRGDISEPKKKEYEGGLGQQDANENVHPMSPDTKLVTIEPPNPINPSTNCNGLKENPHCGGSVTMPPINLTNSNLMAANLSSNLFHPSVRLTERAKKRRTSSQSIGQVMPNSRQEDPGPIQSQMEKGIFNERTGHSDQMANENKRKLNFSRSDRKEFHFPELPVTIQSKDTKGMEVKQIKMLKRESKKTESSKIPTLLNVDQNQEKQEGGDGHCEGKNLKRNRFFFW

SEQ ID NO: 31736 - protein, 474 aa, Artificial Sequence
  Synthetic polypeptide
FYIMIIHRDIKPENILVSQSGITKLCDFGFARTLAAPGDIYTDYVATRWYRAPELVLKDTSYGKPVDIWALGCMIIEMATGNPYLPSSSDLDLLHKIVLKVGNLSPHLQNIFSKSPIFAGVVLPQVQHPKNARKKYPKLNGLLADIVHACLQIDPADRISSSDLLHHEYFTRDGFIEKFMPELKAKLLQEAKVNSLIKPKESSKENELRKDERKTVYTNTLLSSSVLGKEIEKEKKPKEIKVRVIKVKGGRGDISEPKKKEYEGGLGQQDANENVHPMSPDTKLVTIEPPNPINPSTNCNGLKENPHCGGSVTMPPINLTNSNLMAANLSSNLFHPSVRLTERAKKRRTSSQSIGQVMPNSRQEDPGPIQSQMEKGIFNERTGHSDQMANENKRKLNFSRSDRKEFHFPELPVTIQSKDTKGMEVKQIKMLKRESKKTESSKIPTLLNVDQNQEKQENTGNAQTERKKNLPDVE

SEQ ID NO: 31737 - protein, 339 aa, Artificial Sequence
  Synthetic polypeptide
FYIMIIHRDIKPENILVSQSGITKLCDFGFARTLAAPGDIYTDYVATRWYRAPELVLKDTSYGKPVDIWALGCMIIEMATGNPYLPSSSDLDLLHKIVLKVGNLSPHLQNIFSKSPIFAGVVLPQVQHPKNARKKYPKLNGLLADIVHACLQIDPADRISSSDLLHHEYFTRDGFIEKFMPELKAKLLQEAKVNSLIKPKESSKENELRKDERKTVYTNTLLSSSVLGKEIEKEKKPKEIKVRVIKVKGGRGDISEPKKKEYEGGLGQQDANENVHPMSPDTKLVTIEPPNPINPSTNCNGLKENPHCGGSVTMPPINLTNSNLMAANLSSNLFHPSVR

SEQ ID NO: 31738 - protein, 11 aa, Artificial Sequence
  Synthetic polypeptide
SQHFGEAKHQS

SEQ ID NO: 31739 - protein, 20 aa, Artificial Sequence
  Synthetic polypeptide
PGAVAHAYNPSTLGRLSIKA

SEQ ID NO: 31740 - protein, 12 aa, Artificial Sequence
  Synthetic polypeptide
ASVFSSVTIKTF

SEQ ID NO: 31741 - protein, 16 aa, Artificial Sequence
  Synthetic polypeptide
LGKILIFEPQFSLLLQ

SEQ ID NO: 31742 - protein, 50 aa, Artificial Sequence
  Synthetic polypeptide
MERSLSLSLSFLFCYNKDLLDKVMEMADGIEVEDLPQFTTRSELMKKHQS

SEQ ID NO: 31743 - protein, 182 aa, Artificial Sequence
  Synthetic polypeptide
SSLQLVSHCLRAPSPARAPPLCVPSSGHLFSRPMEEKRRKYSISSDNSDTTDSHATSTSASRCSKLPSSTKSGWPRQNEKKPSEVFRTDLITAMKIPDSYQLSPDDYYILADPWRQEWEKGVQVPAGAEAIPEPVVRILPPLEGPPAQASPSSTMLGEGSQPDWPGGSRYDLDEIDAYWLEL

SEQ ID NO: 31744 - protein, 89 aa, Artificial Sequence
  Synthetic polypeptide
HPSSWSLTAFEPHHLLGLPLCVSPVLDTYSADLWKRRGENTPSAVTTLTPLTVMRHLHPHQDAPNCPAAPSRAGPDRTKRSPPRFSGQT

SEQ ID NO: 31745 - protein, 44 aa, Artificial Sequence
  Synthetic polypeptide
IPPAGLSLPSSPITCSGSPSVCPQFWTLIQQTYGREEAKILHQQ

SEQ ID NO: 31746 - protein, 867 aa, Artificial Sequence
  Synthetic polypeptide
SSLQLVSHCLRAPSPARAPPLCVPSSGHLFSRPMEEKRRKYSISSDNSDTTDSHATSTSASRCSKLPSSTKSGWPRQNEKKPSEVFRTDLITAMKIPDSYQLSPDDYYILADPWRQEWEKGVQVPAGAEAIPEPVVRILPPLEGPPAQASPSSTMLGEGSQPDWPGGSRYDLDEIDAYWLELINSELKEMERPELDELTLERVLEELETLCHQNMARAIETQEGLGIEYDEDVVCDVCRSPEGEDGNEMVFCDKCNVCVHQACYGILKVPTGSWLCRTCALGVQPKCLLCPKRGGALKPTRSGTKWVHVSCALWIPEVSIGCPEKMEPITKISHIPASRWALSCSLCKECTGTCIQCSMPSCVTAFHVTCAFDHGLEMRTILADNDEVKFKSFCQEHSDGGPRNEPTSEPTEPSQAGEDLEKVTLRKQRLQQLEEDFYELVEPAEVAERLDLAEALVDFIYQYWKLKRKANANQPLLTPKTDEVDNLAQQEQDVLYRRLKLFTHLRQDLERVRNLCYMVTRRERTKHAICKLQEQIFHLQMKLIEQDLCRERSGRRAKGKKSDSKRKGCEGSKGSTEKKEKVKAGPDSVLGQLAGLSTSFPIDGTFFNSWLAQSVQITAENMAMSEWPLNNGHREDPAPGLLSEELLQDEETLLSFMRDPSLRPGDPARKARGRTRLPAKKKPPPPPPQDGPGSRTTPDKAPKKTWGQDAGSGKGGQGPPTRKPPRRTSSHLPSSPAAGDCPILATPESPPPLAPETPDEAASVAADSDVQVPGPAASPKPLGRLRPPRESKVTRRLPGARPDAGMGPPSAVAERPKVSLHFDTETDGYFSDGEMSDSDVEAEDGGVQRGPREAGAEEVVRMGVLAS

SEQ ID NO: 31747 - protein, 824 aa, Artificial Sequence
  Synthetic polypeptide
SSLQLVSHCLRAPSPARAPPLCVPSSGHLFSRPMEEKRRKYSISSDNSDTTDSHATSTSASRCSKLPSSTKSGWPRQNEKKPSEVFRTDLITAMKIPDSYQLSPDDYYILADPWRQEWEKGVQVPAGAEAIPEPVVRILPPLEGPPAQASPSSTMLGEGSQPDWPGGSRYDLDEIDAYWLELINSELKEMERPELDELTLERVLEELETLCHQNMARAIETQEGLGIEYDEDVVCDVCRSPEGEDGNEMVFCDKCNVCVHQACYGILKVPTGSWLCRTCALGVQPKCLLCPKRGGALKPTRSGTKWVHVSCALWIPEVSIGCPEKMEPITKISHIPASRWALSCSLCKECTGTCIQCSMPSCVTAFHVTCAFDHGLEMRTILADNDEVKFKSFCQEHSDGGPRNEPTSEPTEPSQAGEDLEKVTLRKQRLQQLEEDFYELVEPAEVAERLDLAEALVDFIYQYWKLKRKANANQPLLTPKTDEVDNLAQQEQDVLYRRLKLFTHLRQDLERVRNLCYMVTRRERTKHAICKLQEQIFHLQMKLIEQDLCRAGLSTSFPIDGTFFNSWLAQSVQITAENMAMSEWPLNNGHREDPAPGLLSEELLQDEETLLSFMRDPSLRPGDPARKARGRTRLPAKKKPPPPPPQDGPGSRTTPDKAPKKTWGQDAGSGKGGQGPPTRKPPRRTSSHLPSSPAAGDCPILATPESPPPLAPETPDEAASVAADSDVQVPGPAASPKPLGRLRPPRESKVTRRLPGARPDAGMGPPSAVAERPKVSLHFDTETDGYFSDGEMSDSDVEAEDGGVQRGPREAGAEEVVRMGVLAS

SEQ ID NO: 31748 - protein, 542 aa, Artificial Sequence
  Synthetic polypeptide
SSLQLVSHCLRAPSPARAPPLCVPSSGHLFSRPMEEKRRKYSISSDNSDTTDSHATSTSASRCSKLPSSTKSGWPRQNEKKPSEVFRTDLITAMKIPDSYQLSPDDYYILADPWRQEWEKGVQVPAGAEAIPEPVVRILPPLEGPPAQASPSSTMLGEGSQPDWPGGSRYDLDEIDAYWLELINSELKEMERPELDELTLERVLEELETLCHQNMARAIETQEGLGIEYDEDVVCDVCRSPEGEDGNEMVFCDKCNVCVHQACYGILKVPTGSWLCRTCALGVQPKCLLCPKRGGALKPTRSGTKWVHVSCALWIPEVSIGCPEKMEPITKISHIPASRWALSCSLCKECTGTCIQCSMPSCVTAFHVTCAFDHGLEMRTILADNDEVKFKSFCQEHSDGGPRNEPTSEPTEPSQAGEDLEKVTLRKQRLQQLEEDFYELVEPAEVAERLDLAEALVDFIYQYWKLKRKANANQPLLTPKTDEVDNLAQQEQDVLYRRLKLFTHLRQDLERSGLGGEQRARRVTRRGRAARAPRAALRRKRK

SEQ ID NO: 31749 - protein, 823 aa, Artificial Sequence
  Synthetic polypeptide
SSLQLVSHCLRAPSPARAPPLCVPSSGHLFSRPMEEKRRKYSISSDNSDTTDSHATSTSASRCSKLPSSTKSGWPRQNEKKPSEVFRTDLITAMKIPDSYQLSPDDYYILADPWRQEWEKGVQVPAGAEAIPEPVVRILPPLEGPPAQASPSSTMLGEGSQPDWPGGSRYDLDEIDAYWLELINSELKEMERPELDELTLERVLEELETLCHQNMARAIETQEGLGIEYDEDVVCDVCRSPEGEDGNEMVFCDKCNVCVHQACYGILKVPTGSWLCRTCALGVQPKCLLCPKRGGALKPTRSGTKWVHVSCALWIPEVSIGCPEKMEPITKISHIPASRWALSCSLCKECTGTCIQCSMPSCVTAFHVTCAFDHGLEMRTILADNDEVKFKSFCQEHSDGGPRNEPTSEPTEPSQAGEDLEKVTLRKQRLQQLEEDFYELVEPAEVAERLDLAEALVDFIYQYWKLKRKANANQPLLTPKTDEVDNLAQQEQDVLYRRLKLFTHLRQDLERVRNLCYMVTRRERTKHAICKLQEQIFHLQMKLIEQDLCRGLSTSFPIDGTFFNSWLAQSVQITAENMAMSEWPLNNGHREDPAPGLLSEELLQDEETLLSFMRDPSLRPGDPARKARGRTRLPAKKKPPPPPPQDGPGSRTTPDKAPKKTWGQDAGSGKGGQGPPTRKPPRRTSSHLPSSPAAGDCPILATPESPPPLAPETPDEAASVAADSDVQVPGPAASPKPLGRLRPPRESKVTRRLPGARPDAGMGPPSAVAERPKVSLHFDTETDGYFSDGEMSDSDVEAEDGGVQRGPREAGAEEVVRMGVLAS

SEQ ID NO: 31750 - protein, 288 aa, Artificial Sequence
  Synthetic polypeptide
SSLQLVSHCLRAPSPARAPPLCVPSSGHLFSRPMEEKRRKYSISSDNSDTTDSHATSTSASRCSKLPSSTKSGWPRQNEKKPSEVFRTDLITAMKIPDSYQLSPDDYYILADPWRQEWEKGVQVPAGAEAIPEPVVRILPPLEGPPAQASPSSTMLGEGSQPDWPGGSRYDLDEIDAYWLELINSELKEMERPELDELTLERVLEELETLCHQNMARAIETQEGLGIEYDEDVVCDVCRSPEGEDGNEMVFCDKCNVCVHQACYGILKVPTGSWLCRTCALGVQPKCL

SEQ ID NO: 31751 - protein, 23 aa, Artificial Sequence
  Synthetic polypeptide
DKMWRWKTVRLMILTLYRPGLMY

SEQ ID NO: 31752 - protein, 107 aa, Artificial Sequence
  Synthetic polypeptide
AWANVLMLWVGKNCTQNFLSQVLGVQNYASIPQPMTDLPELDTPESARIIAFISWLREQRPFFPILYVIRDESPMKANFLQNMIEDRTESALSYYEFLLHIQQQVNK

SEQ ID NO: 31753 - protein, 387 aa, Artificial Sequence
  Synthetic polypeptide
GQAWWLVPVISAVREAKNFDQNKLEEEMRKRKERVEKWREEQRKKAMENIGELKKEIEEMKQGKKWSLEDDDDDEDDPAEAEKEGNEMEGEELDPLDAYMEEVKEEVKKFNMRSVKGGGGNEKKSGPTVTKVVTVVTTKKAVVDSDKKKGELMENDQDAMEYSSEEEEVDLQTALTGYQTKQRKLLEPVDHGKIEYEPFRKNFYVEVPELAKMSQEEVNVFRLEMEGITVKGKGCPKPIKSWVQCGISMKILNSLKKHGYEKPTPIQTQAIPAIMSGRDLIGIAKTGSGKTIAFLLPMFRHIMDQRSLEEGEGPIAVIMTPTRELALQITKECKKFSKTLGLRVVCVYGGTGISEQIAELKRGAEIIVCTPGRMIDMLAANSGDAVR

SEQ ID NO: 31754 - protein, 18 aa, Artificial Sequence
  Synthetic polypeptide
SQQFGRPRTLTRISWKKK

SEQ ID NO: 31755 - protein, 18 aa, Artificial Sequence
  Synthetic polypeptide
PGMVARACNLSSSGGQEL

SEQ ID NO: 31756 - protein, 900 aa, Artificial Sequence
  Synthetic polypeptide
GQAWWLVPVISAVREAKNFDQNKLEEEMRKRKERVEKWREEQRKKAMENIGELKKEIEEMKQGKKWSLEDDDDDEDDPAEAEKEGNEMEGEELDPLDAYMEEVKEEVKKFNMRSVKGGGGNEKKSGPTVTKVVTVVTTKKAVVDSDKKKGELMENDQDAMEYSSEEEEVDLQTALTGYQTKQRKLLEPVDHGKIEYEPFRKNFYVEVPELAKMSQEEVNVFRLEMEGITVKGKGCPKPIKSWVQCGISMKILNSLKKHGYEKPTPIQTQAIPAIMSGRDLIGIAKTGSGKTIAFLLPMFRHIMDQRSLEEGEGPIAVIMTPTRELALQITKECKKFSKTLGLRVVCVYGGTGISEQIAELKRGAEIIVCTPGRMIDMLAANSGRVTNLRRVTYVVLDEADRMFDMGFEPQVMRIVDNVRPDRQTVMFSATFPRAMEALARRILSKPIEVQVGGRSVVCSDVEQQVIVIEEEKKFLKLLELLGHYQESGSVIIFVDKQEHADGLLKDLMRASYPCMSLHGGIDQYDRDSIINDFKNGTCKLLVATSVAARGLDVKHLILVVNYSCPNHYEDYVHRAGRTGRAGNKGYAYTFITEDQARYAGDIIKALELSGTAVPPDLEKLWSDFKDQQKAEGKIIKKSSGFSGKGFKFDETEQALANERKKLQKAALGLQDSDDEDAAVDIDEQIESMFNSKKRVKDMAAPGTSSVPAPTAGNAEKLEIAKRLALRINAQKNLGIESQVDVMQQATNAILRGGTILAPTVSAKTIAEQLAEKINAKLNYVPLEKQEEERQDGGQNESFKRYEEELEINDFPQTARWKVTSKEALQRISEYSEAAITIRGTYFPPGKEPKEGERKIYLAIESANELAVQKAKAEITRLIKEELIRLQNSYQPTNKGRYKVL

SEQ ID NO: 31757 - protein, 899 aa, Artificial Sequence
  Synthetic polypeptide
GQAWWLVPVISAVREAKNFDQNKLEEEMRKRKERVEKWREEQRKKAMENIGELKKEIEEMKQGKKWSLEDDDDDEDDPAEAEKEGNEMEGEELDPLDAYMEEVKEEVKKFNMRSVKGGGGNEKKSGPTVTKVVTVVTTKKAVVDSDKKKGELMENDQDAMEYSSEEEEVDLQTALTGYQTKQRKLLEPVDHGKIEYEPFRKNFYVEVPELAKMSQEEVNVFRLEMEGITVKGKGCPKPIKSWVQCGISMKILNSLKKHGYEKPTPIQTQAIPAIMSGRDLIGIAKTGSGKTIAFLLPMFRHIMDQRSLEEGEGPIAVIMTPTRELALQITKECKKFSKTLGLRVVCVYGGTGISEQIAELKRGAEIIVCTPGRMIDMLAANSGRVTNLRRVTYVVLDEADRMFDMGFEPQVMRIVDNVRPDRQTVMFSATFPRAMEALARRILSKPIEVQVGGRSVVCSDVEQQVIVIEEEKKFLKLLELLGHYQESGSVIIFVDKQEHADGLLKDLMRASYPCMSLHGGIDQYDRDSIINDFKNGTCKLLVATSVAARGLDVKHLILVVNYSCPNHYEDYVHRAGRTGRAGNKGYAYTFITEDQARYAGDIIKALELSGTAVPPDLEKLWSDFKDQQKAEGKIIKKSSGFSGKGFKFDETEQALANERKKLQKAALGLQDSDDEDAAVDIDEQIESMFNSKKRVKDMAAPGTSSVPAPTAGNAEKLEIAKRLALRINAQKNLGIESQDVMQQATNAILRGGTILAPTVSAKTIAEQLAEKINAKLNYVPLEKQEEERQDGGQNESFKRYEEELEINDFPQTARWKVTSKEALQRISEYSEAAITIRGTYFPPGKEPKEGERKIYLAIESANELAVQKAKAEITRLIKEELIRLQNSYQPTNKGRYKVL

SEQ ID NO: 31758 - protein, 40 aa, Artificial Sequence
  Synthetic polypeptide
GQELKTSLANMARLPVSTENTEISLAWWRLPVISATRLLS

SEQ ID NO: 31759 - protein, 6 aa, Artificial Sequence
  Synthetic polypeptide
YQLLDC

SEQ ID NO: 31760 - protein, 44 aa, Artificial Sequence
  Synthetic polypeptide
PGLVAPACNISYSIAELKRGAEIIVCTPGRMIDMLAANSGDAVR

SEQ ID NO: 31761 - protein, 557 aa, Artificial Sequence
  Synthetic polypeptide
PGLVAPACNISYSIAELKRGAEIIVCTPGRMIDMLAANSGRVTNLRRVTYVVLDEADRMFDMGFEPQVMRIVDNVRPDRQTVMFSATFPRAMEALARRILSKPIEVQVGGRSVVCSDVEQQVIVIEEEKKFLKLLELLGHYQESGSVIIFVDKQEHADGLLKDLMRASYPCMSLHGGIDQYDRDSIINDFKNGTCKLLVATSVAARGLDVKHLILVVNYSCPNHYEDYVHRAGRTGRAGNKGYAYTFITEDQARYAGDIIKALELSGTAVPPDLEKLWSDFKDQQKAEGKIIKKSSGFSGKGFKFDETEQALANERKKLQKAALGLQDSDDEDAAVDIDEQIESMFNSKKRVKDMAAPGTSSVPAPTAGNAEKLEIAKRLALRINAQKNLGIESQVDVMQQATNAILRGGTILAPTVSAKTIAEQLAEKINAKLNYVPLEKQEEERQDGGQNESFKRYEEELEINDFPQTARWKVTSKEALQRISEYSEAAITIRGTYFPPGKEPKEGERKIYLAIESANELAVQKAKAEITRLIKEELIRLQNSYQPTNKGRYKVL

SEQ ID NO: 31762 - protein, 556 aa, Artificial Sequence
  Synthetic polypeptide
PGLVAPACNISYSIAELKRGAEIIVCTPGRMIDMLAANSGRVTNLRRVTYVVLDEADRMFDMGFEPQVMRIVDNVRPDRQTVMFSATFPRAMEALARRILSKPIEVQVGGRSVVCSDVEQQVIVIEEEKKFLKLLELLGHYQESGSVIIFVDKQEHADGLLKDLMRASYPCMSLHGGIDQYDRDSIINDFKNGTCKLLVATSVAARGLDVKHLILVVNYSCPNHYEDYVHRAGRTGRAGNKGYAYTFITEDQARYAGDIIKALELSGTAVPPDLEKLWSDFKDQQKAEGKIIKKSSGFSGKGFKFDETEQALANERKKLQKAALGLQDSDDEDAAVDIDEQIESMFNSKKRVKDMAAPGTSSVPAPTAGNAEKLEIAKRLALRINAQKNLGIESQDVMQQATNAILRGGTILAPTVSAKTIAEQLAEKINAKLNYVPLEKQEEERQDGGQNESFKRYEEELEINDFPQTARWKVTSKEALQRISEYSEAAITIRGTYFPPGKEPKEGERKIYLAIESANELAVQKAKAEITRLIKEELIRLQNSYQPTNKGRYKVL

SEQ ID NO: 31763 - protein, 17 aa, Artificial Sequence
  Synthetic polypeptide
RLRQSVLGDLLCVHLHI

SEQ ID NO: 31764 - protein, 317 aa, Artificial Sequence
  Synthetic polypeptide
GRVFSEIFFVSICTSELSMKVYVDPINYWKNGYNLLDVIIIIVMFLPYALRQLMGKQFTYLYIADGMQSLRILKLIGYSQGIRTLITAVGQTVYTVASVLLLLFLLMYIFAILGFCLFGSPDNGDHDNWGNLAAAFFTLFSLATVDGWTDLQKQLDNREFALSRAFTIIFILLASFIFLNMFVGVMIMHTEDSIRKFERELMLEQQEMLMGEKQVILQRQQEEISRLMHIQKNADCTSFSELVENFKKTLSHTDPMVLDDFGTSLPFIDIYFSTLDYQDTTVHKLQELYYEIVHVLSLMLEDLPQEKPQSLEKVDEK

SEQ ID NO: 31765 - protein, 40 aa, Artificial Sequence
  Synthetic polypeptide
ESPDLSPLANLEALCKQEMKAEAECSRRSSLCPSAHLSCP

SEQ ID NO: 31766 - protein, 159 aa, Artificial Sequence
  Synthetic polypeptide
TSMHLRFLSYQMETLPSLSAGVVGLHGQGSYSLRKKPCYGTVAALDCAGCQEGMAEAASVGLAQSESTTIMGHVCAERHTHDRYVTSMCPYLPLPMDGNAMDFSFLSSARAKQFFTVFSRSSSHLSAPQTGLLQWITNLAGRPWPALTAASGAGMKQKQ

SEQ ID NO: 31767 - protein, 9 aa, Artificial Sequence
  Synthetic polypeptide
DYTGREATA

SEQ ID NO: 31768 - protein, 68 aa, Artificial Sequence
  Synthetic polypeptide
QLLNFHAPQIPQLSNGDTAITICRCCRITRAGKLQPKEETLLWDCGCSGLRRLPGRNGGGSLRGPCTE

SEQ ID NO: 31769 - protein, 647 aa, Artificial Sequence
  Synthetic polypeptide
SWTSQPPELPNVCAVQKVIGTNRKYFTNCKQWYQRKICGKSTVISYECCPGYEKVPGEKGCPAALPLSNLYETLGVVGSTTTQLYTDRTEKLRPEMEGPGSFTIFAPSNEAWASLPAEVLDSLVSNVNIELLNALRYHMVGRRVLTDELKHGMTLTSMYQNSNIQIHHYPNGIVTVNCARLLKADHHATNGVVHLIDKVISTITNNIQQIIEIEDTFETLRAAVAASGLNTMLEGNGQYTLLAPTNEAFEKIPSETLNRILGDPEALRDLLNNHILKSAMCAEAIVAGLSVETLEGTTLEVGCSGDMLTINGKAIISNKDILATNGVIHYIDELLIPDSAKTLFELAAESDVSTAIDLFRQAGLGNHLSGSERLTLLAPLNSVFKDGTPPIDAHTRNLLRNHIIKDQLASKYLYHGQTLETLGGKKLRVFVYRNSLCIENSCIAAHDKRGRYGTLFTMDRVLTPPMGTVMDVLKGDNRFSMLVAAIQSAGLTETLNREGVYTVFAPTNEAFRALPPRERSRLLGDAKELANILKYHIGDEILVSGGIGALVRLKSLQGDKLEVSLKNNVVSVNKEPVAEPDIMATNGVVHVITNVLQPPANRPQERGDELADSALEIFKQASAFSRASQRSVRLAPVYQKLLERMKH

SEQ ID NO: 31770 - protein, 122 aa, Artificial Sequence
  Synthetic polypeptide
HTSPLEDAVLKAPSWEWGTALTRYQTYQHLDLGLPSLQSSPTCVLCRRLLALIGSTSPTASSGTKGKSVANQQSSATSAVLDMKRSLGRRAVQQPYHSQTFTRPWESLDPPPLSCTRTARRS

SEQ ID NO: 31771 - protein, 79 aa, Artificial Sequence
  Synthetic polypeptide
IRLDTLIKGLGRRSLPLLPFRLLPCKDSIPRLWKMQCSRHHLGSGEQPSPDTKPTSTLILDFPASRAPQRVCCAEGYWH

SEQ ID NO: 31772 - protein, 647 aa, Artificial Sequence
  Synthetic polypeptide
SWTSQPPELPNVCAVQKVIGTNRKYFTNCKQWYQRKICGKSTVISYECCPGYEKVPGEKGCPAALPLSNLYETLGVVGSTTTQLYTDRTEKLRPEMEGPGSFTIFAPSNEAWASLPAEVLDSLVSNVNIELLNALRYHMVGRRVLTDELKHGMTLTSMYQNSNIQIHHYPNGIVTVNCARLLKADHHATNGVVHLIDKVISTITNNIQQIIEIEDTFETLRAAVAASGLNTMLEGNGQYTLLAPTNEAFEKIPSETLNRILGDPEALRDLLNNHILKSAMCAEAIVAGLSVETLEGTTLEVGCSGDMLTINGKAIISNKDILATNGVIHYIDELLIPDSAKTLFELAAESDVSTAIDLFRQAGLGNHLSGSERLTLLAPLNSVFKDGTPPIDAHTRNLLRNHIIKDQLASKYLYHGQTLETLGGKKLRVFVYRNSLCIENSCIAAHDKRGRYGTLFTMDRVLTPPMGTVMDVLKGDNRFSMLVAAIQSAGLTETLNREGVYTVFAPTNEAFRALPPRERSRLLGDAKELANILKYHIGDEILVSGGIGALVRLKSLQGDKLEVSLKNNVVSVNKEPVAEPDIMATNGVVHVITNVLQPPANRPQERGDELADSALEIFKQASAFSRPEQPQVLCSPVYQKLLERMKH

SEQ ID NO: 31773 - protein, 119 aa, Artificial Sequence
  Synthetic polypeptide
SWTSQPPELPNVCAVQKVIGTNRKYFTNCKQWYQRKICGKSTVISYECCPGYEKVPGEKGCPAALPLSNLYETLGVVGSTTTQLYTDRTEKLRPEMEGPGSFTIFAPSNEAWASLPAVR

SEQ ID NO: 31774 - protein, 618 aa, Artificial Sequence
  Synthetic polypeptide
GQAQWLMPLIPALWEAKRGRSPEPRIRDQQPVQHTLPLSNLYETLGVVGSTTTQLYTDRTEKLRPEMEGPGSFTIFAPSNEAWASLPAEVLDSLVSNVNIELLNALRYHMVGRRVLTDELKHGMTLTSMYQNSNIQIHHYPNGIVTVNCARLLKADHHATNGVVHLIDKVISTITNNIQQIIEIEDTFETLRAAVAASGLNTMLEGNGQYTLLAPTNEAFEKIPSETLNRILGDPEALRDLLNNHILKSAMCAEAIVAGLSVETLEGTTLEVGCSGDMLTINGKAIISNKDILATNGVIHYIDELLIPDSAKTLFELAAESDVSTAIDLFRQAGLGNHLSGSERLTLLAPLNSVFKDGTPPIDAHTRNLLRNHIIKDQLASKYLYHGQTLETLGGKKLRVFVYRNSLCIENSCIAAHDKRGRYGTLFTMDRVLTPPMGTVMDVLKGDNRFSMLVAAIQSAGLTETLNREGVYTVFAPTNEAFRALPPRERSRLLGDAKELANILKYHIGDEILVSGGIGALVRLKSLQGDKLEVSLKNNVVSVNKEPVAEPDIMATNGVVHVITNVLQPPANRPQERGDELADSALEIFKQASAFSRASQRSVRLAPVYQKLLERMKH

SEQ ID NO: 31775 - protein, 53 aa, Artificial Sequence
  Synthetic polypeptide
FQHFGRPRGDDHLSQEFETSSPCNIPYHSQTFTRPWESLDPPPLSCTRTARRS

SEQ ID NO: 31776 - protein, 42 aa, Artificial Sequence
  Synthetic polypeptide
AKNSRPAARATYPTTLKPLRDPGSRWIHHHSAVHGPHGEAEA

SEQ ID NO: 31777 - protein, 618 aa, Artificial Sequence
  Synthetic polypeptide
GQAQWLMPLIPALWEAKRGRSPEPRIRDQQPVQHTLPLSNLYETLGVVGSTTTQLYTDRTEKLRPEMEGPGSFTIFAPSNEAWASLPAEVLDSLVSNVNIELLNALRYHMVGRRVLTDELKHGMTLTSMYQNSNIQIHHYPNGIVTVNCARLLKADHHATNGVVHLIDKVISTITNNIQQIIEIEDTFETLRAAVAASGLNTMLEGNGQYTLLAPTNEAFEKIPSETLNRILGDPEALRDLLNNHILKSAMCAEAIVAGLSVETLEGTTLEVGCSGDMLTINGKAIISNKDILATNGVIHYIDELLIPDSAKTLFELAAESDVSTAIDLFRQAGLGNHLSGSERLTLLAPLNSVFKDGTPPIDAHTRNLLRNHIIKDQLASKYLYHGQTLETLGGKKLRVFVYRNSLCIENSCIAAHDKRGRYGTLFTMDRVLTPPMGTVMDVLKGDNRFSMLVAAIQSAGLTETLNREGVYTVFAPTNEAFRALPPRERSRLLGDAKELANILKYHIGDEILVSGGIGALVRLKSLQGDKLEVSLKNNVVSVNKEPVAEPDIMATNGVVHVITNVLQPPANRPQERGDELADSALEIFKQASAFSRPEQPQVLCSPVYQKLLERMKH

SEQ ID NO: 31778 - protein, 90 aa, Artificial Sequence
  Synthetic polypeptide
GQAQWLMPLIPALWEAKRGRSPEPRIRDQQPVQHTLPLSNLYETLGVVGSTTTQLYTDRTEKLRPEMEGPGSFTIFAPSNEAWASLPAVR

SEQ ID NO: 31779 - protein, 54 aa, Artificial Sequence
  Synthetic polypeptide
RLSANWSSMLVLLAKASPPSVMGPVPVSQSLSHQSTRQKGVPAQTRSCGTLPPG

SEQ ID NO: 31780 - protein, 23 aa, Artificial Sequence
  Synthetic polypeptide
LSEGSVQIGVPCLFYWQKPRHPL

SEQ ID NO: 31781 - protein, 338 aa, Artificial Sequence
  Synthetic polypeptide
EIFVKGRVHQFSKLYCLIFRNYSHLNLQQPPPLSVSSHQYQGKTLHQQKGHDFLKAQCKLEFHACSTGKSLATLCDGPCPCLPEPEPPKHKAERSACTDKELRNLASRLKDWFGALHEDANRVIKPTSSNTAQGRFDTSILPICKDSLGWMFNKLDMNYDLLLDPSEINAIYLDKYEPCIKPLFNSCDSFKDGKLSNNEWCYCFQKPGGLPCQNEMNRIQKLSKGKSLLGAFIPRCNEEGYYKATQCHGSTGQCWCVDKYGNELAGSRKQGAVSCEEEQETSGDFGSGGSVVLLDDLEYERELGPKDKEGKLRVHTRAVTEDDEDEDDDKEDEVGYIW

SEQ ID NO: 31782 - protein, 111 aa, Artificial Sequence
  Synthetic polypeptide
EIFVKGRVHQFSKLYCLIFRNYSHLNLQQPPPLSVSSHQYQGKTLHQQKGHDFLKAQCKLEFHACSTGKSLATLCDGPCPCLPEPEPPKHKAERSACTDKELRNLASRLKD

SEQ ID NO: 31783 - protein, 18 aa, Artificial Sequence
  Synthetic polypeptide
SWTSPASGTPWTHPRTPA

SEQ ID NO: 31784 - protein, 120 aa, Artificial Sequence
  Synthetic polypeptide
RTVTRHRICWHLDLGLPQPPELPGPIQGPLPEGKMQPSQSVCDPGLPDRPVCQPQAPAPQAKEGERGPETLGWTFEFGQVQALSRGTVSHGLRLRWPLLHIQVQIGVPCLFYWQKPRHPL

SEQ ID NO: 31785 - protein, 405 aa, Artificial Sequence
  Synthetic polypeptide
KRAGSLVALSAVWEQMEDTINEEPSPGTESAGTLILDFPSLRNSLDPSKDPCLKVKCSPHKVCVTQDYQTALCVSRKHLLPRQKKGNVAQKHWVGPSNLVKCKPCPVAQSAMVCGSDGHSYTSKCKLEFHACSTGKSLATLCDGPCPCLPEPEPPKHKAERSACTDKELRNLASRLKDWFGALHEDANRVIKPTSSNTAQGRFDTSILPICKDSLGWMFNKLDMNYDLLLDPSEINAIYLDKYEPCIKPLFNSCDSFKDGKLSNNEWCYCFQKPGGLPCQNEMNRIQKLSKGKSLLGAFIPRCNEEGYYKATQCHGSTGQCWCVDKYGNELAGSRKQGAVSCEEEQETSGDFGSGGSVVLLDDLEYERELGPKDKEGKLRVHTRAVTEDDEDEDDDKEDEVGYIW

SEQ ID NO: 31786 - protein, 83 aa, Artificial Sequence
  Synthetic polypeptide
RTVTRHRICWHLDLGLPQPPELPGPIQGPLPEGKMQPSQSVCDPGLPDRPVCQPQAPAPQAKEGERGPETLGWTFEFGQVQAL

SEQ ID NO: 31787 - protein, 105 aa, Artificial Sequence
  Synthetic polypeptide
KRAGSLVALSAVWEQMEDTINEEPSPGTESAGTLILDFPSLRNSLDPSKDPCLKVKCSPHKVCVTQDYQTALCVSRKHLLPRQKKGNVAQKHWVGPSNLVKCKPC

SEQ ID NO: 31788 - protein, 386 aa, Artificial Sequence
  Synthetic polypeptide
SWTSPASGTDDYFRNWNPNKPFDQALDPSKDPCLKVKCSPHKVCVTQDYQTALCVSRKHLLPRQKKGNVAQKHWVGPSNLVKCKPCPVAQSAMVCGSDGHSYTSKCKLEFHACSTGKSLATLCDGPCPCLPEPEPPKHKAERSACTDKELRNLASRLKDWFGALHEDANRVIKPTSSNTAQGRFDTSILPICKDSLGWMFNKLDMNYDLLLDPSEINAIYLDKYEPCIKPLFNSCDSFKDGKLSNNEWCYCFQKPGGLPCQNEMNRIQKLSKGKSLLGAFIPRCNEEGYYKATQCHGSTGQCWCVDKYGNELAGSRKQGAVSCEEEQETSGDFGSGGSVVLLDDLEYERELGPKDKEGKLRVHTRAVTEDDEDEDDDKEDEVGYIW

SEQ ID NO: 31789 - protein, 46 aa, Artificial Sequence
  Synthetic polypeptide
RTVTRHRICWHLDLGLPQPPELMIISETGIPTSPLTKPWTHPRTPA

SEQ ID NO: 31790 - protein, 86 aa, Artificial Sequence
  Synthetic polypeptide
SWTSPASGTDDYFRNWNPNKPFDQALDPSKDPCLKVKCSPHKVCVTQDYQTALCVSRKHLLPRQKKGNVAQKHWVGPSNLVKCKPC

SEQ ID NO: 31791 - protein, 448 aa, Artificial Sequence
  Synthetic polypeptide
SWTSPASGTMPAIAVLAAAAAAWCFLQVESRHLDALAGGAGPNHGNFLDNDQWLSTVSQYDRDKYWNRFRDDDYFRNWNPNKPFDQALDPSKDPCLKVKCSPHKVCVTQDYQTALCVSRKHLLPRQKKGNVAQKHWVGPSNLVKCKPCPVAQSAMVCGSDGHSYTSKCKLEFHACSTGKSLATLCDGPCPCLPEPEPPKHKAERSACTDKELRNLASRLKDWFGALHEDANRVIKPTSSNTAQGRFDTSILPICKDSLGWMFNKLDMNYDLLLDPSEINAIYLDKYEPCIKPLFNSCDSFKDGKLSNNEWCYCFQKPGGLPCQNEMNRIQKLSKGKSLLGAFIPRCNEEGYYKATQCHGSTGQCWCVDKYGNELAGSRKQGAVSCEEEQETSGDFGSGGSVVLLDDLEYERELGPKDKEGKLRVHTRAVTEDDEDEDDDKEDEVGYIW

SEQ ID NO: 31792 - protein, 60 aa, Artificial Sequence
  Synthetic polypeptide
RTVTRHRICWHLDLGLPQPPELCRRSRCWRRPPRRGASSKSRAGTWTRSPEARAPTTAIS

SEQ ID NO: 31793 - protein, 84 aa, Artificial Sequence
  Synthetic polypeptide
KRAGSLVALSAVWEQMEDTINEEPSPGTESAGTLILDFPSLRNYAGDRGVGGGRRGVVLPPSREPAPGRARRRRGPQPRQFPRQ

SEQ ID NO: 31794 - protein, 148 aa, Artificial Sequence
  Synthetic polypeptide
SWTSPASGTMPAIAVLAAAAAAWCFLQVESRHLDALAGGAGPNHGNFLDNDQWLSTVSQYDRDKYWNRFRDDDYFRNWNPNKPFDQALDPSKDPCLKVKCSPHKVCVTQDYQTALCVSRKHLLPRQKKGNVAQKHWVGPSNLVKCKPC

SEQ ID NO: 31795 - protein, 95 aa, Artificial Sequence
  Synthetic polypeptide
RQPCMFETTSNLHTFWMEYPEIATKALKSLLPFPASYICEAGFSAVTATKTRLWSKLDISNTLRVSLSPITPRWEPASCGKTSSSLPLILRYVSS

SEQ ID NO: 31796 - protein, 17 aa, Artificial Sequence
  Synthetic polypeptide
FYVTCQAELPDSDTGWG

SEQ ID NO: 31797 - protein, 597 aa, Artificial Sequence
  Synthetic polypeptide
LRENKLKPSTDSTLRVKLSSQTLIQAGDDEKNQRTITVNPAHMGKAFKVMNELRSKQLLCDVMIVAEDVEIEAHRVVLAACSPYFCAMFTGDMSESKAKKIEIKDVDGQTLSKLIDYIYTAEIEVTEENVQVLLPAASLLQLMDVRQNCCDFLQSQLHPTNCLGIRAFADVHTCTDLLQQANAYAEQHFPEVMLGEEFLSLSLDQVCSLISSDKLTVSSEEKVFEAVISWINYEKETRLEHMAKLMEHVRLPLLPRDYLVQTVEEEALIKNNNTCKDFLIEAMKYHLLPLDQRLLIKNPRTKPRTPVSLPKVMIVVGGQAPKAIRSVECYDFEEDRWDQIAELPSRRCRAGVVFMAGHVYAVGGFNGSLRVRTVDVYDGVKDQWTSIASMQERRSTLGAAVLNDLLYAVGGFDGSTGLASVEAYSYKTNEWFFVAPMNTRRSSVGVGVVEGKLYAVGGYDGASRQCLSTVEQYNPATNEWIYVADMSTRRSGAGVGVLSGQLYATGGHDGPLVRKSVEVYDPGTNTWKQVADMNMCRRNAGVCAVNGLLYVVGGDDGSCNLASVEYYNPVTDKWTLLPTNMSTGRSYAGVAVIHKSL

SEQ ID NO: 31798 - protein, 311 aa, Artificial Sequence
  Synthetic polypeptide
LRENKLKPSTDSTLRVKLSSQTLIQAGDDEKNQRTITVNPAHMGKAFKVMNELRSKQLLCDVMIVAEDVEIEAHRVVLAACSPYFCAMFTGDMSESKAKKIEIKDVDGQTLSKLIDYIYTAEIEVTEENVQVLLPAASLLQLMDVRQNCCDFLQSQLHPTNCLGIRAFADVHTCTDLLQQANAYAEQHFPEVMLGEEFLSLSLDQVCSLISSDKLTVSSEEKVFEAVISWINYEKETRLEHMAKLMEHVRLPLLPRDYLVQTVEEEALIKNNNTCKDFLIEAMKYHLLPLDQRLLIKNPRTKPRTPVSLPK

SEQ ID NO: 31799 - protein, 45 aa, Artificial Sequence
  Synthetic polypeptide
GRAQWLKPVIPTLWEAEAGGSQGQEIETILANMGLRNISCITERK

SEQ ID NO: 31800 - protein, 28 aa, Artificial Sequence
  Synthetic polypeptide
SQHFGRPRRADHKVKRSRPSWPTWGFET

SEQ ID NO: 31801 - protein, 545 aa, Artificial Sequence
  Synthetic polypeptide
PGAVAQACNPNTLGGRGGRITRSRDRDHPGQHGASKHKLHYRKEVEITTTLQELLLYFIFLINLCILTFGMVNPHMYYLNKVMSSLFLDTSVPGEERTNFKSIRSITDFWKFMEGPLLEGLYWDSWYNNQQLYNLKNSSRIYYENILLGVPRVRQLKVRNNTCKVYSSFQSLMSECYGKYTSANEDLSNFGLQINTEWRYSTSNTNSPWHWGFLGVYRNGGYIFTLSKSKSETKNKFIDLRLNSWITRGTRVIFIDFSLYNANVNLFCIIRLVAEFPATGGILTSWQFYSVKLLRYVSYYDYFIASCEITFCIFLFVFTTQEVKKIKEFKSAYFKSIWNWLELLLLLLCFVAVSFNTYYNVQIFLLLGQLLKSTEKYSDFYFLACWHIYYNNIIAITIFFAWIKNMFLAIINDTYSEVKADYSIGRRLDFELGKMIKQSYKNVLEKFRLKKAQKDEDKKTKGSGDLAEQARREGFDENEIQNAEQMKKWKERLEKKYYSMEIQDDYQPVTQEEFRELFLYAVELEKELHYINLKLNQVVRKVSAL

SEQ ID NO: 31802 - protein, 79 aa, Artificial Sequence
  Synthetic polypeptide
PGAVAQACNPNTLGGRGGRITRSRDRDHPGQHGASKHKLHYRKEVEITTTLQELLLYFIFLINLCICYVISIFGHFCAW

SEQ ID NO: 31803 - protein, 624 aa, Artificial Sequence
  Synthetic polypeptide
PGAVAQACNPNTLGGRGGRITRSRDRDHPGQHGASKHKLHYRKEVEITTTLQELLLYFIFLINLCILTFGMVNPHMYYLNKVMSSLFLDTSVPGEERTNFKSIRSITDFWKFMEGPLLEGLYWDSWYNNQQLYNLKNSSRIYYENILLGVPRVRQLKVRNNTCKVYSSFQSLMSECYGKYTSANEDLSNFGLQINTEWRYSTSNTNSPWHWGFLGVYRNGGYIFTLSKSKSETKNKFIDLRLNSWITRGTRVIFIDFSLYNANVNLFCIIRLVAEFPATGGILTSWQFYSVKLLRYVSYYDYFIASCEITFCIFLFVFTTQEVKKIKEFKSAYFKSIWNWLELLLLLLLKSTEKYSDFYFLACWHIYYNNIIAITIFFAWIKIFKFISFNKTMSQLSSTLSRCVKDIVGFAIMFFIIFFAYAQLGFLVFGSQVDDFSTFQNSIFAQFRIVLGDFNFAGIQQANPILGPIYFITFIFFVFFVLLNMFLAIINDTYSEVKADYSIGRRLDFELGKMIKQSYKNVLEKFRLKKAQKDEDKKTKGSGDLAEQARREGFDENEIQNAEQMKKWKERLEKKYYSMEIQDDYQPVTQEEFRELFLYAVELEKELHYINLKLNQVVRKVSAL

SEQ ID NO: 31804 - protein, 646 aa, Artificial Sequence
  Synthetic polypeptide
PGAVAQACNPNTLGGRGGRITRSRDRDHPGQHGASKHKLHYRKEVEITTTLQELLLYFIFLINLCILTFGMVNPHMYYLNKVMSSLFLDTSVPGEERTNFKSIRSITDFWKFMEGPLLEGLYWDSWYNNQQLYNLKNSSRIYYENILLGVPRVRQLKVRNNTCKVYSSFQSLMSECYGKYTSANEDLSNFGLQINTEWRYSTSNTNSPWHWGFLGVYRNGGYIFTLSKSKSETKNKFIDLRLNSWITRGTRVIFIDFSLYNANVNLFCIIRLVAEFPATGGILTSWQFYSVKLLRYVSYYDYFIASCEITFCIFLFVFTTQEVKKIKEFKSAYFKSIWNWLELLLLLLCFVAVSFNTYYNVQIFLLLGQLLKSTEKYSDFYFLACWHIYYNNIIAITIFFAWIKIFKFISFNKTMSQLSSTLSRCVKDIVGFAIMFFIIFFAYAQLGFLVFGSQVDDFSTFQNSIFAQFRIVLGDFNFAGIQQANPILGPIYFITFIFFVFFVLLNMFLAIINDTYSEVKADYSIGRRLDFELGKMIKQSYKNVLEKFRLKKAQKDEDKKTKGSGDLAEQARREGFDENEIQNAEQMKKWKERLEKKYYSMEIQDDYQPVTQEEFRELFLYAVELEKELHYINLKLNQVVRKVSAL

SEQ ID NO: 31805 - protein, 635 aa, Artificial Sequence
  Synthetic polypeptide
PGAVAQACNPNTLGGRGGRITRSRDRDHPGQHGASKHKLHYRKEVEITTTLQELLLYFIFLINLCILTFGMVNPHMYYLNKVMSSLFLDTSVPGEERTNFKSIRSITDFWKFMEGPLLEGLYWDSWYNNQQLYNLKNSSRIYYENILLGVPRVRQLKVRNNTCKVYSSFQSLMSECYGKYTSANEDLSNFGLQINTEWRYSTSNTNSPWHWGFLGVYRNGGYIFTLSKSKSETKNKFIDLRLNSWITRGTRVIFIDFSLYNANVNLFCIIRLVAEFPATGGILTSWQFYSVKLLRYVSYYDYFIASCEITFCIFLFVFTTQEVKKIKEFKSAYFKSIWNWLELLLLLLCFVAVSFNTYYNVQIFLLLGQLLKSTEKYSDFYFLACWHIYYNNIIAITIFFAWIKIFKFISFNKTMSQLSSTLSRCVKDIVGFAIMFFIIFFAYAQLGFLVFGSQVDDFSTFQNSIFAQFRIVLGDFNFAGIQQANPILGPIYFITFIFFVFFVLLNMFLAIINDTYSEVKADYSIGRRLDFELGKMIKQSYKNVLEKFRLKKAQKDEDKKTKGSGDLAEQARREGFDENEIQNAEQMKKWKERLEKKYYSMEIQDDYQPVTQEEFRDGTTTKYKMRFSECLTKRI

SEQ ID NO: 31806 - protein, 47 aa, Artificial Sequence
  Synthetic polypeptide
GRVRWLTPVIPALWGPRRADHEVRRWRPSWLTRRSGATRTFSSQWKC

SEQ ID NO: 31807 - protein, 864 aa, Artificial Sequence
  Synthetic polypeptide
HGGLEQQGLFQVNGNAETVEWLRQRYDSGEEVDLVKEADVPSAISLLRFFLQELPEPVIPGSLHIHLMQLSQDYNNEDEFGRKLRFLLQQLPPVNYSLLKFLCRFLANVASHHEEIWSANSLAAVFGPDVFHIYTDVEDMKEQEIVSRIMAGLLENYYEFFENEEEDFSSNDLSSITEQVNELSEEEEEDEKLEHIEELPEEGAEKSNDMPEVVQLRMTENILESNSVTATSTHISPISILPASTDILERTIRAAVEQHLFDLQSSIDHDLKNLQQQSVVCNNEAESIHCDGEGSNNQIDIADDIINASESNRDCSKPVASTNLDNEAMQQDCVFENEENTQSVGILLEPCSDRGDSEDGCLEREEYLLFDSDKLSHLILDSSSKICDLNANTESEVPGGQSVGVQGEAACVSIPHLDLKNVSDGDKWEEPFPAFKSWQEDSESGEAQLSPQAGRMNHHPLEEDCPPVLSHRSLDFGQSQRFLHDPEKLDSSSKALSFTRIRRSSFSSKDEKREDRTPYQLVKKLQKKIRQFEEQFERERNSKPSYSDIAANPKVLKWMTELTKLRKQIKDAKHKNSDGEFVPQTRPRSNTLPKSFGSSLDHEDEENEDEPKVIQKEKKPSKEATLELILKRLKEKRIERCLPEDIKKMTKDHLVEEKASLQKSLLYYESQHGRPVTKEERHIVKPLYDRYRLVKQMLTRASITPVLGSPSTKRRGQMLQPIIEGETAHFFEEIKEEEEDGVNLSSELGDMLKTAVQVQSSLENSESDVEENQEKLALDLRLSSSRAASMPELLEQLWKARAEKKKLRKTLREFEEAFYQQNGRNAQKEDRVPVLEEYREYKKIKAKLRLLEVLISKQDSSKSI

SEQ ID NO: 31808 - protein, 97 aa, Artificial Sequence
  Synthetic polypeptide
PGAVANACNPSTLGAETGRSRGQEMETILANTEVWSNKDFFKSMEMLRQWSGFGRDTTAEKRWIWLRKQMFPQLLAFLDFFFKNFLNLLSLAVYIFT

SEQ ID NO: 31809 - protein, 836 aa, Artificial Sequence
  Synthetic polypeptide
HGGLEQQGLFQVNGNAETVEWLRQRYDSGEEVDLVKEADVPSAISLLRFFLQELPEPVIPGSLHIHLMQLSQDYNNEDEFGRKLRFLLQQLPPVNYSLLKFLCRFLANVASHHEEIWSANSLAAVFGPDVFHIYTDVEDMKEQEIVSRIMAGLLENYYEFFENEEEDFSSNDLSSITEQVNELSEEEEEDEKLEHIEELPEEGAEKSNDMPEVVQLRMTENILESNSVTATSTHISPISILPASTDILERTIRAAVEQHLFDLQSSIDHDLKNLQQQSVVCNNEAESIHCDGEGSNNQIDIADDIINASESNRDCSKPVASTNLDNEAMQQDCVFENEENTQSVGILLEPCSDRGDSEDGCLEREEYLLFDSDKLSHLILDSSSKICDLNANTESEVPGGQSVGVQGEAACVSIPHLDLKNVSDGDKWEEPFPAFKSWQEDSESGEAQLSPQAGRMNHHPLEEDCPPVLSHRSLDFGQSQRFLHDPEKLDSSSKALSFTRIRRSSFSSKDEKREDRTPYQLVKKLQKKIRQFEEQFERERNSKPSYSDIAANPKVLKWMTELTKLRKQIKDAKHKNSDGEFVPQTRPRSNTLPKSFGSSLDHEDEENEDEPKVIQKEKKPSKEATLELILKRLKEKRIERCLPEDIKVTKEERHIVKPLYDRYRLVKQMLTRASITPVLGSPSTKRRGQMLQPIIEGETAHFFEEIKEEEEDGVNLSSELGDMLKTAVQVQSSLENSESDVEENQEKLALDLRLSSSRAASMPELLEQLWKARAEKKKLRKTLREFEEAFYQQNGRNAQKEDRVPVLEEYREYKKIKAKLRLLEVLISKQDSSKSI

SEQ ID NO: 31810 - protein, 91 aa, Artificial Sequence
  Synthetic polypeptide
HGGLEQQGLFQVNGNAETVEWLRQRYDSGEEVDLVKEADVPSAISLLRFFLQELPEPVIPGSLHIHLMQLSQDYNNEDEFGRKLRFLLQQL

SEQ ID NO: 31811 - protein, 44 aa, Artificial Sequence
  Synthetic polypeptide
HGGLEQQGLFQVNGNAETVEWLRQRYDSGEEVDLVKEADVPSAI

SEQ ID NO: 31812 - protein, 75 aa, Artificial Sequence
  Synthetic polypeptide
PGAVANACNPSTLGAETGRSRGQEMETILANTEVWSNKDFFKSMEMLRQWSGFGRDTTAEKRWIWLRKQMFPQLL

SEQ ID NO: 31813 - protein, 36 aa, Artificial Sequence
  Synthetic polypeptide
HGGLEQQGLFQVNGNAETVEWLRQRYDSGEEVDLVK

SEQ ID NO: 31814 - protein, 67 aa, Artificial Sequence
  Synthetic polypeptide
PGAVANACNPSTLGAETGRSRGQEMETILANTEVWSNKDFFKSMEMLRQWSGFGRDTTAEKRWIWLR

SEQ ID NO: 31815 - protein, 44 aa, Artificial Sequence
  Synthetic polypeptide
GRVRWLTPVIPALWGPRRADHEVRRWRPSWLTRRSGATRTFSSQ

SEQ ID NO: 31816 - protein, 13 aa, Artificial Sequence
  Synthetic polypeptide
HGGLEQQGLFQVN

SEQ ID NO: 31817 - protein, 44 aa, Artificial Sequence
  Synthetic polypeptide
PGAVANACNPSTLGAETGRSRGQEMETILANTEVWSNKDFFKSM

SEQ ID NO: 31818 - protein, 25 aa, Artificial Sequence
  Synthetic polypeptide
ENGVNAGGGACGSADCTGSFWQSPK

SEQ ID NO: 31819 - protein, 292 aa, Artificial Sequence
  Synthetic polypeptide
TQEVELAVQQTVQDLFGRAPSKAVNPDEAVAIGAAIQGGVLAGDVTDVLLLDVTPLSLGIETLGGVFTKLINRNTTIPTKKSQVFSTAADGQTQVEIKVCQGEREMAGDNKLLGQFTLIGIPPAPRGVPQIEVTFDIDANGIVHVSAKDKGTGREQQIVIQSSGGLSKDDIENMVKNAEKYAEEDRRKKERVEAVNMAEGIIHDTETKMEEFKDQLPADECNKLKEEISKMRELLARKDSETGENIRQAASSLQQASLKLFEMAYKKMASEREGSGSSGTGEQKEDQKEEKQ

SEQ ID NO: 31820 - protein, 83 aa, Artificial Sequence
  Synthetic polypeptide
KIWWAPVVPATWEAEVGEWRERRRWSLRFSRLYRIFLAEPQVKLSILMRLWPLELPFREVCWPAMSRMCCSLMSLPCLWVLKL

SEQ ID NO: 31821 - protein, 21 aa, Artificial Sequence
  Synthetic polypeptide
TQEVELAVQQTVQDLFGRAPS

SEQ ID NO: 31822 - protein, 42 aa, Artificial Sequence
  Synthetic polypeptide
KIWWAPVVPATWEAEVGEWRERRRWSLRFSRLYRIFLAEPQV

SEQ ID NO: 31823 - protein, 63 aa, Artificial Sequence
  Synthetic polypeptide
SQLLGRLRFSRLYRIFLAEPQVKLSILMRLWPLELPFREVCWPAMSRMCCSLMSLPCLWVLKL

SEQ ID NO: 31824 - protein, 300 aa, Artificial Sequence
  Synthetic polypeptide
KIWWAPVVPATWEAEVQQTVQDLFGRAPSKAVNPDEAVAIGAAIQGGVLAGDVTDVLLLDVTPLSLGIETLGGVFTKLINRNTTIPTKKSQVFSTAADGQTQVEIKVCQGEREMAGDNKLLGQFTLIGIPPAPRGVPQIEVTFDIDANGIVHVSAKDKGTGREQQIVIQSSGGLSKDDIENMVKNAEKYAEEDRRKKERVEAVNMAEGIIHDTETKMEEFKDQLPADECNKLKEEISKMRELLARKDSETGENIRQAASSLQQASLKLFEMAYKKMASEREGSGSSGTGEQKEDQKEEKQ

SEQ ID NO: 31825 - protein, 22 aa, Artificial Sequence
  Synthetic polypeptide
SQLLGRLRFSRLYRIFLAEPQV

SEQ ID NO: 31826 - protein, 29 aa, Artificial Sequence
  Synthetic polypeptide
KIWWAPVVPATWEAEVQQTVQDLFGRAPS

SEQ ID NO: 31827 - protein, 182 aa, Artificial Sequence
  Synthetic polypeptide
AEITPLHSSLGNIHMFSNVTDDTYYYRRRHRHERTQTQKEEEEEKPQTTYSAFIQLLPVLVIVIISVITQLLATNPPYSLFYKSTLGYTISRETQNLQVPYFVDKNFDKAYRGASLHDLEKTIEKDYIDYIQTSCWKEKQQKSELTNLAGLYRDERLKQKAESLKLENCEKLSKLIGLRRGG

SEQ ID NO: 31828 - protein, 40 aa, Artificial Sequence
  Synthetic polypeptide
SQLLRMLRQENRLNPGSRGCSEPRSPHCTPVWEIFICFQM

SEQ ID NO: 31829 - protein, 29 aa, Artificial Sequence
  Synthetic polypeptide
TQEAEVAVSRDHPIALQSGKYSYVFKCDR

SEQ ID NO: 31830 - protein, 168 aa, Artificial Sequence
  Synthetic polypeptide
AEITPLHSSLGNIHMFSNVTDDTYYYRRRHRHERTQTQKEEEEEKPQTTYSAFIQLLPVLVIVIISVITQLLATNPPYSLFYKSTLGYTISRETQNLQVPYFVDKNFDKAYRGASLHDLEKTIEKDYIDYIQTSCWKEKQQRFWHSPCFRTSAQQMSFEERILRSRKQ

SEQ ID NO: 31831 - protein, 37 aa, Artificial Sequence
  Synthetic polypeptide
FFTSHLDVSQQKKSYLERSVKEAEDNIREMLMARRAQ

SEQ ID NO: 31832 - protein, 71 aa, Artificial Sequence
  Synthetic polypeptide
VLLLYVLYLGISSILTTSSTTSMQNYISSPDFFHELQSQSSFSHLIWMSHSRKSPTWSEALRKLRTTSGRC

SEQ ID NO: 31833 - protein, 51 aa, Artificial Sequence
  Synthetic polypeptide
EFHPFSRLQVPRLCKIISLAQISSMNSRANLVFHISFGCLTAEKVLPGAKR

SEQ ID NO: 31834 - protein, 57 aa, Artificial Sequence
  Synthetic polypeptide
GWAWWLMPVIPALWEAEAGRSRGQEIETILANMVYSSVQGSNSQSAVREAENSRRKN

SEQ ID NO: 31835 - protein, 79 aa, Artificial Sequence
  Synthetic polypeptide
SQHFGRPRRADHEVRKSRPSWLTWFILQSKEAIHSQLLEKQKIAEEKIKELEQKKSYLERSVKEAEDNIREMLMARRAQ

SEQ ID NO: 31836 - protein, 15 aa, Artificial Sequence
  Synthetic polypeptide
HGLFFSPRKQFTVSC

SEQ ID NO: 31837 - protein, 48 aa, Artificial Sequence
  Synthetic polypeptide
SQHFGRPRRADHEVRKSRPSWLTWFILQSKEAIHSQLLEKQKIAEEKI

SEQ ID NO: 31838 - protein, 74 aa, Artificial Sequence
  Synthetic polypeptide
SQHFGRPRRADHEVRKSRPSWLTWFILQSKEAIHSQLLEKQKIAEEKIKELEVTEPFLSWGMGLALFSFPFLYL

SEQ ID NO: 31839 - protein, 35 aa, Artificial Sequence
  Synthetic polypeptide
GQEFETSLDNMVYSSVQGSNSQSAVREAENSRRKN

SEQ ID NO: 31840 - protein, 90 aa, Artificial Sequence
  Synthetic polypeptide
AGHGGSLLYIIPALWEAEAVGSPEVRSSRLAWTTWFILQSKEAIHSQLLEKQKIAEEKIKELEQKKSYLERSVKEAEDNIREMLMARRAQ

SEQ ID NO: 31841 - protein, 18 aa, Artificial Sequence
  Synthetic polypeptide
PGQHGLFFSPRKQFTVSC

SEQ ID NO: 31842 - protein, 59 aa, Artificial Sequence
  Synthetic polypeptide
AGHGGSLLYIIPALWEAEAVGSPEVRSSRLAWTTWFILQSKEAIHSQLLEKQKIAEEKI

SEQ ID NO: 31843 - protein, 85 aa, Artificial Sequence
  Synthetic polypeptide
AGHGGSLLYIIPALWEAEAVGSPEVRSSRLAWTTWFILQSKEAIHSQLLEKQKIAEEKIKELEVTEPFLSWGMGLALFSFPFLYL

SEQ ID NO: 31844 - protein, 18 aa, Artificial Sequence
  Synthetic polypeptide
TKGPSQSFKPKLLTLNRR

SEQ ID NO: 31845 - protein, 19 aa, Artificial Sequence
  Synthetic polypeptide
WNGKIAELRGLHRASSQSY

SEQ ID NO: 31846 - protein, 112 aa, Artificial Sequence
  Synthetic polypeptide
GAFTELQAKVIDTQQKVKLADIQIEQLNRTKKHAHLTDTEIMTLVDETNMYEGVGRMFILQSKEAIHSQLLEKQKIAEEKIKELEQKKSYLERSVKEAEDNIREMLMARRAQ

SEQ ID NO: 31847 - protein, 107 aa, Artificial Sequence
  Synthetic polypeptide
GAFTELQAKVIDTQQKVKLADIQIEQLNRTKKHAHLTDTEIMTLVDETNMYEGVGRMFILQSKEAIHSQLLEKQKIAEEKIKELEVTEPFLSWGMGLALFSFPFLYL

SEQ ID NO: 31848 - protein, 2296 aa, Artificial Sequence
  Synthetic polypeptide
CGMNIMEYYSDLKKEEILPFATTWMDLKDIMLSGISQTQKGKYCMISLFFFPHSLMDIGNTALTYACAGGFVDIVKVLLNEGANIEDHNENGHTPLMEAASAGHVEVARVLLDHGAGINTHSNEFKESALTLACYKGHLDMVRFLLEAGADQEHKTDEMHTALMEACMDGHVEVARLLLDSGAQVNMPADSFESPLTLAACGGHVELAALLIERGANLEEVNDEGYTPLMEAAREGHEEMVALLLAQGANINAQTEETQETALTLACCGGFSEVADFLIKAGADIELGCSTPLMEASQEGHLELVKYLLASGANVHATTATGDTALTYACENGHTDVADVLLQAGADLEHESEGGRTPLMKAARAGHLCTVQFLISKGANVNRATANNDHTVVSLACAGGHLAVVELLLAHGADPTHRLKDGSTMLIEAAKGGHTNVVSYLLDYPNNVLSVPTTDVSQLPPPSQDQSQVPRVPTHTLAMVVPPQEPDRTSQENSPALLGVQKGTSKQKSSSLQVADQDLLPSFHPYQPLECIVEETEGKLNELGQRISAIEKAQLKSLELIQGEPLNKDKIEELKKNREEQVQKKKKILKELQKVERQLQMKTQQQFTKEYLETKGQKDTVSLHQQCSHRGVFPEGEGDGSLPEDHFSELPQVDTILFKDNDVDDEQQSPPSAEQIDFVPVQPLSSPQCNFSSDLGSNGTNSLELQKVSGNQQIVGQPQIAITGHDQGLLVQEPDGLMVATPAQTLTDTLDDLIAAVSTRVPTGSNSSSQTTECLTPESCSQTTSNVASQSMPPVYPSVDIDAHTESNHDTALTLACAGGHEELVSVLIARDAKIEHRDKKGFTPLILAATAGHVGVVEILLDKGGDIEAQSERTKDTPLSLACSGGRQEVVDLLLARGANKEHRNVSDYTPLSLAASGGYVNIIKILLNAGAEINSRTGSKLGISPLMLAAMNGHVPAVKLLLDMGSDINAQIETNRNTALTLACFQGRAEVVSLLLDRKANVEHRAKTGLTPLMEAASGGYAEVGRVLLDKGADVNAPPVPSSRDTALTIAADKGHYKFCELLIHRGAHIDVRNKKGNTPLWLASNGGHFDVVQLLVQAGADVDAADNRKITPLMSAFRKGHVKVVQYLVKEVNQFPSDIECMRYIATITDKELLKKCHQCVETIVKAKDQQAAEANKNASILLKELDLEKSREESRKQALAAKREKRKEKRKKKKEEQKRKQEEDEENKPKENSELPEDEDEEENDEDVEQEVPIEPPSATTTTTIGISATSATFTNVFGKKRANVVTTPSTNRKNKKNKTKETPPTAHLILPEQHMSLAQQKADKNKINGEPRGGGAGGNSDSDNLDSTDCNSESSSGGKSQELNFVMDVNSSKYPSLLLHSQEEKTSTATSKTQTRLEGEVTPNSLSTSYKTVSLPLSSPNIKLNLTSPKRGQKREEGWKEVVRRSKKLSVPASVVSRIMGRGGCNITAIQDVTGAHIDVDKQKDKNGERMITIRGGTESTRYAVQLINALIQDPAKELEDLIPKNHIRTPASTKSIHANFSSGVGTTAASSKNAFPLGAPTLVTSQATTLSTFQPANKLNKNVPTNVRSSFPVSLPLAYPHPHFALLAAQTMQQIRHPRLPMAQFGGTFSPSPNTWGPFPVRPVNPGNTNSSPKHNNTSRLPNQNGTVLPSESAGLATASCPITVSSVVAASQQLCVTNTRTPSSVRKQLFACVPKTSPPATVISSVTSTCSSLPSVSSAPITSGQAPTTFLPASTSQAQLSSQKMESFSAVPPTKEKVSTQDQPMANLCTPSSTANSCSSSASNTPGAPETHPSSSPTPTSSNTQEEAQPSSVSDLSPMSMPFASNSEPAPLTLTSPRMVAADNQDTSNLPQLAVPAPRVSHRMQPRGSFYSMVPNATIHQDPQSIFVTNPVTLTPPQGPPAAVQLSSAVNIMNGSQMHINPANKSLPPTFGPATLFNHFSSLFDSSQVPANQGWGDGPLSSRVATDASFTVQSAFLGNSVLGHLENMHPDNSKAPGFRPPSQRVSTSPVGLPSIDPSGSSPSSSSAPLASFSGIPGTRVFLQGPAPVGTPSFNRQHFSPHPWTSASNSSTSAPPTLGQPKGVSASQDRKIPPPIGTERLARIRQGGSVAQAPAGTSFVAPVGHSGIWSFGVNAVSEGLSGWSQSVMGNHPMHQQLSDPSTFSQHQPMERDDSGMVAPSNIFHQPMASGFVDFSKGLPISMYGGTIIPSHPQLADVPGGPLFNGLHNPDPAWNPMIKVIQNSTECTDAQQIWPGTWAPHIGNMHLKYVN

SEQ ID NO: 31849 - protein, 71 aa, Artificial Sequence
  Synthetic polypeptide
WYEHNGILFRLKKGGDPAICHNMDGPEGHYAKWNKPDTERKVLHDLTFFFPPQSYGHRKHCANLCMCWRIC

SEQ ID NO: 31850 - protein, 2371 aa, Artificial Sequence
  Synthetic polypeptide
CGMNIMEYYSDLKKEEILPFATTWMDLKDIMLSGISQTQKGKYCMISLFFFPHSLMDIGNTALTYACAGGFVDIVKVLLNEGANIEDHNENGHTPLMEAASAGHVEVARVLLDHGAGINTHSNEFKESALTLACYKGHLDMVRFLLEAGADQEHKTDEMHTALMEACMDGHVEVARLLLDSGAQVNMPADSFESPLTLAACGGHVELAALLIERGANLEEVNDEGYTPLMEAAREGHEEMVALLLAQGANINAQTEETQETALTLACCGGFSEVADFLIKAGADIELGCSTPLMEASQEGHLELVKYLLASGANVHATTATGDTALTYACENGHTDVADVLLQAGADLEHESEGGRTPLMKAARAGHLCTVQFLISKGANVNRATANNDHTVVSLACAGGHLAVVELLLAHGADPTHRLKDGSTMLIEAAKGGHTNVVSYLLDYPNNVLSVPTTDVSQLPPPSQDQSQVPRVPTHTLAMVVPPQEPDRTSQENSPALLGVQKGTSKQKSSSLQVADQDLLPSFHPYQPLECIVEETEGKLNELGQRISAIEKAQLKSLELIQGEPLNKDKIEELKKNREEQVQKKKKILKELQKVERQLQMKTQQQFTKEYLETKGQKDTVSLHQQCSHRGVFPEGEGDGSLPEDHFSELPQVDTILFKDNDVDDEQQSPPSAEQIDFVPVQPLSSPQCNFSSDLGSNGTNSLELQKVSGNQQIVGQPQIAITGHDQGLLVQEPDGLMVATPAQTLTDTLDDLIAAVSTRVPTGSNSSSQTTECLTPESCSQTTSNVASQSMPPVYPSVDIDAHTESNHDTALTLACAGGHEELVSVLIARDAKIEHRDKKGFTPLILAATAGHVGVVEILLDKGGDIEAQSERTKDTPLSLACSGGRQEVVDLLLARGANKEHRNVSDYTPLSLAASGGYVNIIKILLNAGAEINSRTGSKLGISPLMLAAMNGHVPAVKLLLDMGSDINAQIETNRNTALTLACFQGRAEVVSLLLDRKANVEHRAKTGLTPLMEAASGGYAEVGRVLLDKGADVNAPPVPSSRDTALTIAADKGHYKFCELLIHRGAHIDVRNKKGNTPLWLASNGGHFDVVQLLVQAGADVDAADNRKITPLMSAFRKGHVKVVQYLVKEVNQFPSDIECMRYIATITDKELLKKCHQCVETIVKAKDQQAAEANKNASILLKELDLEKSREESRKQALAAKREKRKEKRKKKKEEQKRKQEEDEENKPKENSELPEDEDEEENDEDVEQEVPIEPPSATTTTTIGISATSATFTNVFGKKRANVVTTPSTNRKNKKNKTKETPPTAHLILPEQHMSLAQQKADKNKINGEPRGGGAGGNSDSDNLDSTDCNSESSSGGKSQELNFVMDVNSSKYPSLLLHSQEEKTSTATSKTQTRLEGEVTPNSLSTSYKTVSLPLSSPNIKLNLTSPKRGQKREEGWKEVVRRSKKLSVPASVVSRIMGRGGCNITAIQDVTGAHIDVDKQKDKNGERMITIRGGTESTRYAVQLINALIQDPAKELEDLIPKNHIRTPASTKSIHANFSSGVGTTAASSKNAFPLGAPTLVTSQATTLSTFQPANKLNKNVPTNVRSSFPVSLPLAYPHPHFALLAAQTMQQIRHPRLPMAQFGGTFSPSPNTWGPFPVRPVNPGNTNSSPKHNNTSRLPNQNGTVLPSESAGLATASCPITVSSVVAASQQLCVTNTRTPSSVRKQLFACVPKTSPPATVISSVTSTCSSLPSVSSAPITSGQAPTTFLPASTSQAQLSSQKMESFSAVPPTKEKVSTQDQPMANLCTPSSTANSCSSSASNTPGAPETHPSSSPTPTSSNTQEEAQPSSVSDLSPMSMPFASNSEPAPLTLTSPRMVAADNQDTSNLPQLAVPAPRVSHRMQPRGSFYSMVPNATIHQDPQSIFVTNPVTLTPPQGPPAAVQLSSAVNIMNGSQMHINPANKSLPPTFGPATLFNHFSSLFDSSQVPANQGWGDGPLSSRVATDASFTVQSAFLGNSVLGHLENMHPDNSKAPGFRPPSQRVSTSPVGLPSIDPSGSSPSSSSAPLASFSGIPGTRVFLQGPAPVGTPSFNRQHFSPHPWTSASNSSTSAPPTLGQPKGVSASQDRKIPPPIGTERLARIRQGGSVAQAPAGTSFVAPVGHSGIWSFGVNAVSEGLSGWSQSVMGNHPMHQQLSDPSTFSQHQPMERDDSGMVAPSNIFHQPMASGFVDFSKGLPISMYGGTIIPSHPQLADVPGGPLFNGLHNPDPAWNPMIKVIQNSTECTDAQQASLLPSVPALKGEIPSPQLTRPKKRIGRPMVASPNQRHQDHLRPKVPAGVQELTHCPDTPLLPPSDSRGHNSSNSPSLQAGGAEGAGDRGRDTR

SEQ ID NO: 31851 - protein, 1319 aa, Artificial Sequence
  Synthetic polypeptide
CGMNIMEYYSDLKKEEILPFATTWMDLKDIMLSGISQTQKGKYCMISLFFFPHSLMDIGNTALTYACAGGFVDIVKVLLNEGANIEDHNENGHTPLMEAASAGHVEVARVLLDHGAGINTHSNEFKESALTLACYKGHLDMVRFLLEAGADQEHKTDEMHTALMEACMDGHVEVARLLLDSGAQVNMPADSFESPLTLAACGGHVELAALLIERGANLEEVNDEGYTPLMEAAREGHEEMVALLLAQGANINAQTEETQETALTLACCGGFSEVADFLIKAGADIELGCSTPLMEASQEGHLELVKYLLASGANVHATTATGDTALTYACENGHTDVADVLLQAGADLDKQEDMKTILEGIDPAKHQEHESEGGRTPLMKAARAGHLCTVQFLISKGANVNRATANNDHTVVSLACAGGHLAVVELLLAHGADPTHRLKDGSTMLIEAAKGGHTNVVSYLLDYPNNVLSVPTTDVSQLPPPSQDQSQVPRVPTHTLAMVVPPQEPDRTSQENSPALLGVQKGTSKQKSSSLQVADQDLLPSFHPYQPLECIVEETEGKLNELGQRISAIEKAQLKSLELIQGEPLNKDKIEELKKNREEQVQKKKKILKELQKVERQLQMKTQQQFTKEYLETKGQKDTVSLHQQCSHRGVFPEGEGDGSLPEDHFSELPQVDTILFKDNDVDDEQQSPPSAEQIDFVPVQPLSSPQCNFSSDLGSNGTNSLELQKVSGNQQIVGQPQIAITGHDQGLLVQEPDGLMVATPAQTLTDTLDDLIAAVSTRVPTGSNSSSQTTECLTPESCSQTTSNVASQSMPPVYPSVDIDAHTESNHDTALTLACAGGHEELVSVLIARDAKIEHRDKKGFTPLILAATAGHVGVVEILLDKGGDIEAQSERTKDTPLSLACSGGRQEVVDLLLARGANKEHRNVSDYTPLSLAASGGYVNIIKILLNAGAEINSRTGSKLGISPLMLAAMNGHVPAVKLLLDMGSDINAQIETNRNTALTLACFQGRAEVVSLLLDRKANVEHRAKTGLTPLMEAASGGYAEVGRVLLDKGADVNAPPVPSSRDTALTIAADKGHYKFCELLIHRGAHIDVRNKKGNTPLWLASNGGHFDVVQLLVQAGADVDAADNRKITPLMSAFRKGHVKVVQYLVKEVNQFPSDIECMRYIATITDKELLKKCHQCVETIVKAKDQQAAEANKNASILLKELDLEKSREESRKQALAAKREKRKEKRKKKKEEQKRKQEEDEENKPKENSELPEDEDEEENDEDVEQEVPIEPPSATTTTTIGISATSATFTNVFGKKRANVVTTPSTNRKNK

SEQ ID NO: 31852 - protein, 381 aa, Artificial Sequence
  Synthetic polypeptide
CGMNIMEYYSDLKKEEILPFATTWMDLKDIMLSGISQTQKGKYCMISLFFFPHSLMDIGNTALTYACAGGFVDIVKVLLNEGANIEDHNENGHTPLMEAASAGHVEVARVLLDHGAGINTHSNEFKESALTLACYKGHLDMVRFLLEAGADQEHKTDEMHTALMEACMDGHVEVARLLLDSGAQVNMPADSFESPLTLAACGGHVELAALLIERGANLEEVNDEGYTPLMEAAREGHEEMVALLLAQGANINAQTEETQETALTLACCGGFSEVADFLIKAGADIELGCSTPLMEASQEGHLELVKYLLASGANVHATTATGDTALTYACENGHTDVADVLLQAGADLDKQEDMKTILEGIDPAKHQVRVAFDACKLLRKE

SEQ ID NO: 31853 - protein, 136 aa, Artificial Sequence
  Synthetic polypeptide
CGMNIMEYYSDLKKEEILPFATTWMDLKDIMLSGISQTQKGKYCMISLFFFPHSLMDIGNTALTYACAGGFVDIVKVLLNEGANIEDHNENGHTPLMEAASAGHVEVARVLLDHGAGINTHSNEFKESALTLACYK

SEQ ID NO: 31854 - protein, 75 aa, Artificial Sequence
  Synthetic polypeptide
WEVISSKYQDKITIQNSVLKYHSREGKNKHIFKSTKNKRITIIRPLTKELLKDIYISKKKSESWRKAWDTRNYGT

SEQ ID NO: 31855 - protein, 1970 aa, Artificial Sequence
  Synthetic polypeptide
KIYTSVRRKVSPGGRRGIQETTEHESEGGRTPLMKAARAGHLCTVQFLISKGANVNRATANNDHTVVSLACAGGHLAVVELLLAHGADPTHRLKDGSTMLIEAAKGGHTNVVSYLLDYPNNVLSVPTTDVSQLPPPSQDQSQVPRVPTHTLAMVVPPQEPDRTSQENSPALLGVQKGTSKQKSSSLQVADQDLLPSFHPYQPLECIVEETEGKLNELGQRISAIEKAQLKSLELIQGEPLNKDKIEELKKNREEQVQKKKKILKELQKVERQLQMKTQQQFTKEYLETKGQKDTVSLHQQCSHRGVFPEGEGDGSLPEDHFSELPQVDTILFKDNDVDDEQQSPPSAEQIDFVPVQPLSSPQCNFSSDLGSNGTNSLELQKVSGNQQIVGQPQIAITGHDQGLLVQEPDGLMVATPAQTLTDTLDDLIAAVSTRVPTGSNSSSQTTECLTPESCSQTTSNVASQSMPPVYPSVDIDAHTESNHDTALTLACAGGHEELVSVLIARDAKIEHRDKKGFTPLILAATAGHVGVVEILLDKGGDIEAQSERTKDTPLSLACSGGRQEVVDLLLARGANKEHRNVSDYTPLSLAASGGYVNIIKILLNAGAEINSRTGSKLGISPLMLAAMNGHVPAVKLLLDMGSDINAQIETNRNTALTLACFQGRAEVVSLLLDRKANVEHRAKTGLTPLMEAASGGYAEVGRVLLDKGADVNAPPVPSSRDTALTIAADKGHYKFCELLIHRGAHIDVRNKKGNTPLWLASNGGHFDVVQLLVQAGADVDAADNRKITPLMSAFRKGHVKVVQYLVKEVNQFPSDIECMRYIATITDKELLKKCHQCVETIVKAKDQQAAEANKNASILLKELDLEKSREESRKQALAAKREKRKEKRKKKKEEQKRKQEEDEENKPKENSELPEDEDEEENDEDVEQEVPIEPPSATTTTTIGISATSATFTNVFGKKRANVVTTPSTNRKNKKNKTKETPPTAHLILPEQHMSLAQQKADKNKINGEPRGGGAGGNSDSDNLDSTDCNSESSSGGKSQELNFVMDVNSSKYPSLLLHSQEEKTSTATSKTQTRLEGEVTPNSLSTSYKTVSLPLSSPNIKLNLTSPKRGQKREEGWKEVVRRSKKLSVPASVVSRIMGRGGCNITAIQDVTGAHIDVDKQKDKNGERMITIRGGTESTRYAVQLINALIQDPAKELEDLIPKNHIRTPASTKSIHANFSSGVGTTAASSKNAFPLGAPTLVTSQATTLSTFQPANKLNKNVPTNVRSSFPVSLPLAYPHPHFALLAAQTMQQIRHPRLPMAQFGGTFSPSPNTWGPFPVRPVNPGNTNSSPKHNNTSRLPNQNGTVLPSESAGLATASCPITVSSVVAASQQLCVTNTRTPSSVRKQLFACVPKTSPPATVISSVTSTCSSLPSVSSAPITSGQAPTTFLPASTSQAQLSSQKMESFSAVPPTKEKVSTQDQPMANLCTPSSTANSCSSSASNTPGAPETHPSSSPTPTSSNTQEEAQPSSVSDLSPMSMPFASNSEPAPLTLTSPRMVAADNQDTSNLPQLAVPAPRVSHRMQPRGSFYSMVPNATIHQDPQSIFVTNPVTLTPPQGPPAAVQLSSAVNIMNGSQMHINPANKSLPPTFGPATLFNHFSSLFDSSQVPANQGWGDGPLSSRVATDASFTVQSAFLGNSVLGHLENMHPDNSKAPGFRPPSQRVSTSPVGLPSIDPSGSSPSSSSAPLASFSGIPGTRVFLQGPAPVGTPSFNRQHFSPHPWTSASNSSTSAPPTLGQPKGVSASQDRKIPPPIGTERLARIRQGGSVAQAPAGTSFVAPVGHSGIWSFGVNAVSEGLSGWSQSVMGNHPMHQQLSDPSTFSQHQPMERDDSGMVAPSNIFHQPMASGFVDFSKGLPISMYGGTIIPSHPQLADVPGGPLFNGLHNPDPAWNPMIKVIQNSTECTDAQQIWPGTWAPHIGNMHLKYVN

SEQ ID NO: 31856 - protein, 22 aa, Artificial Sequence
  Synthetic polypeptide
VLEEGVGYKKLRNMNLKVEEHL

SEQ ID NO: 31857 - protein, 2045 aa, Artificial Sequence
  Synthetic polypeptide
KIYTSVRRKVSPGGRRGIQETTEHESEGGRTPLMKAARAGHLCTVQFLISKGANVNRATANNDHTVVSLACAGGHLAVVELLLAHGADPTHRLKDGSTMLIEAAKGGHTNVVSYLLDYPNNVLSVPTTDVSQLPPPSQDQSQVPRVPTHTLAMVVPPQEPDRTSQENSPALLGVQKGTSKQKSSSLQVADQDLLPSFHPYQPLECIVEETEGKLNELGQRISAIEKAQLKSLELIQGEPLNKDKIEELKKNREEQVQKKKKILKELQKVERQLQMKTQQQFTKEYLETKGQKDTVSLHQQCSHRGVFPEGEGDGSLPEDHFSELPQVDTILFKDNDVDDEQQSPPSAEQIDFVPVQPLSSPQCNFSSDLGSNGTNSLELQKVSGNQQIVGQPQIAITGHDQGLLVQEPDGLMVATPAQTLTDTLDDLIAAVSTRVPTGSNSSSQTTECLTPESCSQTTSNVASQSMPPVYPSVDIDAHTESNHDTALTLACAGGHEELVSVLIARDAKIEHRDKKGFTPLILAATAGHVGVVEILLDKGGDIEAQSERTKDTPLSLACSGGRQEVVDLLLARGANKEHRNVSDYTPLSLAASGGYVNIIKILLNAGAEINSRTGSKLGISPLMLAAMNGHVPAVKLLLDMGSDINAQIETNRNTALTLACFQGRAEVVSLLLDRKANVEHRAKTGLTPLMEAASGGYAEVGRVLLDKGADVNAPPVPSSRDTALTIAADKGHYKFCELLIHRGAHIDVRNKKGNTPLWLASNGGHFDVVQLLVQAGADVDAADNRKITPLMSAFRKGHVKVVQYLVKEVNQFPSDIECMRYIATITDKELLKKCHQCVETIVKAKDQQAAEANKNASILLKELDLEKSREESRKQALAAKREKRKEKRKKKKEEQKRKQEEDEENKPKENSELPEDEDEEENDEDVEQEVPIEPPSATTTTTIGISATSATFTNVFGKKRANVVTTPSTNRKNKKNKTKETPPTAHLILPEQHMSLAQQKADKNKINGEPRGGGAGGNSDSDNLDSTDCNSESSSGGKSQELNFVMDVNSSKYPSLLLHSQEEKTSTATSKTQTRLEGEVTPNSLSTSYKTVSLPLSSPNIKLNLTSPKRGQKREEGWKEVVRRSKKLSVPASVVSRIMGRGGCNITAIQDVTGAHIDVDKQKDKNGERMITIRGGTESTRYAVQLINALIQDPAKELEDLIPKNHIRTPASTKSIHANFSSGVGTTAASSKNAFPLGAPTLVTSQATTLSTFQPANKLNKNVPTNVRSSFPVSLPLAYPHPHFALLAAQTMQQIRHPRLPMAQFGGTFSPSPNTWGPFPVRPVNPGNTNSSPKHNNTSRLPNQNGTVLPSESAGLATASCPITVSSVVAASQQLCVTNTRTPSSVRKQLFACVPKTSPPATVISSVTSTCSSLPSVSSAPITSGQAPTTFLPASTSQAQLSSQKMESFSAVPPTKEKVSTQDQPMANLCTPSSTANSCSSSASNTPGAPETHPSSSPTPTSSNTQEEAQPSSVSDLSPMSMPFASNSEPAPLTLTSPRMVAADNQDTSNLPQLAVPAPRVSHRMQPRGSFYSMVPNATIHQDPQSIFVTNPVTLTPPQGPPAAVQLSSAVNIMNGSQMHINPANKSLPPTFGPATLFNHFSSLFDSSQVPANQGWGDGPLSSRVATDASFTVQSAFLGNSVLGHLENMHPDNSKAPGFRPPSQRVSTSPVGLPSIDPSGSSPSSSSAPLASFSGIPGTRVFLQGPAPVGTPSFNRQHFSPHPWTSASNSSTSAPPTLGQPKGVSASQDRKIPPPIGTERLARIRQGGSVAQAPAGTSFVAPVGHSGIWSFGVNAVSEGLSGWSQSVMGNHPMHQQLSDPSTFSQHQPMERDDSGMVAPSNIFHQPMASGFVDFSKGLPISMYGGTIIPSHPQLADVPGGPLFNGLHNPDPAWNPMIKVIQNSTECTDAQQASLLPSVPALKGEIPSPQLTRPKKRIGRPMVASPNQRHQDHLRPKVPAGVQELTHCPDTPLLPPSDSRGHNSSNSPSLQAGGAEGAGDRGRDTR

SEQ ID NO: 31858 - protein, 974 aa, Artificial Sequence
  Synthetic polypeptide
KIYTSVRRKVSPGGRRGIQETTEHESEGGRTPLMKAARAGHLCTVQFLISKGANVNRATANNDHTVVSLACAGGHLAVVELLLAHGADPTHRLKDGSTMLIEAAKGGHTNVVSYLLDYPNNVLSVPTTDVSQLPPPSQDQSQVPRVPTHTLAMVVPPQEPDRTSQENSPALLGVQKGTSKQKSSSLQVADQDLLPSFHPYQPLECIVEETEGKLNELGQRISAIEKAQLKSLELIQGEPLNKDKIEELKKNREEQVQKKKKILKELQKVERQLQMKTQQQFTKEYLETKGQKDTVSLHQQCSHRGVFPEGEGDGSLPEDHFSELPQVDTILFKDNDVDDEQQSPPSAEQIDFVPVQPLSSPQCNFSSDLGSNGTNSLELQKVSGNQQIVGQPQIAITGHDQGLLVQEPDGLMVATPAQTLTDTLDDLIAAVSTRVPTGSNSSSQTTECLTPESCSQTTSNVASQSMPPVYPSVDIDAHTESNHDTALTLACAGGHEELVSVLIARDAKIEHRDKKGFTPLILAATAGHVGVVEILLDKGGDIEAQSERTKDTPLSLACSGGRQEVVDLLLARGANKEHRNVSDYTPLSLAASGGYVNIIKILLNAGAEINSRTGSKLGISPLMLAAMNGHVPAVKLLLDMGSDINAQIETNRNTALTLACFQGRAEVVSLLLDRKANVEHRAKTGLTPLMEAASGGYAEVGRVLLDKGADVNAPPVPSSRDTALTIAADKGHYKFCELLIHRGAHIDVRNKKGNTPLWLASNGGHFDVVQLLVQAGADVDAADNRKITPLMSAFRKGHVKVVQYLVKEVNQFPSDIECMRYIATITDKELLKKCHQCVETIVKAKDQQAAEANKNASILLKELDLEKSREESRKQALAAKREKRKEKRKKKKEEQKRKQEEDEENKPKENSELPEDEDEEENDEDVEQEVPIEPPSATTTTTIGISATSATFTNVFGKKRANVVTTPSTNRKNK

SEQ ID NO: 31859 - protein, 620 aa, Artificial Sequence
  Synthetic polypeptide
KIYTSVRRKVSPGGRRGIQETTEHESEGGRTPLMKAARAGHLCTVQFLISKGANVNRATANNDHTVVSLACAGGHLAVVELLLAHGADPTHRLKDGSTMLIEAAKGGHTNVVSYLLDYPNNVLSVPTTDVSQLPPPSQDQSQEPDRTSQENSPALLGVQKAVSTRVPTGSNSSSQTTECLTPESCSQTTSNVASQSMPPVYPSVDIDAHTESNHDTALTLACAGGHEELVSVLIARDAKIEHRDKKGFTPLILAATAGHVGVVEILLDKGGDIEAQSERTKDTPLSLACSGGRQEVVDLLLARGANKEHRNVSDYTPLSLAASGGYVNIIKILLNAGAEINSRTGSKLGISPLMLAAMNGHVPAVKLLLDMGSDINAQIETNRNTALTLACFQGRAEVVSLLLDRKANVEHRAKTGLTPLMEAASGGYAEVGRVLLDKGADVNAPPVPSSRDTALTIAADKGHYKFCELLIHRGAHIDVRNKKGNTPLWLASNGGHFDVVQLLVQAGADVDAADNRKITPLMSAFRKGHVKVVQYLVKEVNQFPSDIECMRYIATITDKELLKKCHQCVETIVKAKDQQAAEANKNASILLKELDLEKSREESRKQALAAKREKRKEKRK

SEQ ID NO: 31860 - protein, 630 aa, Artificial Sequence
  Synthetic polypeptide
KIYTSVRRKVSPGGRRGIQETTEHESEGGRTPLMKAARAGHLCTVQFLISKGANVNRATANNDHTVVSLACAGGHLAVVELLLAHGADPTHRLKDGSTMLIEAAKGGHTNVVSYLLDYPNNVLSVPTTDVSQLPPPSQDQSQVPRVPTHTLAMVVPPQEPDRTSQENSPALLGVQKAVSTRVPTGSNSSSQTTECLTPESCSQTTSNVASQSMPPVYPSVDIDAHTESNHDTALTLACAGGHEELVSVLIARDAKIEHRDKKGFTPLILAATAGHVGVVEILLDKGGDIEAQSERTKDTPLSLACSGGRQEVVDLLLARGANKEHRNVSDYTPLSLAASGGYVNIIKILLNAGAEINSRTGSKLGISPLMLAAMNGHVPAVKLLLDMGSDINAQIETNRNTALTLACFQGRAEVVSLLLDRKANVEHRAKTGLTPLMEAASGGYAEVGRVLLDKGADVNAPPVPSSRDTALTIAADKGHYKFCELLIHRGAHIDVRNKKGNTPLWLASNGGHFDVVQLLVQAGADVDAADNRKITPLMSAFRKGHVKVVQYLVKEVNQFPSDIECMRYIATITDKELLKKCHQCVETIVKAKDQQAAEANKNASILLKELDLEKSREESRKQALAAKREK

SEQ ID NO: 31861 - protein, 1929 aa, Artificial Sequence
  Synthetic polypeptide
VKEARRKRVHCANVNRATANNDHTVVSLACAGGHLAVVELLLAHGADPTHRLKDGSTMLIEAAKGGHTNVVSYLLDYPNNVLSVPTTDVSQLPPPSQDQSQVPRVPTHTLAMVVPPQEPDRTSQENSPALLGVQKGTSKQKSSSLQVADQDLLPSFHPYQPLECIVEETEGKLNELGQRISAIEKAQLKSLELIQGEPLNKDKIEELKKNREEQVQKKKKILKELQKVERQLQMKTQQQFTKEYLETKGQKDTVSLHQQCSHRGVFPEGEGDGSLPEDHFSELPQVDTILFKDNDVDDEQQSPPSAEQIDFVPVQPLSSPQCNFSSDLGSNGTNSLELQKVSGNQQIVGQPQIAITGHDQGLLVQEPDGLMVATPAQTLTDTLDDLIAAVSTRVPTGSNSSSQTTECLTPESCSQTTSNVASQSMPPVYPSVDIDAHTESNHDTALTLACAGGHEELVSVLIARDAKIEHRDKKGFTPLILAATAGHVGVVEILLDKGGDIEAQSERTKDTPLSLACSGGRQEVVDLLLARGANKEHRNVSDYTPLSLAASGGYVNIIKILLNAGAEINSRTGSKLGISPLMLAAMNGHVPAVKLLLDMGSDINAQIETNRNTALTLACFQGRAEVVSLLLDRKANVEHRAKTGLTPLMEAASGGYAEVGRVLLDKGADVNAPPVPSSRDTALTIAADKGHYKFCELLIHRGAHIDVRNKKGNTPLWLASNGGHFDVVQLLVQAGADVDAADNRKITPLMSAFRKGHVKVVQYLVKEVNQFPSDIECMRYIATITDKELLKKCHQCVETIVKAKDQQAAEANKNASILLKELDLEKSREESRKQALAAKREKRKEKRKKKKEEQKRKQEEDEENKPKENSELPEDEDEEENDEDVEQEVPIEPPSATTTTTIGISATSATFTNVFGKKRANVVTTPSTNRKNKKNKTKETPPTAHLILPEQHMSLAQQKADKNKINGEPRGGGAGGNSDSDNLDSTDCNSESSSGGKSQELNFVMDVNSSKYPSLLLHSQEEKTSTATSKTQTRLEGEVTPNSLSTSYKTVSLPLSSPNIKLNLTSPKRGQKREEGWKEVVRRSKKLSVPASVVSRIMGRGGCNITAIQDVTGAHIDVDKQKDKNGERMITIRGGTESTRYAVQLINALIQDPAKELEDLIPKNHIRTPASTKSIHANFSSGVGTTAASSKNAFPLGAPTLVTSQATTLSTFQPANKLNKNVPTNVRSSFPVSLPLAYPHPHFALLAAQTMQQIRHPRLPMAQFGGTFSPSPNTWGPFPVRPVNPGNTNSSPKHNNTSRLPNQNGTVLPSESAGLATASCPITVSSVVAASQQLCVTNTRTPSSVRKQLFACVPKTSPPATVISSVTSTCSSLPSVSSAPITSGQAPTTFLPASTSQAQLSSQKMESFSAVPPTKEKVSTQDQPMANLCTPSSTANSCSSSASNTPGAPETHPSSSPTPTSSNTQEEAQPSSVSDLSPMSMPFASNSEPAPLTLTSPRMVAADNQDTSNLPQLAVPAPRVSHRMQPRGSFYSMVPNATIHQDPQSIFVTNPVTLTPPQGPPAAVQLSSAVNIMNGSQMHINPANKSLPPTFGPATLFNHFSSLFDSSQVPANQGWGDGPLSSRVATDASFTVQSAFLGNSVLGHLENMHPDNSKAPGFRPPSQRVSTSPVGLPSIDPSGSSPSSSSAPLASFSGIPGTRVFLQGPAPVGTPSFNRQHFSPHPWTSASNSSTSAPPTLGQPKGVSASQDRKIPPPIGTERLARIRQGGSVAQAPAGTSFVAPVGHSGIWSFGVNAVSEGLSGWSQSVMGNHPMHQQLSDPSTFSQHQPMERDDSGMVAPSNIFHQPMASGFVDFSKGLPISMYGGTIIPSHPQLADVPGGPLFNGLHNPDPAWNPMIKVIQNSTECTDAQQIWPGTWAPHIGNMHLKYVN

SEQ ID NO: 31862 - protein, 23 aa, Artificial Sequence
  Synthetic polypeptide
KKPDAKEYIVPMLTGLQPIMIIQ

SEQ ID NO: 31863 - protein, 33 aa, Artificial Sequence
  Synthetic polypeptide
MNELQLHATLWMNLTNIILSERSQTQKSTLCQC

SEQ ID NO: 31864 - protein, 2004 aa, Artificial Sequence
  Synthetic polypeptide
VKEARRKRVHCANVNRATANNDHTVVSLACAGGHLAVVELLLAHGADPTHRLKDGSTMLIEAAKGGHTNVVSYLLDYPNNVLSVPTTDVSQLPPPSQDQSQVPRVPTHTLAMVVPPQEPDRTSQENSPALLGVQKGTSKQKSSSLQVADQDLLPSFHPYQPLECIVEETEGKLNELGQRISAIEKAQLKSLELIQGEPLNKDKIEELKKNREEQVQKKKKILKELQKVERQLQMKTQQQFTKEYLETKGQKDTVSLHQQCSHRGVFPEGEGDGSLPEDHFSELPQVDTILFKDNDVDDEQQSPPSAEQIDFVPVQPLSSPQCNFSSDLGSNGTNSLELQKVSGNQQIVGQPQIAITGHDQGLLVQEPDGLMVATPAQTLTDTLDDLIAAVSTRVPTGSNSSSQTTECLTPESCSQTTSNVASQSMPPVYPSVDIDAHTESNHDTALTLACAGGHEELVSVLIARDAKIEHRDKKGFTPLILAATAGHVGVVEILLDKGGDIEAQSERTKDTPLSLACSGGRQEVVDLLLARGANKEHRNVSDYTPLSLAASGGYVNIIKILLNAGAEINSRTGSKLGISPLMLAAMNGHVPAVKLLLDMGSDINAQIETNRNTALTLACFQGRAEVVSLLLDRKANVEHRAKTGLTPLMEAASGGYAEVGRVLLDKGADVNAPPVPSSRDTALTIAADKGHYKFCELLIHRGAHIDVRNKKGNTPLWLASNGGHFDVVQLLVQAGADVDAADNRKITPLMSAFRKGHVKVVQYLVKEVNQFPSDIECMRYIATITDKELLKKCHQCVETIVKAKDQQAAEANKNASILLKELDLEKSREESRKQALAAKREKRKEKRKKKKEEQKRKQEEDEENKPKENSELPEDEDEEENDEDVEQEVPIEPPSATTTTTIGISATSATFTNVFGKKRANVVTTPSTNRKNKKNKTKETPPTAHLILPEQHMSLAQQKADKNKINGEPRGGGAGGNSDSDNLDSTDCNSESSSGGKSQELNFVMDVNSSKYPSLLLHSQEEKTSTATSKTQTRLEGEVTPNSLSTSYKTVSLPLSSPNIKLNLTSPKRGQKREEGWKEVVRRSKKLSVPASVVSRIMGRGGCNITAIQDVTGAHIDVDKQKDKNGERMITIRGGTESTRYAVQLINALIQDPAKELEDLIPKNHIRTPASTKSIHANFSSGVGTTAASSKNAFPLGAPTLVTSQATTLSTFQPANKLNKNVPTNVRSSFPVSLPLAYPHPHFALLAAQTMQQIRHPRLPMAQFGGTFSPSPNTWGPFPVRPVNPGNTNSSPKHNNTSRLPNQNGTVLPSESAGLATASCPITVSSVVAASQQLCVTNTRTPSSVRKQLFACVPKTSPPATVISSVTSTCSSLPSVSSAPITSGQAPTTFLPASTSQAQLSSQKMESFSAVPPTKEKVSTQDQPMANLCTPSSTANSCSSSASNTPGAPETHPSSSPTPTSSNTQEEAQPSSVSDLSPMSMPFASNSEPAPLTLTSPRMVAADNQDTSNLPQLAVPAPRVSHRMQPRGSFYSMVPNATIHQDPQSIFVTNPVTLTPPQGPPAAVQLSSAVNIMNGSQMHINPANKSLPPTFGPATLFNHFSSLFDSSQVPANQGWGDGPLSSRVATDASFTVQSAFLGNSVLGHLENMHPDNSKAPGFRPPSQRVSTSPVGLPSIDPSGSSPSSSSAPLASFSGIPGTRVFLQGPAPVGTPSFNRQHFSPHPWTSASNSSTSAPPTLGQPKGVSASQDRKIPPPIGTERLARIRQGGSVAQAPAGTSFVAPVGHSGIWSFGVNAVSEGLSGWSQSVMGNHPMHQQLSDPSTFSQHQPMERDDSGMVAPSNIFHQPMASGFVDFSKGLPISMYGGTIIPSHPQLADVPGGPLFNGLHNPDPAWNPMIKVIQNSTECTDAQQASLLPSVPALKGEIPSPQLTRPKKRIGRPMVASPNQRHQDHLRPKVPAGVQELTHCPDTPLLPPSDSRGHNSSNSPSLQAGGAEGAGDRGRDTR

SEQ ID NO: 31865 - protein, 933 aa, Artificial Sequence
  Synthetic polypeptide
VKEARRKRVHCANVNRATANNDHTVVSLACAGGHLAVVELLLAHGADPTHRLKDGSTMLIEAAKGGHTNVVSYLLDYPNNVLSVPTTDVSQLPPPSQDQSQVPRVPTHTLAMVVPPQEPDRTSQENSPALLGVQKGTSKQKSSSLQVADQDLLPSFHPYQPLECIVEETEGKLNELGQRISAIEKAQLKSLELIQGEPLNKDKIEELKKNREEQVQKKKKILKELQKVERQLQMKTQQQFTKEYLETKGQKDTVSLHQQCSHRGVFPEGEGDGSLPEDHFSELPQVDTILFKDNDVDDEQQSPPSAEQIDFVPVQPLSSPQCNFSSDLGSNGTNSLELQKVSGNQQIVGQPQIAITGHDQGLLVQEPDGLMVATPAQTLTDTLDDLIAAVSTRVPTGSNSSSQTTECLTPESCSQTTSNVASQSMPPVYPSVDIDAHTESNHDTALTLACAGGHEELVSVLIARDAKIEHRDKKGFTPLILAATAGHVGVVEILLDKGGDIEAQSERTKDTPLSLACSGGRQEVVDLLLARGANKEHRNVSDYTPLSLAASGGYVNIIKILLNAGAEINSRTGSKLGISPLMLAAMNGHVPAVKLLLDMGSDINAQIETNRNTALTLACFQGRAEVVSLLLDRKANVEHRAKTGLTPLMEAASGGYAEVGRVLLDKGADVNAPPVPSSRDTALTIAADKGHYKFCELLIHRGAHIDVRNKKGNTPLWLASNGGHFDVVQLLVQAGADVDAADNRKITPLMSAFRKGHVKVVQYLVKEVNQFPSDIECMRYIATITDKELLKKCHQCVETIVKAKDQQAAEANKNASILLKELDLEKSREESRKQALAAKREKRKEKRKKKKEEQKRKQEEDEENKPKENSELPEDEDEEENDEDVEQEVPIEPPSATTTTTIGISATSATFTNVFGKKRANVVTTPSTNRKNK

SEQ ID NO: 31866 - protein, 579 aa, Artificial Sequence
  Synthetic polypeptide
VKEARRKRVHCANVNRATANNDHTVVSLACAGGHLAVVELLLAHGADPTHRLKDGSTMLIEAAKGGHTNVVSYLLDYPNNVLSVPTTDVSQLPPPSQDQSQEPDRTSQENSPALLGVQKAVSTRVPTGSNSSSQTTECLTPESCSQTTSNVASQSMPPVYPSVDIDAHTESNHDTALTLACAGGHEELVSVLIARDAKIEHRDKKGFTPLILAATAGHVGVVEILLDKGGDIEAQSERTKDTPLSLACSGGRQEVVDLLLARGANKEHRNVSDYTPLSLAASGGYVNIIKILLNAGAEINSRTGSKLGISPLMLAAMNGHVPAVKLLLDMGSDINAQIETNRNTALTLACFQGRAEVVSLLLDRKANVEHRAKTGLTPLMEAASGGYAEVGRVLLDKGADVNAPPVPSSRDTALTIAADKGHYKFCELLIHRGAHIDVRNKKGNTPLWLASNGGHFDVVQLLVQAGADVDAADNRKITPLMSAFRKGHVKVVQYLVKEVNQFPSDIECMRYIATITDKELLKKCHQCVETIVKAKDQQAAEANKNASILLKELDLEKSREESRKQALAAKREKRKEKRK

SEQ ID NO: 31867 - protein, 589 aa, Artificial Sequence
  Synthetic polypeptide
VKEARRKRVHCANVNRATANNDHTVVSLACAGGHLAVVELLLAHGADPTHRLKDGSTMLIEAAKGGHTNVVSYLLDYPNNVLSVPTTDVSQLPPPSQDQSQVPRVPTHTLAMVVPPQEPDRTSQENSPALLGVQKAVSTRVPTGSNSSSQTTECLTPESCSQTTSNVASQSMPPVYPSVDIDAHTESNHDTALTLACAGGHEELVSVLIARDAKIEHRDKKGFTPLILAATAGHVGVVEILLDKGGDIEAQSERTKDTPLSLACSGGRQEVVDLLLARGANKEHRNVSDYTPLSLAASGGYVNIIKILLNAGAEINSRTGSKLGISPLMLAAMNGHVPAVKLLLDMGSDINAQIETNRNTALTLACFQGRAEVVSLLLDRKANVEHRAKTGLTPLMEAASGGYAEVGRVLLDKGADVNAPPVPSSRDTALTIAADKGHYKFCELLIHRGAHIDVRNKKGNTPLWLASNGGHFDVVQLLVQAGADVDAADNRKITPLMSAFRKGHVKVVQYLVKEVNQFPSDIECMRYIATITDKELLKKCHQCVETIVKAKDQQAAEANKNASILLKELDLEKSREESRKQALAAKREK

SEQ ID NO: 31868 - protein, 16 aa, Artificial Sequence
  Synthetic polypeptide
WKYEGEDPVNDRVTIH

SEQ ID NO: 31869 - protein, 261 aa, Artificial Sequence
  Synthetic polypeptide
MTGLPSIDPSGSSPSSSSAPLASFSGIPGTRVFLQGPAPVGTPSFNRQHFSPHPWTSASNSSTSAPPTLGQPKGVSASQDRKIPPPIGTERLARIRQGGSVAQAPAGTSFVAPVGHSGIWSFGVNAVSEGLSGWSQSVMGNHPMHQQLSDPSTFSQHQPMERDDSGMVAPSNIFHQPMASGFVDFSKGLPISMYGGTIIPSHPQLADVPGGPLFNGLHNPDPAWNPMIKVIQNSTECTDAQQIWPGTWAPHIGNMHLKYVN

SEQ ID NO: 31870 - protein, 136 aa, Artificial Sequence
  Synthetic polypeptide
QGYHPLTHQAAPHLPLLLLWQVFPAYQEQGFSCKGQLLLGLLVSTDNIFLPILGQAPQTHPLLPHQRWANQKESVPVKIERYLPQLEQRDWPEFGKEGLLHKPRRGPVLSLPLDTVESGHLVSMLCQKAYQVGRNL

SEQ ID NO: 31871 - protein, 336 aa, Artificial Sequence
  Synthetic polypeptide
MTGLPSIDPSGSSPSSSSAPLASFSGIPGTRVFLQGPAPVGTPSFNRQHFSPHPWTSASNSSTSAPPTLGQPKGVSASQDRKIPPPIGTERLARIRQGGSVAQAPAGTSFVAPVGHSGIWSFGVNAVSEGLSGWSQSVMGNHPMHQQLSDPSTFSQHQPMERDDSGMVAPSNIFHQPMASGFVDFSKGLPISMYGGTIIPSHPQLADVPGGPLFNGLHNPDPAWNPMIKVIQNSTECTDAQQASLLPSVPALKGEIPSPQLTRPKKRIGRPMVASPNQRHQDHLRPKVPAGVQELTHCPDTPLLPPSDSRGHNSSNSPSLQAGGAEGAGDRGRDTR

SEQ ID NO: 31872 - protein, 278 aa, Artificial Sequence
  Synthetic polypeptide
MTGLPSIDPSGSSPSSSSAPLASFSGIPGTRVFLQGPAPVGTPSFNRQHFSPHPWTSASNSCDSPIPSVSSGSSSPLSATSAPPTLGQPKGVSASQDRKIPPPIGTERLARIRQGGSVAQAPAGTSFVAPVGHSGIWSFGVNAVSEGLSGWSQSVMGNHPMHQQLSDPSTFSQHQPMERDDSGMVAPSNIFHQPMASGFVDFSKGLPISMYGGTIIPSHPQLADVPGGPLFNGLHNPDPAWNPMIKVIQNSTECTDAQQIWPGTWAPHIGNMHLKYVN

SEQ ID NO: 31873 - protein, 153 aa, Artificial Sequence
  Synthetic polypeptide
QGYHPLTHQAAPHLPLLLLWQVFPAYQEQGFSCKGQLLLGLLVSTDNIFLPILGQAPQTHVTLLFHLFLRDHLHLFQPLLPHQRWANQKESVPVKIERYLPQLEQRDWPEFGKEGLLHKPRRGPVLSLPLDTVESGHLVSMLCQKAYQVGRNL

SEQ ID NO: 31874 - protein, 269 aa, Artificial Sequence
  Synthetic polypeptide
MTGLPSIDPSGSSPSSSSAPLASFSGIPGTRVFLQGPAPVGTPSFNRQHFSPHPWTSASNSCDSPIPSVSSGSSSPLSATSAPPTLGQPKGVSASQDRKIPPPIGTERLARIRQGGSVAQAPAGTSFVAPVGHSGIWSFGVNAVSEGLSGWSQSVMGNHPMHQQLSDPSTFSQHQPMERDDSGMVAPSNIFHQPMGLPISMYGGTIIPSHPQLADVPGGPLFNGLHNPDPAWNPMIKVIQNSTECTDAQQIWPGTWAPHIGNMHLKYVN

SEQ ID NO: 31875 - protein, 252 aa, Artificial Sequence
  Synthetic polypeptide
MTGLPSIDPSGSSPSSSSAPLASFSGIPGTRVFLQGPAPVGTPSFNRQHFSPHPWTSASNSSTSAPPTLGQPKGVSASQDRKIPPPIGTERLARIRQGGSVAQAPAGTSFVAPVGHSGIWSFGVNAVSEGLSGWSQSVMGNHPMHQQLSDPSTFSQHQPMERDDSGMVAPSNIFHQPMGLPISMYGGTIIPSHPQLADVPGGPLFNGLHNPDPAWNPMIKVIQNSTECTDAQQIWPGTWAPHIGNMHLKYVN

SEQ ID NO: 31876 - protein, 344 aa, Artificial Sequence
  Synthetic polypeptide
MTGLPSIDPSGSSPSSSSAPLASFSGIPGTRVFLQGPAPVGTPSFNRQHFSPHPWTSASNSCDSPIPSVSSGSSSPLSATSAPPTLGQPKGVSASQDRKIPPPIGTERLARIRQGGSVAQAPAGTSFVAPVGHSGIWSFGVNAVSEGLSGWSQSVMGNHPMHQQLSDPSTFSQHQPMERDDSGMVAPSNIFHQPMGLPISMYGGTIIPSHPQLADVPGGPLFNGLHNPDPAWNPMIKVIQNSTECTDAQQASLLPSVPALKGEIPSPQLTRPKKRIGRPMVASPNQRHQDHLRPKVPAGVQELTHCPDTPLLPPSDSRGHNSSNSPSLQAGGAEGAGDRGRDTR

SEQ ID NO: 31877 - protein, 468 aa, Artificial Sequence
  Synthetic polypeptide
DIICLFRCVNICTEGTKALGTRDYSPRQMAVREKVFDVIIRCFKRHGAEVIDTPVFELKETLMGKYGEDSKLIYDLKDQGGELLSLRYDLTVPFARYLAMNKLTNIKRYHIAKVYRRDNPAMTRGRYREFYQCDFDIAGNFDPMIPDAECLKIMCEILSSLQIGDFLVKVNDRRILDGMFAICGVSDSKFRTICSSVDKLDKVSWEEVKNEMVGEKGLAPEVADRIGDYVQQHGGVSLVEQLLQDPKLSQNKQALEGLGDLKLLFEYLTLFGIDDKISFDLSLARGLDYYTGVIYEAVLLQTPAQAGEEPLGVGSVAAGGRYDGLVGMFDPKGRKVPCVGLSIGVERIFSIVEQRLEALEEKIRTTETQVLVASAQKKLLEERLKLVSELWDAGIKAELLYKKNPKLLNQLQYCEEAGIPLVAIIGEQELKDGVIKLRSVTSREEVDVRREDLVEEIKRRTGQPLCIC

SEQ ID NO: 31878 - protein, 43 aa, Artificial Sequence
  Synthetic polypeptide
FYNNSKTLSAFFVVLTFALKAQKRWAQETIVPGRWQFARRCLT

SEQ ID NO: 31879 - protein, 10 aa, Artificial Sequence
  Synthetic polypeptide
RHKSAGHKRL

SEQ ID NO: 31880 - protein, 448 aa, Artificial Sequence
  Synthetic polypeptide
DIICLFRCVNICTEGTKALGTRDYSPRQMAVREKVFDVIIRCFKRHGAEVIDTPVFELKETLMGKYGEDSKLIYDLKDQGGELLSLRYDLTVPFARYLAMNKLTNIKRYHIAKDFDIAGNFDPMIPDAECLKIMCEILSSLQIGDFLVKVNDRRILDGMFAICGVSDSKFRTICSSVDKLDKVSWEEVKNEMVGEKGLAPEVADRIGDYVQQHGGVSLVEQLLQDPKLSQNKQALEGLGDLKLLFEYLTLFGIDDKISFDLSLARGLDYYTGVIYEAVLLQTPAQAGEEPLGVGSVAAGGRYDGLVGMFDPKGRKVPCVGLSIGVERIFSIVEQRLEALEEKIRTTETQVLVASAQKKLLEERLKLVSELWDAGIKAELLYKKNPKLLNQLQYCEEAGIPLVAIIGEQELKDGVIKLRSVTSREEVDVRREDLVEEIKRRTGQPLCIC

SEQ ID NO: 31881 - protein, 394 aa, Artificial Sequence
  Synthetic polypeptide
DIICLFRCVNICTEGTKALGTRDYSPRQMAVREKVFDVIIRCFKRHGAEVIDTPVFELKDFDIAGNFDPMIPDAECLKIMCEILSSLQIGDFLVKVNDRRILDGMFAICGVSDSKFRTICSSVDKLDKVSWEEVKNEMVGEKGLAPEVADRIGDYVQQHGGVSLVEQLLQDPKLSQNKQALEGLGDLKLLFEYLTLFGIDDKISFDLSLARGLDYYTGVIYEAVLLQTPAQAGEEPLGVGSVAAGGRYDGLVGMFDPKGRKVPCVGLSIGVERIFSIVEQRLEALEEKIRTTETQVLVASAQKKLLEERLKLVSELWDAGIKAELLYKKNPKLLNQLQYCEEAGIPLVAIIGEQELKDGVIKLRSVTSREEVDVRREDLVEEIKRRTGQPLCIC

SEQ ID NO: 31882 - protein, 247 aa, Artificial Sequence
  Synthetic polypeptide
DIICLFRCVNICTEGTKALGTRDYSPRQMAVREKVFDVIIRCFKRHGAEVIDTPVFELKVNDRRILDGMFAICGVSDSKFRTICSSVDKLDKVSWEEVKNEMVGEKGLAPEVADRIGDYVQQHGGVSLVEQLLQDPKLSQNKQALEGLGDLKLLFEYLTLFGIDDKISFDLSLARGLDYYTGVIYEAVLLQTPAQAGEEPLGVGSVAAGGRYDGLVGMFDPKGRKVPCVGLSIGVERIFSIVEQRLE

SEQ ID NO: 31883 - protein, 46 aa, Artificial Sequence
  Synthetic polypeptide
LVTVSHHPQMGPSSCRKTRSGLPLILHYAKTEGREGSQAGSFGCEA

SEQ ID NO: 31884 - protein, 4609 aa, Artificial Sequence
  Synthetic polypeptide
FYITQRLKGEKEAKRALLDARHNYLFAIVASCLDLNKTEVEDAILEGNQIERIDQLFAVGGLRHLMFYYQDVEEAETGQLGSLGGVNLVSGKIKKPKVFVTEGNDVALTGVCVFFIRTDPSKAITPDNIHQEVSFNMLDAADGGLLNSVRRLLSDIFIPALRATSHGWGELEGLQDAANIRQEFLSSLEGFVNVLSGAQESLKEKVNLRKCDILELKTLKEPTDYLTLANNPETLGKIEDCMKVWIKQTEQVLAENNQLLKEADDVGPRAELEHWKKRLSKFNYLLEQLKSPDVKAVLAVLAAAKSKLLKTWREMDIRITDATNEAKDNVKYLYTLEKCCDPLYSSDPLSMMDAIPTLINAIKMIYSISHYYNTSEKITSLFVKVTNQIISACKAYITNNGTASIWNQPQDVVEEKILSAIKLKQEYQLCFHKTKQKLKQNPNAKQFDFSEMYIFGKFETFHRRLAKIIDIFTTLKTYSVLQDSTIEGLEDMATKYQGIVATIKKKEYNFLDQRKMDFDQDYEEFCKQTNDLHNELRKFMDVTFAKIQNTNQALRMLKKFERLNIPNLGIDDKYQLILENYGADIDMISKLYTKQKYDPPLARNQPPIAGKILWARQLFHRIQQPMQLFQQHPAVLSTAEAKPIIRSYNRMAKVLLEFEVLFHRAWLRQIEEIHVGLEASLLVKAPGTGELFVNFDPQILILFRETECMAQMGLEVSPLATSLFQKRDRYKRNFSNMKMMLAEYQRVKSKIPAAIEQLIVPHLAKVDEALQPGLAALTWTSLNIEAYLENTFAKIKDLELLLDRVNDLIEFRIDAILEEMSSTPLCQLPQEEPLTCEEFLQMTKDLCVNGAQILHFKSSLVEEAVNELVNMLLDVEVLSEEESEKISNENSVNYKNESSAKREEGNFDTLTSSINARANALLLTTVTRKKKETEMLGEEARELLSHFNHQNMDALLKVTRNTLEAIRKRIHSSHTINFRDSNSASNMKQNSLPIFRASVTLAIPNIVMAPALEDVQQTLNKAVECIISVPKGVRQWSSELLSKKKIQERKMAALQSNEDSDSDVEMGENELQDTLEIASVNLPIPVQTKNYYKNVSENKEIVKLVSVLSTIINSTKKEVITSMDCFKRYNHIWQKGKEEAIKTFITQSPLLSEFESQILYFQNLEQEINAEPEYVCVGSIALYTADLKFALTAETKAWMVVIGRHCNKKYRSEMENIFMLIEEFNKKLNRPIKDLDDIRIAMAALKEIREEQISIDFQVGPIEESYALLNRYGLLIAREEIDKVDTLHYAWEKLLARAGEVQNKLVSLQPSFKKELISAVEVFLQDCHQFYLDYDLNGPMASGLKPQEASDRLIMFQNQFDNIYRKYITYTGGEELFGLPATQYPQLLEIKKQLNLLQKIYTLYNSVIETVNSYYDILWSEVNIEKINNELLEFQNRCRKLPRALKDWQAFLDLKKIIDDFSECCPLLEYMASKAMMERHWERITTLTGHSLDVGNESFKLRNIMEAPLLKYKEEIEDICISAVKERDIEQKLKQVINEWDNKTFTFGSFKTRGELLLRGDSTSEIIANMEDSLMLLGSLLSNRYNMPFKAQIQKWVQYLSNSTDIIESWMTVQNLWIYLEAVFVGGDIAKQLPKEAKRFSNIDKSWVKIMTRAHEVPSVVQCCVGDETLGQLLPHLLDQLEICQKSLTGYLEKKRLCFPRFFFVSDPALLEILGQASDSHTIQAHLLNVFDNIKSVKFHEKIYDRILSISSQEGETIELDKPVMAEGNVEVWLNSLLEESQSSLHLVIRQAAANIQETGFQLTEFLSSFPAQVGLLGIQMIWTRDSEEALRNAKFDKKIMQKTNQAFLELLNTLIDVTTRDLSSTERVKYETLITIHVHQRDIFDDLCHMHIKSPMDFEWLKQCRFYFNEDSDKMMIHITDVAFIYQNEFLGCTDRLVITPLTDRCYITLAQALGMSMGGAPAGPAGTGKTETTKDMGRCLGKYVVVFNCSDQMDFRGLGRIFKGLAQSGSWGCFDEFNRIDLPVLSVAAQQISIILTCKKEHKKSFIFTDGDNVTMNPEFGLFLTMNPGYAGRQELPENLKINFRSVAMMVPDRQIIIRVKLASCGFIDNVVLARKFFTLYKLCEEQLSKQVHYDFGLRNILSVLRTLGAAKRANPMDTESTIVMRVLRDMNLSKLIDEDEPLFLSLIEDLFPNILLDKAGYPELEAAISRQVEEAGLINHPPWKLKVIQLFETQRVRHGMMTLGPSGAGKTTCIHTLMRAMTDCGKPHREMRMNPKAITAPQMFGRLDVATNDWTDGIFSTLWRKTLRAKKGEHIWIILDGPVDAIWIENLNSVLDDNKTLTLANGDRIPMAPNCKIIFEPHNIDNASPATVSRNGMVFMSSSILDWSPILEGFLKKRSPQEAEILRQLYTESFPDLYRFCIQNLEYKMEVLEAFVITQSINMLQGLIPLKEQGGEVSQAHLGRLFVFALLWSAGAALELDGRRRLELWLRSRPTGTLELPPPAGPGDTAFDYYVAPDGTWTHWNTRTQEYLYPSDTTPEYGSILVPNVDNVRTDFLIQTIAKQGKAVLLIGEQGTAKTVIIKGFMSKYDPECHMIKSLNFSSATTPLMFQRTIESYVDKRMGTTYGPPAGKKMTVFIDDVNMPIINEWGDQVTNEIVRQLMEQNGFYNLEKPGEFTSIVDIQFLAAMIHPGGGRNDIPQRLKRQFSIFNCTLPSEASVDKIFGVIGVGHYCTQRGFSEEVRDSVTKLVPLTRRLWQMTKIKMLPTPAKFHYVFNLRDLSRVWQGMLNTTSEVIKEPNDLLKLWKHECKRVIADRFTVSSDVTWFDKALVSLVEEEFGEEKKLLVDCGIDTYFVDFLRDAPEAAGETSEEADAETPKIYEPIESFSHLKERLNMFLQLYNESIRGAGMDMVFFADAMVHLVKISRVIRTPQGNALLVGVGGSGKQSLTRLASFIAGYVSFQITLTRSYNTSNLMEDLKVLYRTAGQQGKGITFIFTDNEIKDESFLEYMNNVLSSGEVSNLFARDEIDEINSDLASVMKKEFPRCLPTNENLHDYFMSRVRQNLHIVLCFSPVGEKFRNRALKFPALISGCTIDWFSRWPKDALVAVSEHFLTSYDIDCSLEIKKEVVQCMGSFQDGVAEKCVDYFQRFRRSTHVTPKSYLSFIQGYKFIYGEKHVEVRTLANRMNTGLEKLKEASESVAALSKELEAKEKELQVANDKADMVLKEVTMKAQAAEKVKAEVQKVKDRAQAIVDSISKDKAIAEEKLEAAKPALEEAEAALQTIRPSDIATVRTLGRPPHLIMRIMDCVLLLFQRKVSAVKIDLEKSCTMPSWQESLKLMTAGNFLQNLQQFPKDTINEEVIEFLSPYFEMPDYNIETAKRVCGNVAGLCSWTKAMASFFSINKEVLPLKANLVVQENRHLLAMQDLQKAQAELDDKQAELDVVQAEYEQAMTEKQTLLEDAERCRHKMQTASTLISGLAGEKERWTEQSQEFAAQTKRLVGDVLLATAFLSYSGPFNQEFRDLLLNDWRKEMKARKIPFGKNLNLSEMLIDAPTISEWNLQGLPNDDLSIQNGIIVTKASRYPLLIDPQTQGKIWIKNKESRNELQITSLNHKYFRNHLEDSLSLGRPLLIEDVGEELDPALDNVLERNFIKTGSTFKVKVGDKEVDVLDGFRLYITTKLPNPAYTPEISARTSIIDFTVTMKGLEDQLLGRVILTEKQELEKERTHLMEDVTANKRRMKELEDNLLYRLTSTQGSLVEDESLIVVLSNTKRTAEEVTQKLEISAETEVQINSAREEYRPVATRGSILYFLITEMRLVNEMYQTSLRQFLGLFDLSLARSVKSPITSKRIANIIEHMTYEVYKYAARGLYEEHKFLFTLLLTLKIDIQRNRVKHEEFLTLIKGGASLDLKACPPKPSKWILDITWLNLVELSKLRQFSDVLDQISRNEKMWKIWFDKENPEEEPLPNAYDKSLDCFRRLLLIRSWCPDRTIAQARKYIVDSMGEKYAEGVILDLEKTWEESDPRTPLICLLSMGSDPTDSIIALGKRLKIETRYVSMGQGQEVHARKLLQQTMANGGWALLQNCHLGLDFMDELMDIIIETELVHDAFRLWMTTEAHKQFPITLLQMSIKFANDPPQGLRAGLKRTYSGVSQDLLDVSSGSQWKPMLYAVAFLHSTVQERRKFGALGWNIPYEFNQADFNATVQFIQNHLDDMDVKKGVSWTTIRYMIGEIQYGGRVTDDYDKRLLNTFAKVWFSENMFGPDFSFYQGYNIPKCSTVDNYLQYIQSLPAYDSPEVFGLHPNADITYQSKLAKDVLDTILGIQPKDTSGGGDETREAVVARLADDMLEKLPPDYVPFEVKERLQKMGPFQPMNIFLRQEIDRMQRVLSLVRSTLTELKLAIDGTIIMSENLRDALDCMFDARIPAWWKKASWISSTLGFWFTELIERNSQFTSWVFNGRPHCFWMTGFFNPQGFLTAMRQEITRANKGWALDNMVLCNEVTKWMKDDISAPPTEGVYVYGLYLEGAGWDKRNMKLIESKPKVLFELMPVIRIYAENNTLRDPRFYSCPIYKKPVRTDLNYIAAVDLRTAQTPEHWVLRGVALLCDVK

SEQ ID NO: 31885 - protein, 17 aa, Artificial Sequence
  Synthetic polypeptide
LQENKIRTPTDSTLRKD

SEQ ID NO: 31886 - protein, 27 aa, Artificial Sequence
  Synthetic polypeptide
SQLLGRLSQQEGRVCSHISASFGADQG

SEQ ID NO: 31887 - protein, 43 aa, Artificial Sequence
  Synthetic polypeptide
TTWRDPISAKKYKNSQIWWHMLIVPATREAEPTGRPGVQSHLC

SEQ ID NO: 31888 - protein, 20 aa, Artificial Sequence
  Synthetic polypeptide
SQLLGRLSQQEGRVCSHISA

SEQ ID NO: 31889 - protein, 55 aa, Artificial Sequence
  Synthetic polypeptide
LVQVPLCHLQVCGGILNLSWPQFMFFMRQSPGLPWVPGHDGTSTQADASTTSPAG

SEQ ID NO: 31890 - protein, 51 aa, Artificial Sequence
  Synthetic polypeptide
VESTCLGSGARLTGSGPALSSPSVWWDSEPVLASVYVLYETKPWTSLGSWT

SEQ ID NO: 31891 - protein, 50 aa, Artificial Sequence
  Synthetic polypeptide
LVQVPLCHLQVCGGILNLSWPQFMFFMRFRRYMCLFVIWIYCILVEIGLL

SEQ ID NO: 31892 - protein, 62 aa, Artificial Sequence
  Synthetic polypeptide
VESTCLGSGARLTGSGPALSSPSVWWDSEPVLASVYVLYEIQEVHVLVCHMDILHTGGDWAS

SEQ ID NO: 31893 - protein, 42 aa, Artificial Sequence
  Synthetic polypeptide
HGAEMCGSKPDVHAELGSAVCTQRVPDGWARGARGASAARAH

SEQ ID NO: 31894 - protein, 694 aa, Artificial Sequence
  Synthetic polypeptide
AQNLRWFSPLSCHQLLGPGLLRLGRLWLRSPSHTAPAPGLWLSGFGLLRGDHLFLCSAPGPGPPAPEDMVHLRRLQEISVVSAADTPDKKEHLVLVETGRTLYLQGEGRLDFTAWNAAIGGAAGGGGTGLQEQQMSRGDIPIIVDACISFVTQHELPQKNQRLEKYKDVIGCLPRVNRRTLATLIGHLYRVQKCAALNQMCTRNLALLFAPSVFQTDGRGEHEVRVLQELIDGYISVFDIDSDQVAQIDLEVSLITTWKDVQLSQAGDLIMEVYIEQQLPDNCVTLKVSPTLTAEELTNQVLEMRGTAAGMDLWVTFEIREHGELERPLHPKEKVLEQALQWCQLPEPCSASLLLKKVPLAQAGCLFTGIRRESPRVGLLRCREEPPRLLGSRFQERFFLLRGRCLLLLKEKKSSKPEREWPLEGAKVYLGIRKKLKPPTPWGFTLILEKMHLYLSCTDEDEMWDWTTSILKAQHDDQQPVVLRRHSSSDLARQKFGTMPLLPIRGDDSGATLLSANQTLRRLHNRRTLSMFFPMKSSQGSVEEQEELEEPVYEEPVYEEVGAFPELIQDTSTSFSTTREWTVKPENPLTSQKSLDQPFLSKSSTLGQEERPPEPPPGPPSKSSPQARGSLEEQLLQELSSLILRKGETTAGLGSPSQPSSPQSPSPTGLPTQTPGFPTQPPCTSSPPSSQPLT

SEQ ID NO: 31895 - protein, 76 aa, Artificial Sequence
  Synthetic polypeptide
VLPGGCCEDCHTILAPGLCVMVHDRISTELEMVLPAELPPAAGPRAAAAGPPMAAVPLPYSPGPWSLAVRVWPPSW

SEQ ID NO: 31896 - protein, 765 aa, Artificial Sequence
  Synthetic polypeptide
AQNLRWFSPLSCHQLLGPGLLRLGRLWLRSPSHTAPAPGLWLSGFGLLRGDHLFLCSAPGPGPPAPEDMVHLRRLQEISVVSAADTPDKKEHLVLVETGRTLYLQGEGRLDFTAWNAAIGGAAGGGGTGLQEQQMSRGDIPIIVDACISFVTQHGLRLEGVYRKGGARARSLRLLAEFRRDARSVKLRPGEHFVEDVTDTLKRFFRELDDPVTSARLLPRWREAAELPQKNQRLEKYKDVIGCLPRVNRRTLATLIGHLYRVQKCAALNQMCTRNLALLFAPSVFQTDGRGEHEVRVLQELIDGYISVFDIDSDQVAQIDLEVSLITTWKDVQLSQAGDLIMEVYIEQQLPDNCVTLKVSPTLTAEELTNQVLEMRGTAAGMDLWVTFEIREHGELERPLHPKEKVLEQALQWCQLPEPCSASLLLKKVPLAQAGCLFTGIRRESPRVGLLRCREEPPRLLGSRFQERFFLLRGRCLLLLKEKKSSKPEREWPLEGAKVYLGIRKKLKPPTPWGFTLILEKMHLYLSCTDEDEMWDWTTSILKAQHDDQQPVVLRRHSSSDLARQKFGTMPLLPIRGDDSGATLLSANQTLRRLHNRRTLSMFFPMKSSQGSVEEQEELEEPVYEEPVYEEVGAFPELIQDTSTSFSTTREWTVKPENPLTSQKSLDQPFLSKSSTLGQEERPPEPPPGPPSKSSPQARGSLEEQLLQELSSLILRKGETTAGLGSPSQPSSPQSPSPTGLPTQTPGFPTQPPCTSSPPSSQPLT

SEQ ID NO: 31897 - protein, 752 aa, Artificial Sequence
  Synthetic polypeptide
AQNLRWFSPLSCHQLLGPGLLRLGRLWLRSPSHTAPAPGLWLSGFGLLRGDHLFLCSAPGPGPPAPEDMVHLRRLQEISVVSAADTPDKKEHLVLVETGRTLYLQGEGRLDFTAWNAAIGGAAGGGGTGLQEQQMSRGDIPIIVDACISFVTQHGLRLEGVYRKGGARARSLRLLAEFRRDARSVKLRPGEHFVEDVTDTLKRFFRELDDPVTSARLLPRWREAAELPQKNQRLEKYKDVIGCLPRVNRRTLATLIGHLYRVQKCAALNQMCTRNLALLFAPSVFQTDGRGEHEVRVLQELIDGYISVFDIDSDQVAQIDLEVSLITTWKDVQLSQAGDLIMEVYIEQQLPDNCVTLKVSPTLTAEELTNQVLEMRGTAAGMDLWVTFEIREHGELERPLHPKEKVLEQALQWCQLPEPCSASLLLKKVPLAQAGCLFTGIRRESPRVGLLRCREEPPRLLGSRFQERFFLLRGRCLLLLKEKKSSKPEREWPLEGAKVYLGIRKKLKPPTPWGFTLILEKMHLYLSCTDEDEMWDWTTSILKAQHDDQQPVVLRRHSSSDLARQKFGTMPLLPIRGDDSGATLLSANQTLPMKSSQGSVEEQEELEEPVYEEPVYEEVGAFPELIQDTSTSFSTTREWTVKPENPLTSQKSLDQPFLSKSSTLGQEERPPEPPPGPPSKSSPQARGSLEEQLLQELSSLILRKGETTAGLGSPSQPSSPQSPSPTGLPTQTPGFPTQPPCTSSPPSSQPLT

SEQ ID NO: 31898 - protein, 3063 aa, Artificial Sequence
  Synthetic polypeptide
DMPFTFCHNCEASPATWSWFRKNDEMKAMDVLPILKEKVAYLSGGRDKRGGPILTFPARSNHDRIRQEDLRRLISYLACIPSEEVCKRGFTVIVDMRGSKWDSIKPLLKILQESFPCCIHVALIIKPDNFWQKQRTNFGSSKFEFETNMVSLEGLTKVVDPSQLTPEFDGCLEYNHEEWIEIRVAFEDYISNATHMLSRLEELQDILAKKELPQDLEGARNMIEEHSQLKKKVIKAPIEDLDLEGQKLLQRIQSSESFPKKNSGSGNADLQNLLPKVSTMLDRLHSTRQHLHQMWHVRKLKLDQCFQLRLFEQDAEKMFDWITHNKGLFLNSYTEIGTSHPHAMELQTQHNHFAMNCMNVYVNINRIMSVANRLVESGHYASQQIRQIASQLEQEWKAFAAALDERSTLLDMSSIFHQKAEKYMSNVDSWCKACGEVDLPSELQDLEDAIHHHQGIYEHITLAYSEVSQDGKSLLDKLQRPLTPGSSDSLTASANYSKAVHHVLDVIHEVLHHQRQLENIWQHRKVRLHQRLQLCVFQQDVQQVLDWIENHGEAFLSKHTGVGKSLHRARALQKRHEDFEEVAQNTYTNADKLLEAAEQLAQTGECDPEEIYQAAHQLEDRIQDFVRRVEQRKILLDMSVSFHTHVKELWTWLEELQKELLDDVYAESVEAVQDLIKRFGQQQQTTLQVTVNVIKEGEDLIQQLRDSAISSNKTPHNSSINHIETVLQQLDEAQSQMEELFQERKIKLELFLQLRIFERDAIDIISDLESWNDELSQQMNDFDTEDLTIAEQRLQHHADKALTMNNLTFDVIHQGQDLLQYVNEVQASGVELLCDRDVDMATRVQDLLEFLHEKQQELDLAAEQHRKHLEQCVQLRHLQAEVKQVLGWIRNGESMLNAGLITASSLQEAEQLQREHEQFQHAIEKTHQSALQVQQKAEAMLQANHYDMDMIRDCAEKVASHWQQLMLKMEDRLKLVNASVAFYKTSEQVCSVLESLEQEYKREEDWCGGADKLGPNSETDHVTPMISKHLEQKEAFLKACTLARRNADVFLKYLHRNSVNMPGMVTHIKAPEQQVKNILNELFQRENRVLHYWTMRKRRLDQCQQYVVFERSAKQALEWIHDNGEFYLSTHTSTGSSIQHTQELLKEHEEFQITAKQTKERVKLLIQLADGFCEKGHAHAAEIKKCVTAVDKRYRDFSLRMEKYRTSLEKALGISSDSNKSSKSLQLDIIPASIPGSEVKLRDAAHELNEEKRKSARRKEFIMAELIQTEKAYVRDLRECMDTYLWEMTSGVEEIPPGIVNKELIIFGNMQEIYEFHNNIFLKELEKYEQLPEDVGHCFVTWADKFQMYVTYCKNKPDSTQLILEHAGSYFDEIQQRHGLANSISSYLIKPVQRITKYQLLLKELLTCCEEGKGEIKDGLEVMLSVPKRANDAMHLSMLEGFDENIESQGELILQESFQVWDPKTLIRKGRERHLFLFEMSLVFSKEVKDSSGRSKYLYKSKLFTSELGVTEHVEGDPCKFALWVGRTPTSDNKIVLKASSIENKQDWIKHIREVIQERTIHLKGALKEPIHIPKTAPATRQKGRRDGEDLDSQGDGSSQPDTISIASRTSQNTLDSDKLSGGCELTVVIHDFTACNSNELTIRRGQTVEVLERPHDKPDWCLVRTTDRSPAAEGLVPCGSLCIAHSRSSMEMEGIFNHKDSLSVSSNDASPPASVASLQPHMIGAQSSPGPKRPGNTLRKWLTSPVRRLSSGKADGHVKKLAHKHKKSREVRKSADAGSQKDSDDSAATPQDETVEERGRNEGLSSGTLSKSSSSGMQSCGEEEGEEGADAVPLPPPMAIQQHSLLQPDSQDDKASSRLLVRPTSSETPSAAELVSAIEELVKSKMALEDRPSSLLVDQGDSSSPSFNPSDNSLLSSSSPIDEMEERKSSSLKRRHYVLQELVETERDYVRDLGYVVEGYMALMKEDGVPDDMKGKDKIVFGNIHQIYDWHRDFFLGELEKCLEDPEKLGSLFVKHERRLHMYIAYCQNKPKSEHIVSEYIDTFFEDLKQRLGHRLQLTDLLIKPVQRIMKYQLLLKDFLKYSKKASLDTSELERAVEVMCIVPRRCNDMMNVGRLQGFDGKIVAQGKLLLQDTFLVTDQDAGLLPRCRERRIFLFEQIVIFSEPLDKKKGFSMPGFLFKNSIKVSCLCLEENVENDPCKFALTSRTGDVVETFILHSSSPSVRQTWIHEINQILENQRNFLNALTSPIEYQRNHSGGGGGGGSGGSGGGGGSGGGGAPSGGSGHSGGPSSCGGAPSTSRSRPSRIPQPVRHHPPVLVSSAASSQAEADKMSGTSTPGPSLPPPGAAPEAGPSAPSRRPPGADAEGSEREAEPIPKMKVLESPRKGAANASGSSPDAPAKDARASLGTLPLGKPRAGAASPLNSPLSSAVPSLGKEPFPPSSPLQKGGSFWSSIPASPASRPGSFTFPGDSDSLQRQTPRHAAPGKDTDRMSTCSSASEQSVQSTQSNGSESSSSSNISTMLVTHDYTAVKEDEINVYQGEVVQILASNQQNMFLVFRAATDQCPAAEGWIPGFVLGHTSAVIVENPDGTLKKSTSWHTALRLRKKSEKKDKDGKREGKLENGYRKSREGLSNKVSVKLLNPNYIYDVPPEFVIPLSEVTCETGETVVLRCRVCGRPKASITWKGPEHNTLNNDGHYSISYSDLGEATLKIVGVTTEDDGIYTCIAVNDMGSASSSASLRVLGPGMDGIMVTWKDNFDSFYSEVAELGRGRFSVVKKCDQKGTKRAVATKFVNKKLMKRDQVTHELGILQSLQHPLLVGLLDTFETPTSYILVLEMADQGRLLDCVVRWGSLTEGKIRAHLGEVLEAVRYLHNCRIAHLDLKPENILVDESLAKPTIKLADFGDAVQLNTTYYIHQLLGNPEFAAPEIILGNPVSLTSDTWSVGVLTYVLLSGVSPFLDDSVEETCLNICRLDFSFPDDYFKGVSQKAKEFVCFLLQEDPAKRPSAALALQEQWLQAGNGRSTGVLDTSRLTSFIERRKHQNDVRPIRSIKNFLQSRLLPRV

SEQ ID NO: 31899 - protein, 41 aa, Artificial Sequence
  Synthetic polypeptide
PFPVLCTMGPHSSGSETCLSPSAITVRPLQLRGAGFEKTMK

SEQ ID NO: 31900 - protein, 13 aa, Artificial Sequence
  Synthetic polypeptide
GLSSYVELVSKKR

SEQ ID NO: 31901 - protein, 2887 aa, Artificial Sequence
  Synthetic polypeptide
DMPFTFCHNCEASPATWSWFRKNDEMKAMDVLPILKEKVAYLSGGRDKRGGPILTFPARSNHDRIRQEDLRRLISYLACIPSEEVCKRGFTVIVDMRGSKWDSIKPLLKILQESFPCCIHVALIIKPDNFWQKQRTNFGSSKFEFETNMVSLEGLTKVVDPSQLTPEFDGCLEYNHEEWIEIRVAFEDYISNATHMLSRLEELQDILAKKELPQDLEGARNMIEEHSQLKKKVIKAPIEDLDLEGQKLLQRIQSSESFPKKNSGSGNADLQNLLPKVSTMLDRLHSTRQHLHQMWHVRKLKLDQCFQLRLFEQDAEKMFDWITHNKGLFLNSYTEIGTSHPHAMELQTQHNHFAMNCMNVYVNINRIMSVANRLVESGHYASQQIRQIASQLEQEWKAFAAALDERSTLLDMSSIFHQKAEKYMSNVDSWCKACGEVDLPSELQDLEDAIHHHQGIYEHITLAYSEVSQDGKSLLDKLQRPLTPGSSDSLTASANYSKAVHHVLDVIHEVLHHQRQLENIWQHRKVRLHQRLQLCVFQQDVQQVLDWIENHGEAFLSKHTGVGKSLHRARALQKRHEDFEEVAQNTYTNADKLLEAAEQLAQTGECDPEEIYQAAHQLEDRIQDFVRRVEQRKILLDMSVSFHTHVKELWTWLEELQKELLDDVYAESVEAVQDLIKRFGQQQQTTLQVTVNVIKEGEDLIQQLRDSAISSNKTPHNSSINHIETVLQQLDEAQSQMEELFQERKIKLELFLQLRIFERDAIDIISDLESWNDELSQQMNDFDTEDLTIAEQRLQHHADKALTMNNLTFDVIHQGQDLLQYVNEVQASGVELLCDRDVDMATRVQDLLEFLHEKQQELDLAAEQHRKHLEQCVQLRHLQAEVKQVLGWIRNGESMLNAGLITASSLQEAEQLQREHEQFQHAIEKTHQSALQVQQKAEAMLQANHYDMDMIRDCAEKVASHWQQLMLKMEDRLKLVNASVAFYKTSEQVCSVLESLEQEYKREEDWCGGADKLGPNSETDHVTPMISKHLEQKEAFLKACTLARRNADVFLKYLHRNSVNMPGMVTHIKAPEQQVKNILNELFQRENRVLHYWTMRKRRLDQCQQYVVFERSAKQALEWIHDNGEFYLSTHTSTGSSIQHTQELLKEHEEFQITAKQTKERVKLLIQLADGFCEKGHAHAAEIKKCVTAVDKRYRDFSLRMEKYRTSLEKALGISSDSNKSSKSLQLDIIPASIPGSEVKLRDAAHELNEEKRKSARRKEFIMAELIQTEKAYVRDLRECMDTYLWEMTSGVEEIPPGIVNKELIIFGNMQEIYEFHNNIFLKELEKYEQLPEDVGHCFVTWADKFQMYVTYCKNKPDSTQLILEHAGSYFDEIQQRHGLANSISSYLIKPVQRITKYQLLLKELLTCCEEGKGEIKDGLEVMLSVPKRANDAMHLSMLEGFDENIESQGELILQESFQVWDPKTLIRKGRERHLFLFEMSLVFSKEVKDSSGRSKYLYKSKLFTSELGVTEHVEGDPCKFALWVGRTPTSDNKIVLKASSIENKQDWIKHIREVIQERTIHLKGALKEPIHIPKTAPATRQKGRRDGEDLDSQGDGSSQPDTISIASRTSQNTLDSDKLSGGCELTVVIHDFTACNSNELTIRRGQTVEVLERPHDKPDWCLVRTTDRSPAAEGLVPCGSLCIAHSRSSMEMEGIFNHKDSLSVSSNDASPPASVASLQPHMIGAQSSPGPKRPGNTLRKWLTSPVRRLSSGKADGHVKKLAHKHKKSREVRKSADAGSQKDSDDSAATPQDETVEERGRNEGLSSGTLSKSSSSGMQSCGEEEGEEGADAVPLPPPMAIQQHSLLQPDSQDDKASSRLLVRPTSSETPSAAELVSAIEELVKSKMALEDRPSSLLVDQGDSSSPSFNPSDNSLLSSSSPIDEMEERKSSSLKRRHYVLQELVETERDYVRDLGYVVEGYMALMKEDGVPDDMKGKDKIVFGNIHQIYDWHRDFFLGELEKCLEDPEKLGSLFVKHERRLHMYIAYCQNKPKSEHIVSEYIDTFFEDLKQRLGHRLQLTDLLIKPVQRIMKYQLLLKDFLKYSKKASLDTSELERAVEVMCIVPRRCNDMMNVGRLQGFDGKIVAQGKLLLQDTFLVTDQDAGLLPRCRERRIFLFEQIVIFSEPLDKKKGFSMPGFLFKNSIKVSCLCLEENVENDPCKFALTSRTGDVVETFILHSSSPSVRQTWIHEINQILENQRNFLNALTSPIEYQRNHSGGGGGGGSGGSGGGGGSGGGGAPSGGSGHSGGPSSCGGAPSTSRSRPSRIPQPVRHHPPVLVSSAASSQAEADKMSESESSSSSNISTMLVTHDYTAVKEDEINVYQGEVVQILASNQQNMFLVFRAATDQCPAAEGWIPGFVLGHTSAVIVENPDGTLKKSTSWHTALRLRKKSEKKDKDGKREGKLENGYRKSREGLSNKVSVKLLNPNYIYDVPPEFVIPLSEVTCETGETVVLRCRVCGRPKASITWKGPEHNTLNNDGHYSISYSDLGEATLKIVGVTTEDDGIYTCIAVNDMGSASSSASLRVLGPGMDGIMVTWKDNFDSFYSEVAELGRGRFSVVKKCDQKGTKRAVATKFVNKKLMKRDQVTHELGILQSLQHPLLVGLLDTFETPTSYILVLEMADQGRLLDCVVRWGSLTEGKIRAHLGEVLEAVRYLHNCRIAHLDLKPENILVDESLAKPTIKLADFGDAVQLNTTYYIHQLLGNPEFAAPEIILGNPVSLTSDTWSVGVLTYVLLSGVSPFLDDSVEETCLNICRLDFSFPDDYFKGVSQKAKEFVCFLLQEDPAKRPSAALALQEQWLQAGNGRSTGVLDTSRLTSFIERRKHQNDVRPIRSIKNFLQSRLLPRV

SEQ ID NO: 31902 - protein, 1523 aa, Artificial Sequence
  Synthetic polypeptide
DMPFTFCHNCEASPATWSWFRKNDEMKAMDVLPILKEKVAYLSGGRDKRGGPILTFPARSNHDRIRQEDLRRLISYLACIPSEEVCKRGFTVIVDMRGSKWDSIKPLLKILQESFPCCIHVALIIKPDNFWQKQRTNFGSSKFEFETNMVSLEGLTKVVDPSQLTPEFDGCLEYNHEEWIEIRVAFEDYISNATHMLSRLEELQDILAKKELPQDLEGARNMIEEHSQLKKKVIKAPIEDLDLEGQKLLQRIQSSESFPKKNSGSGNADLQNLLPKVSTMLDRLHSTRQHLHQMWHVRKLKLDQCFQLRLFEQDAEKMFDWITHNKGLFLNSYTEIGTSHPHAMELQTQHNHFAMNCMNVYVNINRIMSVANRLVESGHYASQQIRQIASQLEQEWKAFAAALDERSTLLDMSSIFHQKAEKYMSNVDSWCKACGEVDLPSELQDLEDAIHHHQGIYEHITLAYSEVSQDGKSLLDKLQRPLTPGSSDSLTASANYSKAVHHVLDVIHEVLHHQRQLENIWQHRKVRLHQRLQLCVFQQDVQQVLDWIENHGEAFLSKHTGVGKSLHRARALQKRHEDFEEVAQNTYTNADKLLEAAEQLAQTGECDPEEIYQAAHQLEDRIQDFVRRVEQRKILLDMSVSFHTHVKELWTWLEELQKELLDDVYAESVEAVQDLIKRFGQQQQTTLQVTVNVIKEGEDLIQQLRDSAISSNKTPHNSSINHIETVLQQLDEAQSQMEELFQERKIKLELFLQLRIFERDAIDIISDLESWNDELSQQMNDFDTEDLTIAEQRLQHHADKALTMNNLTFDVIHQGQDLLQYVNEVQASGVELLCDRDVDMATRVQDLLEFLHEKQQELDLAAEQHRKHLEQCVQLRHLQAEVKQVLGWIRNGESMLNAGLITASSLQEAEQLQREHEQFQHAIEKTHQSALQVQQKAEAMLQANHYDMDMIRDCAEKVASHWQQLMLKMEDRLKLVNASVAFYKTSEQVCSVLESLEQEYKREEDWCGGADKLGPNSETDHVTPMISKHLEQKEAFLKACTLARRNADVFLKYLHRNSVNMPGMVTHIKAPEQQVKNILNELFQRENRVLHYWTMRKRRLDQCQQYVVFERSAKQALEWIHDNGEFYLSTHTSTGSSIQHTQELLKEHEEFQITAKQTKERVKLLIQLADGFCEKGHAHAAEIKKCVTAVDKRYRDFSLRMEKYRTSLEKALGISSDSNKSSKSLQLDIIPASIPGSEVKLRDAAHELNEEKRKSARRKEFIMAELIQTEKAYVRDLRECMDTYLWEMTSGVEEIPPGIVNKELIIFGNMQEIYEFHNNIFLKELEKYEQLPEDVGHCFVTWADKFQMYVTYCKNKPDSTQLILEHAGSYFDEIQQRHGLANSISSYLIKPVQRITKYQLLLKELLTCCEEGKGEIKDGLEVMLSVPKRANDAMHLSMLEGFDENIESQGELILQESFQVWDPKTLIRKGRERHLFLFEMSLVFSKEVKDSSGRSKYLYKSKLFVSIGVQNCKSKGNTIAVFL

SEQ ID NO: 31903 - protein, 39 aa, Artificial Sequence
  Synthetic polypeptide
TPKARGYHHASFVGRGPEALDGSHGWPGTCLQLEQRQPE

SEQ ID NO: 31904 - protein, 515 aa, Artificial Sequence
  Synthetic polypeptide
CDITIVLVKRGNLDPEMDMYTRRYRVNMKAEVEVMHLQANEHQRPGVITMQALSEEDRRLWMEAMDGREPVYNSNKDSQSEGTAQLDSIGFSIIRKCIHAVETRGINEQGLYRIVGVNSRVQKLLSVLMDPKTASETETDICAEWEIKTITSALKTYLRMLPGPLMMYQFQRSFIKAAKLENQESRVSEIHSLVHRLPEKNRQMLQLLMNHLANVANNHKQNLMTVANLGVVFGPTLLRPQEETVAAIMDIKFQNIVIEILIENHEKIFNTVPDMPLTNAQLHLSRKKSSDSKPPSCSERPLTLFHTVQSTEKQEQRNSIINSSLESVSSNPNSILNSSSSLQPNMNSSDPDLAVVKPTRPNSLPPNPSPTSPLSPSWPMFSAPSSPMPTSSTSSDSSPVRSVAGFVWFSVAAVVLSLARSSLHAVFSLLVNFVPCHPNLHLLFDRPEEAVHEDSSTPFRKAKALYACKAEHDSELSFTAGTVFDNVHPSQEPGWLEGTLNGKTGLIPENYVEFL

SEQ ID NO: 31905 - protein, 58 aa, Artificial Sequence
  Synthetic polypeptide
CTYKPMNTKGQGLSPCKLCRKRTGGSGWKPWMAGNLSTTRTKTARVKGLRSWTALASA

SEQ ID NO: 31906 - protein, 460 aa, Artificial Sequence
  Synthetic polypeptide
CDITIVLVKRGNLDPEMDMYTRRYRVNMKAEVEVMHLQANEHQRPGVITMQALSEEDRRLWMEAMDGREPVYNSNKDSQSEGTAQLDSIGFSIIRKCIHAVETRGINEQGLYRIVGVNSRVQKLLSVLMDPKTASETETDICAEWEIKTITSALKTYLRMLPGPLMMYQFQRSFIKAAKLENQESRVSEIHSLVHRLPEKNRQMLQLLMNHLANVANNHKQNLMTVANLGVVFGPTLLRPQEETVAAIMDIKFQNIVIEILIENHEKIFNTVPDMPLTNAQLHLSRKKSSDSKPPSCSERPLTLFHTVQSTEKQEQRNSIINSSLESVSSNPNSILNSSSSLQPNMNSSDPDLAVVKPTRPNSLPPNPSPTSPLSPSWPMFSAPSSPMPTSSTSSDSSPVSTPFRKAKALYACKAEHDSELSFTAGTVFDNVHPSQEPGWLEGTLNGKTGLIPENYVEFL

SEQ ID NO: 31907 - protein, 91 aa, Artificial Sequence
  Synthetic polypeptide
CDITIVLVKRGNLDPEMDMYTRRYRVNMKAEVEVMHLQANEHQRPGVITMQALSEEDRRLWMEAMDGREPVYNSNKDSQSEGTAQLDSIGF

SEQ ID NO: 31908 - protein, 57 aa, Artificial Sequence
  Synthetic polypeptide
CTYKPMNTKGQGLSPCKLCRKRTGGSGWKPWMAGNLSTTRTKTARVKGLRSWTALAS

SEQ ID NO: 31909 - protein, 15 aa, Artificial Sequence
  Synthetic polypeptide
EKEQKTKHCMFSLCC

SEQ ID NO: 31910 - protein, 333 aa, Artificial Sequence
  Synthetic polypeptide
VHVLCRDMDEAGNHSQQTKRRNRKPNTACSHSVANNHKQNLMTVANLGVVFGPTLLRPQEETVAAIMDIKFQNIVIEILIENHEKIFNTVPDMPLTNAQLHLSRKKSSDSKPPSCSERPLTLFHTVQSTEKQEQRNSIINSSLESVSSNPNSILNSSSSLQPNMNSSDPDLAVVKPTRPNSLPPNPSPTSPLSPSWPMFSAPSSPMPTSSTSSDSSPVRSVAGFVWFSVAAVVLSLARSSLHAVFSLLVNFVPCHPNLHLLFDRPEEAVHEDSSTPFRKAKALYACKAEHDSELSFTAGTVFDNVHPSQEPGWLEGTLNGKTGLIPENYVEFL

SEQ ID NO: 31911 - protein, 65 aa, Artificial Sequence
  Synthetic polypeptide
MLDWIKKKMWHIYTMEYYEAIKKNKFMSFAGTWMKLETILSKLREGTENQTLHVLTLLLTTTSRI

SEQ ID NO: 31912 - protein, 278 aa, Artificial Sequence
  Synthetic polypeptide
VHVLCRDMDEAGNHSQQTKRRNRKPNTACSHSVANNHKQNLMTVANLGVVFGPTLLRPQEETVAAIMDIKFQNIVIEILIENHEKIFNTVPDMPLTNAQLHLSRKKSSDSKPPSCSERPLTLFHTVQSTEKQEQRNSIINSSLESVSSNPNSILNSSSSLQPNMNSSDPDLAVVKPTRPNSLPPNPSPTSPLSPSWPMFSAPSSPMPTSSTSSDSSPVSTPFRKAKALYACKAEHDSELSFTAGTVFDNVHPSQEPGWLEGTLNGKTGLIPENYVEFL

SEQ ID NO: 31913 - protein, 288 aa, Artificial Sequence
  Synthetic polypeptide
VHVLCRDMDEAGNHSQQTKRRNRKPNTACSHSVANNHKQNLMTVANLGVVFGPTLLRPQEETVAAIMDIKFQNIVIEILIENHEKIFNTVPDMPLTNAQLHLSRKKSSDSKPPSCSERPLTLFHTVQSTEKQEQRNSIINSSLESVSSNPNSILNSSSSLQPNMNSSDPDLAVVKPTRPNSLPPNPSPTSPLSPSWPMFSAPSSPMPTSSTSSDSSPVRPEEAVHEDSSTPFRKAKALYACKAEHDSELSFTAGTVFDNVHPSQEPGWLEGTLNGKTGLIPENYVEFL

SEQ ID NO: 31914 - protein, 241 aa, Artificial Sequence
  Synthetic polypeptide
VHVLCRDMDEAGNHSQQTKRRNRKPNTACSHSVANNHKQNLMTVANLGVVFGPTLLRPQEETVAAIMDIKFQNIVIEILIENHEKIFNTVPDMPLTNAQLHLSRKKSSDSKPPSCSERPLTLFHTVQSTEKQEQRNSIINSSLESVSSNPNSILNSSSSLQPNMNSSDPDLAVVKPTRPNSLTPFRKAKALYACKAEHDSELSFTAGTVFDNVHPSQEPGWLEGTLNGKTGLIPENYVEFL

SEQ ID NO: 31915 - protein, 27 aa, Artificial Sequence
  Synthetic polypeptide
DVSCFPCPFHHDHKFPEASPAMQNSPA

SEQ ID NO: 31916 - protein, 70 aa, Artificial Sequence
  Synthetic polypeptide
MWQFPLCSFSLLLPGETCLASPAPSTMIISFLRPPQPCRTPQHETRCKLSSIQLLNSNNRTTSQTLPGVL

SEQ ID NO: 31917 - protein, 390 aa, Artificial Sequence
  Synthetic polypeptide
GLPSHAELPSMRPDVSSPPSSSSTATTGPPPKLCLVCSDEASGCHYGVLTCGSCKVFFKRAVEGQHNYLCAGRNDCIIDKIRRKNCPACRYRKCLQAGMNLEARKTKKKIKGIQQATTGVSQETSENPGNKTIVPATLPQLTPTLVSLLEVIEPEVLYAGYDSSVPDSTWRIMTTLNMLGGRQVIAAVKWAKAIPGFRNLHLDDQMTLLQYSWMFLMAFALGWRSYRQSSANLLCFAPDLIINEQRMTLPCMYDQCKHMLYVSSELHRLQVSYEEYLCMKTLLLLSSVPKDGLKSQELFDEIRMTYIKELGKAIVKREGNSSQNWQRFYQLTKLLDSMHEVVENLLNYCFQTFLDKTMSIEFPEMLAEIITNQIPKYSNGNIKKLLFHQK

SEQ ID NO: 31918 - protein, 355 aa, Artificial Sequence
  Synthetic polypeptide
GLPSHAELPSMRPDVSSPPSSSSTATTGPPPKLCLVCSDEASGCHYGVLTCGSCKVFFKRAVEGQHNYLCAGRNDCIIDKIRRKNCPACRYRKCLQAGMNLEARKTKKKIKGIQQATTGVSQETSENPGNKTIVPATLPQLTPTLVSLLEVIEPEVLYAGYDSSVPDSTWRIMTTLNMLGGRQVIAAVKWAKAIPGFRNLHLDDQMTLLQYSWMFLMAFALGWRSYRQSSANLLCFAPDLIINEQRMTLPCMYDQCKHMLYVSSELHRLQVSYEEYLCMKTLLLLSSVPKDGLKSQELFDEIRMTYIKELGKAIVKREGNSSQNWQRFYQLTKLLDSMHENVMWLKPESTSHTLI

SEQ ID NO: 31919 - protein, 391 aa, Artificial Sequence
  Synthetic polypeptide
GLPSHAELPSMRPDVSSPPSSSSTATTGPPPKLCLVCSDEASGCHYGVLTCGSCKVFFKRAVEGRQHNYLCAGRNDCIIDKIRRKNCPACRYRKCLQAGMNLEARKTKKKIKGIQQATTGVSQETSENPGNKTIVPATLPQLTPTLVSLLEVIEPEVLYAGYDSSVPDSTWRIMTTLNMLGGRQVIAAVKWAKAIPGFRNLHLDDQMTLLQYSWMFLMAFALGWRSYRQSSANLLCFAPDLIINEQRMTLPCMYDQCKHMLYVSSELHRLQVSYEEYLCMKTLLLLSSVPKDGLKSQELFDEIRMTYIKELGKAIVKREGNSSQNWQRFYQLTKLLDSMHEVVENLLNYCFQTFLDKTMSIEFPEMLAEIITNQIPKYSNGNIKKLLFHQK

SEQ ID NO: 31920 - protein, 19 aa, Artificial Sequence
  Synthetic polypeptide
CLTPVIPALWEAETGRSQE

SEQ ID NO: 31921 - protein, 566 aa, Artificial Sequence
  Synthetic polypeptide
SQRFGRPRRADHKSESSSSSNISTMLVTHDYTAVKEDEINVYQGEVVQILASNQQNMFLVFRAATDQCPAAEGWIPGFVLGHTSAVIVENPDGTLKKSTSWHTALRLRKKSEKKDKDGKREGKLENGYRKSREGLSNKVSVKLLNPNYIYDVPPEFVIPLSEVTCETGETVVLRCRVCGRPKASITWKGPEHNTLNNDGHYSISYSDLGEATLKIVGVTTEDDGIYTCIAVNDMGSASSSASLRVLGPGMDGIMVTWKDNFDSFYSEVAELGRGRFSVVKKCDQKGTKRAVATKFVNKKLMKRDQVTHELGILQSLQHPLLVGLLDTFETPTSYILVLEMADQGRLLDCVVRWGSLTEGKIRAHLGEVLEAVRYLHNCRIAHLDLKPENILVDESLAKPTIKLADFGDAVQLNTTYYIHQLLGNPEFAAPEIILGNPVSLTSDTWSVGVLTYVLLSGVSPFLDDSVEETCLNICRLDFSFPDDYFKGVSQKAKEFVCFLLQEDPAKRPSAALALQEQWLQAGNGRSTGVLDTSRLTSFIERRKHQNDVRPIRSIKNFLQSRLLPRV

SEQ ID NO: 31922 - protein, 35 aa, Artificial Sequence
  Synthetic polypeptide
MGMMSHTCNPSALGGRDGQITRVKAAAVATSPPCW

SEQ ID NO: 31923 - protein, 14 aa, Artificial Sequence
  Synthetic polypeptide
SQRFGRPRRADHKS

SEQ ID NO: 31924 - protein, 23 aa, Artificial Sequence
  Synthetic polypeptide
MGMMSHTCNPSALGGRDGQITRV

SEQ ID NO: 31925 - protein, 282 aa, Artificial Sequence
  Synthetic polypeptide
SQRFGRPRRADHKSESSSSSNISTMLVTHDYTAVKEDEINVYQGEVVQILASNQQNMFLVFRAATDQCPAAEGWIPGFVLGHTSAVIVENPDGTLKKSTSWHTALRLRKKSEKKDKDGKREGKLENGYRKSREGLSNKVSVKLLNPNYIYDVPPEFVIPLSEVTCETGETVVLRCRVCGRPKASITWKGPEHNTLNNDGHYSISYSDLGEATLKIVGVTTEDDGIYTCIAVNDMGSASSSASLRVLGPGMDGIMVTWKDNFDSFYSEVAELGRANWNNWSPY

SEQ ID NO: 31926 - protein, 52 aa, Artificial Sequence
  Synthetic polypeptide
LTERPLVFQTPGALVSTPHGRYPPPLCPPKAAFQKVIHGKAVPSNPSLCPLP

SEQ ID NO: 31927 - protein, 7 aa, Artificial Sequence
  Synthetic polypeptide
YSSLKDL

SEQ ID NO: 31928 - protein, 1199 aa, Artificial Sequence
  Synthetic polypeptide
KPGMLLNILQCTGQPLKTKNYLAQSERKGTAKVDFLKKIEKEIQQKWDTERVFEVNASNLEKQTSKGKYFVTFPYPYMNGRLHLGHTFSLSKCEFAVGYQRLKGKCCLFPFGLHCTGMPIKACADKLKREIELYGCPPDFPDEEEEEEETSVKTEDIIIKDKAKGKKSKAAAKAGSSKYQWGIMKSLGLSDEEIVKFSEAEHWLDYFPPLAIQDLKRMGLKVDWRRSFITTDVNPYYDSFVRWQFLTLRERNKIKFGKRYTIYSPKDGQPCMDHDRQTGEGVGPQEYTLLKLKVLEPYPSKLSGLKGKNIFLVAATLRPETMFGQTNCWVRPDMKYIGFETVNGDIFICTQKAARNMSYQGFTKDNGVVPVVKELMGEEILGASLSAPLTSYKVIYVLPMLTIKEDKGTGVVTSVPSDSPDDIAALRDLKKKQALRAKYGIRDDMVLPFEPVPVIEIPGFGNLSAVTICDELKIQSQNDREKLAEAKEKIYLKGFYEGIMLVDGFKGQKVQDVKKTIQKKMIDAGDALIYMEPEKQVMSRSSDECVVALCDQWYLDYGEENWKKQTSQCLKNLETFCEETRRNFEATLGWLQEHACSRTYGLGTHLPWDEQWLIESLSDSTIYMAFYTVAHLLQGGNLHGQAESPLGIRPQQMTKEVWDYVFFKEAPFPKTQIAKEKLDQLKQEFEFWYPVDLRVSGKDLVPNHLSYYLYNHVAMWPEQSDKWPTAVRANGHLLLNSEKMSKSTGNFLTLTQAIDKFSADGMRLALADAGDTVEDANFVEAMADAGILRLYTWVEWVKEMVANWDSLRSGPASTFNDRVFASELNAGIIKTDQNYEKMMFKEALKTGFFEFQAAKDKYRELAVEGMHRELVFRFIEVQTLLLAPFCPHLCEHIWTLLGKPDSIMNASWPVAGPVNEVLIHSSQYLMEVTHDLRLRLKNYMMPAKGKKTDKQPLQKPSHCTIYVAKNYPPWQHTTLSVLRKHFEANNGKLPDNKVIASELGSMPELKKYMKKVMPFVAMIKENLEKMGPRILDLQLEFDEKAVLMENIVYLTNSLELEHIEVKFASEAEDKIREDCCPGKPLNVFRIEPGVSVSLVNPQPSNGHFSTKIEIRQGDNCDSIIRRLMKMNRGIKDLSKVKLMRFDDPLLGPRRVPVLGKEYTEKTPISEHAVFNVDLMSKKIHLTENGIRVDIGDTIIYLVH

SEQ ID NO: 31929 - protein, 19 aa, Artificial Sequence
  Synthetic polypeptide
KQRIIWPKVKEKEQPKWTF

SEQ ID NO: 31930 - protein, 1153 aa, Artificial Sequence
  Synthetic polypeptide
KPGMLLNILQCTGQPLKTKNYLAQSERKGTAKVDFLKKIEKEIQQKWDTERVFEVNASNLEKQTSKGKYFVTFPYPYMNGRLHLGHTFSLSKCEFAVGYQRLKGKCCLFPFGLHCTGMPIKSKAAAKAGSSKYQWGIMKSLGLSDEEIVKFSEAEHWLDYFPPLAIQDLKRMGLKVDWRRSFITTDVNPYYDSFVRWQFLTLRERNKIKFGKRYTIYSPKDGQPCMDHDRQTGEGVGPQEYTLLKLKVLEPYPSKLSGLKGKNIFLVAATLRPETMFGQTNCWVRPDMKYIGFETVNGDIFICTQKAARNMSYQGFTKDNGVVPVVKELMGEEILGASLSAPLTSYKVIYVLPMLTIKEDKGTGVVTSVPSDSPDDIAALRDLKKKQALRAKYGIRDDMVLPFEPVPVIEIPGFGNLSAVTICDELKIQSQNDREKLAEAKEKIYLKGFYEGIMLVDGFKGQKVQDVKKTIQKKMIDAGDALIYMEPEKQVMSRSSDECVVALCDQWYLDYGEENWKKQTSQCLKNLETFCEETRRNFEATLGWLQEHACSRTYGLGTHLPWDEQWLIESLSDSTIYMAFYTVAHLLQGGNLHGQAESPLGIRPQQMTKEVWDYVFFKEAPFPKTQIAKEKLDQLKQEFEFWYPVDLRVSGKDLVPNHLSYYLYNHVAMWPEQSDKWPTAVRANGHLLLNSEKMSKSTGNFLTLTQAIDKFSADGMRLALADAGDTVEDANFVEAMADAGILRLYTWVEWVKEMVANWDSLRSGPASTFNDRVFASELNAGIIKTDQNYEKMMFKEALKTGFFEFQAAKDKYRELAVEGMHRELVFRFIEVQTLLLAPFCPHLCEHIWTLLGKPDSIMNASWPVAGPVNEVLIHSSQYLMEVTHDLRLRLKNYMMPAKGKKTDKQPLQKPSHCTIYVAKNYPPWQHTTLSVLRKHFEANNGKLPDNKVIASELGSMPELKKYMKKVMPFVAMIKENLEKMGPRILDLQLEFDEKAVLMENIVYLTNSLELEHIEVKFASEAEDKIREDCCPGKPLNVFRIEPGVSVSLVNPQPSNGHFSTKIEIRQGDNCDSIIRRLMKMNRGIKDLSKVKLMRFDDPLLGPRRVPVLGKEYTEKTPISEHAVFNVDLMSKKIHLTENGIRVDIGDTIIYLVH

SEQ ID NO: 31931 - protein, 1172 aa, Artificial Sequence
  Synthetic polypeptide
KPGMLLNILQCTGQPLKTKNYLAQSERKGTAKVDFLKKIEKEIQQKWDTERVFEVNASNLEKQTSKGKYFVTFPYPYMNGRLHLGHTFSLSKCEACADKLKREIELYGCPPDFPDEEEEEEETSVKTEDIIIKDKAKGKKSKAAAKAGSSKYQWGIMKSLGLSDEEIVKFSEAEHWLDYFPPLAIQDLKRMGLKVDWRRSFITTDVNPYYDSFVRWQFLTLRERNKIKFGKRYTIYSPKDGQPCMDHDRQTGEGVGPQEYTLLKLKVLEPYPSKLSGLKGKNIFLVAATLRPETMFGQTNCWVRPDMKYIGFETVNGDIFICTQKAARNMSYQGFTKDNGVVPVVKELMGEEILGASLSAPLTSYKVIYVLPMLTIKEDKGTGVVTSVPSDSPDDIAALRDLKKKQALRAKYGIRDDMVLPFEPVPVIEIPGFGNLSAVTICDELKIQSQNDREKLAEAKEKIYLKGFYEGIMLVDGFKGQKVQDVKKTIQKKMIDAGDALIYMEPEKQVMSRSSDECVVALCDQWYLDYGEENWKKQTSQCLKNLETFCEETRRNFEATLGWLQEHACSRTYGLGTHLPWDEQWLIESLSDSTIYMAFYTVAHLLQGGNLHGQAESPLGIRPQQMTKEVWDYVFFKEAPFPKTQIAKEKLDQLKQEFEFWYPVDLRVSGKDLVPNHLSYYLYNHVAMWPEQSDKWPTAVRANGHLLLNSEKMSKSTGNFLTLTQAIDKFSADGMRLALADAGDTVEDANFVEAMADAGILRLYTWVEWVKEMVANWDSLRSGPASTFNDRVFASELNAGIIKTDQNYEKMMFKEALKTGFFEFQAAKDKYRELAVEGMHRELVFRFIEVQTLLLAPFCPHLCEHIWTLLGKPDSIMNASWPVAGPVNEVLIHSSQYLMEVTHDLRLRLKNYMMPAKGKKTDKQPLQKPSHCTIYVAKNYPPWQHTTLSVLRKHFEANNGKLPDNKVIASELGSMPELKKYMKKVMPFVAMIKENLEKMGPRILDLQLEFDEKAVLMENIVYLTNSLELEHIEVKFASEAEDKIREDCCPGKPLNVFRIEPGVSVSLVNPQPSNGHFSTKIEIRQGDNCDSIIRRLMKMNRGIKDLSKVKLMRFDDPLLGPRRVPVLGKEYTEKTPISEHAVFNVDLMSKKIHLTENGIRVDIGDTIIYLVH

SEQ ID NO: 31932 - protein, 30 aa, Artificial Sequence
  Synthetic polypeptide
SQHFGRPRRVDHLRSGVRDHPGQHARASIL

SEQ ID NO: 31933 - protein, 39 aa, Artificial Sequence
  Synthetic polypeptide
GQEFETTLANMQGQVFCNLPISIYEWTPSFGTHVFFIQM

SEQ ID NO: 31934 - protein, 1167 aa, Artificial Sequence
  Synthetic polypeptide
RARWPTAVIPALWEAEAGGSFEVRSSRPPWPTCKGKYFVTFPYPYMNGRLHLGHTFSLSKCEFAVGYQRLKGKCCLFPFGLHCTGMPIKACADKLKREIELYGCPPDFPDEEEEEEETSVKTEDIIIKDKAKGKKSKAAAKAGSSKYQWGIMKSLGLSDEEIVKFSEAEHWLDYFPPLAIQDLKRMGLKVDWRRSFITTDVNPYYDSFVRWQFLTLRERNKIKFGKRYTIYSPKDGQPCMDHDRQTGEGVGPQEYTLLKLKVLEPYPSKLSGLKGKNIFLVAATLRPETMFGQTNCWVRPDMKYIGFETVNGDIFICTQKAARNMSYQGFTKDNGVVPVVKELMGEEILGASLSAPLTSYKVIYVLPMLTIKEDKGTGVVTSVPSDSPDDIAALRDLKKKQALRAKYGIRDDMVLPFEPVPVIEIPGFGNLSAVTICDELKIQSQNDREKLAEAKEKIYLKGFYEGIMLVDGFKGQKVQDVKKTIQKKMIDAGDALIYMEPEKQVMSRSSDECVVALCDQWYLDYGEENWKKQTSQCLKNLETFCEETRRNFEATLGWLQEHACSRTYGLGTHLPWDEQWLIESLSDSTIYMAFYTVAHLLQGGNLHGQAESPLGIRPQQMTKEVWDYVFFKEAPFPKTQIAKEKLDQLKQEFEFWYPVDLRVSGKDLVPNHLSYYLYNHVAMWPEQSDKWPTAVRANGHLLLNSEKMSKSTGNFLTLTQAIDKFSADGMRLALADAGDTVEDANFVEAMADAGILRLYTWVEWVKEMVANWDSLRSGPASTFNDRVFASELNAGIIKTDQNYEKMMFKEALKTGFFEFQAAKDKYRELAVEGMHRELVFRFIEVQTLLLAPFCPHLCEHIWTLLGKPDSIMNASWPVAGPVNEVLIHSSQYLMEVTHDLRLRLKNYMMPAKGKKTDKQPLQKPSHCTIYVAKNYPPWQHTTLSVLRKHFEANNGKLPDNKVIASELGSMPELKKYMKKVMPFVAMIKENLEKMGPRILDLQLEFDEKAVLMENIVYLTNSLELEHIEVKFASEAEDKIREDCCPGKPLNVFRIEPGVSVSLVNPQPSNGHFSTKIEIRQGDNCDSIIRRLMKMNRGIKDLSKVKLMRFDDPLLGPRRVPVLGKEYTEKTPISEHAVFNVDLMSKKIHLTENGIRVDIGDTIIYLVH

SEQ ID NO: 31935 - protein, 1121 aa, Artificial Sequence
  Synthetic polypeptide
RARWPTAVIPALWEAEAGGSFEVRSSRPPWPTCKGKYFVTFPYPYMNGRLHLGHTFSLSKCEFAVGYQRLKGKCCLFPFGLHCTGMPIKSKAAAKAGSSKYQWGIMKSLGLSDEEIVKFSEAEHWLDYFPPLAIQDLKRMGLKVDWRRSFITTDVNPYYDSFVRWQFLTLRERNKIKFGKRYTIYSPKDGQPCMDHDRQTGEGVGPQEYTLLKLKVLEPYPSKLSGLKGKNIFLVAATLRPETMFGQTNCWVRPDMKYIGFETVNGDIFICTQKAARNMSYQGFTKDNGVVPVVKELMGEEILGASLSAPLTSYKVIYVLPMLTIKEDKGTGVVTSVPSDSPDDIAALRDLKKKQALRAKYGIRDDMVLPFEPVPVIEIPGFGNLSAVTICDELKIQSQNDREKLAEAKEKIYLKGFYEGIMLVDGFKGQKVQDVKKTIQKKMIDAGDALIYMEPEKQVMSRSSDECVVALCDQWYLDYGEENWKKQTSQCLKNLETFCEETRRNFEATLGWLQEHACSRTYGLGTHLPWDEQWLIESLSDSTIYMAFYTVAHLLQGGNLHGQAESPLGIRPQQMTKEVWDYVFFKEAPFPKTQIAKEKLDQLKQEFEFWYPVDLRVSGKDLVPNHLSYYLYNHVAMWPEQSDKWPTAVRANGHLLLNSEKMSKSTGNFLTLTQAIDKFSADGMRLALADAGDTVEDANFVEAMADAGILRLYTWVEWVKEMVANWDSLRSGPASTFNDRVFASELNAGIIKTDQNYEKMMFKEALKTGFFEFQAAKDKYRELAVEGMHRELVFRFIEVQTLLLAPFCPHLCEHIWTLLGKPDSIMNASWPVAGPVNEVLIHSSQYLMEVTHDLRLRLKNYMMPAKGKKTDKQPLQKPSHCTIYVAKNYPPWQHTTLSVLRKHFEANNGKLPDNKVIASELGSMPELKKYMKKVMPFVAMIKENLEKMGPRILDLQLEFDEKAVLMENIVYLTNSLELEHIEVKFASEAEDKIREDCCPGKPLNVFRIEPGVSVSLVNPQPSNGHFSTKIEIRQGDNCDSIIRRLMKMNRGIKDLSKVKLMRFDDPLLGPRRVPVLGKEYTEKTPISEHAVFNVDLMSKKIHLTENGIRVDIGDTIIYLVH

SEQ ID NO: 31936 - protein, 1140 aa, Artificial Sequence
  Synthetic polypeptide
RARWPTAVIPALWEAEAGGSFEVRSSRPPWPTCKGKYFVTFPYPYMNGRLHLGHTFSLSKCEACADKLKREIELYGCPPDFPDEEEEEEETSVKTEDIIIKDKAKGKKSKAAAKAGSSKYQWGIMKSLGLSDEEIVKFSEAEHWLDYFPPLAIQDLKRMGLKVDWRRSFITTDVNPYYDSFVRWQFLTLRERNKIKFGKRYTIYSPKDGQPCMDHDRQTGEGVGPQEYTLLKLKVLEPYPSKLSGLKGKNIFLVAATLRPETMFGQTNCWVRPDMKYIGFETVNGDIFICTQKAARNMSYQGFTKDNGVVPVVKELMGEEILGASLSAPLTSYKVIYVLPMLTIKEDKGTGVVTSVPSDSPDDIAALRDLKKKQALRAKYGIRDDMVLPFEPVPVIEIPGFGNLSAVTICDELKIQSQNDREKLAEAKEKIYLKGFYEGIMLVDGFKGQKVQDVKKTIQKKMIDAGDALIYMEPEKQVMSRSSDECVVALCDQWYLDYGEENWKKQTSQCLKNLETFCEETRRNFEATLGWLQEHACSRTYGLGTHLPWDEQWLIESLSDSTIYMAFYTVAHLLQGGNLHGQAESPLGIRPQQMTKEVWDYVFFKEAPFPKTQIAKEKLDQLKQEFEFWYPVDLRVSGKDLVPNHLSYYLYNHVAMWPEQSDKWPTAVRANGHLLLNSEKMSKSTGNFLTLTQAIDKFSADGMRLALADAGDTVEDANFVEAMADAGILRLYTWVEWVKEMVANWDSLRSGPASTFNDRVFASELNAGIIKTDQNYEKMMFKEALKTGFFEFQAAKDKYRELAVEGMHRELVFRFIEVQTLLLAPFCPHLCEHIWTLLGKPDSIMNASWPVAGPVNEVLIHSSQYLMEVTHDLRLRLKNYMMPAKGKKTDKQPLQKPSHCTIYVAKNYPPWQHTTLSVLRKHFEANNGKLPDNKVIASELGSMPELKKYMKKVMPFVAMIKENLEKMGPRILDLQLEFDEKAVLMENIVYLTNSLELEHIEVKFASEAEDKIREDCCPGKPLNVFRIEPGVSVSLVNPQPSNGHFSTKIEIRQGDNCDSIIRRLMKMNRGIKDLSKVKLMRFDDPLLGPRRVPVLGKEYTEKTPISEHAVFNVDLMSKKIHLTENGIRVDIGDTIIYLVH

SEQ ID NO: 31937 - protein, 267 aa, Artificial Sequence
  Synthetic polypeptide
GGARWLTPVIPALWEAEAGGSSEGYEEVSQKFTSIRRVRGDNYCALRATLFQAMSQAVGLPPWLQDPELMLLPEKLISKYNWIKQWKLGLKFDGKNEDLVDKIKESLTLLRKKWAGLAEMRTAEARQIACDELFTNEAEEYSLYEAVKFLMLNRAIELYNDKEKGKEVPFFSVLLFARDTSNDPGQLLRNHLNQVGHTGGLEQVEMFLLAYAVRHTIQVYRLSKYNTEEFITVYPTDPPKDWPVVTLIAEDDRHYNIPVRVCEETSL

SEQ ID NO: 31938 - protein, 36 aa, Artificial Sequence
  Synthetic polypeptide
SLHFGRQKQVDHLRAMKRFLRSSPPYGESVVIITVH

SEQ ID NO: 31939 - protein, 82 aa, Artificial Sequence
  Synthetic polypeptide
GGARWLTPVIPALWEAEAGGSSEGYEEVSQKFTSIRRVRGDNYCALRATLFQAMSQAVGLPPWLQDPELMLVRCCCSYQKNS

SEQ ID NO: 31940 - protein, 25 aa, Artificial Sequence
  Synthetic polypeptide
TTFLVRTGRSLLFDTVAPASCESHK

SEQ ID NO: 31941 - protein, 576 aa, Artificial Sequence
  Synthetic polypeptide
GQADLSCSTLLLQHLVKAISDRLLIKGGRIVNDDQSFYADIYMEDGLIKQIGDNLIVPGGVKTIEANGKMVIPGGIDVHTHFQMPYKGMTTVDDFFQGTKAALAGGTTMIIDHVVPEPESSLTEAYEKWREWADGKSCCDYALHVDITHWNDSVKQEVQNLIKDKGVNSFMVYMAYKDLYQVSNTELYEIFTCLGELGAIAQVHAENGDIIAQEQTRMLEMGITGPEGHVLSRPEELEAEAVFRAITIASQTNCPLYVTKVMSKSAADLISQARKKGNVVFGEPITASLGIDGTHYWSKNWAKAAAFVTSPPLSPDPTTPDYINSLLASGDLQLSGSAHCTFSTAQKAIGKDNFTAIPEGTNGVEERMSVIWDKAVATGKMDENQFVAVTSTNAAKIFNLYPRKGRISVGSDSDLVIWDPDAVKIVSAKNHQSAAEYNIFEGMELRGAPLVVICQGKIMLEDGNLHVTQGAGRFIPCSPFSDYVYKRIKARRKMADLHAVPRGMYDGPVFDLTTTPKGGTPAGSARGSPTRPNPPVRNLHQSGFSLSGTQVDEGVRSASKRIVAPPGGRSNITSLS

SEQ ID NO: 31942 - protein, 98 aa, Artificial Sequence
  Synthetic polypeptide
GQADLSCSTLLLQHLVKAISDRLLIKGGRIVNDDQSFYADIYMEDGLIKQIGDNLIVPGGVKTIEANGKMVIPGGIDVHTHFQMPYKGMTTVDDFFQG

SEQ ID NO: 31943 - protein, 32 aa, Artificial Sequence
  Synthetic polypeptide
SQHFGRPRRADHEVVLEICTLLFWELAKMLLK

SEQ ID NO: 31944 - protein, 24 aa, Artificial Sequence
  Synthetic polypeptide
PGAVAHACNPSTLGGRGGRIMRWF

SEQ ID NO: 31945 - protein, 907 aa, Artificial Sequence
  Synthetic polypeptide
IAPLHSSLGGFRNLHTIVLGACKNALEVDLGYLIITAARRLHEVRIQPSLTKDGVFSALKMAELEFPQFETLHLGYVDEFLLQSRMANADLVKYGLADVVENPGIITDIGMKAVNEVFSCIKYLAIYNCPHLHNPYNWISDHSRWTRLVDINLVRCHALKLDSFGQFIELLPSLEFISLDQMFREPPKGCARVGLSAGTGIGVSSALVSNQNSNNDDNNAQNNNANIHDNNHHHPDDSDEENDFRQDLQPGEQQFAADALNEMEDIVQEDGEVVAESGNNTPAHSQAIIPVDVDEEQAGPSGLQRVVKPTSITVHDSESDDEEDSLELQEVWIPKNGTRRYSEREEKTGESVQSRELSVSGKGKTPLRKRYNSHQMGQSKQFPLEESSCEKGCQVTSEQIKADMKAARDIPEKKKNKDVYPSCSSTTASTVGNSSSHNTASQSPDFVRTVNSGGSSEPSPTEVDVSRQCACSPGGSEDSEAMEEGDAESSVCPRCCCHRPQESQRRTSRCSDEERPSTSRACVVNGPDGTRSAFSFRTLPQGGSSGPAHDERTNGSGSGATGEDRRGSSQPESCDVQSNEDYPRRPLTRARSRLSHVLLVSESEVAKTKPRHAMKRKRTADKSTSTSDPVIEDDHVQVLVLKSKNLVGVTMTNCGITDLVLKDCPKMMFIHATRCRVLKHLKVENAPIVNRFDYAQCKKLNMDQVLDQILRMPPERNRIIYLRPMQQVDTLTLEQKLFSGPYPYHICIIHEFSNPPNVRNKVRIRSWMDTIANINQELIKYEFFPEATRSEEDLKKYPKYPWGREIYTLEGVVDGAPYSMISDFPWLRSLRAAEPNSFARYDFEDDEESTIYAPRRKGQLSADICMETIGEEISEMRQMKKGVFQRVVAIFIHYCDVNGEPVEDDYI

SEQ ID NO: 31946 - protein, 51 aa, Artificial Sequence
  Synthetic polypeptide
SQLLGRLRQENGVNLGGRACSEPRSHHCTPAWVVLEICTLLFWELAKMLLK

SEQ ID NO: 31947 - protein, 21 aa, Artificial Sequence
  Synthetic polypeptide
TWEAEHAVSLDRTTALQPGWF

SEQ ID NO: 31948 - protein, 662 aa, Artificial Sequence
  Synthetic polypeptide
IAPLHSSLGGFRNLHTIVLGACKNALEVDLGYLIITAARRLHEVRIQPSLTKDGVFSALKMAELEFPQFETLHLGYVDEFLLQSRMANADLVKYGLADVVENPGIITDIGMKAVNEVFSCIKYLAIYNCPHLHNPYNWISDHSRWTRLVDINLVRCHALKLDSFGQFIELLPSLEFISLDQMFREPPKGCARVGLSAGTGIGVSSALVSNQNSNNDDNNAQNNNANIHDNNHHHPDDSDEENDFRQDLQPGEQQFAADALNEMEDIVQEDGEVVAESGNNTPAHSQAIIPVDVDEEQAGPSGLQRVVKPTSITVHDSESDDEEDSLELQEVWIPKNGTRRYSEREEKTGESVQSRELSEVAKTKPRHAMKRKRTADKSTSTSDPVIEDDHVQVLVLKSKNLVGVTMTNCGITDLVLKDCPKMMFIHATRCRVLKHLKVENAPIVNRFDYAQCKKLNMDQVLDQILRMPPERNRIIYLRPMQQVDTLTLEQKLFSGPYPYHICIIHEFSNPPNVRNKVRIRSWMDTIANINQELIKYEFFPEATRSEEDLKKYPKYPWGREIYTLEGVVDGAPYSMISDFPWLRSLRAAEPNSFARYDFEDDEESTIYAPRRKGQLSADICMETIGEEISEMRQMKKGVFQRVVAIFIHYCDVNGEPVEDDYI

SEQ ID NO: 31949 - protein, 832 aa, Artificial Sequence
  Synthetic polypeptide
IAPLHSSLGGFRNLHTIVLGACKNALEVDLGYLIITAARRLHEVRIQPSLTKDGVFSALKMAELEFPQFETLHLGYVDEFLLQSRMANADLVKYGLADVVENPGIITDIGMKAVNEVFSCIKYLAIYNCPHLHNPYNWISDHSRWTRLVDINLVRCHALKLDSFGQFIELLPSLEFISLDQMFREPPKGCARVGLSAGTGIGVSSALVSNQNSNNDDNNAQNNNANIHDNNHHHPDDSDEENDFRQDLQPGEQQFAADALNEMEDIVQEDGEVVAESGNNTPAHSQAIIPVDVDEEQAGPSGLQRVVKPTSITVHDSESDDEEDSLELQEVWIPKNGTRRYSEREEKTGESVQSRELSVSGKGKTPLRKRYNSHQMGQSKQFPLEESSCEKGCQVTSEQIKADMKAARDIPEKKKNKDVYPSCSSTTASTVGNSSSHNTASQSPDFVRTVNSGGSSEPSPTEVDVSRQCACSPGGSEDSEAMEEGDAESSVCPRCCCHRPQESQRRTSRCSDEERPSTSRACVVNGPDEVAKTKPRHAMKRKRTADKSTSTSDPVIEDDHVQVLVLKSKNLVGVTMTNCGITDLVLKDCPKMMFIHATRCRVLKHLKVENAPIVNRFDYAQCKKLNMDQVLDQILRMPPERNRIIYLRPMQQVDTLTLEQKLFSGPYPYHICIIHEFSNPPNVRNKVRIRSWMDTIANINQELIKYEFFPEATRSEEDLKKYPKYPWGREIYTLEGVVDGAPYSMISDFPWLRSLRAAEPNSFARYDFEDDEESTIYAPRRKGQLSADICMETIGEEISEMRQMKKGVFQRVVAIFIHYCDVNGEPVEDDYI

SEQ ID NO: 31950 - protein, 732 aa, Artificial Sequence
  Synthetic polypeptide
EAVQYNGESSGFKGCARVGLSAGTGIGVSSALVSNQNSNNDDNNAQNNNANIHDNNHHHPDDSDEENDFRQDLQPGEQQFAADALNEMEDIVQEDGEVVAESGNNTPAHSQAIIPVDVDEEQAGPSGLQRVVKPTSITVHDSESDDEEDSLELQEVWIPKNGTRRYSEREEKTGESVQSRELSVSGKGKTPLRKRYNSHQMGQSKQFPLEESSCEKGCQVTSEQIKADMKAARDIPEKKKNKDVYPSCSSTTASTVGNSSSHNTASQSPDFVRTVNSGGSSEPSPTEVDVSRQCACSPGGSEDSEAMEEGDAESSVCPRCCCHRPQESQRRTSRCSDEERPSTSRACVVNGPDGTRSAFSFRTLPQGGSSGPAHDERTNGSGSGATGEDRRGSSQPESCDVQSNEDYPRRPLTRARSRLSHVLLVSESEVAKTKPRHAMKRKRTADKSTSTSDPVIEDDHVQVLVLKSKNLVGVTMTNCGITDLVLKDCPKMMFIHATRCRVLKHLKVENAPIVNRFDYAQCKKLNMDQVLDQILRMPPERNRIIYLRPMQQVDTLTLEQKLFSGPYPYHICIIHEFSNPPNVRNKVRIRSWMDTIANINQELIKYEFFPEATRSEEDLKKYPKYPWGREIYTLEGVVDGAPYSMISDFPWLRSLRAAEPNSFARYDFEDDEESTIYAPRRKGQLSADICMETIGEEISEMRQMKKGVFQRVVAIFIHYCDVNGEPVEDDYI

SEQ ID NO: 31951 - protein, 19 aa, Artificial Sequence
  Synthetic polypeptide
KQYNIMGKAQDLRVVLELV

SEQ ID NO: 31952 - protein, 487 aa, Artificial Sequence
  Synthetic polypeptide
EAVQYNGESSGFKGCARVGLSAGTGIGVSSALVSNQNSNNDDNNAQNNNANIHDNNHHHPDDSDEENDFRQDLQPGEQQFAADALNEMEDIVQEDGEVVAESGNNTPAHSQAIIPVDVDEEQAGPSGLQRVVKPTSITVHDSESDDEEDSLELQEVWIPKNGTRRYSEREEKTGESVQSRELSEVAKTKPRHAMKRKRTADKSTSTSDPVIEDDHVQVLVLKSKNLVGVTMTNCGITDLVLKDCPKMMFIHATRCRVLKHLKVENAPIVNRFDYAQCKKLNMDQVLDQILRMPPERNRIIYLRPMQQVDTLTLEQKLFSGPYPYHICIIHEFSNPPNVRNKVRIRSWMDTIANINQELIKYEFFPEATRSEEDLKKYPKYPWGREIYTLEGVVDGAPYSMISDFPWLRSLRAAEPNSFARYDFEDDEESTIYAPRRKGQLSADICMETIGEEISEMRQMKKGVFQRVVAIFIHYCDVNGEPVEDDYI

SEQ ID NO: 31953 - protein, 657 aa, Artificial Sequence
  Synthetic polypeptide
EAVQYNGESSGFKGCARVGLSAGTGIGVSSALVSNQNSNNDDNNAQNNNANIHDNNHHHPDDSDEENDFRQDLQPGEQQFAADALNEMEDIVQEDGEVVAESGNNTPAHSQAIIPVDVDEEQAGPSGLQRVVKPTSITVHDSESDDEEDSLELQEVWIPKNGTRRYSEREEKTGESVQSRELSVSGKGKTPLRKRYNSHQMGQSKQFPLEESSCEKGCQVTSEQIKADMKAARDIPEKKKNKDVYPSCSSTTASTVGNSSSHNTASQSPDFVRTVNSGGSSEPSPTEVDVSRQCACSPGGSEDSEAMEEGDAESSVCPRCCCHRPQESQRRTSRCSDEERPSTSRACVVNGPDEVAKTKPRHAMKRKRTADKSTSTSDPVIEDDHVQVLVLKSKNLVGVTMTNCGITDLVLKDCPKMMFIHATRCRVLKHLKVENAPIVNRFDYAQCKKLNMDQVLDQILRMPPERNRIIYLRPMQQVDTLTLEQKLFSGPYPYHICIIHEFSNPPNVRNKVRIRSWMDTIANINQELIKYEFFPEATRSEEDLKKYPKYPWGREIYTLEGVVDGAPYSMISDFPWLRSLRAAEPNSFARYDFEDDEESTIYAPRRKGQLSADICMETIGEEISEMRQMKKGVFQRVVAIFIHYCDVNGEPVEDDYI

SEQ ID NO: 31954 - protein, 57 aa, Artificial Sequence
  Synthetic polypeptide
WFYNRKPFLLGSPSLSCLLPCKTCFSPSAMIVRPSQPHGTVPQEVTHMHQGEPAYLH

SEQ ID NO: 31955 - protein, 249 aa, Artificial Sequence
  Synthetic polypeptide
GLPSHMELSLRRSLTCIKESLRIFIDLGETDKAAEAWLGAGRLHYLMQEDELVELCLQAAIQTALKSEEPLLALKLYEEAGDVFFNGTRHRHHAVEYYRAGAVPLARRLKAVRTELRIFNKLTELQISLEGYEKALEFATLAARLSTVTGDQRQELVAFHRLATVYYSLHMYEMAEDCYLKTLSLCPPWLQSPKEALYYAKVYYRLGRLTFCQLKFLLCCPGWSSVVQSGLPATSDSGAQVILQCQPPE

SEQ ID NO: 31956 - protein, 75 aa, Artificial Sequence
  Synthetic polypeptide
DVLFTFCHDCEAFPATWNCPSGGHSHASRRACVSSLTWGRQTRLLRPGLGRGDSTTSCRKTSWWSCACRQPSRQP

SEQ ID NO: 31957 - protein, 169 aa, Artificial Sequence
  Synthetic polypeptide
GLPSHMELSLRRSLTCIKESLRIFIDLGETDKAAEAWLGAGRLHYLMQEDELVELCLQAAIQTALKSEEPLLALKLYEEAGDVFFNGTRHRHHAVEYYRAGAVPLARRLKAVRTELRIFNKLTELQISLEGYEKALEFATLAARLSTVTEARAGGLSPPGYSVLLPAHV

SEQ ID NO: 31958 - protein, 278 aa, Artificial Sequence
  Synthetic polypeptide
GLPSHMELSLRRSLTCIKESLRIFIDLGETDKAAEAWLGAGRLHYLMQEDELVELCLQAAIQTALKSEEPLLALKLYEEAGDVFFNGTRHRHHAVEYYRAGAVPLARRLKAVRTELRIFNKLTELQISLEGYEKALEFATLAARLSTVTGDQRQELVAFHRLATVYYSLHMYEMAEDCYLKTLSLCPPWLQSPKEALYYAKVYYRLGRLTFCQLKDAHDATEYFLLALAAAVLLGDEELQDTIRSRLDNICQSPLWHSRPSGCSSERARWLSGGGLAL

SEQ ID NO: 31959 - protein, 1183 aa, Artificial Sequence
  Synthetic polypeptide
GRVRWLTPVIPALWEAKDLSARLVSIQSQRAQFLITFKTMEEIWKFSTYLNLGYVSMCLEHLLFDHKYWLNCILVEDTEIQVSVDDKHLETIYLGLLIQEGHFFCRALCSVTPPAEKEGECLTLCKNELISVKMAEAGSELEGVSLVTGQRGLVLVSALEPLPLPFHQWFLKNYPGSCGLSRKRDWTGSYQIGRGRCKALTGYEPGEKDELNFYQGESIEIIGFVIPGLQWFIGKSTSSGQVGFVPTRNIDPDSYSPMSRNSAFLSDEERCSLLALGSDKQTECSSFLHTLARTDITSVYRLSGFESIQNPPNDLSASQPEGFKEVRPGRAWEEHQAVGSRQSSSSEDSSLEEELLSATSDSYRLPEPDDLDDPELLMDLSTGQEEEAENFAPILAFLDHEGYADHFKSLYDFSFSFLTSSFYSFSEEDEFVAYLEASRKWAKKSHMTWAHARLCFLLGRLSIRKVKLSQARVYFEEAIHILNGAFEDLSLVATLYINLAAIYLKQRLRHKGSALLEKAGALLACLPDRESSAKHELDVVAYVLRQGIVVGSSPLEARACFLAIRLLLSLGRHEEVLPFAERLQLLSGHPPASEAVASVLSFLYDKKYLPHLAVASVQQHGIQSAQGMSLPIWQVHLVLQNTTKLLGFPSPGWGEVSALACPMLRQALAACEELADRSTQRALCLILSKVYLEHRSPDGAIHYLSQALVLGQLLGEQESFESSLCLAWAYLLASQAKKALDVLEPLLCSLKETESLTQRGVIYNLLGLALQGEGRVNRAAKSYLRALNRAQEVGDVHNQAVAMANLGHLSLKSWAQHPARNYLLQAVRLYCELQASKETDMELVQVFLWLAQVLVSGHQLTHGLLCYEMALLFGLRHRHLKSQLQATKSLCHFYSSVSPNPEACITYHEHWLALAQQLRDREMEGRLLESLGQLYRNLNTARSLRRSLTCIKESLRIFIDLGETDKAAEAWLGAGRLHYLMQEDELVELCLQAAIQTALKSEEPLLALKLYEEAGDVFFNGTRHRHHAVEYYRAGAVPLARRLKAVRTELRIFNKLTELQISLEGYEKALEFATLAARLSTVTGDQRQELVAFHRLATVYYSLHMYEMAEDCYLKTLSLCPPWLQSPKEALYYAKVYYRLGRLTFCQLKFLLCCPGWSSVVQSGLPATSDSGAQVILQCQPPE

SEQ ID NO: 31960 - protein, 42 aa, Artificial Sequence
  Synthetic polypeptide
SQHFGRPRTSQQGWSVSSLRGPSFSSPSRPWRKSGSSPPTLI

SEQ ID NO: 31961 - protein, 49 aa, Artificial Sequence
  Synthetic polypeptide
PGAVAHACNPSTLGGQGPLSKVGQYPVSEGPVSHHLQDHGGNLEVLHLP

SEQ ID NO: 31962 - protein, 151 aa, Artificial Sequence
  Synthetic polypeptide
GRVRWLTPVIPALWEAKDLSARLVSIQSQRAQFLITFKTMEEIWKFSTYLNLGYVSMCLEHLLFDHKYWLNCILVEDTEIQVSVDDKHLETIYLGLLIQEGHFFCRALCSVTPPAEKEGECLTLCKNELISVKMAEAGSELEGVSLVTGGS

SEQ ID NO: 31963 - protein, 1212 aa, Artificial Sequence
  Synthetic polypeptide
GRVRWLTPVIPALWEAKDLSARLVSIQSQRAQFLITFKTMEEIWKFSTYLNLGYVSMCLEHLLFDHKYWLNCILVEDTEIQVSVDDKHLETIYLGLLIQEGHFFCRALCSVTPPAEKEGECLTLCKNELISVKMAEAGSELEGVSLVTGQRGLVLVSALEPLPLPFHQWFLKNYPGSCGLSRKRDWTGSYQIGRGRCKALTGYEPGEKDELNFYQGESIEIIGFVIPGLQWFIGKSTSSGQVGFVPTRNIDPDSYSPMSRNSAFLSDEERCSLLALGSDKQTECSSFLHTLARTDITSVYRLSGFESIQNPPNDLSASQPEGFKEVRPGRAWEEHQAVGSRQSSSSEDSSLEEELLSATSDSYRLPEPDDLDDPELLMDLSTGQEEEAENFAPILAFLDHEGYADHFKSLYDFSFSFLTSSFYSFSEEDEFVAYLEASRKWAKKSHMTWAHARLCFLLGRLSIRKVKLSQARVYFEEAIHILNGAFEDLSLVATLYINLAAIYLKQRLRHKGSALLEKAGALLACLPDRESSAKHELDVVAYVLRQGIVVGSSPLEARACFLAIRLLLSLGRHEEVLPFAERLQLLSGHPPASEAVASVLSFLYDKKYLPHLAVASVQQHGIQSAQGMSLPIWQVHLVLQNTTKLLGFPSPGWGEVSALACPMLRQALAACEELADRSTQRALCLILSKVYLEHRSPDGAIHYLSQALVLGQLLGEQESFESSLCLAWAYLLASQAKKALDVLEPLLCSLKETESLTQRGVIYNLLGLALQGEGRVNRAAKSYLRALNRAQEVGDVHNQAVAMANLGHLSLKSWAQHPARNYLLQAVRLYCELQASKETDMELVQVFLWLAQVLVSGHQLTHGLLCYEMALLFGLRHRHLKSQLQATKSLCHFYSSVSPNPEACITYHEHWLALAQQLRDREMEGRLLESLGQLYRNLNTARSLRRSLTCIKESLRIFIDLGETDKAAEAWLGAGRLHYLMQEDELVELCLQAAIQTALKSEEPLLALKLYEEAGDVFFNGTRHRHHAVEYYRAGAVPLARRLKAVRTELRIFNKLTELQISLEGYEKALEFATLAARLSTVTGDQRQELVAFHRLATVYYSLHMYEMAEDCYLKTLSLCPPWLQSPKEALYYAKVYYRLGRLTFCQLKDAHDATEYFLLALAAAVLLGDEELQDTIRSRLDNICQSPLWHSRPSGCSSERARWLSGGGLAL

SEQ ID NO: 31964 - protein, 1205 aa, Artificial Sequence
  Synthetic polypeptide
GRVRWLTPVIPALWEAKDLSARLVSIQSQRAQFLITFKTMEEIWKFSTYLNLEHLLFDHKYWLNCILVEDTEIQVSVDDKHLETIYLGLLIQEGHFFCRALCSVTPPAEKEGECLTLCKNELISVKMAEAGSELEGVSLVTGQRGLVLVSALEPLPLPFHQWFLKNYPGSCGLSRKRDWTGSYQIGRGRCKALTGYEPGEKDELNFYQGESIEIIGFVIPGLQWFIGKSTSSGQVGFVPTRNIDPDSYSPMSRNSAFLSDEERCSLLALGSDKQTECSSFLHTLARTDITSVYRLSGFESIQNPPNDLSASQPEGFKEVRPGRAWEEHQAVGSRQSSSSEDSSLEEELLSATSDSYRLPEPDDLDDPELLMDLSTGQEEEAENFAPILAFLDHEGYADHFKSLYDFSFSFLTSSFYSFSEEDEFVAYLEASRKWAKKSHMTWAHARLCFLLGRLSIRKVKLSQARVYFEEAIHILNGAFEDLSLVATLYINLAAIYLKQRLRHKGSALLEKAGALLACLPDRESSAKHELDVVAYVLRQGIVVGSSPLEARACFLAIRLLLSLGRHEEVLPFAERLQLLSGHPPASEAVASVLSFLYDKKYLPHLAVASVQQHGIQSAQGMSLPIWQVHLVLQNTTKLLGFPSPGWGEVSALACPMLRQALAACEELADRSTQRALCLILSKVYLEHRSPDGAIHYLSQALVLGQLLGEQESFESSLCLAWAYLLASQAKKALDVLEPLLCSLKETESLTQRGVIYNLLGLALQGEGRVNRAAKSYLRALNRAQEVGDVHNQAVAMANLGHLSLKSWAQHPARNYLLQAVRLYCELQASKETDMELVQVFLWLAQVLVSGHQLTHGLLCYEMALLFGLRHRHLKSQLQATKSLCHFYSSVSPNPEACITYHEHWLALAQQLRDREMEGRLLESLGQLYRNLNTARSLRRSLTCIKESLRIFIDLGETDKAAEAWLGAGRLHYLMQEDELVELCLQAAIQTALKSEEPLLALKLYEEAGDVFFNGTRHRHHAVEYYRAGAVPLARRLKAVRTELRIFNKLTELQISLEGYEKALEFATLAARLSTVTGDQRQELVAFHRLATVYYSLHMYEMAEDCYLKTLSLCPPWLQSPKEALYYAKVYYRLGRLTFCQLKDAHDATEYFLLALAAAVLLGDEELQDTIRSRLDNICQSPLWHSRPSGCSSERARWLSGGGLAL

SEQ ID NO: 31965 - protein, 1222 aa, Artificial Sequence
  Synthetic polypeptide
TSSVWPFSTTLSKDLTLSFCVKSRSRRCVNGPLQEAARRRLWALENEDQEVRMLFKDLSARLVSIQSQRAQFLITFKTMEEIWKFSTYLNLGYVSMCLEHLLFDHKYWLNCILVEDTEIQVSVDDKHLETIYLGLLIQEGHFFCRALCSVTPPAEKEGECLTLCKNELISVKMAEAGSELEGVSLVTGQRGLVLVSALEPLPLPFHQWFLKNYPGSCGLSRKRDWTGSYQIGRGRCKALTGYEPGEKDELNFYQGESIEIIGFVIPGLQWFIGKSTSSGQVGFVPTRNIDPDSYSPMSRNSAFLSDEERCSLLALGSDKQTECSSFLHTLARTDITSVYRLSGFESIQNPPNDLSASQPEGFKEVRPGRAWEEHQAVGSRQSSSSEDSSLEEELLSATSDSYRLPEPDDLDDPELLMDLSTGQEEEAENFAPILAFLDHEGYADHFKSLYDFSFSFLTSSFYSFSEEDEFVAYLEASRKWAKKSHMTWAHARLCFLLGRLSIRKVKLSQARVYFEEAIHILNGAFEDLSLVATLYINLAAIYLKQRLRHKGSALLEKAGALLACLPDRESSAKHELDVVAYVLRQGIVVGSSPLEARACFLAIRLLLSLGRHEEVLPFAERLQLLSGHPPASEAVASVLSFLYDKKYLPHLAVASVQQHGIQSAQGMSLPIWQVHLVLQNTTKLLGFPSPGWGEVSALACPMLRQALAACEELADRSTQRALCLILSKVYLEHRSPDGAIHYLSQALVLGQLLGEQESFESSLCLAWAYLLASQAKKALDVLEPLLCSLKETESLTQRGVIYNLLGLALQGEGRVNRAAKSYLRALNRAQEVGDVHNQAVAMANLGHLSLKSWAQHPARNYLLQAVRLYCELQASKETDMELVQVFLWLAQVLVSGHQLTHGLLCYEMALLFGLRHRHLKSQLQATKSLCHFYSSVSPNPEACITYHEHWLALAQQLRDREMEGRLLESLGQLYRNLNTARSLRRSLTCIKESLRIFIDLGETDKAAEAWLGAGRLHYLMQEDELVELCLQAAIQTALKSEEPLLALKLYEEAGDVFFNGTRHRHHAVEYYRAGAVPLARRLKAVRTELRIFNKLTELQISLEGYEKALEFATLAARLSTVTGDQRQELVAFHRLATVYYSLHMYEMAEDCYLKTLSLCPPWLQSPKEALYYAKVYYRLGRLTFCQLKFLLCCPGWSSVVQSGLPATSDSGAQVILQCQPPE

SEQ ID NO: 31966 - protein, 14 aa, Artificial Sequence
  Synthetic polypeptide
PPQYGLSRQHYPKT

SEQ ID NO: 31967 - protein, 45 aa, Artificial Sequence
  Synthetic polypeptide
LLSMAFLDNTIQRPDTLLLCKEPLQEVCKWTPTGSCSEAALGTGE

SEQ ID NO: 31968 - protein, 190 aa, Artificial Sequence
  Synthetic polypeptide
TSSVWPFSTTLSKDLTLSFCVKSRSRRCVNGPLQEAARRRLWALENEDQEVRMLFKDLSARLVSIQSQRAQFLITFKTMEEIWKFSTYLNLGYVSMCLEHLLFDHKYWLNCILVEDTEIQVSVDDKHLETIYLGLLIQEGHFFCRALCSVTPPAEKEGECLTLCKNELISVKMAEAGSELEGVSLVTGGS

SEQ ID NO: 31969 - protein, 1251 aa, Artificial Sequence
  Synthetic polypeptide
TSSVWPFSTTLSKDLTLSFCVKSRSRRCVNGPLQEAARRRLWALENEDQEVRMLFKDLSARLVSIQSQRAQFLITFKTMEEIWKFSTYLNLGYVSMCLEHLLFDHKYWLNCILVEDTEIQVSVDDKHLETIYLGLLIQEGHFFCRALCSVTPPAEKEGECLTLCKNELISVKMAEAGSELEGVSLVTGQRGLVLVSALEPLPLPFHQWFLKNYPGSCGLSRKRDWTGSYQIGRGRCKALTGYEPGEKDELNFYQGESIEIIGFVIPGLQWFIGKSTSSGQVGFVPTRNIDPDSYSPMSRNSAFLSDEERCSLLALGSDKQTECSSFLHTLARTDITSVYRLSGFESIQNPPNDLSASQPEGFKEVRPGRAWEEHQAVGSRQSSSSEDSSLEEELLSATSDSYRLPEPDDLDDPELLMDLSTGQEEEAENFAPILAFLDHEGYADHFKSLYDFSFSFLTSSFYSFSEEDEFVAYLEASRKWAKKSHMTWAHARLCFLLGRLSIRKVKLSQARVYFEEAIHILNGAFEDLSLVATLYINLAAIYLKQRLRHKGSALLEKAGALLACLPDRESSAKHELDVVAYVLRQGIVVGSSPLEARACFLAIRLLLSLGRHEEVLPFAERLQLLSGHPPASEAVASVLSFLYDKKYLPHLAVASVQQHGIQSAQGMSLPIWQVHLVLQNTTKLLGFPSPGWGEVSALACPMLRQALAACEELADRSTQRALCLILSKVYLEHRSPDGAIHYLSQALVLGQLLGEQESFESSLCLAWAYLLASQAKKALDVLEPLLCSLKETESLTQRGVIYNLLGLALQGEGRVNRAAKSYLRALNRAQEVGDVHNQAVAMANLGHLSLKSWAQHPARNYLLQAVRLYCELQASKETDMELVQVFLWLAQVLVSGHQLTHGLLCYEMALLFGLRHRHLKSQLQATKSLCHFYSSVSPNPEACITYHEHWLALAQQLRDREMEGRLLESLGQLYRNLNTARSLRRSLTCIKESLRIFIDLGETDKAAEAWLGAGRLHYLMQEDELVELCLQAAIQTALKSEEPLLALKLYEEAGDVFFNGTRHRHHAVEYYRAGAVPLARRLKAVRTELRIFNKLTELQISLEGYEKALEFATLAARLSTVTGDQRQELVAFHRLATVYYSLHMYEMAEDCYLKTLSLCPPWLQSPKEALYYAKVYYRLGRLTFCQLKDAHDATEYFLLALAAAVLLGDEELQDTIRSRLDNICQSPLWHSRPSGCSSERARWLSGGGLAL

SEQ ID NO: 31970 - protein, 1244 aa, Artificial Sequence
  Synthetic polypeptide
TSSVWPFSTTLSKDLTLSFCVKSRSRRCVNGPLQEAARRRLWALENEDQEVRMLFKDLSARLVSIQSQRAQFLITFKTMEEIWKFSTYLNLEHLLFDHKYWLNCILVEDTEIQVSVDDKHLETIYLGLLIQEGHFFCRALCSVTPPAEKEGECLTLCKNELISVKMAEAGSELEGVSLVTGQRGLVLVSALEPLPLPFHQWFLKNYPGSCGLSRKRDWTGSYQIGRGRCKALTGYEPGEKDELNFYQGESIEIIGFVIPGLQWFIGKSTSSGQVGFVPTRNIDPDSYSPMSRNSAFLSDEERCSLLALGSDKQTECSSFLHTLARTDITSVYRLSGFESIQNPPNDLSASQPEGFKEVRPGRAWEEHQAVGSRQSSSSEDSSLEEELLSATSDSYRLPEPDDLDDPELLMDLSTGQEEEAENFAPILAFLDHEGYADHFKSLYDFSFSFLTSSFYSFSEEDEFVAYLEASRKWAKKSHMTWAHARLCFLLGRLSIRKVKLSQARVYFEEAIHILNGAFEDLSLVATLYINLAAIYLKQRLRHKGSALLEKAGALLACLPDRESSAKHELDVVAYVLRQGIVVGSSPLEARACFLAIRLLLSLGRHEEVLPFAERLQLLSGHPPASEAVASVLSFLYDKKYLPHLAVASVQQHGIQSAQGMSLPIWQVHLVLQNTTKLLGFPSPGWGEVSALACPMLRQALAACEELADRSTQRALCLILSKVYLEHRSPDGAIHYLSQALVLGQLLGEQESFESSLCLAWAYLLASQAKKALDVLEPLLCSLKETESLTQRGVIYNLLGLALQGEGRVNRAAKSYLRALNRAQEVGDVHNQAVAMANLGHLSLKSWAQHPARNYLLQAVRLYCELQASKETDMELVQVFLWLAQVLVSGHQLTHGLLCYEMALLFGLRHRHLKSQLQATKSLCHFYSSVSPNPEACITYHEHWLALAQQLRDREMEGRLLESLGQLYRNLNTARSLRRSLTCIKESLRIFIDLGETDKAAEAWLGAGRLHYLMQEDELVELCLQAAIQTALKSEEPLLALKLYEEAGDVFFNGTRHRHHAVEYYRAGAVPLARRLKAVRTELRIFNKLTELQISLEGYEKALEFATLAARLSTVTGDQRQELVAFHRLATVYYSLHMYEMAEDCYLKTLSLCPPWLQSPKEALYYAKVYYRLGRLTFCQLKDAHDATEYFLLALAAAVLLGDEELQDTIRSRLDNICQSPLWHSRPSGCSSERARWLSGGGLAL

SEQ ID NO: 31971 - protein, 58 aa, Artificial Sequence
  Synthetic polypeptide
TSSVWPFSTTLSKDLTLSFCVKSRSRRCVNGPLQEAARRRLWALENEDQEVRMLFKVL

SEQ ID NO: 31972 - protein, 10 aa, Artificial Sequence
  Synthetic polypeptide
PMSQADPLKP

SEQ ID NO: 31973 - protein, 1243 aa, Artificial Sequence
  Synthetic polypeptide
NRKETPSKDPTVSSECIASSEYKEKCFLPQNINPDLTLSFCVKSRSRRCVNGPLQEAARRRLWALENEDQEVRMLFKDLSARLVSIQSQRAQFLITFKTMEEIWKFSTYLNLGYVSMCLEHLLFDHKYWLNCILVEDTEIQVSVDDKHLETIYLGLLIQEGHFFCRALCSVTPPAEKEGECLTLCKNELISVKMAEAGSELEGVSLVTGQRGLVLVSALEPLPLPFHQWFLKNYPGSCGLSRKRDWTGSYQIGRGRCKALTGYEPGEKDELNFYQGESIEIIGFVIPGLQWFIGKSTSSGQVGFVPTRNIDPDSYSPMSRNSAFLSDEERCSLLALGSDKQTECSSFLHTLARTDITSVYRLSGFESIQNPPNDLSASQPEGFKEVRPGRAWEEHQAVGSRQSSSSEDSSLEEELLSATSDSYRLPEPDDLDDPELLMDLSTGQEEEAENFAPILAFLDHEGYADHFKSLYDFSFSFLTSSFYSFSEEDEFVAYLEASRKWAKKSHMTWAHARLCFLLGRLSIRKVKLSQARVYFEEAIHILNGAFEDLSLVATLYINLAAIYLKQRLRHKGSALLEKAGALLACLPDRESSAKHELDVVAYVLRQGIVVGSSPLEARACFLAIRLLLSLGRHEEVLPFAERLQLLSGHPPASEAVASVLSFLYDKKYLPHLAVASVQQHGIQSAQGMSLPIWQVHLVLQNTTKLLGFPSPGWGEVSALACPMLRQALAACEELADRSTQRALCLILSKVYLEHRSPDGAIHYLSQALVLGQLLGEQESFESSLCLAWAYLLASQAKKALDVLEPLLCSLKETESLTQRGVIYNLLGLALQGEGRVNRAAKSYLRALNRAQEVGDVHNQAVAMANLGHLSLKSWAQHPARNYLLQAVRLYCELQASKETDMELVQVFLWLAQVLVSGHQLTHGLLCYEMALLFGLRHRHLKSQLQATKSLCHFYSSVSPNPEACITYHEHWLALAQQLRDREMEGRLLESLGQLYRNLNTARSLRRSLTCIKESLRIFIDLGETDKAAEAWLGAGRLHYLMQEDELVELCLQAAIQTALKSEEPLLALKLYEEAGDVFFNGTRHRHHAVEYYRAGAVPLARRLKAVRTELRIFNKLTELQISLEGYEKALEFATLAARLSTVTGDQRQELVAFHRLATVYYSLHMYEMAEDCYLKTLSLCPPWLQSPKEALYYAKVYYRLGRLTFCQLKFLLCCPGWSSVVQSGLPATSDSGAQVILQCQPPE

SEQ ID NO: 31974 - protein, 19 aa, Artificial Sequence
  Synthetic polypeptide
PFKTVKKLLPRIQLYRVSV

SEQ ID NO: 31975 - protein, 211 aa, Artificial Sequence
  Synthetic polypeptide
NRKETPSKDPTVSSECIASSEYKEKCFLPQNINPDLTLSFCVKSRSRRCVNGPLQEAARRRLWALENEDQEVRMLFKDLSARLVSIQSQRAQFLITFKTMEEIWKFSTYLNLGYVSMCLEHLLFDHKYWLNCILVEDTEIQVSVDDKHLETIYLGLLIQEGHFFCRALCSVTPPAEKEGECLTLCKNELISVKMAEAGSELEGVSLVTGGS

SEQ ID NO: 31976 - protein, 1272 aa, Artificial Sequence
  Synthetic polypeptide
NRKETPSKDPTVSSECIASSEYKEKCFLPQNINPDLTLSFCVKSRSRRCVNGPLQEAARRRLWALENEDQEVRMLFKDLSARLVSIQSQRAQFLITFKTMEEIWKFSTYLNLGYVSMCLEHLLFDHKYWLNCILVEDTEIQVSVDDKHLETIYLGLLIQEGHFFCRALCSVTPPAEKEGECLTLCKNELISVKMAEAGSELEGVSLVTGQRGLVLVSALEPLPLPFHQWFLKNYPGSCGLSRKRDWTGSYQIGRGRCKALTGYEPGEKDELNFYQGESIEIIGFVIPGLQWFIGKSTSSGQVGFVPTRNIDPDSYSPMSRNSAFLSDEERCSLLALGSDKQTECSSFLHTLARTDITSVYRLSGFESIQNPPNDLSASQPEGFKEVRPGRAWEEHQAVGSRQSSSSEDSSLEEELLSATSDSYRLPEPDDLDDPELLMDLSTGQEEEAENFAPILAFLDHEGYADHFKSLYDFSFSFLTSSFYSFSEEDEFVAYLEASRKWAKKSHMTWAHARLCFLLGRLSIRKVKLSQARVYFEEAIHILNGAFEDLSLVATLYINLAAIYLKQRLRHKGSALLEKAGALLACLPDRESSAKHELDVVAYVLRQGIVVGSSPLEARACFLAIRLLLSLGRHEEVLPFAERLQLLSGHPPASEAVASVLSFLYDKKYLPHLAVASVQQHGIQSAQGMSLPIWQVHLVLQNTTKLLGFPSPGWGEVSALACPMLRQALAACEELADRSTQRALCLILSKVYLEHRSPDGAIHYLSQALVLGQLLGEQESFESSLCLAWAYLLASQAKKALDVLEPLLCSLKETESLTQRGVIYNLLGLALQGEGRVNRAAKSYLRALNRAQEVGDVHNQAVAMANLGHLSLKSWAQHPARNYLLQAVRLYCELQASKETDMELVQVFLWLAQVLVSGHQLTHGLLCYEMALLFGLRHRHLKSQLQATKSLCHFYSSVSPNPEACITYHEHWLALAQQLRDREMEGRLLESLGQLYRNLNTARSLRRSLTCIKESLRIFIDLGETDKAAEAWLGAGRLHYLMQEDELVELCLQAAIQTALKSEEPLLALKLYEEAGDVFFNGTRHRHHAVEYYRAGAVPLARRLKAVRTELRIFNKLTELQISLEGYEKALEFATLAARLSTVTGDQRQELVAFHRLATVYYSLHMYEMAEDCYLKTLSLCPPWLQSPKEALYYAKVYYRLGRLTFCQLKDAHDATEYFLLALAAAVLLGDEELQDTIRSRLDNICQSPLWHSRPSGCSSERARWLSGGGLAL

SEQ ID NO: 31977 - protein, 1265 aa, Artificial Sequence
  Synthetic polypeptide
NRKETPSKDPTVSSECIASSEYKEKCFLPQNINPDLTLSFCVKSRSRRCVNGPLQEAARRRLWALENEDQEVRMLFKDLSARLVSIQSQRAQFLITFKTMEEIWKFSTYLNLEHLLFDHKYWLNCILVEDTEIQVSVDDKHLETIYLGLLIQEGHFFCRALCSVTPPAEKEGECLTLCKNELISVKMAEAGSELEGVSLVTGQRGLVLVSALEPLPLPFHQWFLKNYPGSCGLSRKRDWTGSYQIGRGRCKALTGYEPGEKDELNFYQGESIEIIGFVIPGLQWFIGKSTSSGQVGFVPTRNIDPDSYSPMSRNSAFLSDEERCSLLALGSDKQTECSSFLHTLARTDITSVYRLSGFESIQNPPNDLSASQPEGFKEVRPGRAWEEHQAVGSRQSSSSEDSSLEEELLSATSDSYRLPEPDDLDDPELLMDLSTGQEEEAENFAPILAFLDHEGYADHFKSLYDFSFSFLTSSFYSFSEEDEFVAYLEASRKWAKKSHMTWAHARLCFLLGRLSIRKVKLSQARVYFEEAIHILNGAFEDLSLVATLYINLAAIYLKQRLRHKGSALLEKAGALLACLPDRESSAKHELDVVAYVLRQGIVVGSSPLEARACFLAIRLLLSLGRHEEVLPFAERLQLLSGHPPASEAVASVLSFLYDKKYLPHLAVASVQQHGIQSAQGMSLPIWQVHLVLQNTTKLLGFPSPGWGEVSALACPMLRQALAACEELADRSTQRALCLILSKVYLEHRSPDGAIHYLSQALVLGQLLGEQESFESSLCLAWAYLLASQAKKALDVLEPLLCSLKETESLTQRGVIYNLLGLALQGEGRVNRAAKSYLRALNRAQEVGDVHNQAVAMANLGHLSLKSWAQHPARNYLLQAVRLYCELQASKETDMELVQVFLWLAQVLVSGHQLTHGLLCYEMALLFGLRHRHLKSQLQATKSLCHFYSSVSPNPEACITYHEHWLALAQQLRDREMEGRLLESLGQLYRNLNTARSLRRSLTCIKESLRIFIDLGETDKAAEAWLGAGRLHYLMQEDELVELCLQAAIQTALKSEEPLLALKLYEEAGDVFFNGTRHRHHAVEYYRAGAVPLARRLKAVRTELRIFNKLTELQISLEGYEKALEFATLAARLSTVTGDQRQELVAFHRLATVYYSLHMYEMAEDCYLKTLSLCPPWLQSPKEALYYAKVYYRLGRLTFCQLKDAHDATEYFLLALAAAVLLGDEELQDTIRSRLDNICQSPLWHSRPSGCSSERARWLSGGGLAL

SEQ ID NO: 31978 - protein, 79 aa, Artificial Sequence
  Synthetic polypeptide
NRKETPSKDPTVSSECIASSEYKEKCFLPQNINPDLTLSFCVKSRSRRCVNGPLQEAARRRLWALENEDQEVRMLFKVL

SEQ ID NO: 31979 - protein, 502 aa, Artificial Sequence
  Synthetic polypeptide
ILAPPHAVGVTLASDPHLCKPQFLHRKPFPIGDKVTFSGKECVCQTCSQSMASSKPIKIRGPSHCAGCKEEIKHGQSLLALDKQWHVSCFKCQTCSVILTGEYISKDGVPYCESDYHAQFGIKCETCDRYISGRVLEAGGKHYHPTCARCVRCHQMFTEGEEMYLTGSEVWHPICKQAARAEKKLKHRRTSETSISPPGSSIGSPNRVICDIYENLDLRQRRASSPGYIDSPTYSRQGMSPTFSRSPHHYYRSAGDSNIYRKPPIYKRHGDLSTATKSKTSEDISQTSKYSPIYSPDPYYASESEYWTYHGSPKVPRARRFSSGGEEDDFDRSMHKLQSGIGRLILKEEMKARSSSYADPWTPPRSSTSSREALHTAGYEMSLNGSPRSHYLADSDPLISKSASLPAYRRNGLHRTPSADLFHYDSMNAVNWGMREYKIYPYELLLVTTRGRNRLPKDVDRTRLERHLSQEEFYQVFGMTISEFDRLALWKRNELKKQARLF

SEQ ID NO: 31980 - protein, 24 aa, Artificial Sequence
  Synthetic polypeptide
PWQVTPTSVSLSFSTGSLSPLETR

SEQ ID NO: 31981 - protein, 19 aa, Artificial Sequence
  Synthetic polypeptide
ASVSPQEAFPHWRQGDLQR

SEQ ID NO: 31982 - protein, 458 aa, Artificial Sequence
  Synthetic polypeptide
ILAPPHAVGVTLASDPHLCKPQFLHRKPFPIGDKVTFSGKECVCQTCSQSMASSKPIKIRGPSHCAGCKEEIKHGQSLLALDKQWHVSCFKCQTCSVILTGEYISKDGVPYCESDYHAQFGIKCETCDRYISGRVLEAGGKHYHPTCARCVRCHQMFTEGEEMYLTGSEVWHPICKQAARAEKKLKHRRTSETSISPPGSSIGSPNRVICDIYENLDLRQRRASSPGYIDSPTYSRQGMSPTFSRSPHHYYRSGDLSTATKSKTSEDISQTSKYSPIYSPDPYYASESEYWTYHGSPKVPRARRFSSGGEEDDFDRSMHKLQSGIGRLILKEEMKARSSSYADPWTPPRSSTSSREALHTAGYEMSLNGSPRSHYLADSDPLISKSASLPAYRRNGLHRTPSADLFHYDSMNAVNWGMREYKIYPYELLLVTTRGRNRLPKDVDRTRLEGNFWKSGCL

SEQ ID NO: 31983 - protein, 597 aa, Artificial Sequence
  Synthetic polypeptide
ILAPPHAVGVTLASDPHLCKPQFLHRKPFPIGDKVTFSGKECVCQTCSQSMASSKPIKIRGPSHCAGCKEEIKHGQSLLALDKQWHVSCFKCQTCSVILTGEYISKDGVPYCESDYHAQFGIKCETCDRYISGRVLEAGGKHYHPTCARCVRCHQMFTEGEEMYLTGSEVWHPICKQAARAEKKLKHRRTSETSISPPGSSIGSPNRVICAKVDNEILNYKDLAALPKVKSIYEVQRPDLISYEPHSRYMSDEMLERCGYGESLGTLSPYSQDIYENLDLRQRRASSPGYIDSPTYSRQGMSPTFSRSPHHYYRSGPESGRSSPYHSQLDVRSSTPTSYQAPKHFHIPAGDSNIYRKPPIYKRHGDLSTATKSKTSEDISQTSKYSPIYSPDPYYASESEYWTYHGSPKVPRARRFSSGGEEDDFDRSMHKLQSGIGRLILKEEMKARSSSYADPWTPPRSSTSSREALHTAGYEMSLNGSPRSHYLADSDPLISKSASLPAYRRNGLHRTPSADLFHYDSMNAVNWGMREYKIYPYELLLVTTRGRNRLPKDVDRTRLERHLSQEEFYQVFGMTISEFDRLALWKRNELKKQARLF

SEQ ID NO: 31984 - protein, 39 aa, Artificial Sequence
  Synthetic polypeptide
ILAPPHAVGVTLASDPHLCKPQFLHRKPFPIGDKVTFSG

SEQ ID NO: 31985 - protein, 564 aa, Artificial Sequence
  Synthetic polypeptide
ILAPPHAVGVTLASDPHLCKPQFLHRKPFPIGDKVTFSGKECVCQTCSQSMASSKPIKIRGPSHCAGCKEEIKHGQSLLALDKQWHVSCFKCQTCSVILTGEYISKDGVPYCESDYHAQFGIKCETCDRYISGRVLEAGGKHYHPTCARCVRCHQMFTEGEEMYLTGSEVWHPICKQAARAEKKLKHRRTSETSISPPGSSIGSPNRVICAKVDNEILNYKDLAALPKVKSIYEVQRPDLISYEPHSRYMSDEMLERCGYGESLGTLSPYSQDIYENLDLRQRRASSPGYIDSPTYSRQGMSPTFSRSPHHYYRSAGDSNIYRKPPIYKRHGDLSTATKSKTSEDISQTSKYSPIYSPDPYYASESEYWTYHGSPKVPRARRFSSGGEEDDFDRSMHKLQSGIGRLILKEEMKARSSSYADPWTPPRSSTSSREALHTAGYEMSLNGSPRSHYLADSDPLISKSASLPAYRRNGLHRTPSADLFHYDSMNAVNWGMREYKIYPYELLLVTTRGRNRLPKDVDRTRLERHLSQEEFYQVFGMTISEFDRLALWKRNELKKQARLF

SEQ ID NO: 31986 - protein, 448 aa, Artificial Sequence
  Synthetic polypeptide
SSWISCLKQDCAGCKEEIKHGQSLLALDKQWHVSCFKCQTCSVILTGEYISKDGVPYCESDYHAQFGIKCETCDRYISGRVLEAGGKHYHPTCARCVRCHQMFTEGEEMYLTGSEVWHPICKQAARAEKKLKHRRTSETSISPPGSSIGSPNRVICDIYENLDLRQRRASSPGYIDSPTYSRQGMSPTFSRSPHHYYRSAGDSNIYRKPPIYKRHGDLSTATKSKTSEDISQTSKYSPIYSPDPYYASESEYWTYHGSPKVPRARRFSSGGEEDDFDRSMHKLQSGIGRLILKEEMKARSSSYADPWTPPRSSTSSREALHTAGYEMSLNGSPRSHYLADSDPLISKSASLPAYRRNGLHRTPSADLFHYDSMNAVNWGMREYKIYPYELLLVTTRGRNRLPKDVDRTRLERHLSQEEFYQVFGMTISEFDRLALWKRNELKKQARLF

SEQ ID NO: 31987 - protein, 123 aa, Artificial Sequence
  Synthetic polypeptide
NKTVPGARRRSSTASHSWLWTSSGTSAASSARPAASSSPGSISARMVFHTVSPTTMPSLALNVRLVTDTSVAESWRQEGSTTTQPVPGVYAATRCSPKERKCTSQVPRFGTPSANRQPGQRRS

SEQ ID NO: 31988 - protein, 53 aa, Artificial Sequence
  Synthetic polypeptide
LPKTRLCRVQGGDQARPVTPGSGQAVARQLLQVPDLQRHPHRGVYQQGWCSIL

SEQ ID NO: 31989 - protein, 404 aa, Artificial Sequence
  Synthetic polypeptide
SSWISCLKQDCAGCKEEIKHGQSLLALDKQWHVSCFKCQTCSVILTGEYISKDGVPYCESDYHAQFGIKCETCDRYISGRVLEAGGKHYHPTCARCVRCHQMFTEGEEMYLTGSEVWHPICKQAARAEKKLKHRRTSETSISPPGSSIGSPNRVICDIYENLDLRQRRASSPGYIDSPTYSRQGMSPTFSRSPHHYYRSGDLSTATKSKTSEDISQTSKYSPIYSPDPYYASESEYWTYHGSPKVPRARRFSSGGEEDDFDRSMHKLQSGIGRLILKEEMKARSSSYADPWTPPRSSTSSREALHTAGYEMSLNGSPRSHYLADSDPLISKSASLPAYRRNGLHRTPSADLFHYDSMNAVNWGMREYKIYPYELLLVTTRGRNRLPKDVDRTRLEGNFWKSGCL

SEQ ID NO: 31990 - protein, 543 aa, Artificial Sequence
  Synthetic polypeptide
SSWISCLKQDCAGCKEEIKHGQSLLALDKQWHVSCFKCQTCSVILTGEYISKDGVPYCESDYHAQFGIKCETCDRYISGRVLEAGGKHYHPTCARCVRCHQMFTEGEEMYLTGSEVWHPICKQAARAEKKLKHRRTSETSISPPGSSIGSPNRVICAKVDNEILNYKDLAALPKVKSIYEVQRPDLISYEPHSRYMSDEMLERCGYGESLGTLSPYSQDIYENLDLRQRRASSPGYIDSPTYSRQGMSPTFSRSPHHYYRSGPESGRSSPYHSQLDVRSSTPTSYQAPKHFHIPAGDSNIYRKPPIYKRHGDLSTATKSKTSEDISQTSKYSPIYSPDPYYASESEYWTYHGSPKVPRARRFSSGGEEDDFDRSMHKLQSGIGRLILKEEMKARSSSYADPWTPPRSSTSSREALHTAGYEMSLNGSPRSHYLADSDPLISKSASLPAYRRNGLHRTPSADLFHYDSMNAVNWGMREYKIYPYELLLVTTRGRNRLPKDVDRTRLERHLSQEEFYQVFGMTISEFDRLALWKRNELKKQARLF

SEQ ID NO: 31991 - protein, 510 aa, Artificial Sequence
  Synthetic polypeptide
SSWISCLKQDCAGCKEEIKHGQSLLALDKQWHVSCFKCQTCSVILTGEYISKDGVPYCESDYHAQFGIKCETCDRYISGRVLEAGGKHYHPTCARCVRCHQMFTEGEEMYLTGSEVWHPICKQAARAEKKLKHRRTSETSISPPGSSIGSPNRVICAKVDNEILNYKDLAALPKVKSIYEVQRPDLISYEPHSRYMSDEMLERCGYGESLGTLSPYSQDIYENLDLRQRRASSPGYIDSPTYSRQGMSPTFSRSPHHYYRSAGDSNIYRKPPIYKRHGDLSTATKSKTSEDISQTSKYSPIYSPDPYYASESEYWTYHGSPKVPRARRFSSGGEEDDFDRSMHKLQSGIGRLILKEEMKARSSSYADPWTPPRSSTSSREALHTAGYEMSLNGSPRSHYLADSDPLISKSASLPAYRRNGLHRTPSADLFHYDSMNAVNWGMREYKIYPYELLLVTTRGRNRLPKDVDRTRLERHLSQEEFYQVFGMTISEFDRLALWKRNELKKQARLF

SEQ ID NO: 31992 - protein, 196 aa, Artificial Sequence
  Synthetic polypeptide
GIKKRETIVVFNSLKELSYGKRGGLFLMRKNGSSHGSQVSAPYKEDSHDNHTCPRAEWTSSPPLPQEGLNCPLLETVPGARRRSSTASHSWLWTSSGTSAASSARPAASSSPGSISARMVFHTVSPTTMPSLALNVRLVTDTSVAESWRQEGSTTTQPVPGVYAATRCSPKERKCTSQVPRFGTPSANRQPGQRRS

SEQ ID NO: 31993 - protein, 54 aa, Artificial Sequence
  Synthetic polypeptide
TAHYWRLCRVQGGDQARPVTPGSGQAVARQLLQVPDLQRHPHRGVYQQGWCSIL

SEQ ID NO: 31994 - protein, 465 aa, Artificial Sequence
  Synthetic polypeptide
QSYLSKGRVDFLTTPSSGGVKLPTTGDCAGCKEEIKHGQSLLALDKQWHVSCFKCQTCSVILTGEYISKDGVPYCESDYHAQFGIKCETCDRYISGRVLEAGGKHYHPTCARCVRCHQMFTEGEEMYLTGSEVWHPICKQAARAEKKLKHRRTSETSISPPGSSIGSPNRVICDIYENLDLRQRRASSPGYIDSPTYSRQGMSPTFSRSPHHYYRSAGDSNIYRKPPIYKRHGDLSTATKSKTSEDISQTSKYSPIYSPDPYYASESEYWTYHGSPKVPRARRFSSGGEEDDFDRSMHKLQSGIGRLILKEEMKARSSSYADPWTPPRSSTSSREALHTAGYEMSLNGSPRSHYLADSDPLISKSASLPAYRRNGLHRTPSADLFHYDSMNAVNWGMREYKIYPYELLLVTTRGRNRLPKDVDRTRLERHLSQEEFYQVFGMTISEFDRLALWKRNELKKQARLF

SEQ ID NO: 31995 - protein, 421 aa, Artificial Sequence
  Synthetic polypeptide
QSYLSKGRVDFLTTPSSGGVKLPTTGDCAGCKEEIKHGQSLLALDKQWHVSCFKCQTCSVILTGEYISKDGVPYCESDYHAQFGIKCETCDRYISGRVLEAGGKHYHPTCARCVRCHQMFTEGEEMYLTGSEVWHPICKQAARAEKKLKHRRTSETSISPPGSSIGSPNRVICDIYENLDLRQRRASSPGYIDSPTYSRQGMSPTFSRSPHHYYRSGDLSTATKSKTSEDISQTSKYSPIYSPDPYYASESEYWTYHGSPKVPRARRFSSGGEEDDFDRSMHKLQSGIGRLILKEEMKARSSSYADPWTPPRSSTSSREALHTAGYEMSLNGSPRSHYLADSDPLISKSASLPAYRRNGLHRTPSADLFHYDSMNAVNWGMREYKIYPYELLLVTTRGRNRLPKDVDRTRLEGNFWKSGCL

SEQ ID NO: 31996 - protein, 560 aa, Artificial Sequence
  Synthetic polypeptide
QSYLSKGRVDFLTTPSSGGVKLPTTGDCAGCKEEIKHGQSLLALDKQWHVSCFKCQTCSVILTGEYISKDGVPYCESDYHAQFGIKCETCDRYISGRVLEAGGKHYHPTCARCVRCHQMFTEGEEMYLTGSEVWHPICKQAARAEKKLKHRRTSETSISPPGSSIGSPNRVICAKVDNEILNYKDLAALPKVKSIYEVQRPDLISYEPHSRYMSDEMLERCGYGESLGTLSPYSQDIYENLDLRQRRASSPGYIDSPTYSRQGMSPTFSRSPHHYYRSGPESGRSSPYHSQLDVRSSTPTSYQAPKHFHIPAGDSNIYRKPPIYKRHGDLSTATKSKTSEDISQTSKYSPIYSPDPYYASESEYWTYHGSPKVPRARRFSSGGEEDDFDRSMHKLQSGIGRLILKEEMKARSSSYADPWTPPRSSTSSREALHTAGYEMSLNGSPRSHYLADSDPLISKSASLPAYRRNGLHRTPSADLFHYDSMNAVNWGMREYKIYPYELLLVTTRGRNRLPKDVDRTRLERHLSQEEFYQVFGMTISEFDRLALWKRNELKKQARLF

SEQ ID NO: 31997 - protein, 527 aa, Artificial Sequence
  Synthetic polypeptide
QSYLSKGRVDFLTTPSSGGVKLPTTGDCAGCKEEIKHGQSLLALDKQWHVSCFKCQTCSVILTGEYISKDGVPYCESDYHAQFGIKCETCDRYISGRVLEAGGKHYHPTCARCVRCHQMFTEGEEMYLTGSEVWHPICKQAARAEKKLKHRRTSETSISPPGSSIGSPNRVICAKVDNEILNYKDLAALPKVKSIYEVQRPDLISYEPHSRYMSDEMLERCGYGESLGTLSPYSQDIYENLDLRQRRASSPGYIDSPTYSRQGMSPTFSRSPHHYYRSAGDSNIYRKPPIYKRHGDLSTATKSKTSEDISQTSKYSPIYSPDPYYASESEYWTYHGSPKVPRARRFSSGGEEDDFDRSMHKLQSGIGRLILKEEMKARSSSYADPWTPPRSSTSSREALHTAGYEMSLNGSPRSHYLADSDPLISKSASLPAYRRNGLHRTPSADLFHYDSMNAVNWGMREYKIYPYELLLVTTRGRNRLPKDVDRTRLERHLSQEEFYQVFGMTISEFDRLALWKRNELKKQARLF

SEQ ID NO: 31998 - protein, 75 aa, Artificial Sequence
  Synthetic polypeptide
ALVSSSKSAGAAAPRAHRAAQPPGPRVPQRYHPGKEDGRGLHPAEPAAPSSKGGLLPVCEHSRPPLGAQLRGIPL

SEQ ID NO: 31999 - protein, 768 aa, Artificial Sequence
  Synthetic polypeptide
CLHLKVLEQLLPELTGLLSLLDHEYLSDTTLEKKMAVASILQSLQPLPAKEVSYLYVNTADLHSGPSFVESLFEEFDCDLSDLRDMPEDDGEPSKGASPELAKSPRLRNAADLPPPLPNKPPPEDYYEEALPLGPGKSPEYISSHNGCSPSHSIVDGYYEDADSSYPATRVNGELKSSYNDSDAMSSSYESYDEEEEEGKSPQPRHQWPSEEASMHLVRECRICAFLLRKKRFGQWAKQLTVIREDQLLCYKSSKDRQPHLRLALDTCSIIYVPKDSRHKRHELRFTQGATEVLVLALQSREQAEEWLKVIREVSKPVGGAEGVEVPRSPVLLCKLDLDKRLSQEKQTSDSDSVGVGDNCSTLGRRETCDHGKGKKSSLAELKGSMSRAAGRKITRIIGFSKKKTLADDLQTSSTEEEVPCCGYLNVLVNQGWKERWCRLKCNTLYFHKDHMDLRTHVNAIALQGCEVAPGFGPRHPFAFRILRNRQEVAILEASCSEDMGRWLGLLLVEMGSRVTPEALHYDYVDVETLTSIVSAGRNSFLYARSCQNQWPEPRVYDDVPYEKMQDEEPERPTGAQVKRHASSCSEKSHRVDPQVKVKRHASSANQYKYGKNRAEEDARRYLVEKEKLEKEKETIRTELIALRQEKRELKEAIRSSPGAKLKALEEAVATLEAQCRAKEERRIDLELKLVAVKERLQQSLAGGPALGLSVSSKPKSGETANKPQNSVPEQPLPVNCVSELRKRSPSIVASNQGRVLQKAKEWEMKKT

SEQ ID NO: 32000 - protein, 52 aa, Artificial Sequence
  Synthetic polypeptide
KCWSSCSQSSPGCSASWTTSTSAIPPWKRRWPWPPSCRACSPFQQRRSPTCM

SEQ ID NO: 32001 - protein, 725 aa, Artificial Sequence
  Synthetic polypeptide
CLHLKVLEQLLPELTGLLSLLDHEYLSDTTLEKKMAVASILQSLQPLPAKEVSYLYVNTADLHSGPSFVESLFEEFDCDLSDLRDMPEDDGEPSKGASPELAKSPRLRNAADLPPPLPNKPPPEDYYEEALPLGPGKSPEYISSHNGCSPSHSIVDGYYEDADSSYPATRVNGELKSSYNDSDAMSSSYESYDEEEEEGKSPQPRHQWPSEEASMHLVRECRICAFLLRKKRFGQWAKQLTVIREDQLLCYKSSKDRQPHLRLALDTCSIIYVPKDSRHKRHELRFTQGATEVLVLALQSREQAEEWLKVIREVSKPVGGAEGVEVPRSPVLLCKLDLDKRLSQEKQTSDSDSVGVGDNCSTLGRRETCDHGKGKKSSLAELKGSMSRAAGRKITRIIGFSKKKTLADDLQTSSTEEEVPCCGYLNVLVNQGWKERWCRLKCNTLYFHKDHMDLRTHVNAIALQGCEVAPGFGPRHPFAFRILRNRQEVAILEASCSEDMGRWLGLLLVEMGSRVTPEALHYDYVDVETLTSIVSAGRNSFLYARSCQNQWPEPRVYDDVPYEKMQDEEPERPTGAQVKRHASSCSEKSHRVDPQVKVKRHASSANQYKYGKNRAEEDARRYLVEKEKLEKEKETIRTELIALRQEKRELKEAIRSSPGAKLKALEEAVATLEAQCRAKEERRIDLELKLVAVKERLQQSLAGGPALGLSVSSKPKSGEWEMKKT

SEQ ID NO: 32002 - protein, 109 aa, Artificial Sequence
  Synthetic polypeptide
LATQMVQDHQHQLQLGADQKCRISDPTAHLLNQNLHFDKIPSAGAAAPRAHRAAQPPGPRVPQRYHPGKEDGRGLHPAEPAAPSSKGGLLPVCEHSRPPLGAQLRGIPL

SEQ ID NO: 32003 - protein, 773 aa, Artificial Sequence
  Synthetic polypeptide
IRICILTRSPVLEQLLPELTGLLSLLDHEYLSDTTLEKKMAVASILQSLQPLPAKEVSYLYVNTADLHSGPSFVESLFEEFDCDLSDLRDMPEDDGEPSKGASPELAKSPRLRNAADLPPPLPNKPPPEDYYEEALPLGPGKSPEYISSHNGCSPSHSIVDGYYEDADSSYPATRVNGELKSSYNDSDAMSSSYESYDEEEEEGKSPQPRHQWPSEEASMHLVRECRICAFLLRKKRFGQWAKQLTVIREDQLLCYKSSKDRQPHLRLALDTCSIIYVPKDSRHKRHELRFTQGATEVLVLALQSREQAEEWLKVIREVSKPVGGAEGVEVPRSPVLLCKLDLDKRLSQEKQTSDSDSVGVGDNCSTLGRRETCDHGKGKKSSLAELKGSMSRAAGRKITRIIGFSKKKTLADDLQTSSTEEEVPCCGYLNVLVNQGWKERWCRLKCNTLYFHKDHMDLRTHVNAIALQGCEVAPGFGPRHPFAFRILRNRQEVAILEASCSEDMGRWLGLLLVEMGSRVTPEALHYDYVDVETLTSIVSAGRNSFLYARSCQNQWPEPRVYDDVPYEKMQDEEPERPTGAQVKRHASSCSEKSHRVDPQVKVKRHASSANQYKYGKNRAEEDARRYLVEKEKLEKEKETIRTELIALRQEKRELKEAIRSSPGAKLKALEEAVATLEAQCRAKEERRIDLELKLVAVKERLQQSLAGGPALGLSVSSKPKSGETANKPQNSVPEQPLPVNCVSELRKRSPSIVASNQGRVLQKAKEWEMKKT

SEQ ID NO: 32004 - protein, 55 aa, Artificial Sequence
  Synthetic polypeptide
QDPQCWSSCSQSSPGCSASWTTSTSAIPPWKRRWPWPPSCRACSPFQQRRSPTCM

SEQ ID NO: 32005 - protein, 730 aa, Artificial Sequence
  Synthetic polypeptide
IRICILTRSPVLEQLLPELTGLLSLLDHEYLSDTTLEKKMAVASILQSLQPLPAKEVSYLYVNTADLHSGPSFVESLFEEFDCDLSDLRDMPEDDGEPSKGASPELAKSPRLRNAADLPPPLPNKPPPEDYYEEALPLGPGKSPEYISSHNGCSPSHSIVDGYYEDADSSYPATRVNGELKSSYNDSDAMSSSYESYDEEEEEGKSPQPRHQWPSEEASMHLVRECRICAFLLRKKRFGQWAKQLTVIREDQLLCYKSSKDRQPHLRLALDTCSIIYVPKDSRHKRHELRFTQGATEVLVLALQSREQAEEWLKVIREVSKPVGGAEGVEVPRSPVLLCKLDLDKRLSQEKQTSDSDSVGVGDNCSTLGRRETCDHGKGKKSSLAELKGSMSRAAGRKITRIIGFSKKKTLADDLQTSSTEEEVPCCGYLNVLVNQGWKERWCRLKCNTLYFHKDHMDLRTHVNAIALQGCEVAPGFGPRHPFAFRILRNRQEVAILEASCSEDMGRWLGLLLVEMGSRVTPEALHYDYVDVETLTSIVSAGRNSFLYARSCQNQWPEPRVYDDVPYEKMQDEEPERPTGAQVKRHASSCSEKSHRVDPQVKVKRHASSANQYKYGKNRAEEDARRYLVEKEKLEKEKETIRTELIALRQEKRELKEAIRSSPGAKLKALEEAVATLEAQCRAKEERRIDLELKLVAVKERLQQSLAGGPALGLSVSSKPKSGEWEMKKT

SEQ ID NO: 32006 - protein, 137 aa, Artificial Sequence
  Synthetic polypeptide
PFYSSLQPSAVPLAFDWGFPLPGSPLLNALPGWCLSSLPLSISCSEKASGTTLKSLLTVRMRPSWQSSPRPWMTSLKMTWVWLPSQPWMVETLYHAPQLRLPPHLHPPALPRRSPRPQPLRWTSSHWRTAPKTRRLP

SEQ ID NO: 32007 - protein, 16 aa, Artificial Sequence
  Synthetic polypeptide
VSAAQRRHLGPPSRAY

SEQ ID NO: 32008 - protein, 928 aa, Artificial Sequence
  Synthetic polypeptide
RFTWLVSFKPTFKYQLLREGIWDHPQEPIDSENEALLAELTKTLDDIPEDDVGLAAFPALDGGDALSCTSASPAPSSAPPSPAPEKPSAPAPEVDELSLADSTQDKKAPMMQSQSRSCTELHKHLTSAQCCLQDRGLQPPCLQSPRLPAKEDKEPGEDCPSPQPAPASPRDSLALGRADPGAPVSQEDMQAMVQLIRYMHTYCLPQRKLPPQTPEPLPKACSNPSQQVRSRPWSRHHSKASWAEFSILRELLAQDVLCDVSKPYRLATPVYASLTPRSRPRPPKDSQASPGRPSSVEEVRIAASPKSTGPRPSLRPLRLEVKREVRRPARLQQQEEEDEEEEEEEEEEEKEEEEEWGRKRPGRGLPWTKLGRKLESSVCPVRRSRRLNPELGPWLTFADEPLVPSEPQGALPSLCLAPKAYDVERELGSPTDEDSGQDQQLLRGPQIPALESPCESGCGDMDEDPSCPQLPPRDSPRCLMLALSQSDPTFGKKSFEQTLTVELCGTAGLTPPTTPPYKPTEEDPFKPDIKHSLGKEIALSLPSPEGLSLKATPGAAHKLPKKHPERSELLSHLRHATAQPASQAGQKRPFSCSFGDHDYCQVLRPEGVLQRKVLRSWEPSGVHLEDWPQQGAPWAEAQAPGREEDRSCDAGAPPKDSTLLRDHEIRASLTKHFGLLETALEEEDLASCKSPEYDTVFEDSSSSSGESSFLPEEEEEEGEEEEEDDEEEDSGVSPTCSDHCPYQSPPSKANRQLCSRSRSSSGSSPCHSWSPATRRNFRCESRGPCSDRTPSIRHARKRREKAIGEGRVVYIQNLSSDMSSRELKRRFEVFGEIEECEVLTRNRRGEKYGFITYRCSEHAALSLTKGAALRKRNEPSFQLSYGGLRHFCWPRYTDYDSNSEEALPASGKSKYEAMDFDSLLKEAQQSLH

SEQ ID NO: 32009 - protein, 176 aa, Artificial Sequence
  Synthetic polypeptide
PFYSSLQPSAVPLAFDWGFPLPGSPLLNALPGWCLSSLPLSISCSEKASGTTLKSLLTVRMRPSWQSSPRPWMTSLKMTWVWLPSQPWMVETLYHAPQLRLPPHLHPPALPRRSPRPQPLRWTSSHCCRSSSWPHPTQHQALTPRRKGPPGARQASDLKVNGLVLRRTAPKTRRLP

SEQ ID NO: 32010 - protein, 961 aa, Artificial Sequence
  Synthetic polypeptide
RFTWLVSFKPTFKYQLLREGIWDHPQEPIDSENEALLAELTKTLDDIPEDDVGLAAFPALDGGDALSCTSASPAPSSAPPSPAPEKPSAPAPEVDELSLLQKLLLATSYPTSSSDTQKEGTAWRQAGLRSKSQRPCVKADSTQDKKAPMMQSQSRSCTELHKHLTSAQCCLQDRGLQPPCLQSPRLPAKEDKEPGEDCPSPQPAPASPRDSLALGRADPGAPVSQEDMQAMVQLIRYMHTYCLPQRKLPPQTPEPLPKACSNPSQQVRSRPWSRHHSKASWAEFSILRELLAQDVLCDVSKPYRLATPVYASLTPRSRPRPPKDSQASPGRPSSVEEVRIAASPKSTGPRPSLRPLRLEVKREVRRPARLQQQEEEDEEEEEEEEEEEKEEEEEWGRKRPGRGLPWTKLGRKLESSVCPVRRSRRLNPELGPWLTFADEPLVPSEPQGALPSLCLAPKAYDVERELGSPTDEDSGQDQQLLRGPQIPALESPCESGCGDMDEDPSCPQLPPRDSPRCLMLALSQSDPTFGKKSFEQTLTVELCGTAGLTPPTTPPYKPTEEDPFKPDIKHSLGKEIALSLPSPEGLSLKATPGAAHKLPKKHPERSELLSHLRHATAQPASQAGQKRPFSCSFGDHDYCQVLRPEGVLQRKVLRSWEPSGVHLEDWPQQGAPWAEAQAPGREEDRSCDAGAPPKDSTLLRDHEIRASLTKHFGLLETALEEEDLASCKSPEYDTVFEDSSSSSGESSFLPEEEEEEGEEEEEDDEEEDSGVSPTCSDHCPYQSPPSKANRQLCSRSRSSSGSSPCHSWSPATRRNFRCESRGPCSDRTPSIRHARKRREKAIGEGRVVYIQNLSSDMSSRELKRRFEVFGEIEECEVLTRNRRGEKYGFITYRCSEHAALSLTKGAALRKRNEPSFQLSYGGLRHFCWPRYTDYGKPLKPSHSLVRLKAWEAVPSLNKTQS

SEQ ID NO: 32011 - protein, 967 aa, Artificial Sequence
  Synthetic polypeptide
RFTWLVSFKPTFKYQLLREGIWDHPQEPIDSENEALLAELTKTLDDIPEDDVGLAAFPALDGGDALSCTSASPAPSSAPPSPAPEKPSAPAPEVDELSLLQKLLLATSYPTSSSDTQKEGTAWRQAGLRSKSQRPCVKADSTQDKKAPMMQSQSRSCTELHKHLTSAQCCLQDRGLQPPCLQSPRLPAKEDKEPGEDCPSPQPAPASPRDSLALGRADPGAPVSQEDMQAMVQLIRYMHTYCLPQRKLPPQTPEPLPKACSNPSQQVRSRPWSRHHSKASWAEFSILRELLAQDVLCDVSKPYRLATPVYASLTPRSRPRPPKDSQASPGRPSSVEEVRIAASPKSTGPRPSLRPLRLEVKREVRRPARLQQQEEEDEEEEEEEEEEEKEEEEEWGRKRPGRGLPWTKLGRKLESSVCPVRRSRRLNPELGPWLTFADEPLVPSEPQGALPSLCLAPKAYDVERELGSPTDEDSGQDQQLLRGPQIPALESPCESGCGDMDEDPSCPQLPPRDSPRCLMLALSQSDPTFGKKSFEQTLTVELCGTAGLTPPTTPPYKPTEEDPFKPDIKHSLGKEIALSLPSPEGLSLKATPGAAHKLPKKHPERSELLSHLRHATAQPASQAGQKRPFSCSFGDHDYCQVLRPEGVLQRKVLRSWEPSGVHLEDWPQQGAPWAEAQAPGREEDRSCDAGAPPKDSTLLRDHEIRASLTKHFGLLETALEEEDLASCKSPEYDTVFEDSSSSSGESSFLPEEEEEEGEEEEEDDEEEDSGVSPTCSDHCPYQSPPSKANRQLCSRSRSSSGSSPCHSWSPATRRNFRCESRGPCSDRTPSIRHARKRREKAIGEGRVVYIQNLSSDMSSRELKRRFEVFGEIEECEVLTRNRRGEKYGFITYRCSEHAALSLTKGAALRKRNEPSFQLSYGGLRHFCWPRYTDYDSNSEEALPASGKSKYEAMDFDSLLKEAQQSLH

SEQ ID NO: 32012 - protein, 61 aa, Artificial Sequence
  Synthetic polypeptide
MMQPMWKTVWQFIRKLNLEPPSDPAIPLTGIYSEELKTGSPREARSTASSPTGVLSTRPSL

SEQ ID NO: 32013 - protein, 18 aa, Artificial Sequence
  Synthetic polypeptide
KQDLQERREVRLHHLPVF

SEQ ID NO: 32014 - protein, 104 aa, Artificial Sequence
  Synthetic polypeptide
SSHSTYGYIFRRIENRISKRGEKYGFITYRCSEHAALSLTKGAALRKRNEPSFQLSYGGLRHFCWPRYTDYDSNSEEALPASGKSKYEAMDFDSLLKEAQQSLH

SEQ ID NO: 32015 - protein, 98 aa, Artificial Sequence
  Synthetic polypeptide
SSHSTYGYIFRRIENRISKRGEKYGFITYRCSEHAALSLTKGAALRKRNEPSFQLSYGGLRHFCWPRYTDYGKPLKPSHSLVRLKAWEAVPSLNKTQS

SEQ ID NO: 32016 - protein, 142 aa, Artificial Sequence
  Synthetic polypeptide
SSHSTYGYIFRRIENRISKRGEKYGFITYRCSEHAALSLTKGAALRKRNEPSFQLSYGGLRHFCWPRYTDYGWQAVPTVQRSSQLPKALGCSHSTVPTHSGRFFNHPVFVSCSLPSPLPCLFTPMPRFQFRRGPSCVREKQV

SEQ ID NO: 32017 - protein, 4 aa, Artificial Sequence
  Synthetic polypeptide
DNAG

SEQ ID NO: 32018 - protein, 730 aa, Artificial Sequence
  Synthetic polypeptide
VTDPPSVRWATDGTYLIAYCEDKSKITQDEHFCDFVDILTEYKTKNILASPIMNGKDVVAIIMAVNKVDGSHFTKRDEEILLKYLNFANLIMKVYHLSYLHNCETRRGQILLWSGSKVFEELTDIERQFHKALYTVRAFLNCDRYSVGLLDMTKQKEFFDVWPVLMGEVPPYSGPRTPDGREINFYKVIDYILHGKEDIKVIPNPPPDHWALVSGLPAYVAQNGLICNIMNAPAEDFFAFQKEPLDESGWMIKNVLSMPIVNKKEEIVGVATFYNRKDGKPFDEMDETLMESLTQFLGWSVLNPDTYESMNKLENRKDIFQDIVKYHVKCDNEEIQKILKTREVYGKEPWECEEEELAEILQAELPDADKYEINKFHFSDLPLTELELVKCGIQMYYELKVVDKFHIPQEALVRFMYSLSKGYRKITYHNWRHGFNVGQTMFSLLVTGKLKRYFTDLEALAMVTAAFCHDIDHRGTNNLYQMKSQNPLAKLHGSSILERHHLEFGKTLLRDESLNIFQNLNRRQHEHAIHMMDIAIIATDLALYFKKRTMFQKIVDQSKTYESEQEWTQYMMLEQTRKEIVMAMMMTACDLSAITKPWEVQSQVALLVAAEFWEQGDLERTVLQQNPIPMMDRNKADELPKLQVGFIDFVCTFVYKEFSRFHEEITPMLDGITNNRKEWKALADEYDAKMKVQEEKKQKQQSAKSAAAGNQPGGNPSPGGATTSKSCCIQ

SEQ ID NO: 32019 - protein, 25 aa, Artificial Sequence
  Synthetic polypeptide
RRMSISVTLWTSSQSTRPRTSWLPP

SEQ ID NO: 32020 - protein, 11 aa, Artificial Sequence
  Synthetic polypeptide
PRDFDLSPQTC

SEQ ID NO: 32021 - protein, 26 aa, Artificial Sequence
  Synthetic polypeptide
SLTLSLVSLISPVTLTCHPRPADDPQ

SEQ ID NO: 32022 - protein, 391 aa, Artificial Sequence
  Synthetic polypeptide
SVDSAVGTLPATSPQSTSVQAKGTNKLRKPKLPEVQQATKAPESSDDSEDSSDSSSGSEEDGEGPQGAKSAHTLVGPTPSRTETLVEETAAESSEDDVVAPSQSLLSGYMTPGLTPANSQASKATPKLDSSPSVSSTLAAKDDPDGKQEAKPQQAAGMLSPKTGGKEAASGTTPQKSRKPKKGAGNPQASTLALQSNITQCLLGQPWPLNEAQVQASVVKVLTELLEQERKKVVDTTKESSRKGWESRKRKLSGDQPAARTPRSKKKKKLGAGEGGEASVSPEKTSTTSKGKAKRDKASGDVKEKKGKGSLGSQGAKDEPEEELQKGMGTVEGGDQSNPKSKKEKKKSDKRKKDKEKKEKKKKAKKASTKDSESPSQKKKKKKKKTAEQTV

SEQ ID NO: 32023 - protein, 88 aa, Artificial Sequence
  Synthetic polypeptide
PLHLVCLPRPQWPNLLTVLWEHSLQQVPRAPPSRPKGPTSSENLSFLRSSRPPKPLRAQMTVRTAATVLQGVRKMVKGPRGPSQPTRW

SEQ ID NO: 32024 - protein, 48 aa, Artificial Sequence
  Synthetic polypeptide
WGELGEPGEASPRSVEGAGVALHRGTSTHLPHDLCTWFASLGLSGLIC

SEQ ID NO: 32025 - protein, 390 aa, Artificial Sequence
  Synthetic polypeptide
SVDSAVGTLPATSPQSTSVQAKGTNKLRKPKLPEVQQATKAPESSDDSEDSSDSSSGSEEDGEGPQGAKSAHTLGPTPSRTETLVEETAAESSEDDVVAPSQSLLSGYMTPGLTPANSQASKATPKLDSSPSVSSTLAAKDDPDGKQEAKPQQAAGMLSPKTGGKEAASGTTPQKSRKPKKGAGNPQASTLALQSNITQCLLGQPWPLNEAQVQASVVKVLTELLEQERKKVVDTTKESSRKGWESRKRKLSGDQPAARTPRSKKKKKLGAGEGGEASVSPEKTSTTSKGKAKRDKASGDVKEKKGKGSLGSQGAKDEPEEELQKGMGTVEGGDQSNPKSKKEKKKSDKRKKDKEKKEKKKKAKKASTKDSESPSQKKKKKKKKTAEQTV

SEQ ID NO: 32026 - protein, 122 aa, Artificial Sequence
  Synthetic polypeptide
PLHLVCLPRPQWPNLLTVLWEHSLQQVPRAPPSRPKGPTSSENLSFLRSSRPPKPLRAQMTVRTAATVLQGVRKMVKGPRGPSQPTRWVPPPPGQRPWWRRPQQSPARMMWWRHPSLSSQVI

SEQ ID NO: 32027 - protein, 354 aa, Artificial Sequence
  Synthetic polypeptide
SVDSAVGTLPATSPQSTSVQAKGTNKLRKPKLPEVQQATKAPESSDDSEDSSDSSSGSEEDGEGPQGAKSAHTLGPTPSRTETLVEETAAESSEDDVVAPSQSLLSGYMTPGLTPANSQASKATPKLDSSPSVSSTLAAKDDPDGKQEAKPQQAAGMLSPKTGGKEAASGTTPQKSRKPKKGAGNPQASTLALQSNITQCLLGQPWPLNEAQVQASVVKVLTELLEQERKKVVDTTKESSRKGWESRKRKLSGDQPAARTPRSKKKKKLGAGEGGEASVSPEKTSTTSKGKAKRDKASGDVKEKKGKGSLGSQGAKDEPEEELQKGMGTVEGGDQSNPKSKKEKKKSDKRKKDK

SEQ ID NO: 32028 - protein, 661 aa, Artificial Sequence
  Synthetic polypeptide
GVHEPPKANENSLLSAQLKGFPLFLHSNLGLKDCSINPKSPLLYVTRPSEVEKGVLPGEDWTVFQSNHSTYEPVLLAKTRSSESIPHLGADAGLHAALHATVVQDLGLHDGIQRVLFGNNLNFWLHKLVFVDAVAFLTGKRLSLPLDRYILVDIDDIFVGKEGTRMKVEDVKALFDTQNELRAHIPNFTFNLGYSGKFFHTGTNAEDAGDDLLLSYVKEFWWFPHMWSHMQPHLFHNQSVLAEQMALNKKFAVEHGIPTDMGYAVAPHHSGVYPVHVQLYEAWKQVWSIRVTSTEEYPHLKPARYRRGFIHNGIMVLPRQTCGLFTHTIFYNEYPGGSSELDKIINGGELFLTVLLNPISIFMTHLSNYGNDRLGLYTFKHLVRFLHSWTNLRLQTLPPVQLAQKYFQIFSEEKDPLWQDPCEDKRHKDIWSKEKTCDRFPKLLIIGPQKTGTTALYLFLGMHPDLSSNYPSSETFEEIQFFNGHNYHKGIDWYMEFFPIPSNTTSDFYFEKSANYFDSEVAPRRAAALLPKAKVLTILINPADRAYSWYQILVLDGKLLRTEPAKVMDMVQKFLGVTNTIDYHKTLAFDPKKGFWCQLLEGGKTKCLGKSKGRKYPEMDLDSRAFLKDYYRDHNIELSKLLYKMGQTLPTWLREDLQNTR

SEQ ID NO: 32029 - protein, 13 aa, Artificial Sequence
  Synthetic polypeptide
GSMSPQRPMRTAC

SEQ ID NO: 32030 - protein, 5 aa, Artificial Sequence
  Synthetic polypeptide
APKGQ

SEQ ID NO: 32031 - protein, 718 aa, Artificial Sequence
  Synthetic polypeptide
GVHEPPKANENSLLSAQLKGFPLFLHSNLGLKDCSINPKSPLLYVTRPSEVEKGVLPGEDWTVFQSNHSTYEPVLLAKTRSSESIPHLGADAGLHAALHATVVQDLGLHDGIQRVLFGNNLNFWLHKLVFVDAVAFLTGKRLSLPLDRYILVDIDDIFVGKEGTRMKVEDVKALFDTQNELRAHIPNFTFNLGYSGKFFHTGTNAEDAGDDLLLSYVKEFWWFPHMWSHMQPHLFHNQSVLAEQMALNKKFAVEHGIPTDMGYAVAPHHSGVYPVHVQLYEAWKQVWSIRVTSTEEYPHLKPARYRRGFIHNGIMVLPRQTCGLFTHTIFYNEYPGGSSELDKIINGGELFLTVLLNPISIFMTHLSNYGNDRLGLYTFKHLVRFLHSWTNLRLQTLPPVQLAQKYFQIFSEEKDPLWQDPCEDKRHKDIWSKEKTCDRFPKLLIIGPQKTGTTALYLFLGMHPDLSSNYPSSETFEEIQFFNGHNYHKGIDWYMEFFPIPSNTTSDFYFEKSANYFDSEVAPRRAAALLPKAKVLTILINPADRAYSWYQHQRAHDDPVALKYTFHEVITAGSDASSKLRALQNRCLVPGWYATHIERWLSAYHANQILVLDGKLLRTEPAKVMDMVQKFLGVTNTIDYHKTLAFDPKKGFWCQLLEGGKTKCLGKSKGRKYPEMDLDSRAFLKDYYRDHNIELSKLLYKMGQTLPTWLREDLQNTR

SEQ ID NO: 32032 - protein, 656 aa, Artificial Sequence
  Synthetic polypeptide
HWANENSLLSAQLKGFPLFLHSNLGLKDCSINPKSPLLYVTRPSEVEKGVLPGEDWTVFQSNHSTYEPVLLAKTRSSESIPHLGADAGLHAALHATVVQDLGLHDGIQRVLFGNNLNFWLHKLVFVDAVAFLTGKRLSLPLDRYILVDIDDIFVGKEGTRMKVEDVKALFDTQNELRAHIPNFTFNLGYSGKFFHTGTNAEDAGDDLLLSYVKEFWWFPHMWSHMQPHLFHNQSVLAEQMALNKKFAVEHGIPTDMGYAVAPHHSGVYPVHVQLYEAWKQVWSIRVTSTEEYPHLKPARYRRGFIHNGIMVLPRQTCGLFTHTIFYNEYPGGSSELDKIINGGELFLTVLLNPISIFMTHLSNYGNDRLGLYTFKHLVRFLHSWTNLRLQTLPPVQLAQKYFQIFSEEKDPLWQDPCEDKRHKDIWSKEKTCDRFPKLLIIGPQKTGTTALYLFLGMHPDLSSNYPSSETFEEIQFFNGHNYHKGIDWYMEFFPIPSNTTSDFYFEKSANYFDSEVAPRRAAALLPKAKVLTILINPADRAYSWYQILVLDGKLLRTEPAKVMDMVQKFLGVTNTIDYHKTLAFDPKKGFWCQLLEGGKTKCLGKSKGRKYPEMDLDSRAFLKDYYRDHNIELSKLLYKMGQTLPTWLREDLQNTR

SEQ ID NO: 32033 - protein, 12 aa, Artificial Sequence
  Synthetic polypeptide
ELCDIGPMRTAC

SEQ ID NO: 32034 - protein, 29 aa, Artificial Sequence
  Synthetic polypeptide
HPGSGCGLGDGLLASELAPPLRSCVTLGQ

SEQ ID NO: 32035 - protein, 713 aa, Artificial Sequence
  Synthetic polypeptide
HWANENSLLSAQLKGFPLFLHSNLGLKDCSINPKSPLLYVTRPSEVEKGVLPGEDWTVFQSNHSTYEPVLLAKTRSSESIPHLGADAGLHAALHATVVQDLGLHDGIQRVLFGNNLNFWLHKLVFVDAVAFLTGKRLSLPLDRYILVDIDDIFVGKEGTRMKVEDVKALFDTQNELRAHIPNFTFNLGYSGKFFHTGTNAEDAGDDLLLSYVKEFWWFPHMWSHMQPHLFHNQSVLAEQMALNKKFAVEHGIPTDMGYAVAPHHSGVYPVHVQLYEAWKQVWSIRVTSTEEYPHLKPARYRRGFIHNGIMVLPRQTCGLFTHTIFYNEYPGGSSELDKIINGGELFLTVLLNPISIFMTHLSNYGNDRLGLYTFKHLVRFLHSWTNLRLQTLPPVQLAQKYFQIFSEEKDPLWQDPCEDKRHKDIWSKEKTCDRFPKLLIIGPQKTGTTALYLFLGMHPDLSSNYPSSETFEEIQFFNGHNYHKGIDWYMEFFPIPSNTTSDFYFEKSANYFDSEVAPRRAAALLPKAKVLTILINPADRAYSWYQHQRAHDDPVALKYTFHEVITAGSDASSKLRALQNRCLVPGWYATHIERWLSAYHANQILVLDGKLLRTEPAKVMDMVQKFLGVTNTIDYHKTLAFDPKKGFWCQLLEGGKTKCLGKSKGRKYPEMDLDSRAFLKDYYRDHNIELSKLLYKMGQTLPTWLREDLQNTR

SEQ ID NO: 32036 - protein, 17 aa, Artificial Sequence
  Synthetic polypeptide
QHSCLQSAQHLVPGFGQ

SEQ ID NO: 32037 - protein, 658 aa, Artificial Sequence
  Synthetic polypeptide
CLALANENSLLSAQLKGFPLFLHSNLGLKDCSINPKSPLLYVTRPSEVEKGVLPGEDWTVFQSNHSTYEPVLLAKTRSSESIPHLGADAGLHAALHATVVQDLGLHDGIQRVLFGNNLNFWLHKLVFVDAVAFLTGKRLSLPLDRYILVDIDDIFVGKEGTRMKVEDVKALFDTQNELRAHIPNFTFNLGYSGKFFHTGTNAEDAGDDLLLSYVKEFWWFPHMWSHMQPHLFHNQSVLAEQMALNKKFAVEHGIPTDMGYAVAPHHSGVYPVHVQLYEAWKQVWSIRVTSTEEYPHLKPARYRRGFIHNGIMVLPRQTCGLFTHTIFYNEYPGGSSELDKIINGGELFLTVLLNPISIFMTHLSNYGNDRLGLYTFKHLVRFLHSWTNLRLQTLPPVQLAQKYFQIFSEEKDPLWQDPCEDKRHKDIWSKEKTCDRFPKLLIIGPQKTGTTALYLFLGMHPDLSSNYPSSETFEEIQFFNGHNYHKGIDWYMEFFPIPSNTTSDFYFEKSANYFDSEVAPRRAAALLPKAKVLTILINPADRAYSWYQILVLDGKLLRTEPAKVMDMVQKFLGVTNTIDYHKTLAFDPKKGFWCQLLEGGKTKCLGKSKGRKYPEMDLDSRAFLKDYYRDHNIELSKLLYKMGQTLPTWLREDLQNTR

SEQ ID NO: 32038 - protein, 48 aa, Artificial Sequence
  Synthetic polypeptide
SLSRPPSAMCKMGMRAVSPSGVIGGLTAFLSAKCTAPSAWLWPMRTAC

SEQ ID NO: 32039 - protein, 715 aa, Artificial Sequence
  Synthetic polypeptide
CLALANENSLLSAQLKGFPLFLHSNLGLKDCSINPKSPLLYVTRPSEVEKGVLPGEDWTVFQSNHSTYEPVLLAKTRSSESIPHLGADAGLHAALHATVVQDLGLHDGIQRVLFGNNLNFWLHKLVFVDAVAFLTGKRLSLPLDRYILVDIDDIFVGKEGTRMKVEDVKALFDTQNELRAHIPNFTFNLGYSGKFFHTGTNAEDAGDDLLLSYVKEFWWFPHMWSHMQPHLFHNQSVLAEQMALNKKFAVEHGIPTDMGYAVAPHHSGVYPVHVQLYEAWKQVWSIRVTSTEEYPHLKPARYRRGFIHNGIMVLPRQTCGLFTHTIFYNEYPGGSSELDKIINGGELFLTVLLNPISIFMTHLSNYGNDRLGLYTFKHLVRFLHSWTNLRLQTLPPVQLAQKYFQIFSEEKDPLWQDPCEDKRHKDIWSKEKTCDRFPKLLIIGPQKTGTTALYLFLGMHPDLSSNYPSSETFEEIQFFNGHNYHKGIDWYMEFFPIPSNTTSDFYFEKSANYFDSEVAPRRAAALLPKAKVLTILINPADRAYSWYQHQRAHDDPVALKYTFHEVITAGSDASSKLRALQNRCLVPGWYATHIERWLSAYHANQILVLDGKLLRTEPAKVMDMVQKFLGVTNTIDYHKTLAFDPKKGFWCQLLEGGKTKCLGKSKGRKYPEMDLDSRAFLKDYYRDHNIELSKLLYKMGQTLPTWLREDLQNTR

SEQ ID NO: 32040 - protein, 8 aa, Artificial Sequence
  Synthetic polypeptide
DLGVGPEH

SEQ ID NO: 32041 - protein, 811 aa, Artificial Sequence
  Synthetic polypeptide
DQSDRRGPLLSCETWALGRSTSLTEKDLKEAKARSQQIAAQLTTPPSSNSRGVQLFNRRRQRVNEFTLESHGQRGQKPSQESLRVLPSSLPGHAPGLSLSSTSLPEPGPPRHPSPQSPDRGVPGHSMEGYSEEASLLRHLEKVASEEEEVPLVVYLKENAALLTANGLHLSQNREAQQSSPAPPPAEVHSPAADVNQNLASPSATLTTPTSNSSHNPPATDVNQNPPATVVPQSLPLSSIQQNSSEAQLPSNGTGPASKPSTLCADGQPQAPAEEVRCSTLLIDKVSTPATTTSTFSREATLIPSSRPPASDFMSSSLLIDIQPNTLVVSADQEMSGRAAATTPTKVYSEVHFTLAKPPSVVNRTARPFGIQAPGGTSQMERSPMLERRHFGEKAPAPQPPSLPDRSPRPQRHIMSRSPMVERRMMGQRSPASERRPLGNFTAPPTYTETLSTAPLASWVRSPPSYSVLYPSSDPKSSHLKGQAVPASKTGILEESMARRGSRKSMFTFVEKPKVTPNPDLLDLVQTADEKRRQRDQGEVGVEEEPFALGAEASNFQQEPAPRDRASPAAAEEVVPEWASCLKSPRIQAKPKPKPNQNLSEASGKGAELYARRQSRMEKYVIESSSHTPELARCPSPTMSLPSSWKYPTNAPGAFRVASRSPARTPPASLYHGYLPENGVLRPEPTKQPPYQLRPSLFVLSPIKEPAKVSPRAASPAKPSSLDLVPNLPKGALPPSPALPRPSRSSPGLYTSPGQDSLQPTAVSPPYGGDISPVSPSRAWSPRAKQAPRPSFSTRNAGIEAQVWKPSFCFK

SEQ ID NO: 32042 - protein, 17 aa, Artificial Sequence
  Synthetic polypeptide
AVRPGRWAGALASRRRI

SEQ ID NO: 32043 - protein, 25 aa, Artificial Sequence
  Synthetic polypeptide
DLGTAGRACPPPHPGRRARPGPPAA

SEQ ID NO: 32044 - protein, 81 aa, Artificial Sequence
  Synthetic polypeptide
DQSDRRGPLLSCETWGPPGEPAHLPTLDAGRVPAPQQPRRLGEPGPVGARSREQHEQPPAAAAATAHVSLVERALGVPAAT

SEQ ID NO: 32045 - protein, 232 aa, Artificial Sequence
  Synthetic polypeptide
AVRPGDRRESLPTSPPWTPGASRPPSSLDGWVSPGPWEPGRGSSMSSPPPLPPPPPMSPSWSERSVSPLRPETEARPPSRQLQALLARNIINAARRKSASPRSAGAENPRPFSPPRAPPPPPPPPPPPPRMRSPQPARPGSAAVPGAAFAPIPRSPLPAGPSSCTSPRSPLPAPPRPFLYRRSPTDSDVSLDSEDSGAKSPGILGYNICPRGWNGSLRLKRGSLPAEASCTT

SEQ ID NO: 32046 - protein, 3 aa, Artificial Sequence
  Synthetic polypeptide
ISC

SEQ ID NO: 32047 - protein, 16 aa, Artificial Sequence
  Synthetic polypeptide
RHHVKFHAEGNCAPSQ

SEQ ID NO: 32048 - protein, 336 aa, Artificial Sequence
  Synthetic polypeptide
VSELLASRGIMLNFMLKGTVRPANDFNPDADAKALRKAMKGLGTDEDTIIDIITHRSNVQRQQIRQTFKSHFGRDLMTDLKSEISGDLARLILGLMMPPAHYDAKQLKKAMEGAGTDEKALIEILATRTNAEIRAINEAYKEDYHKSLEDALSSDTSGHFRRILISLATGHREEGGENLDQAREDAQVAAEILEIADTPSGDKTSLETRFMTILCTRSYPHLRRVFQEFIKMTNYDVEHTIKKEMSGDVRDAFVAIVQSVKNKPLFFADKLYKSMKGAGTDEKTLTRIMVSRSEIDLLNIRREFIEKYDKSLHQAIEGDTSGDFLKALLALCGGED

SEQ ID NO: 32049 - protein, 330 aa, Artificial Sequence
  Synthetic polypeptide
VSELLASRGIMLNFMLKGTVRPANDFNPDADAKALRKAMKGLGTDEDTIIDIITHRSNVQRQQIRQTFKSHFGRDLMTDLKSEISGDLARLILGLMMPPAHYDAKQLKKAMEGAGTDEKALIEILATRTNAEIRAINEAYKEDYHKSLEDALSSDTSGHFRRILISLATGHREEGGENLDQAREDAQEIADTPSGDKTSLETRFMTILCTRSYPHLRRVFQEFIKMTNYDVEHTIKKEMSGDVRDAFVAIVQSVKNKPLFFADKLYKSMKGAGTDEKTLTRIMVSRSEIDLLNIRREFIEKYDKSLHQAIEGDTSGDFLKALLALCGGED

SEQ ID NO: 32050 - protein, 13 aa, Artificial Sequence
  Synthetic polypeptide
GTWNSAGHVAGML

SEQ ID NO: 32051 - protein, 35 aa, Artificial Sequence
  Synthetic polypeptide
GSCEEQVSHPSEALGTVLDMLQACYNCPALCIRGG

SEQ ID NO: 32052 - protein, 271 aa, Artificial Sequence
  Synthetic polypeptide
VIPLRHLEQCWTCCRHAITVQLCASEEAERHQKDITRILQQHEEEKKKWAQQVEKERELELRDRLDEQQRVLEGKNEEALQVLRASYEQEKEALTHSFREASSTQQETIDRLTSQLEAFQAKMKRVEESILSRNYKKHIQDYGSPSQFWEQELESLHFVIEMKNERIHELDRRLILMETVKEKNLILEEKITTLQQENEDLHVRSRNQVVLSRQLSEDLLLTREALEKEVQLRRQLQQEKEELLYRVLGANASPAFPLAPVTPTEVSFLAT

SEQ ID NO: 32053 - protein, 176 aa, Artificial Sequence
  Synthetic polypeptide
VIPLRHLEQCWTCCRHAITVQLCASEEAERHQKDITRILQQHEEEKKKWAQQVEKERELELRDRLDEQQRVLEGKNEEALQVLRASYEQEKEALTHSFREASSTQQETIDRLTSQLEAFQAKMKRVEESILSRNYKKHIQDYGSPSQFWEQELESLHFVIEMKNERIHELDRKRKI

SEQ ID NO: 32054 - protein, 79 aa, Artificial Sequence
  Synthetic polypeptide
VIPLRHLEQCWTCCRHAITVQLCASEEAERHQKDITRILQQHEEEKKKWAQQSSGPHMNRRKKRLPTLSGRPVLPSRRP

SEQ ID NO: 32055 - protein, 16 aa, Artificial Sequence
  Synthetic polypeptide
QDHLYPKLSITQYTQL

SEQ ID NO: 32056 - protein, 30 aa, Artificial Sequence
  Synthetic polypeptide
YLGDRIICTQNSASPNIPSYNCPALCIRGG

SEQ ID NO: 32057 - protein, 284 aa, Artificial Sequence
  Synthetic polypeptide
RVEKLLGTMLSTWVTGSFVPKTQHHPIYPAITVQLCASEEAERHQKDITRILQQHEEEKKKWAQQVEKERELELRDRLDEQQRVLEGKNEEALQVLRASYEQEKEALTHSFREASSTQQETIDRLTSQLEAFQAKMKRVEESILSRNYKKHIQDYGSPSQFWEQELESLHFVIEMKNERIHELDRRLILMETVKEKNLILEEKITTLQQENEDLHVRSRNQVVLSRQLSEDLLLTREALEKEVQLRRQLQQEKEELLYRVLGANASPAFPLAPVTPTEVSFLAT

SEQ ID NO: 32058 - protein, 189 aa, Artificial Sequence
  Synthetic polypeptide
RVEKLLGTMLSTWVTGSFVPKTQHHPIYPAITVQLCASEEAERHQKDITRILQQHEEEKKKWAQQVEKERELELRDRLDEQQRVLEGKNEEALQVLRASYEQEKEALTHSFREASSTQQETIDRLTSQLEAFQAKMKRVEESILSRNYKKHIQDYGSPSQFWEQELESLHFVIEMKNERIHELDRKRKI

SEQ ID NO: 32059 - protein, 92 aa, Artificial Sequence
  Synthetic polypeptide
RVEKLLGTMLSTWVTGSFVPKTQHHPIYPAITVQLCASEEAERHQKDITRILQQHEEEKKKWAQQSSGPHMNRRKKRLPTLSGRPVLPSRRP

SEQ ID NO: 32060 - protein, 40 aa, Artificial Sequence
  Synthetic polypeptide
VIWRTWLPSHQSFLNCKMAKKKKKKSLLYTNHGLMVSSST

SEQ ID NO: 32061 - protein, 121 aa, Artificial Sequence
  Synthetic polypeptide
NGKKKKKKKPPVHKPWTDGVFFYLSSAVNPIIYNLLSRRFQAAFQNVISSFHKQWHSQHDPQLPPAQRNIFLTECHFVELTEDIGPQFPCQSSMHNSHLPAALSSEQMSRTNYQSFHFNKT

SEQ ID NO: 32062 - protein, 514 aa, Artificial Sequence
  Synthetic polypeptide
FSISTGTVVLLDKDDIETPLLTEAAPILEDGNCEPAKNSESVDQGAKPESKSEPVVSTRKRPETKPSSDLETSKVLPIQDNVSKDVPQTRWGYWGSWGKSILSSASATVATVGQGISNVIEKAETSLGIPGPSEISTEVKYVAGETNAKENENSSPVAGAFGVFSTISTAVQSTGKSVISGGLDALEFIGKKTMDVIAEGDPGFKRTKGLMNRNATLSQVLREAKEKEEIRTSNEVTVETDKKTHYGLLFDEFQGLSHLEALEMLSQESEIKVKSILNSLSGEELETLKVELEQLKETFSLAEFCEEEEEEKKGDEDFTKDITELFSQLHVSSKPEKLARARNTAHEWIRKSLTKPLAENEEGEKQSEAENTEQVNKNSIEDIHAFAIRSLAELTACSIELFHKTAALVLHGRKQEVTAIERSQTLSQMTIVLCKELSSLSKEFTTCLTTAGVKEMADVLNPLITAVFLEASNSASYIQDAFQLLLPVLEISLIENKIESHRHELQGQKPLLEH

SEQ ID NO: 32063 - protein, 25 aa, Artificial Sequence
  Synthetic polypeptide
MAYISSLSPQVLWYYLIKMILRLHC

SEQ ID NO: 32064 - protein, 444 aa, Artificial Sequence
  Synthetic polypeptide
FSISTGTVVLLDKDDIETPLLTEAAPILEDGNCEPAKNSESVDQGISNVIEKAETSLGIPGPSEISTEVKYVAGETNAKENENSSPVAGAFGVFSTISTAVQSTGKSVISGGLDALEFIGKKTMDVIAEGDPGFKRTKGLMNRNATLSQVLREAKEKEEIRTSNEVTVETDKKTHYGLLFDEFQGLSHLEALEMLSQESEIKVKSILNSLSGEELETLKVELEQLKETFSLAEFCEEEEEEKKGDEDFTKDITELFSQLHVSSKPEKLARARNTAHEWIRKSLTKPLAENEEGEKQSEAENTEQVNKNSIEDIHAFAIRSLAELTACSIELFHKTAALVLHGRKQEVTAIERSQTLSQMTIVLCKELSSLSKEFTTCLTTAGVKEMADVLNPLITAVFLEASNSASYIQDAFQLLLPVLEISLIENKIESHRHELQGQKPLLEH

SEQ ID NO: 32065 - protein, 219 aa, Artificial Sequence
  Synthetic polypeptide
FSISTGTVVLLDKDDIETPLLTEAAPILEDGNCEPAKNSESVDQGAKPESKSEPVVSTRKRPETKPSSDLETSKVLPIQDNVSKDVPQTRWGYWGSWGKSILSSASATVATVGQGISNVIEKAETSLGIPGPSEISTEVKYVAGETNAKENENSSPVAGAFGVFSTISTAVQSTGKSVISGGLDALEFIGKKTMDVIAEGDPGFKRTKGLMNRNATLSQ

SEQ ID NO: 32066 - protein, 175 aa, Artificial Sequence
  Synthetic polypeptide
FSISTGTVVLLDKDDIETPLLTEAAPILEDGNCEPAKNSESVDQGAKPESKSEPVVSTRKRPETKPSSDLETSKVLPIQDNVSKDVPQTRWGYWGSWGKSILSSASATVATVGQGISNVIEKAETSLGIPGPSEISTEVKYVAGETNAKENENSSPVAGAFGVFSTISTAVQSTG

SEQ ID NO: 32067 - protein, 134 aa, Artificial Sequence
  Synthetic polypeptide
FSISTGTVVLLDKDDIETPLLTEAAPILEDGNCEPAKNSESVDQGAKPESKSEPVVSTRKRPETKPSSDLETSKVLPIQDNVSKDVPQTRWGYWGSWGKSILSSASATVATVGQGISNVIEKAETSLGIPGPSE

SEQ ID NO: 32068 - protein, 112 aa, Artificial Sequence
  Synthetic polypeptide
FSISTGTVVLLDKDDIETPLLTEAAPILEDGNCEPAKNSESVDQGAKPESKSEPVVSTRKRPETKPSSDLETSKVLPIQDNVSKDVPQTRWGYWGSWGKSILSSASATVATV

SEQ ID NO: 32069 - protein, 88 aa, Artificial Sequence
  Synthetic polypeptide
FSISTGTVVLLDKDDIETPLLTEAAPILEDGNCEPAKNSESVDQGAKPESKSEPVVSTRKRPETKPSSDLETSKVLPIQDNVSKDVPQ

SEQ ID NO: 32070 - protein, 72 aa, Artificial Sequence
  Synthetic polypeptide
FSISTGTVVLLDKDDIETPLLTEAAPILEDGNCEPAKNSESVDQGAKPESKSEPVVSTRKRPETKPSSDLET

SEQ ID NO: 32071 - protein, 24 aa, Artificial Sequence
  Synthetic polypeptide
FSISTGTVVLLDKDDIETPLLTEA

SEQ ID NO: 32072 - protein, 37 aa, Artificial Sequence
  Synthetic polypeptide
NPTPSLRFLSKTLLLQEFFPDRPRKWRTRKTLPHDRC

SEQ ID NO: 32073 - protein, 365 aa, Artificial Sequence
  Synthetic polypeptide
MVQTSFLVLLLVTHFCILLTPAKSGSLPLSKYALHFLTRILSTYFPSSWIPPPTPTPQLLPVKILPLLSGSCQRLCFCRNSSPIVPGNGEQGRPYPMTDAERVDQAYRENGFNIYVSDKISLNRSLPDIRHPNCNSKRYLETLPNTSIIIPFHNEGWSSLLRTVHSVLNRSPPELVAEIVLVDDFSDREHLKKPLEDYMALFPSVRILRTKKREGLIRTRMLGASVATGDVITFLDSHCEANVNWLPPLLDRIARNRKTIVCPMIDVIDHDDFRYETQAGDAMRGAFDWEMYYKRIPIPPELQKADPSDPFESPVMAGGLFAVDRKWFWELGGYDPGLEIWGGEQYEISFKVSQLSRRPVLGTAS

SEQ ID NO: 32074 - protein, 59 aa, Artificial Sequence
  Synthetic polypeptide
LAFFPHTFPLAGFHPQPPPLNCYQLKSYPFSQVPVKDSASAGILPRSSQEMENKEDLTP

SEQ ID NO: 32075 - protein, 602 aa, Artificial Sequence
  Synthetic polypeptide
MVQTSFLVLLLVTHFCILLTPAKSGSLPLSKYALHFLTRILSTYFPSSWIPPPTPTPQLLPVKILPLLSGSCQRLCFCRNSSPIVPGNGEQGRPYPMTDAERVDQAYRENGFNIYVSDKISLNRSLPDIRHPNCNSKRYLETLPNTSIIIPFHNEGWSSLLRTVHSVLNRSPPELVAEIVLVDDFSDREHLKKPLEDYMALFPSVRILRTKKREGLIRTRMLGASVATGDVITFLDSHCEANVNWLPPLLDRIARNRKTIVCPMIDVIDHDDFRYETQAGDAMRGAFDWEMYYKRIPIPPELQKADPSDPFESPVMAGGLFAVDRKWFWELGGYDPGLEIWGGEQYEISFKVWMCGGRMEDIPCSRVGHIYRKYVPYKVPAGVSLARNLKRVAEVWMDEYAEYIYQRRPEYRHLSAGDVAVQKKLRSSLNCKSFKWFMTKIAWDLPKFYPPVEPPAAAWGEIRNVGTGLCADTKHGALGSPLRLEGCVRGRGEAAWNNMQVFTFTWREDIRPGDPQHTKKFCFDAISHTSPVTLYDCHSMKGNQLWKYRKDKTLYHPVSGSCMDCSESDHRIFMNTCNPSSLTQQWLFEHTNSTVLEKFNRN

SEQ ID NO: 32076 - protein, 201 aa, Artificial Sequence
  Synthetic polypeptide
MVQTSFLVLLLVTHFCILLTPAKSGSLPLSKYALHFLTRILSTYFPSSWIPPPTPTPQLLPVKILPLLSGSCQRLCFCRNSSPIVPGNGEQGRPYPMTDAERVDQAYRENGFNIYVSDKISLNRSLPDIRHPNCNSKRYLETLPNTSIIIPFHNEGWSSLLRTVHSVLNRSPPELVAEIVLVDDFSDRDLPTASTPSPFVC

SEQ ID NO: 32077 - protein, 540 aa, Artificial Sequence
  Synthetic polypeptide
MVQTSFLVLLLVTHFCILLTPAKSGSLPLSKYALHFLTRILSTYFPSSWIPPPTPTPQLLPVKILPLLSGSCQRLCFCRNSSPIVPGNGEQGRPYPMTDAERVDQAYRENGFNIYVSDKISLNRSLPDIRHPNCNSKRYLETLPNTSIIIPFHNEGWSSLLRTVHSVLNRSPPELVAEIVLVDDFSDRDRIARNRKTIVCPMIDVIDHDDFRYETQAGDAMRGAFDWEMYYKRIPIPPELQKADPSDPFESPVMAGGLFAVDRKWFWELGGYDPGLEIWGGEQYEISFKVWMCGGRMEDIPCSRVGHIYRKYVPYKVPAGVSLARNLKRVAEVWMDEYAEYIYQRRPEYRHLSAGDVAVQKKLRSSLNCKSFKWFMTKIAWDLPKFYPPVEPPAAAWGEIRNVGTGLCADTKHGALGSPLRLEGCVRGRGEAAWNNMQVFTFTWREDIRPGDPQHTKKFCFDAISHTSPVTLYDCHSMKGNQLWKYRKDKTLYHPVSGSCMDCSESDHRIFMNTCNPSSLTQQWLFEHTNSTVLEKFNRN

SEQ ID NO: 32078 - protein, 252 aa, Artificial Sequence
  Synthetic polypeptide
DVWMCGGRMEDIPCSRVGHIYRKYVPYKVPAGVSLARNLKRVAEVWMDEYAEYIYQRRPEYRHLSAGDVAVQKKLRSSLNCKSFKWFMTKIAWDLPKFYPPVEPPAAAWGEIRNVGTGLCADTKHGALGSPLRLEGCVRGRGEAAWNNMQVFTFTWREDIRPGDPQHTKKFCFDAISHTSPVTLYDCHSMKGNQLWKYRKDKTLYHPVSGSCMDCSESDHRIFMNTCNPSSLTQQWLFEHTNSTVLEKFNRN

SEQ ID NO: 32079 - protein, 141 aa, Artificial Sequence
  Synthetic polypeptide
CPESSCVPPSPQHPSPRVRTVSYQDDCKSLPGLLSLRPAPSGCSPPHWQSHLCKMCGCVGAAWRTSPAPGWAISTGSMCPTRSRPESAWPGTLSGWPKCGWMSTQSTFTSAGLNTATSPLGMSQSRKSSAAPLTARVSSGL

SEQ ID NO: 32080 - protein, 56 aa, Artificial Sequence
  Synthetic polypeptide
GLPHQAVLHPTGRVIFVRCVDVWGPHGGHPLLQGGPYLQEVCALQGPGRSQPGPEP

SEQ ID NO: 32081 - protein, 254 aa, Artificial Sequence
  Synthetic polypeptide
DVWMCGGRMEDIPCSRVGHIYRKYVPYKVPAGVSLARVRNLKRVAEVWMDEYAEYIYQRRPEYRHLSAGDVAVQKKLRSSLNCKSFKWFMTKIAWDLPKFYPPVEPPAAAWGEIRNVGTGLCADTKHGALGSPLRLEGCVRGRGEAAWNNMQVFTFTWREDIRPGDPQHTKKFCFDAISHTSPVTLYDCHSMKGNQLWKYRKDKTLYHPVSGSCMDCSESDHRIFMNTCNPSSLTQQWLFEHTNSTVLEKFNRN

SEQ ID NO: 32082 - protein, 91 aa, Artificial Sequence
  Synthetic polypeptide
CPESSCVPPSPQHPSPRVRTVSYQDDCKSLPGLLSLRPAPSGCSPPHWQSHLCKMCGCVGAAWRTSPAPGWAISTGSMCPTRSRPESAWPG

SEQ ID NO: 32083 - protein, 58 aa, Artificial Sequence
  Synthetic polypeptide
GLPHQAVLHPTGRVIFVRCVDVWGPHGGHPLLQGGPYLQEVCALQGPGRSQPGPGKEP

SEQ ID NO: 32084 - protein, 519 aa, Artificial Sequence
  Synthetic polypeptide
GALPPFGRHFSLLLPCEEGRICFPFCRDCAFPEASPAMLNCKGSSSISSDVSSSTDHTPTKAQKNVATSEDSDLSMRTLSTPSPALICPPNLPGFQNGRGSSTSSSSITGETVAMVHSPPPTRLTHPLIRLASRPQKEQASIDRLPDHSMVQIFSFLPTNQLCRCARVCRRWYNLAWDPRLWRTIRLTGETINVDRALKVLTRRLCQDTPNVCLMLETVTVSGCRRLTDRGLYTIAQCCPELRRLEVSGCYNISNEAVFDVVSLCPNLEHLDVSGCSKVTCISLTREASIKLSPLHGKQISIRYLDMTDCFVLEDEGLHTIAAHCTQLTHLYLRRCVRLTDEGLRYLVIYCASIKELSVSDCRFVSDFGLREIAKLESRLRYLSIAHCGRVTDVGIRYVAKYCSKLRYLNARGCEGITDHGVEYLAKNCTKLKSLDIGKCPLVSDTGLECLALNCFNLKRLSLKSCESITGQGLQIVAANCFDLQTLNVQDCEVSVEALRFVKRHCKRCVIEHTNPAFF

SEQ ID NO: 32085 - protein, 11 aa, Artificial Sequence
  Synthetic polypeptide
TAKAARASHLT

SEQ ID NO: 32086 - protein, 16 aa, Artificial Sequence
  Synthetic polypeptide
GLPSYAELQRQLEHLI

SEQ ID NO: 32087 - protein, 85 aa, Artificial Sequence
  Synthetic polypeptide
GQARWLTPVIPALWEAEAGGSRDASGAVHSPPEHHAWLCGATGIQGGDLWLAETMPVFLCPAPHDFNTGELGHDHLDSQSHELHN

SEQ ID NO: 32088 - protein, 268 aa, Artificial Sequence
  Synthetic polypeptide
SQHFGRPRQVDHEMPQEQYTHHRSTMPGSVGPQVYKVGIYGWRKRCLYFFVLLLMILILVNLAMTIWILKVMNFTIDGMGNLRITEKGLKLEGDSEFLQPLYAKEIQSRPGNALYFKSARNVTVNILNDQTKVLTQLITGPKAVEAYGKKFEVKTVSGKLLFSADNNEVVVGAERLRVLGAEGTVFPKSIETPNVRADPFKELRLESPTRSLVMEAPKGVEINAEAGNMEATCRTELRLESKDGEVRDEKDRSSKSYSFNRPTLPITG

SEQ ID NO: 32089 - protein, 63 aa, Artificial Sequence
  Synthetic polypeptide
PGTVAHACNPSTLGGRGRWITRCLRSSTLTTGAPCLALWGHRYTRWGFMAGGNDACISLSCSS

SEQ ID NO: 32090 - protein, 302 aa, Artificial Sequence
  Synthetic polypeptide
SQHFGRPRQVDHEMPQEQYTHHRSTMPGSVGPQVYKVGIYGWRKRCLYFFVLLLMILILVNLAMTIWILKVMNFTIDGMGNLRITEKGLKLEGDSEFLQPLYAKEIQSRPGNALYFKSARNVTVNILNDQTKVLTQLITGPKAVEAYGKKFEVKTVSGKLLFSADNNEVVVGAERLRVLGAEGTVFPKSIETPNVRADPFKELRLESPTRSLVMEAPKGVEINAEAGNMEATCRTELRLESKDGEIKLDAAKIRLPRLPHGSYTPTGTRQKVFEICVCANGRLFLSQAGAGSTCQINTSVCL

SEQ ID NO: 32091 - protein, 94 aa, Artificial Sequence
  Synthetic polypeptide
SQHFGRPRQVDHEMPQEQYTHHRSTMPGSVGPQVYKVGIYGWRKRCLYFFVLLLMILILVNLAMTIWILKVMNFTISIHLLLRFNWLFRCCGMS

SEQ ID NO: 32092 - protein, 10 aa, Artificial Sequence
  Synthetic polypeptide
VPMNRMEWET

SEQ ID NO: 32093 - protein, 20 aa, Artificial Sequence
  Synthetic polypeptide
TGWNGKPEDHRKRSKARRRL

SEQ ID NO: 32094 - protein, 230 aa, Artificial Sequence
  Synthetic polypeptide
LPKRKKSLCQKETCICIFFLQHISQLQRYGTNLSPHEQDGMGNLRITEKGLKLEGDSEFLQPLYAKEIQSRPGNALYFKSARNVTVNILNDQTKVLTQLITGPKAVEAYGKKFEVKTVSGKLLFSADNNEVVVGAERLRVLGAEGTVFPKSIETPNVRADPFKELRLESPTRSLVMEAPKGVEINAEAGNMEATCRTELRLESKDGEVRDEKDRSSKSYSFNRPTLPITG

SEQ ID NO: 32095 - protein, 264 aa, Artificial Sequence
  Synthetic polypeptide
LPKRKKSLCQKETCICIFFLQHISQLQRYGTNLSPHEQDGMGNLRITEKGLKLEGDSEFLQPLYAKEIQSRPGNALYFKSARNVTVNILNDQTKVLTQLITGPKAVEAYGKKFEVKTVSGKLLFSADNNEVVVGAERLRVLGAEGTVFPKSIETPNVRADPFKELRLESPTRSLVMEAPKGVEINAEAGNMEATCRTELRLESKDGEIKLDAAKIRLPRLPHGSYTPTGTRQKVFEICVCANGRLFLSQAGAGSTCQINTSVCL

SEQ ID NO: 32096 - protein, 97 aa, Artificial Sequence
  Synthetic polypeptide
ANPQNLSEQCPAYLFHLAAFKLKLCKMQLKRKSKQKTISTLRIVFMPRTKTQWCSLRVYAHECRRLNRHQHIRRLLDPKTIFLFQFHLAFQHVSDTG

SEQ ID NO: 32097 - protein, 19 aa, Artificial Sequence
  Synthetic polypeptide
LPEPIHRTCLNSAQHTCFI

SEQ ID NO: 32098 - protein, 41 aa, Artificial Sequence
  Synthetic polypeptide
TVPSILVSFSSLQIKALQNAVEKEVQAEDNIYIENSLYATD

SEQ ID NO: 32099 - protein, 49 aa, Artificial Sequence
  Synthetic polypeptide
ANPQNLSEQCPAYLFHLAAFKLKLCKMQLKRKSKQKTISTLRIVFMPRT

SEQ ID NO: 32100 - protein, 6 aa, Artificial Sequence
  Synthetic polypeptide
GQHKDI

SEQ ID NO: 32101 - protein, 6 aa, Artificial Sequence
  Synthetic polypeptide
ASTKTL

SEQ ID NO: 32102 - protein, 5 aa, Artificial Sequence
  Synthetic polypeptide
PAQRH

SEQ ID NO: 32103 - protein, 47 aa, Artificial Sequence
  Synthetic polypeptide
PSCANNSQSSCAQLSSPPLIEKCHCADGGREAGGEFPQLSPDLRDRG

SEQ ID NO: 32104 - protein, 49 aa, Artificial Sequence
  Synthetic polypeptide
KNATVQMEGGKLVVNFPNYHQTSEIVGDKLVEVSTIGGVTYERVSKRLA

SEQ ID NO: 32105 - protein, 28 aa, Artificial Sequence
  Synthetic polypeptide
LTIFLCPAIITSTDRKMPLCRWRAGSWW

SEQ ID NO: 32106 - protein, 123 aa, Artificial Sequence
  Synthetic polypeptide
NNTQCREGTEAAHLPSPLPTPEEPPVLRGHPDPAEQPLPALPCSPAPGRLPAGPLHGSLQRHHLQAALHRGRLLPPACKRSFALIAQAEVQWHDLSSLQPPPPRFKQFSCFSAPPPTHTAPSS

SEQ ID NO: 32107 - protein, 426 aa, Artificial Sequence
  Synthetic polypeptide
ASPVPRITPSVEKELKLPTFRAHSPLLKSRRFFVDILTLLSSHCQLCPAARHLAVYLLDHFMDRYNVTTSKQLYTVAVSCLLLANGVSLLSPRLKCSGMISAHCNLHLPGSSNSPASAPHPPPTPPQVAETTGKFEDREDHVPKLEQINSTRILSSQNFTLTKKELLSTELLLLEAFSWNLCLPTPAHFLDYYLLASVSQKDHHCHTWPTTCPRKTKECLKEYAHYFLEVTLQDHIFYKFQPSVVAAACVGASRICLQLSPYWTRDLQRISSYSLEHLSTCIEILLVVYDNVLKDAVAVKSQALAMVPGTPPTPTQVLFQPPAYPALGQPATTLAQFQTPVQDLCLAYRDSLQAHRSGSLLSGSTGSSLHTPYQPLQPLDMCPVPVPASLSMHMAIAAEPRHCLATTYGSSYFSGSHMFPTGCFDR

SEQ ID NO: 32108 - protein, 3 aa, Artificial Sequence
  Synthetic polypeptide
RRN

SEQ ID NO: 32109 - protein, 79 aa, Artificial Sequence
  Synthetic polypeptide
NNTQCREGTEAAHLPSPLPTPEEPPVLRGHPDPAEQPLPALPCSPAPGRLPAGPLHGSLQRHHLQAALHRGRLLPPACK

SEQ ID NO: 32110 - protein, 378 aa, Artificial Sequence
  Synthetic polypeptide
ASPVPRITPSVEKELKLPTFRAHSPLLKSRRFFVDILTLLSSHCQLCPAARHLAVYLLDHFMDRYNVTTSKQLYTVAVSCLLLASKFEDREDHVPKLEQINSTRILSSQNFTLTKKELLSTELLLLEAFSWNLCLPTPAHFLDYYLLASVSQKDHHCHTWPTTCPRKTKECLKEYAHYFLEVTLQDHIFYKFQPSVVAAACVGASRICLQLSPYWTRDLQRISSYSLEHLSTCIEILLVVYDNVLKDAVAVKSQALAMVPGTPPTPTQVLFQPPAYPALGQPATTLAQFQTPVQDLCLAYRDSLQAHRSGSLLSGSTGSSLHTPYQPLQPLDMCPVPVPASLSMHMAIAAEPRHCLATTYGSSYFSGSHMFPTGCFDR

SEQ ID NO: 32111 - protein, 243 aa, Artificial Sequence
  Synthetic polypeptide
ASPVPRITPSVEKELKLPTFRAHSPLLKSRRFFVDILTLLSSHCQLCPAARHLAVYLLDHFMDRYNVTTSKQLYTVAVSCLLLASKFEDREDHVPKLEQINSTRILSSQNFTLTKKELLSTELLLLEAFSWNLCLPTPAHFLDYYLLASVSQKDHHCHTWPTTCPRKTKECLKEYAHYFLEVTLQDHIFYKFQPSVVAAACVGASRICLQLSPYWTRDLQRISSYSLEHLSTCIEILLVPLFR

SEQ ID NO: 32112 - protein, 145 aa, Artificial Sequence
  Synthetic polypeptide
ASPVPRITPSVEKELKLPTFRAHSPLLKSRRFFVDILTLLSSHCQLCPAARHLAVYLLDHFMDRYNVTTSKQLYTVAVSCLLLASKFEDREDHVPKLEQINSTRILSSQNFTLTKKELLSTELLLLEAFSWNLCLPTPAHFLDYY

SEQ ID NO: 32113 - protein, 107 aa, Artificial Sequence
  Synthetic polypeptide
NNTQCREGTEAAHLPSPLPTPEEPPVLRGHPDPAEQPLPALPCSPAPGRLPAGPLHGSLQRHHLQAALHRGRLLPPACKSEQRIRVPSAHTFSAAVPSDLGQRQPLV

SEQ ID NO: 32114 - protein, 112 aa, Artificial Sequence
  Synthetic polypeptide
ASPVPRITPSVEKELKLPTFRAHSPLLKSRRFFVDILTLLSSHCQLCPAARHLAVYLLDHFMDRYNVTTSKQLYTVAVSCLLLASRNKGSGSPVPTRSAQQCRQTWARGSPW

SEQ ID NO: 32115 - protein, 64 aa, Artificial Sequence
  Synthetic polypeptide
IAAKSKDPGASLPVFESLLSTATSCMFLSTFLNIPKAWFPCLPNGVSLFMKELQFTECLSAGEL

SEQ ID NO: 32116 - protein, 17 aa, Artificial Sequence
  Synthetic polypeptide
TSPRLGFLVCQTGSHCS

SEQ ID NO: 32117 - protein, 128 aa, Artificial Sequence
  Synthetic polypeptide
LYVFEHVSEHPQGLVSLFAKRGLIVHEGAAVYRVFKRWRAVNLHWDVLNYDKATDIEESSRGESSTSRTLWLPLTALRNRNLVHPTQLTSPRFQCGYVLLHLFNRMRPHEDLSEDNSSGEVVMRVTSV

SEQ ID NO: 32118 - protein, 41 aa, Artificial Sequence
  Synthetic polypeptide
LYVFEHVSEHPQGLVSLFAKRGLIVHEGAAVYRVFKRWRAV

SEQ ID NO: 32119 - protein, 69 aa, Artificial Sequence
  Synthetic polypeptide
TWARDCSVSLYLPYPQDKVVIVPFSWDCFELNMVFTCMKSLEYSLRTEKWFVLFLQRQREMQQIVGLLY

SEQ ID NO: 32120 - protein, 91 aa, Artificial Sequence
  Synthetic polypeptide
HGIHVYEELGVFTEDRKMVRIVLTKTKRDAANCWTSLLESEYAADPWVQDQMQRKLTLERFQKENPGFDFSGAEISGNYTKGGPDFSNLEK

SEQ ID NO: 32121 - protein, 71 aa, Artificial Sequence
  Synthetic polypeptide
ISLMRSDGFIRGSFPTQALSLPAVIHVRRDLLLLAFCHDCEASSAMWNCTSSSRPPRGAHPCSAALPRDTL

SEQ ID NO: 32122 - protein, 119 aa, Artificial Sequence
  Synthetic polypeptide
DVTCSSLPSAMTVRPPQPCGTALPLQDLLGEHTLVQQLFPGIPFDLRNGLHAPAPPAAQEYFLQEGFQAEEALQILQLEMCCPLRHCRGPPLGYFAGVFHSNASARTQLATPACRWAHL

SEQ ID NO: 32123 - protein, 2466 aa, Artificial Sequence
  Synthetic polypeptide
GLLSHVELHFLFKTSSGSTPLFSSSSPGYPLTSGTVYTPPPRLLPRNTFSRKAFKLKKPSKYCSWKCAALSAIAAALLLAILLAYFIAMHLLGLNWQLQPADGHTFNNGIRTGLPGNDDVATMPSGGKVPWSLKNSSIDSGEAEVGRRVTQEVPPGVFWRSQIHISQPQFLKFNISLGKDALFGVYIRRGLPPSHAQYDFMERLDGKEKWSVVESPRERRSIQTLVQNEAVFVQYLDVGLWHLAFYNDGKDKEMVSFNTVVLDSVQDCPRNCHGNGECVSGVCHCFPGFLGADCAKAACPVLCSGNGQYSKGTCQCYSGWKGAECDVPMNQCIDPSCGGHGSCIDGNCVCSAGYKGEHCEEVDCLDPTCSSHGVCVNGECLCSPGWGGLNCELARVQCPDQCSGHGTYLPDTGLCSCDPNWMGPDCSVEVCSVDCGTHGVCIGGACRCEEGWTGAACDQRVCHPRCIEHGTCKDGKCECREGWNGEHCTIGRQTAGTETDGCPDLCNGNGRCTLGQNSWQCVCQTGWRGPGCNVAMETSCADNKDNEGDGLVDCLDPDCCLQSACQNSLLCRGSRDPLDIIQQGQTDWPAVKSFYDRIKLLAGKDSTHIIPGENPFNSSLVSLIRGQVVTTDGTPLVGVNVSFVKYPKYGYTITRQDGTFDLIANGGASLTLHFERAPFMSQERTVWLPWNSFYAMDTLVMKTEENSIPSCDLSGFVRPDPIIISSPLSTFFSAAPGQNPIVPETQVLHEEIELPGSNVKLRYLSSRTAGYKSLLKITMTQSTVPLNLIRVHLMVAVEGHLFQKSFQASPNLAYTFIWDKTDAYGQRVYGLSDAVVSVGFEYETCPSLILWEKRTALLQGFELDPSNLGGWSLDKHHILNVKSGILHKGTGENQFLTQQPAIITSIMGNGRRRSISCPSCNGLAEGNKLLAPVALAVGIDGSLYVGDFNYIRRIFPSRNVTSILELRNKEFKHSNNPAHKYYLAVDPVSGSLYVSDTNSRRIYRVKSLSGTKDLAGNSEVVAGTGEQCLPFDEARCGDGGKAIDATLMSPRGIAVDKNGLMYFVDATMIRKVDQNGIISTLLGSNDLTAVRPLSCDSSMDVAQVRLEWPTDLAVNPMDNSLYVLENNVILRITENHQVSIIAGRPMHCQVPGIDYSLSKLAIHSALESASAIAISHTGVLYITETDEKKINRLRQVTTNGEICLLAGAASDCDCKNDVNCNCYSGDDAYATDAILNSPSSLAVAPDGTIYIADLGNIRIRAVSKNKPVLNAFNQYEAASPGEQELYVFNADGIHQYTVSLVTGEYLYNFTYSTDNDVTELIDNNGNSLKIRRDSSGMPRHLLMPDNQIITLTVGTNGGLKVVSTQNLELGLMTYDGNTGLLATKSDETGWTTFYDYDHEGRLTNVTRPTGVVTSLHREMEKSITIDIENSNRDDDVTVITNLSSVEASYTVVQDQVRNSYQLCNNGTLRVMYANGMGISFHSEPHVLAGTITPTIGRCNISLPMENGLNSIEWRLRKEQIKGKVTIFGRKLRVHGRNLLSIDYDRNIRTEKIYDDHRKFTLRIIYDQVGRPFLWLPSSGLAAVNVSYFFNGRLAGLQRGAMSERTDIDKQGRIVSRMFADGKVWSYSYLDKSMVLLLQSQRQYIFEYDSSDRLLAVTMPSVARHSMSTHTSIGYIRNIYNPPESNASVIFDYSDDGRILKTSFLGTGRQVFYKYGKLSKLSEIVYDSTAVTFGYDETTGVLKMVNLQSGGFSCTIRYRKIGPLVDKQIYRFSEEGMVNARFDYTYHDNSFRIASIKPVISETPLPVDLYRYDEISGKVEHFGKFGVIYYDINQIITTAVMTLSKHFDTHGRIKEVQYEMFRSLMYWMTVQYDSMGRVIKRELKLGPYANTTKYTYDYDGDGQLQSVAVNDRPTWRYSYDLNGNLHLLNPGNSVRLMPLRYDLRDRITRLGDVQYKIDDDGYLCQRGSDIFEYNSKGLLTRAYNKASGWSVQYRYDGVGRRASYKTNLGHHLQYFYSDLHNPTRITHVYNHSNSEITSLYYDLQGHLFAMESSSGEEYYVASDNTGTPLAVFSINGLMIKQLQYTAYGEIYYDSNPDFQMVIGFHGGLYDPLTKLVHFTQRDYDVLAGRWTSPDYTMWKNVGKEPAPFNLYMFKSNNPLSSELDLKNYVTDVKSWLVMFGFQLSNIIPGFPRAKMYFVPPPYELSESQASENGQLITGVQQTTERHNQAFMALEGQVITKKLHASIREKAGHWFATTTPIIGKGIMFAIKEGRVTTGVSSIASEDSRKVASVLNNAYYLDKMHYSIEGKDTHYFVKIGSADGDLVTLGTTIGRKVLESGVNVTVSQPTLLVNGRTRRFTNIEFQYSTLLLSIRYGLTPDTLDEEKARVLDQARQRALGTAWAKEQQKARDGREGSRLWTEGEKQQLLSTGRVQGYEGYYVLPVEQYPELADSSSNIQFLRQNEMGKR

SEQ ID NO: 32124 - protein, 2465 aa, Artificial Sequence
  Synthetic polypeptide
GLLSHVELHFLFKTSSGSTPLFSSSSPGYPLTSGTVYTPPPRLLPRNTFSRKAFKLKKPSKYCSWKCAALSAIAAALLLAILLAYFIAMHLLGLNWQLQPADGHTFNNGIRTGLPGNDDVATMPSGGKVPWSLKNSSIDSGEAEVGRRVTQEVPPGVFWRSQIHISQPQFLKFNISLGKDALFGVYIRRGLPPSHAQYDFMERLDGKEKWSVVESPRERRSIQTLVQNEAVFVQYLDVGLWHLAFYNDGKDKEMVSFNTVVLDSVQDCPRNCHGNGECVSGVCHCFPGFLGADCAKAACPVLCSGNGQYSKGTCQCYSGWKGAECDVPMNQCIDPSCGGHGSCIDGNCVCSAGYKGEHCEEVDCLDPTCSSHGVCVNGECLCSPGWGGLNCELARVQCPDQCSGHGTYLPDTGLCSCDPNWMGPDCSVEVCSVDCGTHGVCIGGACRCEEGWTGAACDQRVCHPRCIEHGTCKDGKCECREGWNGEHCTIVRETIGGECYGCPDLCNGNGRCTLGQNSWQCVCQTGWRGPGCNVAMETSCADNKDNEGDGLVDCLDPDCCLQSACQNSLLCRGSRDPLDIIQQGQTDWPAVKSFYDRIKLLAGKDSTHIIPGENPFNSSLVSLIRGQVVTTDGTPLVGVNVSFVKYPKYGYTITRQDGTFDLIANGGASLTLHFERAPFMSQERTVWLPWNSFYAMDTLVMKTEENSIPSCDLSGFVRPDPIIISSPLSTFFSAAPGQNPIVPETQVLHEEIELPGSNVKLRYLSSRTAGYKSLLKITMTQSTVPLNLIRVHLMVAVEGHLFQKSFQASPNLAYTFIWDKTDAYGQRVYGLSDAVVSVGFEYETCPSLILWEKRTALLQGFELDPSNLGGWSLDKHHILNVKSGILHKGTGENQFLTQQPAIITSIMGNGRRRSISCPSCNGLAEGNKLLAPVALAVGIDGSLYVGDFNYIRRIFPSRNVTSILELRNKEFHNNNPAHKYYLAVDPVSGSLYVSDTNSRRIYRVKSLSGTKDLAGNSEVVAGTGEQCLPFDEARCGDGGKAIDATLMSPRGIAVDKNGLMYFVDATMIRKVDQNGIISTLLGSNDLTAVRPLSCDSSMDVAQVRLEWPTDLAVNPMDNSLYVLENNVILRITENHQVSIIAGRPMHCQVPGIDYSLSKLAIHSALESASAIAISHTGVLYITETDEKKINRLRQVTTNGEICLLAGAASDCDCKNDVNCNCYSGDDAYATDAILNSPSSLAVAPDGTIYIADLGNIRIRAVSKNKPVLNAFNQYEAASPGEQELYVFNADGIHQYTVSLVTGEYLYNFTYSTDNDVTELIDNNGNSLKIRRDSSGMPRHLLMPDNQIITLTVGTNGGLKVVSTQNLELGLMTYDGNTGLLATKSDETGWTTFYDYDHEGRLTNVTRPTGVVTSLHREMEKSITIDIENSNRDDDVTVITNLSSVEASYTVVQDQVRNSYQLCNNGTLRVMYANGMGISFHSEPHVLAGTITPTIGRCNISLPMENGLNSIEWRLRKEQIKGKVTIFGRKLRVHGRNLLSIDYDRNIRTEKIYDDHRKFTLRIIYDQVGRPFLWLPSSGLAAVNVSYFFNGRLAGLQRGAMSERTDIDKQGRIVSRMFADGKVWSYSYLDKSMVLLLQSQRQYIFEYDSSDRLLAVTMPSVARHSMSTHTSIGYIRNIYNPPESNASVIFDYSDDGRILKTSFLGTGRQVFYKYGKLSKLSEIVYDSTAVTFGYDETTGVLKMVNLQSGGFSCTIRYRKIGPLVDKQIYRFSEEGMVNARFDYTYHDNSFRIASIKPVISETPLPVDLYRYDEISGKVEHFGKFGVIYYDINQIITTAVMTLSKHFDTHGRIKEVQYEMFRSLMYWMTVQYDSMGRVIKRELKLGPYANTTKYTYDYDGDGQLQSVAVNDRPTWRYSYDLNGNLHLLNPGNSVRLMPLRYDLRDRITRLGDVQYKIDDDGYLCQRGSDIFEYNSKGLLTRAYNKASGWSVQYRYDGVGRRASYKTNLGHHLQYFYSDLHNPTRITHVYNHSNSEITSLYYDLQGHLFAMESSSGEEYYVASDNTGTPLAVFSINGLMIKQLQYTAYGEIYYDSNPDFQMVIGFHGGLYDPLTKLVHFTQRDYDVLAGRWTSPDYTMWKNVGKEPAPFNLYMFKSNNPLSSELDLKNYVTDVKSWLVMFGFQLSNIIPGFPRAKMYFVPPPYELSESQASENGQLITGVQQTTERHNQAFMALEGQVITKKLHASIREKAGHWFATTTPIIGKGIMFAIKEGRVTTGVSSIASEDSRKVASVLNNAYYLDKMHYSIEGKDTHYFVKIGSADGDLVTLGTTIGRKVLESGVNVTVSQPTLLVNGRTRRFTNIEFQYSTLLLSIRYGLTPDTLDEEKARVLDQARQRALGTAWAKEQQKARDGREGSRLWTEGEKQQLLSTGRVQGYEGYYVLPVEQYPELADSSSNIQFLRQNEMGKR

SEQ ID NO: 32125 - protein, 113 aa, Artificial Sequence
  Synthetic polypeptide
DVTCSSLPSAMTVRPPQPCGTALPLQDLLGEHTLVQQLFPGIPFDLRNGLHAPAPPAAQEYFLQEGFQAEEALQILQLEMCCPLRHCRGPPLGYFAGVFHSALVVEKQQHRQW

SEQ ID NO: 32126 - protein, 2418 aa, Artificial Sequence
  Synthetic polypeptide
GLLSHVELHFLFKTSSGSTPLFSSSSPGYPLTSGTVYTPPPRLLPRNTFSRKAFKLKKPSKYCSWKCAALSAIAAALLLAILLAYFIVPWSLKNSSIDSGEAEVGRRVTQEVPPGVFWRSQIHISQPQFLKFNISLGKDALFGVYIRRGLPPSHAQYDFMERLDGKEKWSVVESPRERRSIQTLVQNEAVFVQYLDVGLWHLAFYNDGKDKEMVSFNTVVLDSVQDCPRNCHGNGECVSGVCHCFPGFLGADCAKAACPVLCSGNGQYSKGTCQCYSGWKGAECDVPMNQCIDPSCGGHGSCIDGNCVCSAGYKGEHCEEVDCLDPTCSSHGVCVNGECLCSPGWGGLNCELARVQCPDQCSGHGTYLPDTGLCSCDPNWMGPDCSVEVCSVDCGTHGVCIGGACRCEEGWTGAACDQRVCHPRCIEHGTCKDGKCECREGWNGEHCTIGRQTAGTETDGCPDLCNGNGRCTLGQNSWQCVCQTGWRGPGCNVAMETSCADNKDNEGDGLVDCLDPDCCLQSACQNSLLCRGSRDPLDIIQQGQTDWPAVKSFYDRIKLLAGKDSTHIIPGENPFNSSLVSLIRGQVVTTDGTPLVGVNVSFVKYPKYGYTITRQDGTFDLIANGGASLTLHFERAPFMSQERTVWLPWNSFYAMDTLVMKTEENSIPSCDLSGFVRPDPIIISSPLSTFFSAAPGQNPIVPETQVLHEEIELPGSNVKLRYLSSRTAGYKSLLKITMTQSTVPLNLIRVHLMVAVEGHLFQKSFQASPNLAYTFIWDKTDAYGQRVYGLSDAVVSVGFEYETCPSLILWEKRTALLQGFELDPSNLGGWSLDKHHILNVKSGILHKGTGENQFLTQQPAIITSIMGNGRRRSISCPSCNGLAEGNKLLAPVALAVGIDGSLYVGDFNYIRRIFPSRNVTSILELRNNPAHKYYLAVDPVSGSLYVSDTNSRRIYRVKSLSGTKDLAGNSEVVAGTGEQCLPFDEARCGDGGKAIDATLMSPRGIAVDKNGLMYFVDATMIRKVDQNGIISTLLGSNDLTAVRPLSCDSSMDVAQVRLEWPTDLAVNPMDNSLYVLENNVILRITENHQVSIIAGRPMHCQVPGIDYSLSKLAIHSALESASAIAISHTGVLYITETDEKKINRLRQVTTNGEICLLAGAASDCDCKNDVNCNCYSGDDAYATDAILNSPSSLAVAPDGTIYIADLGNIRIRAVSKNKPVLNAFNQYEAASPGEQELYVFNADGIHQYTVSLVTGEYLYNFTYSTDNDVTELIDNNGNSLKIRRDSSGMPRHLLMPDNQIITLTVGTNGGLKVVSTQNLELGLMTYDGNTGLLATKSDETGWTTFYDYDHEGRLTNVTRPTGVVTSLHREMEKSITIDIENSNRDDDVTVITNLSSVEASYTVVQDQVRNSYQLCNNGTLRVMYANGMGISFHSEPHVLAGTITPTIGRCNISLPMENGLNSIEWRLRKEQIKGKVTIFGRKLRVHGRNLLSIDYDRNIRTEKIYDDHRKFTLRIIYDQVGRPFLWLPSSGLAAVNVSYFFNGRLAGLQRGAMSERTDIDKQGRIVSRMFADGKVWSYSYLDKSMVLLLQSQRQYIFEYDSSDRLLAVTMPSVARHSMSTHTSIGYIRNIYNPPESNASVIFDYSDDGRILKTSFLGTGRQVFYKYGKLSKLSEIVYDSTAVTFGYDETTGVLKMVNLQSGGFSCTIRYRKIGPLVDKQIYRFSEEGMVNARFDYTYHDNSFRIASIKPVISETPLPVDLYRYDEISGKVEHFGKFGVIYYDINQIITTAVMTLSKHFDTHGRIKEVQYEMFRSLMYWMTVQYDSMGRVIKRELKLGPYANTTKYTYDYDGDGQLQSVAVNDRPTWRYSYDLNGNLHLLNPGNSVRLMPLRYDLRDRITRLGDVQYKIDDDGYLCQRGSDIFEYNSKGLLTRAYNKASGWSVQYRYDGVGRRASYKTNLGHHLQYFYSDLHNPTRITHVYNHSNSEITSLYYDLQGHLFAMESSSGEEYYVASDNTGTPLAVFSINGLMIKQLQYTAYGEIYYDSNPDFQMVIGFHGGLYDPLTKLVHFTQRDYDVLAGRWTSPDYTMWKNVGKEPAPFNLYMFKSNNPLSSELDLKNYVTDVKSWLVMFGFQLSNIIPGFPRAKMYFVPPPYELSESQASENGQLITGVQQTTERHNQAFMALEGQVITKKLHASIREKAGHWFATTTPIIGKGIMFAIKEGRVTTGVSSIASEDSRKVASVLNNAYYLDKMHYSIEGKDTHYFVKIGSADGDLVTLGTTIGRKVLESGVNVTVSQPTLLVNGRTRRFTNIEFQYSTLLLSIRYGLTPDTLDEEKARVLDQARQRALGTAWAKEQQKARDGREGSRLWTEGEKQQLLSTGRVQGYEGYYVLPVEQYPELADSSSNIQFLRQNEMGKR

SEQ ID NO: 32127 - protein, 2457 aa, Artificial Sequence
  Synthetic polypeptide
GLLSHVELHFLFKTSSGSTPLFSSSSPGYPLTSGTVYTPPPRLLPRNTFSRKAFKLKKPSKYCSWKCAALSAIAAALLLAILLAYFIAMHLLGLNWQLQPADGHTFNNGIRTGLPGNDDVATMPSGGKVPWSLKNSSIDSGEAEVGRRVTQEVPPGVFWRSQIHISQPQFLKFNISLGKDALFGVYIRRGLPPSHAQYDFMERLDGKEKWSVVESPRERRSIQTLVQNEAVFVQYLDVGLWHLAFYNDGKDKEMVSFNTVVLDSVQDCPRNCHGNGECVSGVCHCFPGFLGADCAKAACPVLCSGNGQYSKGTCQCYSGWKGAECDVPMNQCIDPSCGGHGSCIDGNCVCSAGYKGEHCEEVDCLDPTCSSHGVCVNGECLCSPGWGGLNCELARVQCPDQCSGHGTYLPDTGLCSCDPNWMGPDCSVEVCSVDCGTHGVCIGGACRCEEGWTGAACDQRVCHPRCIEHGTCKDGKCECREGWNGEHCTIDGCPDLCNGNGRCTLGQNSWQCVCQTGWRGPGCNVAMETSCADNKDNEGDGLVDCLDPDCCLQSACQNSLLCRGSRDPLDIIQQGQTDWPAVKSFYDRIKLLAGKDSTHIIPGENPFNSSLVSLIRGQVVTTDGTPLVGVNVSFVKYPKYGYTITRQDGTFDLIANGGASLTLHFERAPFMSQERTVWLPWNSFYAMDTLVMKTEENSIPSCDLSGFVRPDPIIISSPLSTFFSAAPGQNPIVPETQVLHEEIELPGSNVKLRYLSSRTAGYKSLLKITMTQSTVPLNLIRVHLMVAVEGHLFQKSFQASPNLAYTFIWDKTDAYGQRVYGLSDAVVSVGFEYETCPSLILWEKRTALLQGFELDPSNLGGWSLDKHHILNVKSGILHKGTGENQFLTQQPAIITSIMGNGRRRSISCPSCNGLAEGNKLLAPVALAVGIDGSLYVGDFNYIRRIFPSRNVTSILELRNKEFKHSNNPAHKYYLAVDPVSGSLYVSDTNSRRIYRVKSLSGTKDLAGNSEVVAGTGEQCLPFDEARCGDGGKAIDATLMSPRGIAVDKNGLMYFVDATMIRKVDQNGIISTLLGSNDLTAVRPLSCDSSMDVAQVRLEWPTDLAVNPMDNSLYVLENNVILRITENHQVSIIAGRPMHCQVPGIDYSLSKLAIHSALESASAIAISHTGVLYITETDEKKINRLRQVTTNGEICLLAGAASDCDCKNDVNCNCYSGDDAYATDAILNSPSSLAVAPDGTIYIADLGNIRIRAVSKNKPVLNAFNQYEAASPGEQELYVFNADGIHQYTVSLVTGEYLYNFTYSTDNDVTELIDNNGNSLKIRRDSSGMPRHLLMPDNQIITLTVGTNGGLKVVSTQNLELGLMTYDGNTGLLATKSDETGWTTFYDYDHEGRLTNVTRPTGVVTSLHREMEKSITIDIENSNRDDDVTVITNLSSVEASYTVVQDQVRNSYQLCNNGTLRVMYANGMGISFHSEPHVLAGTITPTIGRCNISLPMENGLNSIEWRLRKEQIKGKVTIFGRKLRVHGRNLLSIDYDRNIRTEKIYDDHRKFTLRIIYDQVGRPFLWLPSSGLAAVNVSYFFNGRLAGLQRGAMSERTDIDKQGRIVSRMFADGKVWSYSYLDKSMVLLLQSQRQYIFEYDSSDRLLAVTMPSVARHSMSTHTSIGYIRNIYNPPESNASVIFDYSDDGRILKTSFLGTGRQVFYKYGKLSKLSEIVYDSTAVTFGYDETTGVLKMVNLQSGGFSCTIRYRKIGPLVDKQIYRFSEEGMVNARFDYTYHDNSFRIASIKPVISETPLPVDLYRYDEISGKVEHFGKFGVIYYDINQIITTAVMTLSKHFDTHGRIKEVQYEMFRSLMYWMTVQYDSMGRVIKRELKLGPYANTTKYTYDYDGDGQLQSVAVNDRPTWRYSYDLNGNLHLLNPGNSVRLMPLRYDLRDRITRLGDVQYKIDDDGYLCQRGSDIFEYNSKGLLTRAYNKASGWSVQYRYDGVGRRASYKTNLGHHLQYFYSDLHNPTRITHVYNHSNSEITSLYYDLQGHLFAMESSSGEEYYVASDNTGTPLAVFSINGLMIKQLQYTAYGEIYYDSNPDFQMVIGFHGGLYDPLTKLVHFTQRDYDVLAGRWTSPDYTMWKNVGKEPAPFNLYMFKSNNPLSSELDLKNYVTDVKSWLVMFGFQLSNIIPGFPRAKMYFVPPPYELSESQASENGQLITGVQQTTERHNQAFMALEGQVITKKLHASIREKAGHWFATTTPIIGKGIMFAIKEGRVTTGVSSIASEDSRKVASVLNNAYYLDKMHYSIEGKDTHYFVKIGSADGDLVTLGTTIGRKVLESGVNVTVSQPTLLVNGRTRRFTNIEFQYSTLLLSIRYGLTPDTLDEEKARVLDQARQRALGTAWAKEQQKARDGREGSRLWTEGEKQQLLSTGRVQGYEGYYVLPVEQYPELADSSSNIQFLRQNEMGKR

SEQ ID NO: 32128 - protein, 1475 aa, Artificial Sequence
  Synthetic polypeptide
GRARWLTPVIPALWEAEAGGSRSQEIETILANTDSLHSLMATLSSSNPFFVRCIKPNMQKMPDQFDQAVVLNQLRYSGMLETVRIRKAGYAVRRPFQDFYKRYKVLMRNLALPEDVRGKCTSLLQLYDASNSEWQLGKTKVFLRESLEQKLEKRREEEVSHAAMVIRAHVLGFLARKQYRKVLYCVVIIQKNYRAFLLRRRFLHLKKAAIVFQKQLRGQIARRVYRQLLAEKREQEEKKKQEEEEKKKREEEERERERERREAELRAQQEEETRKQQELEALQKSQKEAELTRELEKQKENKQVEEILRLEKEIEDLQRMKEQQELSLTEASLQKLQERRDQELRRLEEEACRAAQEFLESLNFDEIDECVRNIERSLSVGSEFSSELAESACEEKPNFNFSQPYPEEEVDEGFEADDDAFKDSPNPSEHGHSDQRTSGIRTSDDSSEEDPYMNDTVVPTSPSADSTVLLAPSVQDSGSLHNSSSGESTYCMPQNAGDLPSPDGDYDYDQDDYEDGAITSGSSVTFSNSYGSQWSPDYRCSVGTYNSSGAYRFSSEGAQSSFEDSEEDFDSRFDTDDELSYRRDSVYSCVTLPYFHSFLYMKGGLMNSWKRRWCVLKDETFLWFRSKQEALKQGWLHKKGGGSSTLSRRNWKKRWFVLRQSKLMYFENDSEEKLKGTVEVRTAKEIIDNTTKENGIDIIMADRTFHLIAESPEDASQWFSVLSQVHASTDQEIQEMHDEQANPQNAVGTLDVGLIDSVCASDSPDRPNSFVIITANRVLHCNADTPEEMHHWITLLQRSKGDTRVEGQEFIVRGWLHKEVKNSPKMSSLKLKKRWFVLTHNSLDYYKSSEKNALKLGTLVLNSLCSVVPPDEKIFKETGYWNVTVYGRKHCYRLYTKLLNEATRWSSAIQNVTDTKAPIDTPTQQLIQDIKENCLNSDVVEQIYKRNPILRYTHHPLHSPLLPLPYGDINLNLLKDKGYTTLQDEAIKIFNSLQQLESMSDPIPIIQGILQTGHDLRPLRDELYCQLIKQTNKVPHPGSVGNLYSWQILTCLSCTFLPSRGILKYLKFHLKRIREQFPGSEMEKYALFTYESLKKTKCREFVPSRDEIEALIHRQEMTSTVYCHGGGSCKITINSHTTAGEVVEKLIRGLAMEDSRNMFALFEYNGHVDKAIESRTVVADVLAKFEKLAATSEVGDLPWKFYFKLYCFLDTDNVPKDSVEFAFMFEQAHEAVIHGHHPAPEENLQVLAALRLQYLQGDYTLHAAIPPLEEVYSLQRLKARISQSTKTFTPCERLEKRRTSFLEGTLRRSFRTGSVVRQKVEEEQMLDMWIKEEVSSARASIIDKWRKFQGMNQEQAMAKYMALIKEWPGYGSTLFDVECKEGGFPQELWLGVSADAVSVYKRGEGRPLEVFQYEHILSFGAPLANTYKIVVDERELLFETSEVVDVAKLMKAYISMIVKKRYSTTRSASSQGSSR

SEQ ID NO: 32129 - protein, 29 aa, Artificial Sequence
  Synthetic polypeptide
SQHFGRLRPVDHEVRRSRPSWLTRTHCIP

SEQ ID NO: 32130 - protein, 14 aa, Artificial Sequence
  Synthetic polypeptide
HGLTAFLNGNAKLL

SEQ ID NO: 32131 - protein, 236 aa, Artificial Sequence
  Synthetic polypeptide
GRARWLTPVIPALWEAEAGGSRSQEIETILANTDSLHSLMATLSSSNPFFVRCIKPNMQKMPDQFDQAVVLNQLRYSGMLETVRIRKAGYAVRRPFQDFYKRYKVLMRNLALPEDVRGKCTSLLQLYDASNSEWQLGKTKVFLRESLEQKLEKRREEEVSHAAMVIRAHVLGFLARKQYRKVLYCVVIIQKNYRAFLLRRRFLHLKKAAIVFQKQLRGQIARRVYRQLLAEKREQE

SEQ ID NO: 32132 - protein, 21 aa, Artificial Sequence
  Synthetic polypeptide
DQPDQHGETPSLLKIEKLTRQ

SEQ ID NO: 32133 - protein, 18 aa, Artificial Sequence
  Synthetic polypeptide
PGSRQQGLPGHGSVCVLL

SEQ ID NO: 32134 - protein, 1681 aa, Artificial Sequence
  Synthetic polypeptide
PTWRNPISTKNRKINQAVDSRDSLAMALYACCFEWVIKKINSRIKGNEDFKSIGILDIFGFENFEVNHFEQFNINYANEKLQEYFNKHIFSLEQLEYSREGLVWEDIDWIDNGECLDLIEKKLGLLALINEESHFPQATDSTLLEKLHSQHANNHFYVKPRVAVNNFGVKHYAGEVQYDVRGILEKNRDTFRDDLLNLLRESRFDFIYDLFEHVSSRNNQDTLKCGSKHRRPTVSSQFKDSLHSLMATLSSSNPFFVRCIKPNMQKMPDQFDQAVVLNQLRYSGMLETVRIRKAGYAVRRPFQDFYKRYKVLMRNLALPEDVRGKCTSLLQLYDASNSEWQLGKTKVFLRESLEQKLEKRREEEVSHAAMVIRAHVLGFLARKQYRKVLYCVVIIQKNYRAFLLRRRFLHLKKAAIVFQKQLRGQIARRVYRQLLAEKREQEEKKKQEEEEKKKREEEERERERERREAELRAQQEEETRKQQELEALQKSQKEAELTRELEKQKENKQVEEILRLEKEIEDLQRMKEQQELSLTEASLQKLQERRDQELRRLEEEACRAAQEFLESLNFDEIDECVRNIERSLSVGSEFSSELAESACEEKPNFNFSQPYPEEEVDEGFEADDDAFKDSPNPSEHGHSDQRTSGIRTSDDSSEEDPYMNDTVVPTSPSADSTVLLAPSVQDSGSLHNSSSGESTYCMPQNAGDLPSPDGDYDYDQDDYEDGAITSGSSVTFSNSYGSQWSPDYRCSVGTYNSSGAYRFSSEGAQSSFEDSEEDFDSRFDTDDELSYRRDSVYSCVTLPYFHSFLYMKGGLMNSWKRRWCVLKDETFLWFRSKQEALKQGWLHKKGGGSSTLSRRNWKKRWFVLRQSKLMYFENDSEEKLKGTVEVRTAKEIIDNTTKENGIDIIMADRTFHLIAESPEDASQWFSVLSQVHASTDQEIQEMHDEQANPQNAVGTLDVGLIDSVCASDSPDRPNSFVIITANRVLHCNADTPEEMHHWITLLQRSKGDTRVEGQEFIVRGWLHKEVKNSPKMSSLKLKKRWFVLTHNSLDYYKSSEKNALKLGTLVLNSLCSVVPPDEKIFKETGYWNVTVYGRKHCYRLYTKLLNEATRWSSAIQNVTDTKAPIDTPTQQLIQDIKENCLNSDVVEQIYKRNPILRYTHHPLHSPLLPLPYGDINLNLLKDKGYTTLQDEAIKIFNSLQQLESMSDPIPIIQGILQTGHDLRPLRDELYCQLIKQTNKVPHPGSVGNLYSWQILTCLSCTFLPSRGILKYLKFHLKRIREQFPGSEMEKYALFTYESLKKTKCREFVPSRDEIEALIHRQEMTSTVYCHGGGSCKITINSHTTAGEVVEKLIRGLAMEDSRNMFALFEYNGHVDKAIESRTVVADVLAKFEKLAATSEVGDLPWKFYFKLYCFLDTDNVPKDSVEFAFMFEQAHEAVIHGHHPAPEENLQVLAALRLQYLQGDYTLHAAIPPLEEVYSLQRLKARISQSTKTFTPCERLEKRRTSFLEGTLRRSFRTGSVVRQKVEEEQMLDMWIKEEVSSARASIIDKWRKFQGMNQEQAMAKYMALIKEWPGYGSTLFDVECKEGGFPQELWLGVSADAVSVYKRGEGRPLEVFQYEHILSFGAPLANTYKIVVDERELLFETSEVVDVAKLMKAYISMIVKKRYSTTRSASSQGSSR

SEQ ID NO: 32135 - protein, 442 aa, Artificial Sequence
  Synthetic polypeptide
PTWRNPISTKNRKINQAVDSRDSLAMALYACCFEWVIKKINSRIKGNEDFKSIGILDIFGFENFEVNHFEQFNINYANEKLQEYFNKHIFSLEQLEYSREGLVWEDIDWIDNGECLDLIEKKLGLLALINEESHFPQATDSTLLEKLHSQHANNHFYVKPRVAVNNFGVKHYAGEVQYDVRGILEKNRDTFRDDLLNLLRESRFDFIYDLFEHVSSRNNQDTLKCGSKHRRPTVSSQFKDSLHSLMATLSSSNPFFVRCIKPNMQKMPDQFDQAVVLNQLRYSGMLETVRIRKAGYAVRRPFQDFYKRYKVLMRNLALPEDVRGKCTSLLQLYDASNSEWQLGKTKVFLRESLEQKLEKRREEEVSHAAMVIRAHVLGFLARKQYRKVLYCVVIIQKNYRAFLLRRRFLHLKKAAIVFQKQLRGQIARRVYRQLLAEKREQE

SEQ ID NO: 32136 - protein, 9 aa, Artificial Sequence
  Synthetic polypeptide
ERIYENHSD

SEQ ID NO: 32137 - protein, 1113 aa, Artificial Sequence
  Synthetic polypeptide
VDKNMQWGKDFLFNKWCWDSWRAICKRIKLDPYLLPYTKVNSKWIKDLNVRPQTIRGLEENLENTILYIGLEKEFMKTTQIEDPRVQWRREQEHMLKDYLVVAQEALSAQKEIYQVKQQRLELAQQEYQQLHAVWEHKLGSQVSLVSGSSSSSKYDPEILKAEIATAKSRVNKLKREMVHLQHELQFKERGFQTLKKIDKKMSDAQGSYKLDEAQAVLRETKAIKKAITCGEKEKQDLIKSLAMLKDGFRTDRGSHSDLWSSSSSLESSSFPLPKQYLDVSSQTDISGSFGINSNNQLAEKVRLRLRYEEAKRRIANLKIQLAKLDSEAWPGVLDSERDRLILINEKEELLKEMRFISPRKWTQGEVEQLEMARKRLEKDLQAARDTQSKALTERLKLNSKRNQLVRELEEATRQVATLHSQLKSLSSSMQSLSSGSSPGSLTSSRGSLVASSLDSSTSASFTDLYYDPFEQLDSELQSKVEFLLLEGATGFRPSGCITTIHEDEVAKTQKAEGGGRLQALRSLSGTPKSMTSLSPRSSLSSPSPPCSPLMADPLLAGDAFLNSLEFEDPELSATLCELSLGNSAQERYRLEEPGTEGKQLGQAVNTAQGCGLKVACVSAAVSDESVAGDSGVYEASVQRLGASEAAAFDSDESEAVGATRIQIALKYDEKNKQFAILIIQLSNLSALLQQQDQKVNIRVAVLPCSESTTCLFRTRPLDASDTLVFNEVFWVSMSYPALHQKTLRVDVCTTDRSHLEECLGGAQISLAEVCRSGERSTRWYNLLSYKYLKKQSRELKPVGVMAPASGPASTDAVSALLEQTAVELEKRQEGRSSTQTLEDSWRYEETSENEAVAEEEEEEVEEEEGEEDVFTEKASPDMDGYPALKVDKETNTETPAPSPTVVRPKDRRVGTPSQGPFLRGSTIIRSKTFSPGPQSQYVCRLNRSDSDSSTLSKKPPFVRNSLERRSVRMKRPSSVKSLRSERLIRTSLDLELDLQATRTWHSQLTQEISVLKELKEQLEQAKSHGEKELPQWLREDERFRLLLRMLEKRQMDRAEHKGELQTDKMMRAAAKDVHRLRGQSCKEPPEVQSFREKMAFFTRPRMNIPALSADDV

SEQ ID NO: 32138 - protein, 1119 aa, Artificial Sequence
  Synthetic polypeptide
VDKNMQWGKDFLFNKWCWDSWRAICKRIKLDPYLLPYTKVNSKWIKDLNVRPQTIRGLEENLENTILYIGLEKEFMKTTQIEDPRVQWRREQEHMLKDYLVVAQEALSAQKEIYQVKQQRLELAQQEYQQLHAVWEHKLGSQVSLVSGSSSSSKYDPEILKAEIATAKSRVNKLKREMVHLQHELQFKERGFQTLKKIDKKMSDAQGSYKLDEAQAVLRETKAIKKAITCGEKEKQDLIKSLAMLKDGFRTDRGSHSDLWSSSSSLESSSFPLPKQYLDVSSQTDISGSFGINSNNQLAEKVRLRLRYEEAKRRIANLKIQLAKLDSEAWPGVLDSERDRLILINEKEELLKEMRFISPRKWTQGEVEQLEMARKRLEKDLQAARDTQSKALTERLKLNSKRNQLVRELEEATRQVATLHSQLKSLSSSMQSLSSGSSPGSLTSSRGSLVASSLDSSTSASFTDLYYDPFEQLDSELQSKVEFLLLEGATGFRPSGCITTIHEDEVAKTQKAEGGGRLQALRSLSGTPKSMTSLSPRSSLSSPSPPCSPLMADPLLAGDAFLNSLEFEDPELSATLCELSLGNSAQERYRLEEPGTEGKQLGQAVNTAQGCGLKVACVSAAVSDESVAGDSGVYEASVQRLGASEAAAFDSDESEAVGATRIQIALKYDEKNKQFAILIIQLSNLSALLQQQDQKVNIRVAVLPCSESTTCLFRTRPLDASDTLVFNEVFWVSMSYPALHQKTLRVDVCTTDRSHLEECLGGAQISLAEVCRSGERSTRWYNLLSYKYLKKQSRELKPVGVMAPASGPASTDAVSALLEQTAVELEKRQEGRSSTQTLEDSWRYEETSENEAVAEEEEEEVEEEEGEEDVFTEKASPDMDGYPALKVDKETNTETPAPSPTVVRPKDRRVGTPSQGPFLRGSTIIRSKTFSPGPQSQYVCRLNRSDSDSSTLSKKPPFVRNSLERRSVRMKRPSPPPQPSSVKSLRSERLIRTSLDLELDLQATRTWHSQLTQEISVLKELKEQLEQAKSHGEKELPQWLREDERFRLLLRMLEKRQMDRAEHKGELQTDKMMRAAAKDVHRLRGQSCKEPPEVQSFREKMAFFTRPRMNIPALSADDV

SEQ ID NO: 32139 - protein, 1118 aa, Artificial Sequence
  Synthetic polypeptide
VDKNMQWGKDFLFNKWCWDSWRAICKRIKLDPYLLPYTKVNSKWIKDLNVRPQTIRGLEENLENTILYIGLEKEFMKTTQIEDPRVQWRREQEHMLKDYLVVAQEALSAQKEIYQVKQQRLELAQQEYQQLHAVWEHKLGSQVSLVSGSSSSSKYDPEILKAEIATAKSRVNKLKREMVHLQHELQFKERGFQTLKKIDKKMSDAQGSYKLDEAQAVLRETKAIKKAITCGEKEKQDLIKSLAMLKDGFRTDRGSHSDLWSSSSSLESSSFPLPKQYLDVSSQTDISGSFGINSNNQLAEKVRLRLRYEEAKRRIANLKIQLAKLDSEAWPGVLDSERDRLILINEKEELLKEMRFISPRKWTQGEVEQLEMARKRLEKDLQAARDTQSKALTERLKLNSKRNQLVRELEEATRQVATLHSQLKSLSSSMQSLSSGSSPGSLTSSRGSLVASSLDSSTSASFTDLYYDPFEQLDSELQSKVEFLLLEGATGFRPSGCITTIHEDEVAKTQKAEGGGRLQALRSLSGTPKSMTSLSPRSSLSSPSPPCSPLMADPLLAGDAFLNSLEFEDPELSATLCELSLGNSAQERYRLEEPGTEGKQLGQAVNTAQGCGLKVACVSAAVSDESVAGDSGVYEASVQRLGASEAAAFDSDESEAVGATRIQIALKYDEKNKQFAILIIQLSNLSALLQQQDQKVNIRVAVLPCSESTTCLFRTRPLDASDTLVFNEVFWVSMSYPALHQKTLRVDVCTTDRSHLEECLGGAQISLAEVCRSGERSTRWYNLLSYKYLKKQSRELKPVGVMAPASGPASTDAVSALLEQTAVELEKRQEGRSSTQTLEDSWRYEETSENEAVAEEEEEEVEEEEGEEDVFTEKASPDMDGYPALKVDKETNTETPAPSPTVVRPKDRRVGTPSQGPFLRGSTIIRSKTFSPGPQSQYVCRLNRSDSDSSTLSKKPPFVRNSLERRSVRMKRPSPPPQPSSVKSLRSERLIRTSLDLELDLQATRTWHSQLTQEISVLKELKEQLEQAKSHGEKELPQWLREDERFRLLLRMLEKRMDRAEHKGELQTDKMMRAAAKDVHRLRGQSCKEPPEVQSFREKMAFFTRPRMNIPALSADDV

SEQ ID NO: 32140 - protein, 27 aa, Artificial Sequence
  Synthetic polypeptide
RVKKQQMLKPLRLRILEYNGGGSRNIC

SEQ ID NO: 32141 - protein, 1068 aa, Artificial Sequence
  Synthetic polypeptide
SSEKCKSKPQRDTISHQSEWLLLKSQKTTDAETTQIEDPRVQWRREQEHMLKDYLVVAQEALSAQKEIYQVKQQRLELAQQEYQQLHAVWEHKLGSQVSLVSGSSSSSKYDPEILKAEIATAKSRVNKLKREMVHLQHELQFKERGFQTLKKIDKKMSDAQGSYKLDEAQAVLRETKAIKKAITCGEKEKQDLIKSLAMLKDGFRTDRGSHSDLWSSSSSLESSSFPLPKQYLDVSSQTDISGSFGINSNNQLAEKVRLRLRYEEAKRRIANLKIQLAKLDSEAWPGVLDSERDRLILINEKEELLKEMRFISPRKWTQGEVEQLEMARKRLEKDLQAARDTQSKALTERLKLNSKRNQLVRELEEATRQVATLHSQLKSLSSSMQSLSSGSSPGSLTSSRGSLVASSLDSSTSASFTDLYYDPFEQLDSELQSKVEFLLLEGATGFRPSGCITTIHEDEVAKTQKAEGGGRLQALRSLSGTPKSMTSLSPRSSLSSPSPPCSPLMADPLLAGDAFLNSLEFEDPELSATLCELSLGNSAQERYRLEEPGTEGKQLGQAVNTAQGCGLKVACVSAAVSDESVAGDSGVYEASVQRLGASEAAAFDSDESEAVGATRIQIALKYDEKNKQFAILIIQLSNLSALLQQQDQKVNIRVAVLPCSESTTCLFRTRPLDASDTLVFNEVFWVSMSYPALHQKTLRVDVCTTDRSHLEECLGGAQISLAEVCRSGERSTRWYNLLSYKYLKKQSRELKPVGVMAPASGPASTDAVSALLEQTAVELEKRQEGRSSTQTLEDSWRYEETSENEAVAEEEEEEVEEEEGEEDVFTEKASPDMDGYPALKVDKETNTETPAPSPTVVRPKDRRVGTPSQGPFLRGSTIIRSKTFSPGPQSQYVCRLNRSDSDSSTLSKKPPFVRNSLERRSVRMKRPSSVKSLRSERLIRTSLDLELDLQATRTWHSQLTQEISVLKELKEQLEQAKSHGEKELPQWLREDERFRLLLRMLEKRQMDRAEHKGELQTDKMMRAAAKDVHRLRGQSCKEPPEVQSFREKMAFFTRPRMNIPALSADDV

SEQ ID NO: 32142 - protein, 1074 aa, Artificial Sequence
  Synthetic polypeptide
SSEKCKSKPQRDTISHQSEWLLLKSQKTTDAETTQIEDPRVQWRREQEHMLKDYLVVAQEALSAQKEIYQVKQQRLELAQQEYQQLHAVWEHKLGSQVSLVSGSSSSSKYDPEILKAEIATAKSRVNKLKREMVHLQHELQFKERGFQTLKKIDKKMSDAQGSYKLDEAQAVLRETKAIKKAITCGEKEKQDLIKSLAMLKDGFRTDRGSHSDLWSSSSSLESSSFPLPKQYLDVSSQTDISGSFGINSNNQLAEKVRLRLRYEEAKRRIANLKIQLAKLDSEAWPGVLDSERDRLILINEKEELLKEMRFISPRKWTQGEVEQLEMARKRLEKDLQAARDTQSKALTERLKLNSKRNQLVRELEEATRQVATLHSQLKSLSSSMQSLSSGSSPGSLTSSRGSLVASSLDSSTSASFTDLYYDPFEQLDSELQSKVEFLLLEGATGFRPSGCITTIHEDEVAKTQKAEGGGRLQALRSLSGTPKSMTSLSPRSSLSSPSPPCSPLMADPLLAGDAFLNSLEFEDPELSATLCELSLGNSAQERYRLEEPGTEGKQLGQAVNTAQGCGLKVACVSAAVSDESVAGDSGVYEASVQRLGASEAAAFDSDESEAVGATRIQIALKYDEKNKQFAILIIQLSNLSALLQQQDQKVNIRVAVLPCSESTTCLFRTRPLDASDTLVFNEVFWVSMSYPALHQKTLRVDVCTTDRSHLEECLGGAQISLAEVCRSGERSTRWYNLLSYKYLKKQSRELKPVGVMAPASGPASTDAVSALLEQTAVELEKRQEGRSSTQTLEDSWRYEETSENEAVAEEEEEEVEEEEGEEDVFTEKASPDMDGYPALKVDKETNTETPAPSPTVVRPKDRRVGTPSQGPFLRGSTIIRSKTFSPGPQSQYVCRLNRSDSDSSTLSKKPPFVRNSLERRSVRMKRPSPPPQPSSVKSLRSERLIRTSLDLELDLQATRTWHSQLTQEISVLKELKEQLEQAKSHGEKELPQWLREDERFRLLLRMLEKRQMDRAEHKGELQTDKMMRAAAKDVHRLRGQSCKEPPEVQSFREKMAFFTRPRMNIPALSADDV

SEQ ID NO: 32143 - protein, 1073 aa, Artificial Sequence
  Synthetic polypeptide
SSEKCKSKPQRDTISHQSEWLLLKSQKTTDAETTQIEDPRVQWRREQEHMLKDYLVVAQEALSAQKEIYQVKQQRLELAQQEYQQLHAVWEHKLGSQVSLVSGSSSSSKYDPEILKAEIATAKSRVNKLKREMVHLQHELQFKERGFQTLKKIDKKMSDAQGSYKLDEAQAVLRETKAIKKAITCGEKEKQDLIKSLAMLKDGFRTDRGSHSDLWSSSSSLESSSFPLPKQYLDVSSQTDISGSFGINSNNQLAEKVRLRLRYEEAKRRIANLKIQLAKLDSEAWPGVLDSERDRLILINEKEELLKEMRFISPRKWTQGEVEQLEMARKRLEKDLQAARDTQSKALTERLKLNSKRNQLVRELEEATRQVATLHSQLKSLSSSMQSLSSGSSPGSLTSSRGSLVASSLDSSTSASFTDLYYDPFEQLDSELQSKVEFLLLEGATGFRPSGCITTIHEDEVAKTQKAEGGGRLQALRSLSGTPKSMTSLSPRSSLSSPSPPCSPLMADPLLAGDAFLNSLEFEDPELSATLCELSLGNSAQERYRLEEPGTEGKQLGQAVNTAQGCGLKVACVSAAVSDESVAGDSGVYEASVQRLGASEAAAFDSDESEAVGATRIQIALKYDEKNKQFAILIIQLSNLSALLQQQDQKVNIRVAVLPCSESTTCLFRTRPLDASDTLVFNEVFWVSMSYPALHQKTLRVDVCTTDRSHLEECLGGAQISLAEVCRSGERSTRWYNLLSYKYLKKQSRELKPVGVMAPASGPASTDAVSALLEQTAVELEKRQEGRSSTQTLEDSWRYEETSENEAVAEEEEEEVEEEEGEEDVFTEKASPDMDGYPALKVDKETNTETPAPSPTVVRPKDRRVGTPSQGPFLRGSTIIRSKTFSPGPQSQYVCRLNRSDSDSSTLSKKPPFVRNSLERRSVRMKRPSPPPQPSSVKSLRSERLIRTSLDLELDLQATRTWHSQLTQEISVLKELKEQLEQAKSHGEKELPQWLREDERFRLLLRMLEKRMDRAEHKGELQTDKMMRAAAKDVHRLRGQSCKEPPEVQSFREKMAFFTRPRMNIPALSADDV

SEQ ID NO: 32144 - protein, 48 aa, Artificial Sequence
  Synthetic polypeptide
GCGEKRTLICCQWECKLVQPLWKAVWRFFKELRTTIQPSSPITRNHSD

SEQ ID NO: 32145 - protein, 1063 aa, Artificial Sequence
  Synthetic polypeptide
FSHCGKQFGDFSKNLELPFNPAVLLLETTQIEDPRVQWRREQEHMLKDYLVVAQEALSAQKEIYQVKQQRLELAQQEYQQLHAVWEHKLGSQVSLVSGSSSSSKYDPEILKAEIATAKSRVNKLKREMVHLQHELQFKERGFQTLKKIDKKMSDAQGSYKLDEAQAVLRETKAIKKAITCGEKEKQDLIKSLAMLKDGFRTDRGSHSDLWSSSSSLESSSFPLPKQYLDVSSQTDISGSFGINSNNQLAEKVRLRLRYEEAKRRIANLKIQLAKLDSEAWPGVLDSERDRLILINEKEELLKEMRFISPRKWTQGEVEQLEMARKRLEKDLQAARDTQSKALTERLKLNSKRNQLVRELEEATRQVATLHSQLKSLSSSMQSLSSGSSPGSLTSSRGSLVASSLDSSTSASFTDLYYDPFEQLDSELQSKVEFLLLEGATGFRPSGCITTIHEDEVAKTQKAEGGGRLQALRSLSGTPKSMTSLSPRSSLSSPSPPCSPLMADPLLAGDAFLNSLEFEDPELSATLCELSLGNSAQERYRLEEPGTEGKQLGQAVNTAQGCGLKVACVSAAVSDESVAGDSGVYEASVQRLGASEAAAFDSDESEAVGATRIQIALKYDEKNKQFAILIIQLSNLSALLQQQDQKVNIRVAVLPCSESTTCLFRTRPLDASDTLVFNEVFWVSMSYPALHQKTLRVDVCTTDRSHLEECLGGAQISLAEVCRSGERSTRWYNLLSYKYLKKQSRELKPVGVMAPASGPASTDAVSALLEQTAVELEKRQEGRSSTQTLEDSWRYEETSENEAVAEEEEEEVEEEEGEEDVFTEKASPDMDGYPALKVDKETNTETPAPSPTVVRPKDRRVGTPSQGPFLRGSTIIRSKTFSPGPQSQYVCRLNRSDSDSSTLSKKPPFVRNSLERRSVRMKRPSSVKSLRSERLIRTSLDLELDLQATRTWHSQLTQEISVLKELKEQLEQAKSHGEKELPQWLREDERFRLLLRMLEKRQMDRAEHKGELQTDKMMRAAAKDVHRLRGQSCKEPPEVQSFREKMAFFTRPRMNIPALSADDV

SEQ ID NO: 32146 - protein, 1069 aa, Artificial Sequence
  Synthetic polypeptide
FSHCGKQFGDFSKNLELPFNPAVLLLETTQIEDPRVQWRREQEHMLKDYLVVAQEALSAQKEIYQVKQQRLELAQQEYQQLHAVWEHKLGSQVSLVSGSSSSSKYDPEILKAEIATAKSRVNKLKREMVHLQHELQFKERGFQTLKKIDKKMSDAQGSYKLDEAQAVLRETKAIKKAITCGEKEKQDLIKSLAMLKDGFRTDRGSHSDLWSSSSSLESSSFPLPKQYLDVSSQTDISGSFGINSNNQLAEKVRLRLRYEEAKRRIANLKIQLAKLDSEAWPGVLDSERDRLILINEKEELLKEMRFISPRKWTQGEVEQLEMARKRLEKDLQAARDTQSKALTERLKLNSKRNQLVRELEEATRQVATLHSQLKSLSSSMQSLSSGSSPGSLTSSRGSLVASSLDSSTSASFTDLYYDPFEQLDSELQSKVEFLLLEGATGFRPSGCITTIHEDEVAKTQKAEGGGRLQALRSLSGTPKSMTSLSPRSSLSSPSPPCSPLMADPLLAGDAFLNSLEFEDPELSATLCELSLGNSAQERYRLEEPGTEGKQLGQAVNTAQGCGLKVACVSAAVSDESVAGDSGVYEASVQRLGASEAAAFDSDESEAVGATRIQIALKYDEKNKQFAILIIQLSNLSALLQQQDQKVNIRVAVLPCSESTTCLFRTRPLDASDTLVFNEVFWVSMSYPALHQKTLRVDVCTTDRSHLEECLGGAQISLAEVCRSGERSTRWYNLLSYKYLKKQSRELKPVGVMAPASGPASTDAVSALLEQTAVELEKRQEGRSSTQTLEDSWRYEETSENEAVAEEEEEEVEEEEGEEDVFTEKASPDMDGYPALKVDKETNTETPAPSPTVVRPKDRRVGTPSQGPFLRGSTIIRSKTFSPGPQSQYVCRLNRSDSDSSTLSKKPPFVRNSLERRSVRMKRPSPPPQPSSVKSLRSERLIRTSLDLELDLQATRTWHSQLTQEISVLKELKEQLEQAKSHGEKELPQWLREDERFRLLLRMLEKRQMDRAEHKGELQTDKMMRAAAKDVHRLRGQSCKEPPEVQSFREKMAFFTRPRMNIPALSADDV

SEQ ID NO: 32147 - protein, 1068 aa, Artificial Sequence
  Synthetic polypeptide
FSHCGKQFGDFSKNLELPFNPAVLLLETTQIEDPRVQWRREQEHMLKDYLVVAQEALSAQKEIYQVKQQRLELAQQEYQQLHAVWEHKLGSQVSLVSGSSSSSKYDPEILKAEIATAKSRVNKLKREMVHLQHELQFKERGFQTLKKIDKKMSDAQGSYKLDEAQAVLRETKAIKKAITCGEKEKQDLIKSLAMLKDGFRTDRGSHSDLWSSSSSLESSSFPLPKQYLDVSSQTDISGSFGINSNNQLAEKVRLRLRYEEAKRRIANLKIQLAKLDSEAWPGVLDSERDRLILINEKEELLKEMRFISPRKWTQGEVEQLEMARKRLEKDLQAARDTQSKALTERLKLNSKRNQLVRELEEATRQVATLHSQLKSLSSSMQSLSSGSSPGSLTSSRGSLVASSLDSSTSASFTDLYYDPFEQLDSELQSKVEFLLLEGATGFRPSGCITTIHEDEVAKTQKAEGGGRLQALRSLSGTPKSMTSLSPRSSLSSPSPPCSPLMADPLLAGDAFLNSLEFEDPELSATLCELSLGNSAQERYRLEEPGTEGKQLGQAVNTAQGCGLKVACVSAAVSDESVAGDSGVYEASVQRLGASEAAAFDSDESEAVGATRIQIALKYDEKNKQFAILIIQLSNLSALLQQQDQKVNIRVAVLPCSESTTCLFRTRPLDASDTLVFNEVFWVSMSYPALHQKTLRVDVCTTDRSHLEECLGGAQISLAEVCRSGERSTRWYNLLSYKYLKKQSRELKPVGVMAPASGPASTDAVSALLEQTAVELEKRQEGRSSTQTLEDSWRYEETSENEAVAEEEEEEVEEEEGEEDVFTEKASPDMDGYPALKVDKETNTETPAPSPTVVRPKDRRVGTPSQGPFLRGSTIIRSKTFSPGPQSQYVCRLNRSDSDSSTLSKKPPFVRNSLERRSVRMKRPSPPPQPSSVKSLRSERLIRTSLDLELDLQATRTWHSQLTQEISVLKELKEQLEQAKSHGEKELPQWLREDERFRLLLRMLEKRMDRAEHKGELQTDKMMRAAAKDVHRLRGQSCKEPPEVQSFREKMAFFTRPRMNIPALSADDV

SEQ ID NO: 32148 - protein, 27 aa, Artificial Sequence
  Synthetic polypeptide
MGAVAHAYNPNTLGGQGGMRRPVRMRQ

SEQ ID NO: 32149 - protein, 18 aa, Artificial Sequence
  Synthetic polypeptide
WARWLTPIIPTLWEAKEV

SEQ ID NO: 32150 - protein, 279 aa, Artificial Sequence
  Synthetic polypeptide
SQHFGRPRRYEETSENEAVAEEEEEEVEEEEGEEDVFTEKASPDMDGYPALKVDKETNTETPAPSPTVVRPKDRRVGTPSQGPFLRGSTIIRSKTFSPGPQSQYVCRLNRSDSDSSTLSKKPPFVRNSLERRSVRMKRPSSVKSLRSERLIRTSLDLELDLQATRTWHSQLTQEISVLKELKEQLEQAKSHGEKELPQWLREDERFRLLLRMLEKRQMDRAEHKGELQTDKMMRAAAKDVHRLRGQSCKEPPEVQSFREKMAFFTRPRMNIPALSADDV

SEQ ID NO: 32151 - protein, 285 aa, Artificial Sequence
  Synthetic polypeptide
SQHFGRPRRYEETSENEAVAEEEEEEVEEEEGEEDVFTEKASPDMDGYPALKVDKETNTETPAPSPTVVRPKDRRVGTPSQGPFLRGSTIIRSKTFSPGPQSQYVCRLNRSDSDSSTLSKKPPFVRNSLERRSVRMKRPSPPPQPSSVKSLRSERLIRTSLDLELDLQATRTWHSQLTQEISVLKELKEQLEQAKSHGEKELPQWLREDERFRLLLRMLEKRQMDRAEHKGELQTDKMMRAAAKDVHRLRGQSCKEPPEVQSFREKMAFFTRPRMNIPALSADDV

SEQ ID NO: 32152 - protein, 284 aa, Artificial Sequence
  Synthetic polypeptide
SQHFGRPRRYEETSENEAVAEEEEEEVEEEEGEEDVFTEKASPDMDGYPALKVDKETNTETPAPSPTVVRPKDRRVGTPSQGPFLRGSTIIRSKTFSPGPQSQYVCRLNRSDSDSSTLSKKPPFVRNSLERRSVRMKRPSPPPQPSSVKSLRSERLIRTSLDLELDLQATRTWHSQLTQEISVLKELKEQLEQAKSHGEKELPQWLREDERFRLLLRMLEKRMDRAEHKGELQTDKMMRAAAKDVHRLRGQSCKEPPEVQSFREKMAFFTRPRMNIPALSADDV

SEQ ID NO: 32153 - protein, 278 aa, Artificial Sequence
  Synthetic polypeptide
SQHFGRPRRYEETSENEAVAEEEEEEVEEEEGEEDVFTEKASPDMDGYPALKVDKETNTETPAPSPTVVRPKDRRVGTPSQGPFLRGSTIIRSKTFSPGPQSQYVCRLNRSDSDSSTLSKKPPFVRNSLERRSVRMKRPSSVKSLRSERLIRTSLDLELDLQATRTWHSQLTQEISVLKELKEQLEQAKSHGEKELPQWLREDERFRLLLRMLEKRMDRAEHKGELQTDKMMRAAAKDVHRLRGQSCKEPPEVQSFREKMAFFTRPRMNIPALSADDV

SEQ ID NO: 32154 - protein, 662 aa, Artificial Sequence
  Synthetic polypeptide
GRARWLMPVIPALWEAEEEEIKSLTAEIDRLKNCGCLGASPNLEQLQEENLKLKYRLNILRKSLQAERNKPTKNMINIISRLQEVFGHAIKAAYPDLENPPLLVTPSQQAKFGDYQCNSAMGISQMLKTKEQKVNPREIAENITKHLPDNECIEKVEIAGPGFINVHLRKDFVSEQLTSLLVNGVQLPALGENKKVIVDFSSPNIAKEMHVGHLRSTIIGESISRLFEFAGYDVLRLNHVGDWGTQFGMLIAHLQDKFPDYLTVSPPIGDLQVFYKESKKRFDTEEEFKKRAYQCVVLLQGKNPDITKAWKLICDVSRQELNKIYDALDVSLIERGESFYQDRMNDIVKEFEDRGFVQVDDGRKIVFVPGCSIPLTIVKSDGGYTYDTSDLAAIKQRLFEEKADMIIYVVDNGQSVHFQTIFAAAQMIGWYDPKVTRVFHAGFGVVLGEDKKKFKTRSGETVRLMDLLGEGLKRSMDKLKEKERDKVLTAEELNAAQTSVAYGCIKYADLSHNRLNDYIFSFDKMLDDRGNTAAYLLYAFTRIRSIARLANIDEEMLQKAARETKILLDHEKEWKLGRCILRFPEILQKILDDLFLHTLCDYIYELATAFTEFYDSCYCVEKDRQTGKILKVNMWRMLLCEAVAAVMAKGFDILGIKPVQRM

SEQ ID NO: 32155 - protein, 14 aa, Artificial Sequence
  Synthetic polypeptide
SQHFGRPRKKRLNL

SEQ ID NO: 32156 - protein, 20 aa, Artificial Sequence
  Synthetic polypeptide
PGAVAHACNPSTLGGRGRRD

SEQ ID NO: 32157 - protein, 21 aa, Artificial Sequence
  Synthetic polypeptide
GRARWLMPVIPALWEAEEEEI

SEQ ID NO: 32158 - protein, 12 aa, Artificial Sequence
  Synthetic polypeptide
SQHFGRPRKKRL

SEQ ID NO: 32159 - protein, 115 aa, Artificial Sequence
  Synthetic polypeptide
GRARWLMPVIPALWEAEEEEIKSLTAEIDRLKNCGCLGASPNLEQLQEENLKLKYRLNILRKSLQAERNKPTKNMINIISRLQEVFGHAIKAAYPDLENPPLLVTPNAQNQGTES

SEQ ID NO: 32160 - protein, 131 aa, Artificial Sequence
  Synthetic polypeptide
GRARWLMPVIPALWEAEEEEIKSLTAEIDRLKNCGCLGASPNLEQLQEENLKLKYRLNILRKSLQAERNKPTKNMINIISRLQEVFGHAIKAAYPDLENPPLLVTPSQQAKFGDYQCNSAMGISQVLLMST

SEQ ID NO: 32161 - protein, 22 aa, Artificial Sequence
  Synthetic polypeptide
ATKNLRRGLILRRNLRSEHISV

SEQ ID NO: 32162 - protein, 26 aa, Artificial Sequence
  Synthetic polypeptide
SQHLERLRQADCLSSGVGDQPEQQRI

SEQ ID NO: 32163 - protein, 397 aa, Artificial Sequence
  Synthetic polypeptide
VQELETSLSNKESKKRFDTEEEFKKRAYQCVVLLQGKNPDITKAWKLICDVSRQELNKIYDALDVSLIERGESFYQDRMNDIVKEFEDRGFVQVDDGRKIVFVPGCSIPLTIVKSDGGYTYDTSDLAAIKQRLFEEKADMIIYVVDNGQSVHFQTIFAAAQMIGWYDPKVTRVFHAGFGVVLGEDKKKFKTRSGETVRLMDLLGEGLKRSMDKLKEKERDKVLTAEELNAAQTSVAYGCIKYADLSHNRLNDYIFSFDKMLDDRGNTAAYLLYAFTRIRSIARLANIDEEMLQKAARETKILLDHEKEWKLGRCILRFPEILQKILDDLFLHTLCDYIYELATAFTEFYDSCYCVEKDRQTGKILKVNMWRMLLCEAVAAVMAKGFDILGIKPVQRM

SEQ ID NO: 32164 - protein, 236 aa, Artificial Sequence
  Synthetic polypeptide
DQEFDRSLGNIVRDTISIKIKKLTRKKFKTRSGETVRLMDLLGEGLKRSMDKLKEKERDKVLTAEELNAAQTSVAYGCIKYADLSHNRLNDYIFSFDKMLDDRGNTAAYLLYAFTRIRSIARLANIDEEMLQKAARETKILLDHEKEWKLGRCILRFPEILQKILDDLFLHTLCDYIYELATAFTEFYDSCYCVEKDRQTGKILKVNMWRMLLCEAVAAVMAKGFDILGIKPVQRM

SEQ ID NO: 32165 - protein, 22 aa, Artificial Sequence
  Synthetic polypeptide
PGKSLKHVRVKQCASWIFWEKD

SEQ ID NO: 32166 - protein, 7 aa, Artificial Sequence
  Synthetic polypeptide
KINQEKV

SEQ ID NO: 32167 - protein, 21 aa, Artificial Sequence
  Synthetic polypeptide
GLPSHVELYSLTSRAQLPTRR

SEQ ID NO: 32168 - protein, 44 aa, Artificial Sequence
  Synthetic polypeptide
EVPFASRHDSEASQAMWNCIHLQAEHNYPPEGDCYAPHERGGRG

SEQ ID NO: 32169 - protein, 2055 aa, Artificial Sequence
  Synthetic polypeptide
WVYQGFPLLLLPHLPPPRKKFLLPPAMILRPPKPCGTVFTYKQSTITHQKVTAMHPTNEEGVDDMASLTELHGGSIMYNLFQRYKRNQIYTYIGSILASVNPYQPIAGLYEPATMEQYSRRHLGELPPHIFAIANECYRCLWKRHDNQCILISGESGAGKTESTKLILKFLSVISQQSLELSLKEKTSCVERAILESSPIMEAFGNAKTVYNNNSSRFGKFVQLNICQKGNIQGGRIVDYLLEKNRVVRQNPGERNYHIFYALLAGLEHEEREEFYLSTPENYHYLNQSGCVEDKTISDQESFREVITAMDVMQFSKEEVREVSRLLAGILHLGNIEFITAGGAQVSFKTALGRSAELLGLDPTQLTDALTQRSMFLRGEEILTPLNVQQAVDSRDSLAMALYACCFEWVIKKINSRIKGNEDFKSIGILDIFGFENFEVNHFEQFNINYANEKLQEYFNKHIFSLEQLEYSREGLVWEDIDWIDNGECLDLIEKKLGLLALINEESHFPQATDSTLLEKLHSQHANNHFYVKPRVAVNNFGVKHYAGEVQYDVRGILEKNRDTFRDDLLNLLRESRFDFIYDLFEHVSSRNNQDTLKCGSKHRRPTVSSQFKDSLHSLMATLSSSNPFFVRCIKPNMQKMPDQFDQAVVLNQLRYSGMLETVRIRKAGYAVRRPFQDFYKRYKVLMRNLALPEDVRGKCTSLLQLYDASNSEWQLGKTKVFLRESLEQKLEKRREEEVSHAAMVIRAHVLGFLARKQYRKVLYCVVIIQKNYRAFLLRRRFLHLKKAAIVFQKQLRGQIARRVYRQLLAEKREQEEKKKQEEEEKKKREEEERERERERREAELRAQQEEETRKQQELEALQKSQKEAELTRELEKQKENKQVEEILRLEKEIEDLQRMKEQQELSLTEASLQKLQERRDQELRRLEEEACRAAQEFLESLNFDEIDECVRNIERSLSVGSEFSSELAESACEEKPNFNFSQPYPEEEVDEGFEADDDAFKDSPNPSEHGHSDQRTSGIRTSDDSSEEDPYMNDTVVPTSPSADSTVLLAPSVQDSGSLHNSSSGESTYCMPQNAGDLPSPDGDYDYDQDDYEDGAITSGSSVTFSNSYGSQWSPDYRCSVGTYNSSGAYRFSSEGAQSSFEDSEEDFDSRFDTDDELSYRRDSVYSCVTLPYFHSFLYMKGGLMNSWKRRWCVLKDETFLWFRSKQEALKQGWLHKKGGGSSTLSRRNWKKRWFVLRQSKLMYFENDSEEKLKGTVEVRTAKEIIDNTTKENGIDIIMADRTFHLIAESPEDASQWFSVLSQVHASTDQEIQEMHDEQANPQNAVGTLDVGLIDSVCASDSPDRPNSFVIITANRVLHCNADTPEEMHHWITLLQRSKGDTRVEGQEFIVRGWLHKEVKNSPKMSSLKLKKRWFVLTHNSLDYYKSSEKNALKLGTLVLNSLCSVVPPDEKIFKETGYWNVTVYGRKHCYRLYTKLLNEATRWSSAIQNVTDTKAPIDTPTQQLIQDIKENCLNSDVVEQIYKRNPILRYTHHPLHSPLLPLPYGDINLNLLKDKGYTTLQDEAIKIFNSLQQLESMSDPIPIIQGILQTGHDLRPLRDELYCQLIKQTNKVPHPGSVGNLYSWQILTCLSCTFLPSRGILKYLKFHLKRIREQFPGSEMEKYALFTYESLKKTKCREFVPSRDEIEALIHRQEMTSTVYCHGGGSCKITINSHTTAGEVVEKLIRGLAMEDSRNMFALFEYNGHVDKAIESRTVVADVLAKFEKLAATSEVGDLPWKFYFKLYCFLDTDNVPKDSVEFAFMFEQAHEAVIHGHHPAPEENLQVLAALRLQYLQGDYTLHAAIPPLEEVYSLQRLKARISQSTKTFTPCERLEKRRTSFLEGTLRRSFRTGSVVRQKVEEEQMLDMWIKEEVSSARASIIDKWRKFQGMNQEQAMAKYMALIKEWPGYGSTLFDVECKEGGFPQELWLGVSADAVSVYKRGEGRPLEVFQYEHILSFGAPLANTYKIVVDERELLFETSEVVDVAKLMKAYISMIVKKRYSTTRSASSQGSSR

SEQ ID NO: 32170 - protein, 816 aa, Artificial Sequence
  Synthetic polypeptide
WVYQGFPLLLLPHLPPPRKKFLLPPAMILRPPKPCGTVFTYKQSTITHQKVTAMHPTNEEGVDDMASLTELHGGSIMYNLFQRYKRNQIYTYIGSILASVNPYQPIAGLYEPATMEQYSRRHLGELPPHIFAIANECYRCLWKRHDNQCILISGESGAGKTESTKLILKFLSVISQQSLELSLKEKTSCVERAILESSPIMEAFGNAKTVYNNNSSRFGKFVQLNICQKGNIQGGRIVDYLLEKNRVVRQNPGERNYHIFYALLAGLEHEEREEFYLSTPENYHYLNQSGCVEDKTISDQESFREVITAMDVMQFSKEEVREVSRLLAGILHLGNIEFITAGGAQVSFKTALGRSAELLGLDPTQLTDALTQRSMFLRGEEILTPLNVQQAVDSRDSLAMALYACCFEWVIKKINSRIKGNEDFKSIGILDIFGFENFEVNHFEQFNINYANEKLQEYFNKHIFSLEQLEYSREGLVWEDIDWIDNGECLDLIEKKLGLLALINEESHFPQATDSTLLEKLHSQHANNHFYVKPRVAVNNFGVKHYAGEVQYDVRGILEKNRDTFRDDLLNLLRESRFDFIYDLFEHVSSRNNQDTLKCGSKHRRPTVSSQFKDSLHSLMATLSSSNPFFVRCIKPNMQKMPDQFDQAVVLNQLRYSGMLETVRIRKAGYAVRRPFQDFYKRYKVLMRNLALPEDVRGKCTSLLQLYDASNSEWQLGKTKVFLRESLEQKLEKRREEEVSHAAMVIRAHVLGFLARKQYRKVLYCVVIIQKNYRAFLLRRRFLHLKKAAIVFQKQLRGQIARRVYRQLLAEKREQE

SEQ ID NO: 32171 - protein, 244 aa, Artificial Sequence
  Synthetic polypeptide
WVYQGFPLLLLPHLPPPRKKFLLPPAMILRPPKPCGTVFTYKQSTITHQKVTAMHPTNEEGVDDMASLTELHGGSIMYNLFQRYKRNQIYTYIGSILASVNPYQPIAGLYEPATMEQYSRRHLGELPPHIFAIANECYRCLWKRHDNQCILISGESGAGKTESTKLILKFLSVISQQSLELSLKEKTSCVERAILESSPIMEAFGNAKTVYNNNSSRFGKFVQLNICQKGNIQGGRIVDYLLEK

SEQ ID NO: 32172 - protein, 94 aa, Artificial Sequence
  Synthetic polypeptide
WVYQGFPLLLLPHLPPPRKKFLLPPAMILRPPKPCGTVFTYKQSTITHQKVTAMHPTNEEGVDDMASLTELHGGSIMYNLFQRYKRNQIYVQIG

SEQ ID NO: 32173 - protein, 12 aa, Artificial Sequence
  Synthetic polypeptide
SVALSSWEHGSG

SEQ ID NO: 32174 - protein, 61 aa, Artificial Sequence
  Synthetic polypeptide
VHGNTGLAERKWPAFSKYCKFLCRRHRRLPDRLWSGIHLQAEHNYPPEGDCYAPHERGGRG

SEQ ID NO: 32175 - protein, 2059 aa, Artificial Sequence
  Synthetic polypeptide
MKCGIEFMGTRVWLRENGQHFPSTVNSCAEGIVVFRTDYGQVFTYKQSTITHQKVTAMHPTNEEGVDDMASLTELHGGSIMYNLFQRYKRNQIYTYIGSILASVNPYQPIAGLYEPATMEQYSRRHLGELPPHIFAIANECYRCLWKRHDNQCILISGESGAGKTESTKLILKFLSVISQQSLELSLKEKTSCVERAILESSPIMEAFGNAKTVYNNNSSRFGKFVQLNICQKGNIQGGRIVDYLLEKNRVVRQNPGERNYHIFYALLAGLEHEEREEFYLSTPENYHYLNQSGCVEDKTISDQESFREVITAMDVMQFSKEEVREVSRLLAGILHLGNIEFITAGGAQVSFKTALGRSAELLGLDPTQLTDALTQRSMFLRGEEILTPLNVQQAVDSRDSLAMALYACCFEWVIKKINSRIKGNEDFKSIGILDIFGFENFEVNHFEQFNINYANEKLQEYFNKHIFSLEQLEYSREGLVWEDIDWIDNGECLDLIEKKLGLLALINEESHFPQATDSTLLEKLHSQHANNHFYVKPRVAVNNFGVKHYAGEVQYDVRGILEKNRDTFRDDLLNLLRESRFDFIYDLFEHVSSRNNQDTLKCGSKHRRPTVSSQFKDSLHSLMATLSSSNPFFVRCIKPNMQKMPDQFDQAVVLNQLRYSGMLETVRIRKAGYAVRRPFQDFYKRYKVLMRNLALPEDVRGKCTSLLQLYDASNSEWQLGKTKVFLRESLEQKLEKRREEEVSHAAMVIRAHVLGFLARKQYRKVLYCVVIIQKNYRAFLLRRRFLHLKKAAIVFQKQLRGQIARRVYRQLLAEKREQEEKKKQEEEEKKKREEEERERERERREAELRAQQEEETRKQQELEALQKSQKEAELTRELEKQKENKQVEEILRLEKEIEDLQRMKEQQELSLTEASLQKLQERRDQELRRLEEEACRAAQEFLESLNFDEIDECVRNIERSLSVGSEFSSELAESACEEKPNFNFSQPYPEEEVDEGFEADDDAFKDSPNPSEHGHSDQRTSGIRTSDDSSEEDPYMNDTVVPTSPSADSTVLLAPSVQDSGSLHNSSSGESTYCMPQNAGDLPSPDGDYDYDQDDYEDGAITSGSSVTFSNSYGSQWSPDYRCSVGTYNSSGAYRFSSEGAQSSFEDSEEDFDSRFDTDDELSYRRDSVYSCVTLPYFHSFLYMKGGLMNSWKRRWCVLKDETFLWFRSKQEALKQGWLHKKGGGSSTLSRRNWKKRWFVLRQSKLMYFENDSEEKLKGTVEVRTAKEIIDNTTKENGIDIIMADRTFHLIAESPEDASQWFSVLSQVHASTDQEIQEMHDEQANPQNAVGTLDVGLIDSVCASDSPDRPNSFVIITANRVLHCNADTPEEMHHWITLLQRSKGDTRVEGQEFIVRGWLHKEVKNSPKMSSLKLKKRWFVLTHNSLDYYKSSEKNALKLGTLVLNSLCSVVPPDEKIFKETGYWNVTVYGRKHCYRLYTKLLNEATRWSSAIQNVTDTKAPIDTPTQQLIQDIKENCLNSDVVEQIYKRNPILRYTHHPLHSPLLPLPYGDINLNLLKDKGYTTLQDEAIKIFNSLQQLESMSDPIPIIQGILQTGHDLRPLRDELYCQLIKQTNKVPHPGSVGNLYSWQILTCLSCTFLPSRGILKYLKFHLKRIREQFPGSEMEKYALFTYESLKKTKCREFVPSRDEIEALIHRQEMTSTVYCHGGGSCKITINSHTTAGEVVEKLIRGLAMEDSRNMFALFEYNGHVDKAIESRTVVADVLAKFEKLAATSEVGDLPWKFYFKLYCFLDTDNVPKDSVEFAFMFEQAHEAVIHGHHPAPEENLQVLAALRLQYLQGDYTLHAAIPPLEEVYSLQRLKARISQSTKTFTPCERLEKRRTSFLEGTLRRSFRTGSVVRQKVEEEQMLDMWIKEEVSSARASIIDKWRKFQGMNQEQAMAKYMALIKEWPGYGSTLFDVECKEGGFPQELWLGVSADAVSVYKRGEGRPLEVFQYEHILSFGAPLANTYKIVVDERELLFETSEVVDVAKLMKAYISMIVKKRYSTTRSASSQGSSR

SEQ ID NO: 32176 - protein, 820 aa, Artificial Sequence
  Synthetic polypeptide
MKCGIEFMGTRVWLRENGQHFPSTVNSCAEGIVVFRTDYGQVFTYKQSTITHQKVTAMHPTNEEGVDDMASLTELHGGSIMYNLFQRYKRNQIYTYIGSILASVNPYQPIAGLYEPATMEQYSRRHLGELPPHIFAIANECYRCLWKRHDNQCILISGESGAGKTESTKLILKFLSVISQQSLELSLKEKTSCVERAILESSPIMEAFGNAKTVYNNNSSRFGKFVQLNICQKGNIQGGRIVDYLLEKNRVVRQNPGERNYHIFYALLAGLEHEEREEFYLSTPENYHYLNQSGCVEDKTISDQESFREVITAMDVMQFSKEEVREVSRLLAGILHLGNIEFITAGGAQVSFKTALGRSAELLGLDPTQLTDALTQRSMFLRGEEILTPLNVQQAVDSRDSLAMALYACCFEWVIKKINSRIKGNEDFKSIGILDIFGFENFEVNHFEQFNINYANEKLQEYFNKHIFSLEQLEYSREGLVWEDIDWIDNGECLDLIEKKLGLLALINEESHFPQATDSTLLEKLHSQHANNHFYVKPRVAVNNFGVKHYAGEVQYDVRGILEKNRDTFRDDLLNLLRESRFDFIYDLFEHVSSRNNQDTLKCGSKHRRPTVSSQFKDSLHSLMATLSSSNPFFVRCIKPNMQKMPDQFDQAVVLNQLRYSGMLETVRIRKAGYAVRRPFQDFYKRYKVLMRNLALPEDVRGKCTSLLQLYDASNSEWQLGKTKVFLRESLEQKLEKRREEEVSHAAMVIRAHVLGFLARKQYRKVLYCVVIIQKNYRAFLLRRRFLHLKKAAIVFQKQLRGQIARRVYRQLLAEKREQE

SEQ ID NO: 32177 - protein, 98 aa, Artificial Sequence
  Synthetic polypeptide
MKCGIEFMGTRVWLRENGQHFPSTVNSCAEGIVVFRTDYGQVFTYKQSTITHQKVTAMHPTNEEGVDDMASLTELHGGSIMYNLFQRYKRNQIYVQIG

SEQ ID NO: 32178 - protein, 44 aa, Artificial Sequence
  Synthetic polypeptide
KPEVICHIPFPCGRDSERTRAETELPAKGPEILETKTSTGIKFT

SEQ ID NO: 32179 - protein, 36 aa, Artificial Sequence
  Synthetic polypeptide
FATFLSPVAETVSAPVLRQSCQPRAQRSWKQRPQQG

SEQ ID NO: 32180 - protein, 1558 aa, Artificial Sequence
  Synthetic polypeptide
DRAASQGPRDLGNKDLNRDKIYLICQIVRVGKMDLKDTGAKKCTQGLRRPFGVAVMDITDIIKGKAESDEEKQHFIPFHPVTAENDFLHSLLGKVIASKGDSGGQGLWVTMKMLVGDIIQIRKDYPHLVDRTTVVARKLGFPEIIMPGDVRNDIYITLLQGDFDKYNKTTQRNVEVIMCVCAEDGKTLPNAICVGAGDKPMNEYRSVVYYQVKQPRWMETVKVAVPIEDMQRIHLRFMFRHRSSLESKDKGEKNFAMSYVKLMKEDGTTLHDGFHDLVVLKGDSKKMEDASAYLTLPSYRHHVENKGATLSRSSSSVGGLSVSSRDVFSISTLVCSTKLTQNVGLLGLLKWRMKPQLLQENLEKLKIVDGEEVVKFLQDTLDALFNIMMEHSQSDEYDILVFDALIYIIGLIADRKFQHFNTVLEAYIQQHFSATLAYKKLMTVLKTYLDTSSRGEQCEPILRTLKALEYVFKFIVRSRTLFSQLYEGKEQMEFEESMRRLFESINNLMKSQYKTTILLQVAALKYIPSVLHDVEMVFDAKLLSQLLYEFYTCIPPVKLQKQKVQSMNEIVQSNLFKKQECRDILLPVITKELKELLEQKDDMQHQVLERKYCVELLNSILEVLSYQDAAFTYHHIQEIMVQLLRTVNRTVITMGRDHILISHFVACMTAILNQMGDQHYSFYIETFQTSSELVDFLMETFIMFKDLIGKNVYPGDWMAMSMVQNRVFLRAINKFAETMNQKFLEHTNFEFQLWNNYFHLAVAFITQDSLQLEQFSHAKYNKILNKYGDMRRLIGFSIRDMWYKLGQNKICFIPGMVGPILEMTLIPEAELRKATIPIFFDMMLCEYQRSGDFKKFENEIILKLDHEVEGGRGDEQYMQLLESILMECAAEHPTIAKSVENFVNLVKGLLEKLLDYRGVMTDESKDNRMSCTVNLLNFYKDNNREEMYIRYLYKLRDLHLDCDNYTEAAYTLLLHTWLLKWSDEQCASQVMQTGQQHPQTHRQLKETLYETIIGYFDKGKMWEEAISLCKELAEQYEMEIFDYELLSQNLIQQAKFYESIMKILRPKPDYFAVGYYGQGFPSFLRNKVFIYRGKEYERREDFQMQLMTQFPNAEKMNTTSAPGDDVKNAPGQYIQCFTVQPVLDEHPRFKNKPVPDQIINFYKSNYVQRFHYSRPVRRGTVDPENEFASMWIERTSFVTAYKLPGILRWFEVVHMSQTTISPLENAIETMSTANEKILMMINQYQSDETLPINPLSMLLNGIVDPAVMGGFAKYEKAFFTEEYVRDHPEDQDKLTHLKDLIAWQIPFLGAGIKIHEKRVSDNLRPFHDRMEECFKNLKMKVEKEYGVREMPDFDDRRVGRPRSMLRSYRQMSIISLASMNSDCSTPSKPTSESFDLELASPKTPRVEQEEPISPGSTLPEVKLRRSKKRTKRSSVVFADEKAAAESDLKRLSRKHEFMSDTNLSEHAAIPLKASVLSQMSFASQSMPTIPALALSVAGIPGLDEANTSPRLSQTFLQLSDGDKKTLTRKKVNQFFKTMLASKSAEEGKQIPDSLSTDL

SEQ ID NO: 32181 - protein, 759 aa, Artificial Sequence
  Synthetic polypeptide
DRAASQGPRDLGNKDLNRDKIYLICQIVRVGKMDLKDTGAKKCTQGLRRPFGVAVMDITDIIKGKAESDEEKQHFIPFHPVTAENDFLHSLLGKVIASKGDSGGQGLWVTMKMLVGDIIQIRKDYPHLVDRTTVVARKLGFPEIIMPGDVRNDIYITLLQGDFDKYNKTTQRNVEVIMCVCAEDGKTLPNAICVGAGDKPMNEYRSVVYYQVKQPRWMETVKVAVPIEDMQRIHLRFMFRHRSSLESKDKGEKNFAMSYVKLMKEDGTTLHDGFHDLVVLKGDSKKMEDASAYLTLPSYRHHVENKGATLSRSSSSVGGLSVSSRDVFSISTLVCSTKLTQNVGLLGLLKWRMKPQLLQENLEKLKIVDGEEVVKFLQDTLDALFNIMMEHSQSDEYDILVFDALIYIIGLIADRKFQHFNTVLEAYIQQHFSATLAYKKLMTVLKTYLDTSSRGEQCEPILRTLKALEYVFKFIVRSRTLFSQLYEGKEQMEFEESMRRLFESINNLMKSQYKTTILLQVAALKYIPSVLHDVEMVFDAKLLSQLLYEFYTCIPPVKLQKQKVQSMNEIVQSNLFKKQECRDILLPVITKELKELLEQKDDMQHQVLERKYCVELLNSILEVLSYQDAAFTYHHIQEIMVQLLRTVNRTVITMGRDHILISHFVACMTAILNQMGDQHYSFYIETFQTSSELVDFLMETFIMFKDLIGKNVYPGDWMAMSMVQNRVFLRAINKFAETMNQKFLEHTNFEFQGFSRTGM

SEQ ID NO: 32182 - protein, 41 aa, Artificial Sequence
  Synthetic polypeptide
FATFLSPVAETVSAPVLRQSCQPRAQSKILETKTSTGIKFT

SEQ ID NO: 32183 - protein, 20 aa, Artificial Sequence
  Synthetic polypeptide
DRAASQGPRVRSWKQRPQQG

SEQ ID NO: 32184 - protein, 55 aa, Artificial Sequence
  Synthetic polypeptide
SQGMSGTTSTLLSYKVTLTSTTRPHRGMWKSSCVCARRMAKRCLMQFAWEQGTSP

SEQ ID NO: 32185 - protein, 19 aa, Artificial Sequence
  Synthetic polypeptide
NCNRAKGCQERHLHYSLTR

SEQ ID NO: 32186 - protein, 1459 aa, Artificial Sequence
  Synthetic polypeptide
NNQFTLSCFYFLQAFSVYKANLFCSALWNTDSILWNEALPDSRIAIEPRDVRNDIYITLLQGDFDKYNKTTQRNVEVIMCVCAEDGKTLPNAICVGAGDKPMNEYRSVVYYQVKQPRWMETVKVAVPIEDMQRIHLRFMFRHRSSLESKDKGEKNFAMSYVKLMKEDGTTLHDGFHDLVVLKGDSKKMEDASAYLTLPSYRHHVENKGATLSRSSSSVGGLSVSSRDVFSISTLVCSTKLTQNVGLLGLLKWRMKPQLLQENLEKLKIVDGEEVVKFLQDTLDALFNIMMEHSQSDEYDILVFDALIYIIGLIADRKFQHFNTVLEAYIQQHFSATLAYKKLMTVLKTYLDTSSRGEQCEPILRTLKALEYVFKFIVRSRTLFSQLYEGKEQMEFEESMRRLFESINNLMKSQYKTTILLQVAALKYIPSVLHDVEMVFDAKLLSQLLYEFYTCIPPVKLQKQKVQSMNEIVQSNLFKKQECRDILLPVITKELKELLEQKDDMQHQVLERKYCVELLNSILEVLSYQDAAFTYHHIQEIMVQLLRTVNRTVITMGRDHILISHFVACMTAILNQMGDQHYSFYIETFQTSSELVDFLMETFIMFKDLIGKNVYPGDWMAMSMVQNRVFLRAINKFAETMNQKFLEHTNFEFQLWNNYFHLAVAFITQDSLQLEQFSHAKYNKILNKYGDMRRLIGFSIRDMWYKLGQNKICFIPGMVGPILEMTLIPEAELRKATIPIFFDMMLCEYQRSGDFKKFENEIILKLDHEVEGGRGDEQYMQLLESILMECAAEHPTIAKSVENFVNLVKGLLEKLLDYRGVMTDESKDNRMSCTVNLLNFYKDNNREEMYIRYLYKLRDLHLDCDNYTEAAYTLLLHTWLLKWSDEQCASQVMQTGQQHPQTHRQLKETLYETIIGYFDKGKMWEEAISLCKELAEQYEMEIFDYELLSQNLIQQAKFYESIMKILRPKPDYFAVGYYGQGFPSFLRNKVFIYRGKEYERREDFQMQLMTQFPNAEKMNTTSAPGDDVKNAPGQYIQCFTVQPVLDEHPRFKNKPVPDQIINFYKSNYVQRFHYSRPVRRGTVDPENEFASMWIERTSFVTAYKLPGILRWFEVVHMSQTTISPLENAIETMSTANEKILMMINQYQSDETLPINPLSMLLNGIVDPAVMGGFAKYEKAFFTEEYVRDHPEDQDKLTHLKDLIAWQIPFLGAGIKIHEKRVSDNLRPFHDRMEECFKNLKMKVEKEYGVREMPDFDDRRVGRPRSMLRSYRQMSIISLASMNSDCSTPSKPTSESFDLELASPKTPRVEQEEPISPGSTLPEVKLRRSKKRTKRSSVVFADEKAAAESDLKRLSRKHEFMSDTNLSEHAAIPLKASVLSQMSFASQSMPTIPALALSVAGIPGLDEANTSPRLSQTFLQLSDGDKKTLTRKKVNQFFKTMLASKSAEEGKQIPDSLSTDL

SEQ ID NO: 32187 - protein, 660 aa, Artificial Sequence
  Synthetic polypeptide
NNQFTLSCFYFLQAFSVYKANLFCSALWNTDSILWNEALPDSRIAIEPRDVRNDIYITLLQGDFDKYNKTTQRNVEVIMCVCAEDGKTLPNAICVGAGDKPMNEYRSVVYYQVKQPRWMETVKVAVPIEDMQRIHLRFMFRHRSSLESKDKGEKNFAMSYVKLMKEDGTTLHDGFHDLVVLKGDSKKMEDASAYLTLPSYRHHVENKGATLSRSSSSVGGLSVSSRDVFSISTLVCSTKLTQNVGLLGLLKWRMKPQLLQENLEKLKIVDGEEVVKFLQDTLDALFNIMMEHSQSDEYDILVFDALIYIIGLIADRKFQHFNTVLEAYIQQHFSATLAYKKLMTVLKTYLDTSSRGEQCEPILRTLKALEYVFKFIVRSRTLFSQLYEGKEQMEFEESMRRLFESINNLMKSQYKTTILLQVAALKYIPSVLHDVEMVFDAKLLSQLLYEFYTCIPPVKLQKQKVQSMNEIVQSNLFKKQECRDILLPVITKELKELLEQKDDMQHQVLERKYCVELLNSILEVLSYQDAAFTYHHIQEIMVQLLRTVNRTVITMGRDHILISHFVACMTAILNQMGDQHYSFYIETFQTSSELVDFLMETFIMFKDLIGKNVYPGDWMAMSMVQNRVFLRAINKFAETMNQKFLEHTNFEFQGFSRTGM

SEQ ID NO: 32188 - protein, 43 aa, Artificial Sequence
  Synthetic polypeptide
HWRWSQTGPCWGLASVGDTLAGMPGHSASCHHQRAEGAAGAEG

SEQ ID NO: 32189 - protein, 980 aa, Artificial Sequence
  Synthetic polypeptide
LECRDILLPVITKELKELLEQKDDMQHQVLERKYCVELLNSILEVLSYQDAAFTYHHIQEIMVQLLRTVNRTVITMGRDHILISHFVACMTAILNQMGDQHYSFYIETFQTSSELVDFLMETFIMFKDLIGKNVYPGDWMAMSMVQNRVFLRAINKFAETMNQKFLEHTNFEFQLWNNYFHLAVAFITQDSLQLEQFSHAKYNKILNKYGDMRRLIGFSIRDMWYKLGQNKICFIPGMVGPILEMTLIPEAELRKATIPIFFDMMLCEYQRSGDFKKFENEIILKLDHEVEGGRGDEQYMQLLESILMECAAEHPTIAKSVENFVNLVKGLLEKLLDYRGVMTDESKDNRMSCTVNLLNFYKDNNREEMYIRYLYKLRDLHLDCDNYTEAAYTLLLHTWLLKWSDEQCASQVMQTGQQHPQTHRQLKETLYETIIGYFDKGKMWEEAISLCKELAEQYEMEIFDYELLSQNLIQQAKFYESIMKILRPKPDYFAVGYYGQGFPSFLRNKVFIYRGKEYERREDFQMQLMTQFPNAEKMNTTSAPGDDVKNAPGQYIQCFTVQPVLDEHPRFKNKPVPDQIINFYKSNYVQRFHYSRPVRRGTVDPENEFASMWIERTSFVTAYKLPGILRWFEVVHMSQTTISPLENAIETMSTANEKILMMINQYQSDETLPINPLSMLLNGIVDPAVMGGFAKYEKAFFTEEYVRDHPEDQDKLTHLKDLIAWQIPFLGAGIKIHEKRVSDNLRPFHDRMEECFKNLKMKVEKEYGVREMPDFDDRRVGRPRSMLRSYRQMSIISLASMNSDCSTPSKPTSESFDLELASPKTPRVEQEEPISPGSTLPEVKLRRSKKRTKRSSVVFADEKAAAESDLKRLSRKHEFMSDTNLSEHAAIPLKASVLSQMSFASQSMPTIPALALSVAGIPGLDEANTSPRLSQTFLQLSDGDKKTLTRKKVNQFFKTMLASKSAEEGKQIPDSLSTDL

SEQ ID NO: 32190 - protein, 39 aa, Artificial Sequence
  Synthetic polypeptide
GAGITLALESDRSMLGPCLCWRHTSWNAGTFCFLSSPKS

SEQ ID NO: 32191 - protein, 181 aa, Artificial Sequence
  Synthetic polypeptide
LECRDILLPVITKELKELLEQKDDMQHQVLERKYCVELLNSILEVLSYQDAAFTYHHIQEIMVQLLRTVNRTVITMGRDHILISHFVACMTAILNQMGDQHYSFYIETFQTSSELVDFLMETFIMFKDLIGKNVYPGDWMAMSMVQNRVFLRAINKFAETMNQKFLEHTNFEFQGFSRTGM

SEQ ID NO: 32192 - protein, 107 aa, Artificial Sequence
  Synthetic polypeptide
LECRDILLPVITKELKELLEQKDDMQHQVLERKYCVELLNSILEVLSYQDAAFTYHHIQEIMVQLLRTVNRTVITMGRDHILIDAADDRTEPIGCYGVLNVIVSAKG

SEQ ID NO: 32193 - protein, 5 aa, Artificial Sequence
  Synthetic polypeptide
YTSKL

SEQ ID NO: 32194 - protein, 22 aa, Artificial Sequence
  Synthetic polypeptide
PTHLFICILCNILYDTPVNCRV

SEQ ID NO: 32195 - protein, 114 aa, Artificial Sequence
  Synthetic polypeptide
HLPLCALSLLLPCKMCLASPLPSAMIVNFLWPPSHASYTAYSTGQESFKKQEKTPKTPKGPSSVEDIKAKMQASIEKGGSLPKVEAKFINYVKNCFRMTDQEAIQDLWQWRKSL

SEQ ID NO: 32196 - protein, 36 aa, Artificial Sequence
  Synthetic polypeptide
ISCGLLAMLPIQPTALDKNPSRNRKKLLKHQKDLVL

SEQ ID NO: 32197 - protein, 21 aa, Artificial Sequence
  Synthetic polypeptide
PCFLYSLQHWTRILQETGKNS

SEQ ID NO: 32198 - protein, 79 aa, Artificial Sequence
  Synthetic polypeptide
HLPLCALSLLLPCKMCLASPLPSAMIVNFLWPPSHASYTAYSTGQESFKKQEKTPKTPKGPSSVEDIKAKMQASIEKAH

SEQ ID NO: 32199 - protein, 35 aa, Artificial Sequence
  Synthetic polypeptide
AEIVSLHSSLGDRAPGTPRASAAPERRASEPDPAE

SEQ ID NO: 32200 - protein, 441 aa, Artificial Sequence
  Synthetic polypeptide
SQLLGRLRQENHLNPGGGGCSEPRLCHYTPAWATGRQELRELRLLQKEEHRNQTQLSNKHELQLEQMHKRFEQEINAKKKFFDTELENLERQQKQQVEKMEQDHAVRRREEARRIRLEQDRDYTRFQEQLKLMKKEVKNEVEKLPRQQRKESMKQKMEEHTQKKQLLDRDFVAKQKEDLELAMKRLTTDNRREICDKERECLMKKQELLRDREAALWEMEEHQLQERHQLVKQQLKDQYFLQRHELLRKHEKEREQMQRYNQRMIEQLKVRQQQEKARLPKIQRSEGKTRMAMYKKSLHINGGGSAAEQREKIKQFSQQEEKRQKSERLQQQQKHENQMRDMLAQCESNMSELQQLQNEKCHLLVEHETQKLKALDESHNQNLKEWRDKLRPRKKALEEDLNQKKREQEMFFKLSEEAECPNPSTPSKAAKFFPYSSADAS

SEQ ID NO: 32201 - protein, 42 aa, Artificial Sequence
  Synthetic polypeptide
TQEAEVAVSRDCVTTLQPGRQGARNSESFGCSRKKSIGTRPS

SEQ ID NO: 32202 - protein, 8 aa, Artificial Sequence
  Synthetic polypeptide
SQLLGRLS

SEQ ID NO: 32203 - protein, 31 aa, Artificial Sequence
  Synthetic polypeptide
KYKKISQAWWRAPVVPATREAELTLVCLPRI

SEQ ID NO: 32204 - protein, 15 aa, Artificial Sequence
  Synthetic polypeptide
SQLLRRLRCTYRVLR

SEQ ID NO: 32205 - protein, 56 aa, Artificial Sequence
  Synthetic polypeptide
HGETPSLLKIQRISQALWQAPIVPATQEAEVHLQSATMNWGTDISFQCIAWHRQST

SEQ ID NO: 32206 - protein, 38 aa, Artificial Sequence
  Synthetic polypeptide
RLICVDVYHIPFPIAKTWNRRRCPSSVDWIKKMCCSRS

SEQ ID NO: 32207 - protein, 214 aa, Artificial Sequence
  Synthetic polypeptide
RKCVALGRNQPLKKEKPKWKSDYPMTDGQLRSKRDEFWDTAPAFEGRKEIWDALKAAAHAFESNDHELAQAIIDGANITLPHGALTECYDELGNRYQLPVYCLAPPINMIEEKSDIETLDIPEPPPNSGYECQLRLRLSTGKDLKLVVRSTDTVFHMKRRLHAAEGVEPGSQRWFFSGRPLTDKMKFEELKIPKDYVVQVIVSQPVQNPTPVEN

SEQ ID NO: 32208 - protein, 14 aa, Artificial Sequence
  Synthetic polypeptide
MSIISGLDKENVLL

SEQ ID NO: 32209 - protein, 38 aa, Artificial Sequence
  Synthetic polypeptide
GQVRWLTPVIPALSEAEASGSAEVRSSRPAWLTRCSRS

SEQ ID NO: 32210 - protein, 212 aa, Artificial Sequence
  Synthetic polypeptide
HVALGRNQPLKKEKPKWKSDYPMTDGQLRSKRDEFWDTAPAFEGRKEIWDALKAAAHAFESNDHELAQAIIDGANITLPHGALTECYDELGNRYQLPVYCLAPPINMIEEKSDIETLDIPEPPPNSGYECQLRLRLSTGKDLKLVVRSTDTVFHMKRRLHAAEGVEPGSQRWFFSGRPLTDKMKFEELKIPKDYVVQVIVSQPVQNPTPVEN

SEQ ID NO: 32211 - protein, 13 aa, Artificial Sequence
  Synthetic polypeptide
GQEFKTSLANTLL

SEQ ID NO: 32212 - protein, 25 aa, Artificial Sequence
  Synthetic polypeptide
GQVRWLTPVIPALSEAEASGSAELL

SEQ ID NO: 32213 - protein, 18 aa, Artificial Sequence
  Synthetic polypeptide
SQHFRRPRRVDQLSCSRS

SEQ ID NO: 32214 - protein, 259 aa, Artificial Sequence
  Synthetic polypeptide
VLTRFVVLSGAFPAFARHFFLLPCEQGRVCCPFHRDCKFPEASPALRNFALGRNQPLKKEKPKWKSDYPMTDGQLRSKRDEFWDTAPAFEGRKEIWDALKAAAHAFESNDHELAQAIIDGANITLPHGALTECYDELGNRYQLPVYCLAPPINMIEEKSDIETLDIPEPPPNSGYECQLRLRLSTGKDLKLVVRSTDTVFHMKRRLHAAEGVEPGSQRWFFSGRPLTDKMKFEELKIPKDYVVQVIVSQPVQNPTPVEN

SEQ ID NO: 32215 - protein, 67 aa, Artificial Sequence
  Synthetic polypeptide
LNHGGGYLHAVLVIVSEFSQDLWFYQGLSPLLLGTSSSCHVNKDVFVAPSTVIVSFLRPPQPCGTLL

SEQ ID NO: 32216 - protein, 12 aa, Artificial Sequence
  Synthetic polypeptide
GLPSPAELCSRS

SEQ ID NO: 32217 - protein, 247 aa, Artificial Sequence
  Synthetic polypeptide
VLTRFVVLSGAFPAFARHFFLLPCEQGRVCCPFHRDFALGRNQPLKKEKPKWKSDYPMTDGQLRSKRDEFWDTAPAFEGRKEIWDALKAAAHAFESNDHELAQAIIDGANITLPHGALTECYDELGNRYQLPVYCLAPPINMIEEKSDIETLDIPEPPPNSGYECQLRLRLSTGKDLKLVVRSTDTVFHMKRRLHAAEGVEPGSQRWFFSGRPLTDKMKFEELKIPKDYVVQVIVSQPVQNPTPVEN

SEQ ID NO: 32218 - protein, 55 aa, Artificial Sequence
  Synthetic polypeptide
LNHGGGYLHAVLVIVSEFSQDLWFYQGLSPLLLGTSSSCHVNKDVFVAPSTVILL

SEQ ID NO: 32219 - protein, 323 aa, Artificial Sequence
  Synthetic polypeptide
PCSSKCSPRCQLQQHLGACWKWRISVPTWNLNLYFNKIPRFDIYRKVPKDLTQPTYTGAIISICCCLFILFLFLSELTGFITTEVVNELYVDDPDKDSGGKIDVSLNISLPNLHCELVGLDIQDEMGRHEVGHIDNSMKIPLNNGAGCRFEGQFSINKVPGNFHVSTHSATAQPQNPDMTHVIHKLSFGDTLQVQNIHGAFNALGGADRLTSNPLASHDYILKIVPTVYEDKSGKQRYSYQYTVANKEYVAYSHTGRIIPAIWFRYDLSPITVKYTERRQPLYRFITTICAIIGGTFTVAGILDSCIFTASEAWKKIQLGKMH

SEQ ID NO: 32220 - protein, 49 aa, Artificial Sequence
  Synthetic polypeptide
ICILTRSPGLTSTGRCPRTLRSQRTPGPLSPSAAASSSSSSSSRSSPDL

SEQ ID NO: 32221 - protein, 5 aa, Artificial Sequence
  Synthetic polypeptide
QDPQV

SEQ ID NO: 32222 - protein, 216 aa, Artificial Sequence
  Synthetic polypeptide
PCSSKCSPRCQLQQHLGACWKWRISVPTWNLNLYFNKIPRFDIYRKVPKDLTQPTYTGAIISICCCLFILFLFLSELTGFITTEVVNELYVDDPDKDSGGKIDVSLNISLPNLHCELVGLDIQDEMGRHEVGHIDNSMKIPLNNGAGCRFEGQFSINKNQELQILSQVGERSALGRAEAPGGSWQGFAQHVPAFLEARYCHSGASQQRCEAAPFDR

SEQ ID NO: 32223 - protein, 88 aa, Artificial Sequence
  Synthetic polypeptide
PCSSKCSPRCQLQQHLGACWKWRISVPTWNLNLYFNKIPRFDIYRKVPKDLTQPTYTGAIISICCCLFILFLFLSELTGFITTEVGWA

SEQ ID NO: 32224 - protein, 171 aa, Artificial Sequence
  Synthetic polypeptide
PCSSKCSPRCQLQQHLGACWKWRISVPTWNLNLYFNKIPRFDIYRKVPKDLTQPTYTGAIISICCCLFILFLFLSELTGFITTEVVNELYVDDPDKDSGGKIDVSLNISLPNLHCELVGLDIQDEMGRHEVGHIDNSMKIPLNNGAGCRFEGQFSINKEVDQQPDVRVCVF

SEQ ID NO: 32225 - protein, 291 aa, Artificial Sequence
  Synthetic polypeptide
SQHFGRPRFDIYRKVPKDLTQPTYTGAIISICCCLFILFLFLSELTGFITTEVVNELYVDDPDKDSGGKIDVSLNISLPNLHCELVGLDIQDEMGRHEVGHIDNSMKIPLNNGAGCRFEGQFSINKVPGNFHVSTHSATAQPQNPDMTHVIHKLSFGDTLQVQNIHGAFNALGGADRLTSNPLASHDYILKIVPTVYEDKSGKQRYSYQYTVANKEYVAYSHTGRIIPAIWFRYDLSPITVKYTERRQPLYRFITTICAIIGGTFTVAGILDSCIFTASEAWKKIQLGKMH

SEQ ID NO: 32226 - protein, 54 aa, Artificial Sequence
  Synthetic polypeptide
VVHACNPSTLGGQGLTSTGRCPRTLRSQRTPGPLSPSAAASSSSSSSSRSSPDL

SEQ ID NO: 32227 - protein, 14 aa, Artificial Sequence
  Synthetic polypeptide
WFTPVIPALWEAKV

SEQ ID NO: 32228 - protein, 184 aa, Artificial Sequence
  Synthetic polypeptide
SQHFGRPRFDIYRKVPKDLTQPTYTGAIISICCCLFILFLFLSELTGFITTEVVNELYVDDPDKDSGGKIDVSLNISLPNLHCELVGLDIQDEMGRHEVGHIDNSMKIPLNNGAGCRFEGQFSINKNQELQILSQVGERSALGRAEAPGGSWQGFAQHVPAFLEARYCHSGASQQRCEAAPFDR

SEQ ID NO: 32229 - protein, 56 aa, Artificial Sequence
  Synthetic polypeptide
SQHFGRPRFDIYRKVPKDLTQPTYTGAIISICCCLFILFLFLSELTGFITTEVGWA

SEQ ID NO: 32230 - protein, 139 aa, Artificial Sequence
  Synthetic polypeptide
SQHFGRPRFDIYRKVPKDLTQPTYTGAIISICCCLFILFLFLSELTGFITTEVVNELYVDDPDKDSGGKIDVSLNISLPNLHCELVGLDIQDEMGRHEVGHIDNSMKIPLNNGAGCRFEGQFSINKEVDQQPDVRVCVF

SEQ ID NO: 32231 - protein, 84 aa, Artificial Sequence
  Synthetic polypeptide
CHSVRDILMSSSFCRLRLPLGIRRLQPHGPHHPCNLVPLRPQPHHGQVHRETAAAVQIHHHDLCHHWRDLHRRRHPGLMHLHSL

SEQ ID NO: 32232 - protein, 138 aa, Artificial Sequence
  Synthetic polypeptide
LLLIHHVWLRMSPPQSPRCRPGEWVIHSFPSTLHVPPSHMHDVTVLGIFLCLPPSADCDSLWEYVAYSHTGRIIPAIWFRYDLSPITVKYTERRQPLYRFITTICAIIGGTFTVAGILDSCIFTASEAWKKIQLGKMH

SEQ ID NO: 32233 - protein, 92 aa, Artificial Sequence
  Synthetic polypeptide
GYSYVFLLLQTATPSGNTSPTATRAASSLQSGSATTSAPSRSSTQRDGSRCTDSSPRSVPSLAGPSPSPASWTHASSQPLRPGRRSSWARCI

SEQ ID NO: 32234 - protein, 96 aa, Artificial Sequence
  Synthetic polypeptide
SQHREAEVVRGHYKGQQIGKVVQVYRKKYVIYIERVQREKANGTTVHVGIHPSKVVITRLKLDKDRKKILERKAKSRQVGKEKGKYKEELIEKMQE

SEQ ID NO: 32235 - protein, 16 aa, Artificial Sequence
  Synthetic polypeptide
PDAMVHAYNPSTGRLR

SEQ ID NO: 32236 - protein, 79 aa, Artificial Sequence
  Synthetic polypeptide
SQHREAEVVRGHYKGQQIGKVVQVYRKKYVIYIERVQREKANGTTVHVGIHPSKVVITRLKLDKDRKKILERKAKSRQV

SEQ ID NO: 32237 - protein, 43 aa, Artificial Sequence
  Synthetic polypeptide
GQARWLMPSLLHERSWMQMKNLSPCRAPSSWAGSLSQNTIAGS

SEQ ID NO: 32238 - protein, 18 aa, Artificial Sequence
  Synthetic polypeptide
ARRGGSCRHFFTNDPGCK

SEQ ID NO: 32239 - protein, 72 aa, Artificial Sequence
  Synthetic polypeptide
PGAVAHAVTSSRTILDANEEFKSMSGTIQLGRKLITKYNRRELTDKLLIFLALALFLATVLYIVKKRLFPFL

SEQ ID NO: 32240 - protein, 328 aa, Artificial Sequence
  Synthetic polypeptide
PGRLNYSYPGSDSSLLINARTYGRRRGQSSLFPMEDGFLDDGRGDQPLHSGLGSPHCFSHQNGERVERYSRKVFVGGLPPDIDEDEITASFRRFGPLIVDWPHKAESKSYFPPKGYAFLLFQDESSVQALIDACIEEDGKLYLCVSSPTIKDKPVQIRPWNLSDSDFVMDGSQPLDPRKTIFVGGVPRPLRAVELAMIMDRLYGGVCYAGIDTDPELKYPKGAGRVAFSNQQSYIAAISARFVQLQHGEIDKRVEVKPYVLDDQLCDECQGARCGGKFAPFFCANVTCLQYYCEYCWAAIHSRAGREFHKPLVKEGGDRPRHISFRWN

SEQ ID NO: 32241 - protein, 33 aa, Artificial Sequence
  Synthetic polypeptide
PGAVAQACNPSTSGGRGRRITRSGVEDQPSRVV

SEQ ID NO: 32242 - protein, 41 aa, Artificial Sequence
  Synthetic polypeptide
QAQWLKPVIPALREAEAGGSRGQELKTSLAGSSKLFISRIR

SEQ ID NO: 32243 - protein, 60 aa, Artificial Sequence
  Synthetic polypeptide
PGRLNYSYPGSDSSLLINGQSSLFPMEDGFLDDGRGDQPLHSGLGSPHCFSHQNGERVER

SEQ ID NO: 32244 - protein, 320 aa, Artificial Sequence
  Synthetic polypeptide
PGRLNYSYPGSDSSLLINGQSSLFPMEDGFLDDGRGDQPLHSGLGSPHCFSHQNGERVERYSRKVFVGGLPPDIDEDEITASFRRFGPLIVDWPHKAESKSYFPPKGYAFLLFQDESSVQALIDACIEEDGKLYLCVSSPTIKDKPVQIRPWNLSDSDFVMDGSQPLDPRKTIFVGGVPRPLRAVELAMIMDRLYGGVCYAGIDTDPELKYPKGAGRVAFSNQQSYIAAISARFVQLQHGEIDKRVEVKPYVLDDQLCDECQGARCGGKFAPFFCANVTCLQYYCEYCWAAIHSRAGREFHKPLVKEGGDRPRHISFRWN

SEQ ID NO: 32245 - protein, 40 aa, Artificial Sequence
  Synthetic polypeptide
LYLSHGISRWIKPVNTDRVSFCHPAWCAVVQAILLPQPPK

SEQ ID NO: 32246 - protein, 43 aa, Artificial Sequence
  Synthetic polypeptide
GNSCIYLMGLVGGLNQLILTESRSVTQPGVQWFKPFSCLSLPS

SEQ ID NO: 32247 - protein, 16 aa, Artificial Sequence
  Synthetic polypeptide
YTGQQKYRMRHRTSLT

SEQ ID NO: 32248 - protein, 5 aa, Artificial Sequence
  Synthetic polypeptide
GTGLH

SEQ ID NO: 32249 - protein, 877 aa, Artificial Sequence
  Synthetic polypeptide
LKKYSTTVLMCLQCIQIIHRTTKIQDEAQDFIDLTRETRPRTKDRSGLYVIDLTRAEGENRPIATLDLTLEPVTPSQKEPTSLQTCASLSGKAVMEGHVDRSSQPTARRIINSDPVDLDLVEENTFVGPPPATSISGGSVYPTEPNCSSATFTGNLSFLASLQLSSDVSSLSPTSNNSRSSSSSSNQKAPLPCPQQDVSRPPQALPCPLRPLPCPPRASPCPPRASSCPPRALSCPSQTMQCQLPALTHPPQEVPCPRQNIPGPPQDSLGLPQDVPGLPQSILHPQDVAYLQDMPRSPGDVPQSPSDVSPSPDAPQSPGGMPHLPGDVLHSPGDMPHSSGDVTHSPRDIPHLPGDRPDFTQNDVQNRDMPMDISALSSPSCSPSPQSETPLEKVPWLSVMETPARKEISLSEPAKPGSAHVQSRTPQGGLYNRPCLHRLKYFLRPPVHHLFFQTLIPDKDTRENKGQKLEPIPHRRLRMVTNTIEENFPLGTVQFLMDFVSPQHYPPREIVAHIIQKILLSGSETVDVLKEAYMLLMKIQQLHPANAKTVEWDWKLLTYVMEEEGQTLPGRVLFLRYVVQTLEDDFQQTLRRQRQHLQQSIANMVLSCDKQPHNVRDVIKWLVKAVTEDGLTQPPNGNQTSSGTGILKASSSHPSSQPNLTKNTNQLIVCQLQRMLSIAVEVDRTPTCSSNKIAEMMFGFVLDIPERSQREMFFTTMESHLLRCKVLEIIFLHSCETPTRLPLSLAQALYFLNNSTSLLKCQSDKSQWQTWDELVEHLQFLLSSYQHVLREHLRSSVIDRKDLIIKRIKPKPQQGDDITVVDVEKQIEAFRSRLIQMLGEPLVPQLQDKVHLLKLLLFYAADLNPDAEPFQKGWSGS

SEQ ID NO: 32250 - protein, 597 aa, Artificial Sequence
  Synthetic polypeptide
LKKYSTTVLMCLQCIQIIHRTTKIQDEAQDFIDLTRETRPRTKDRSGLYVIDLTRAEGENRPIATLDLTLEPVTPSQKEPTSLQTCASLSGKAVMEGHVDRSSQPTARRIINSDPVDLDLVEENTFVGPPPATSISGGSVYPTEPNCSSATFTGNLSFLASLQLSSDVSSLSPTSNNSRSSSSSSNQKAPLPCPQQDVSRPPQALPCPLRPLPCPPRASPCPPRASSCPPRALSCPSQTMQCQLPALTHPPQEVPCPRQNIPGPPQDSLGLPQDVPGLPQSILHPQDVAYLQDMPRSPGDVPQSPSDVSPSPDAPQSPGGMPHLPGDVLHSPGDMPHSSGDVTHSPRDIPHLPGDRPDFTQNDVQNRDMPMDISALSSPSCSPSPQSETPLEKVPWLSVMETPARKEISLSEPAKPGSAHVQSRTPQGGLYNRPCLHRLKYFLRPPVHHLFFQTLIPDKDTRENKGQKLEPIPHRRLRMVTNTIEENFPLGTVQFLMDFVSPQHYPPREIVAHIIQKILLSGSETVDVLKEAYMLLMKIQQLHPANAKTVEWDWKLLTYVMEEEPAECLRLQARATTPDWFWWRRGFAVLAGPVSSP

SEQ ID NO: 32251 - protein, 314 aa, Artificial Sequence
  Synthetic polypeptide
EGQTLPGRVLFLRYVVQTLEDDFQQTLRRQRQHLQQSIANMVLSCDKQPHNVRDVIKWLVKAVTEDGLTQPPNGNQTSSGTGILKASSSHPSSQPNLTKNTNQLIVCQLQRMLSIAVEVDRTPTCSSNKIAEMMFGFVLDIPERSQREMFFTTMESHLLRCKVLEIIFLHSCETPTRLPLSLAQALYFLNNSTSLLKCQSDKSQWQTWDELVEHLQFLLSSYQHVLREHLRSSVIDRKDLIIKRIKPKPQQGDDITVVDVEKQIEAFRSRLIQMLGEPLVPQLQDKVHLLKLLLFYAADLNPDAEPFQKGWSGS

SEQ ID NO: 32252 - protein, 45 aa, Artificial Sequence
  Synthetic polypeptide
EVRRPSAWQPPRLRSEEPLRPAAAPSEKDKLCLGESFSCVMSFRP

SEQ ID NO: 32253 - protein, 34 aa, Artificial Sequence
  Synthetic polypeptide
EVRSPSARQLPRLRRTNSAWASPFPALCRSDPRR

SEQ ID NO: 32254 - protein, 34 aa, Artificial Sequence
  Synthetic polypeptide
EVRSLSARQPPHLGRTNSAWASPFPALCRSDPRR

SEQ ID NO: 32255 - protein, 325 aa, Artificial Sequence
  Synthetic polypeptide
GASPPGSHPIWEGQTLPGRVLFLRYVVQTLEDDFQQTLRRQRQHLQQSIANMVLSCDKQPHNVRDVIKWLVKAVTEDGLTQPPNGNQTSSGTGILKASSSHPSSQPNLTKNTNQLIVCQLQRMLSIAVEVDRTPTCSSNKIAEMMFGFVLDIPERSQREMFFTTMESHLLRCKVLEIIFLHSCETPTRLPLSLAQALYFLNNSTSLLKCQSDKSQWQTWDELVEHLQFLLSSYQHVLREHLRSSVIDRKDLIIKRIKPKPQQGDDITVVDVEKQIEAFRSRLIQMLGEPLVPQLQDKVHLLKLLLFYAADLNPDAEPFQKGWSGS

SEQ ID NO: 32256 - protein, 45 aa, Artificial Sequence
  Synthetic polypeptide
EVRSPSARQLPRLRSEEPLRPAATPSGKDKLCLGESFSCVMSFRP

SEQ ID NO: 32257 - protein, 63 aa, Artificial Sequence
  Synthetic polypeptide
SQQWEAEPVHHQRVQLQTQLPIQPKDEPAHNYSSSIWHSQGQGQKGPAGLRLPTSAQILSPFP

SEQ ID NO: 32258 - protein, 72 aa, Artificial Sequence
  Synthetic polypeptide
PGTVAHACNPSSGRLSPCTTSGSSYKPSCQYSLRTSLPTTIPVPFGTARGRDRRALQDSASPPLHRSSLLSP

SEQ ID NO: 32259 - protein, 66 aa, Artificial Sequence
  Synthetic polypeptide
ENKSFENPGKHDLTFQQLMDLTGIESMDQCRHTLEQHNWNIEAAVQDRLNEQEGVPSVFNPPPSRP

SEQ ID NO: 32260 - protein, 27 aa, Artificial Sequence
  Synthetic polypeptide
LFNSLWISLASNLWISVAIPWNSITGT

SEQ ID NO: 32261 - protein, 25 aa, Artificial Sequence
  Synthetic polypeptide
LNFSTAYGSHWHRIYGSVSPYLGTA

SEQ ID NO: 32262 - protein, 443 aa, Artificial Sequence
  Synthetic polypeptide
ENKSFENPGKHDLTFQQLMDLTGIESMDQCRHTLEQHNWNIEAAVQDRLNEQEGVPSVFNPPPSRPLQVNTADHRIYSYVVSRPQPRGLLGWGYYLIMLPFRFTYYTILDIFRFALRFIRPDPRSRVTDPVGDIVSFMHSFEEKYGRAHPVFYQGTYSQALNDAKRELRFLLVYLHGDDHQDSDEFCRNTLCAPEVISLINTRMLFWACSTNKPEGYRVSQALRENTYPFLAMIMLKDRRMTVVGRLEGLIQPDDLINQLTFIMDANQTYLVSERLEREERNQTQVLRQQQDEAYLASLRADQEKERKKREERERKRRKEEEVQQQKLAEERRRQNLQEEKERKLECLPPEPSPDDPESVKIIFKLPNDSRVERRFHFSQSLTVIHDFLFSLKESPEKFQIEANFPRRVLPCIPSEEWPNPPTLQEAGLSHTEVLFVQDLTDE

SEQ ID NO: 32263 - protein, 34 aa, Artificial Sequence
  Synthetic polypeptide
ELMNEDESASSSPQMPYPEGRSMRSTSRCTSRKT

SEQ ID NO: 32264 - protein, 19 aa, Artificial Sequence
  Synthetic polypeptide
MRMNQPPHPPRCHTPREDL

SEQ ID NO: 32265 - protein, 27 aa, Artificial Sequence
  Synthetic polypeptide
QHDRMELLKVLMPSGPGLVTRKMLRRK

SEQ ID NO: 32266 - protein, 7 aa, Artificial Sequence
  Synthetic polypeptide
CQVGLGW

SEQ ID NO: 32267 - protein, 251 aa, Artificial Sequence
  Synthetic polypeptide
NGITEGFDAKWAWVGNKEDAEKEVAISTFSSSNQVSCPLCDQCFPPTKIERHAMYCNGLMEEDTVLTRRQKEAKTKSDSGTAAQTSLDIDKNEKCYLCKSLVPFREYQCHVDSCLQLAKADQGDGPEGSGRACSTVEGKWQQRLKNPKEKGHSEGRLLSFLEQSEHKTSDADIKSSETGAFRVPSPGMEEAGCSREMQSSFTRRDLNESPVKSFVSISEATDCLVDFKKQVTVQPGSRTRTKAGRGRRRKF

SEQ ID NO: 32268 - protein, 252 aa, Artificial Sequence
  Synthetic polypeptide
NGITEGFDAKWAWVGNKEDAEKEVAISTFSSSNQVSCPLCDQCFPPTKIERHAMYCNGLMEEDTEVLTRRQKEAKTKSDSGTAAQTSLDIDKNEKCYLCKSLVPFREYQCHVDSCLQLAKADQGDGPEGSGRACSTVEGKWQQRLKNPKEKGHSEGRLLSFLEQSEHKTSDADIKSSETGAFRVPSPGMEEAGCSREMQSSFTRRDLNESPVKSFVSISEATDCLVDFKKQVTVQPGSRTRTKAGRGRRRKF

SEQ ID NO: 32269 - protein, 68 aa, Artificial Sequence
  Synthetic polypeptide
NGITEGFDAKWAWVGNKEDAEKEVAISTFSSSNQVSCPLCDQCFPPTKIERHAMYCNGLMEEDTGKDY

SEQ ID NO: 32270 - protein, 39 aa, Artificial Sequence
  Synthetic polypeptide
GRARQLTPVILALWEAEASGSQGTKGGKWVAENEDKTVE

SEQ ID NO: 32271 - protein, 681 aa, Artificial Sequence
  Synthetic polypeptide
HFGRPRRVDHKEPKEENGLQKTKTKQSNRAKCLAKRKIAQMTEEEQFALALKMSEQEAREVNSQEEEEEELLRKAIAESLNSCRPSDASATRSRPLATGPSSQSHQEKTTDSGLTEGIWQLVPPSLFKGSHISQGNEAEEREEPWDHTEKTEEEPVSGSSGSWDQSSQPVFENVNVKSFDRCTGHSAEHTQCGKPQESTGRGSAFLKAVQGSGDTSRHCLPTLADAKGLQDTGGTVNYFWGIPFCPDGVDPNQYTKVILCQLEVYQKSLKMAQRQLLNKKGFGEPVLPRPPSLIQNECGQGEQASEKNECISEDMGDEDKEERQESRASDWHSKTKDFQESSIKSLKEKLLLEEEPTTSHGQSSQGIVEETSEEGNSVPASQSVAALTSKRSLVLMPESSAEEITVCPETQLSSSETFDLEREVSPGSRDILDGVRIIMADKEVGNKEDAEKEVAISTFSSSNQVSCPLCDQCFPPTKIERHAMYCNGLMEEDTVLTRRQKEAKTKSDSGTAAQTSLDIDKNEKCYLCKSLVPFREYQCHVDSCLQLAKADQGDGPEGSGRACSTVEGKWQQRLKNPKEKGHSEGRLLSFLEQSEHKTSDADIKSSETGAFRVPSPGMEEAGCSREMQSSFTRRDLNESPVKSFVSISEATDCLVDFKKQVTVQPGSRTRTKAGRGRRRKF

SEQ ID NO: 32272 - protein, 51 aa, Artificial Sequence
  Synthetic polypeptide
PGTAAHTCNPSTLGGRGEWITRNQRRKMGCRKRRQNSRIEQSVWPKEKSHR

SEQ ID NO: 32273 - protein, 682 aa, Artificial Sequence
  Synthetic polypeptide
HFGRPRRVDHKEPKEENGLQKTKTKQSNRAKCLAKRKIAQMTEEEQFALALKMSEQEAREVNSQEEEEEELLRKAIAESLNSCRPSDASATRSRPLATGPSSQSHQEKTTDSGLTEGIWQLVPPSLFKGSHISQGNEAEEREEPWDHTEKTEEEPVSGSSGSWDQSSQPVFENVNVKSFDRCTGHSAEHTQCGKPQESTGRGSAFLKAVQGSGDTSRHCLPTLADAKGLQDTGGTVNYFWGIPFCPDGVDPNQYTKVILCQLEVYQKSLKMAQRQLLNKKGFGEPVLPRPPSLIQNECGQGEQASEKNECISEDMGDEDKEERQESRASDWHSKTKDFQESSIKSLKEKLLLEEEPTTSHGQSSQGIVEETSEEGNSVPASQSVAALTSKRSLVLMPESSAEEITVCPETQLSSSETFDLEREVSPGSRDILDGVRIIMADKEVGNKEDAEKEVAISTFSSSNQVSCPLCDQCFPPTKIERHAMYCNGLMEEDTEVLTRRQKEAKTKSDSGTAAQTSLDIDKNEKCYLCKSLVPFREYQCHVDSCLQLAKADQGDGPEGSGRACSTVEGKWQQRLKNPKEKGHSEGRLLSFLEQSEHKTSDADIKSSETGAFRVPSPGMEEAGCSREMQSSFTRRDLNESPVKSFVSISEATDCLVDFKKQVTVQPGSRTRTKAGRGRRRKF

SEQ ID NO: 32274 - protein, 515 aa, Artificial Sequence
  Synthetic polypeptide
HFGRPRRVDHKEPKEENGLQKTKTKQSNRAKCLAKRKIAQMTEEEQFALALKMSEQEAREVNSQEEEEEELLRKAIAESLNSCRPSDASATRSRPLATGPSSQSHQEKTTDSGLTEGIWQLVPPSLFKGSHISQGNEAEEREEPWDHTEKTEEEPVSGSSGSWDQSSQPVFENVNVKSFDRCTGHSAEHTQCGKPQSSQGIVEETSEEGNSVPASQSVAALTSKRSLVLMPESSAEEITVCPETQLSSSETFDLEREVSPGSRDILDGVRIIMADKEVGNKEDAEKEVAISTFSSSNQVSCPLCDQCFPPTKIERHAMYCNGLMEEDTVLTRRQKEAKTKSDSGTAAQTSLDIDKNEKCYLCKSLVPFREYQCHVDSCLQLAKADQGDGPEGSGRACSTVEGKWQQRLKNPKEKGHSEGRLLSFLEQSEHKTSDADIKSSETGAFRVPSPGMEEAGCSREMQSSFTRRDLNESPVKSFVSISEATDCLVDFKKQVTVQPGSRTRTKAGRGRRRKF

SEQ ID NO: 32275 - protein, 128 aa, Artificial Sequence
  Synthetic polypeptide
HFGRPRRVDHKEPKEENGLQKTKTKQSNRAKCLAKRKIAQMTEEEQFALALKMSEQEAREVNSQEEEEEELLRKAIAESLNSCRPSDASATRSRPLATGPSSQSHQEKTTDSGLTEGMHMAAGTSITV

SEQ ID NO: 32276 - protein, 217 aa, Artificial Sequence
  Synthetic polypeptide
HFGRPRRVDHKEPKEENGLQKTKTKQSNRAKCLAKRKIAQMTEEEQFALALKMSEQEAREVNSQEEEEEELLRKAIAESLNSSQGIVEETSEEGNSVPASQSVAALTSKRSLVLMPESSAEEITVCPETQLSSSETFDLEREVSPGSRDILDGVRIIMADKEVGNKEDAEKEVAISTFSSSNQVSCPLCDQCFPPTKIERHAMYCNGLMEEDTGKDY

SEQ ID NO: 32277 - protein, 119 aa, Artificial Sequence
  Synthetic polypeptide
HFGRPRRVDHKEPKEENGLQKTKTKQSNRAKCLAKRKIAQMTEEEQFALALKMSEQEAREVNSQEEEEEELLRKAIAESLNSCRPSDASATRSRPLATGPSSQSHQEKTTDSGLTEGIW

SEQ ID NO: 32278 - protein, 51 aa, Artificial Sequence
  Synthetic polypeptide
HFGRPRRVDHKEPKEENGLQKTKTKQSNRAKCLAKRKIAQMTEEEQFALAL

SEQ ID NO: 32279 - protein, 33 aa, Artificial Sequence
  Synthetic polypeptide
EVKQTRAQSWLCVLLIGRAAEAKTRTSAAPSVT

SEQ ID NO: 32280 - protein, 16 aa, Artificial Sequence
  Synthetic polypeptide
SEEQQKQRQEPVLPHL

SEQ ID NO: 32281 - protein, 181 aa, Artificial Sequence
  Synthetic polypeptide
GSKLAVCLTDRKSSRSKDKNQCCPICNMTFSSPVVAQSHYLGKTHAKNLKLKQQSTKVEALHQNREMIDPDKFCSLCHATFNDPVMAQQHYVGKKHRKQETKLKLMARYGRLADPAVTDFPAGKGYPCKTCKIVLNSIEQYQAHVSGFKHKNQSPKTVASSLGQIPMQRQPIQKDSTTLED

SEQ ID NO: 32282 - protein, 197 aa, Artificial Sequence
  Synthetic polypeptide
GSKLAVCLTDRKSSRSKDKNQCCPICNMTFSSPVVAQSHYLGKTHAKNLKLKQQSTKVEALSKRLTNPFLVASTLALHQNREMIDPDKFCSLCHATFNDPVMAQQHYVGKKHRKQETKLKLMARYGRLADPAVTDFPAGKGYPCKTCKIVLNSIEQYQAHVSGFKHKNQSPKTVASSLGQIPMQRQPIQKDSTTLED

SEQ ID NO: 32283 - protein, 28 aa, Artificial Sequence
  Synthetic polypeptide
CDLTFLSLSFFICKIEIMLSCKVVRVST

SEQ ID NO: 32284 - protein, 85 aa, Artificial Sequence
  Synthetic polypeptide
GCQPKKKSTPLKYEVGDLIWAKFKRRPWWPCRICSDPLINTHSKMKVSNRRPYRQYYVEAFGDPSERAWVAGKAIVMFEGRHQFE

SEQ ID NO: 32285 - protein, 13 aa, Artificial Sequence
  Synthetic polypeptide
GCEGVNLRKSLRH

SEQ ID NO: 32286 - protein, 2388 aa, Artificial Sequence
  Synthetic polypeptide
GCQPKKKSTPLKYEVGDLIWAKFKRRPWWPCRICSDPLINTHSKMKVSNRRPYRQYYVEAFGDPSERAWVAGKAIVMFEGRHQFEELPVLRRRGKQKEKGYRHKVPQKILSKWEASVGLAEQYDVPKGSKNRKCIPGSIKLDSEEDMPFEDCTNDPESEHDLLLNGCLKSLAFDSEHSADEKEKPCAKSRARKSSDNPKRTSVKKGHIQFEAHKDERRGKIPENLGLNFISGDISDTQASNELSRIANSLTGSNTAPGSFLFSSCGKNTAKKEFETSNGDSLLGLPEGALISKCSREKNKPQRSLVCGSKVKLCYIGAGDEEKRSDSISICTTSDDGSSDLDPIEHSSESDNSVLEIPDAFDRTENMLSMQKNEKIKYSRFAATNTRVKAKQKPLISNSHTDHLMGCTKSAEPGTETSQVNLSDLKASTLVHKPQSDFTNDALSPKFNLSSSISSENSLIKGGAANQALLHSKSKQPKFRSIKCKHKENPVMAEPPVINEECSLKCCSSDTKGSPLASISKSGKVDGLKLLNNMHEKTRDSSDIETAVVKHVLSELKELSYRSLGEDVSDSGTSKPSKPLLFSSASSQNHIPIEPDYKFSTLLMMLKDMHDSKTKEQRLMTAQNLVSYRSPGRGDCSTNSPVGVSKVLVSGGSTHNSEKKGDGTQNSANPSPSGGDSALSGELSASLPGLLSDKRDLPASGKSRSDCVTRRNCGRSKPSSKLRDAFSAQMVKNTVNRKALKTERKRKLNQLPSVTLDAVLQGDRERGGSLRGGAEDPSKEDPLQIMGHLTSEDGDHFSDVHFDSKVKQSDPGKISEKGLSFENGKGPELDSVMNSENDELNGVNQVVPKKRWQRLNQRRTKPRKRMNRFKEKENSECAFRVLLPSDPVQEGRDEFPEHRTPSASILEEPLTEQNHADCLDSAGPRLNVCDKSSASIGDMEKEPGIPSLTPQAELPEPAVRSEKKRLRKPSKWLLEYTEEYDQIFAPKKKQKKVQEQVHKVSSRCEEESLLARGRSSAQNKQVDENSLISTKEEPPVLEREAPFLEGPLAQSELGGGHAELPQLTLSVPVAPEVSPRPALESEELLVKTPGNYESKRQRKPTKKLLESNDLDPGFMPKKGDLGLSKKCYEAGHLENGITESCATSYSKDFGGGTTKIFDKPRKRKRQRHAAAKMQCKKVKNDDSSKEIPGSEGELMPHRTATSPKETVEEGVEHDPGMPASKKMQGERGGGAALKENVCQNCEKLGELLLCEAQCCGAFHLECLGLTEMPRGKFICNECRTGIHTCFVCKQSGEDVKRCLLPLCGKFYHEECVQKYPPTVMQNKGFRCSLHICITCHAANPANVSASKGRLMRCVRCPVAYHANDFCLAAGSKILASNSIICPNHFTPRRGCRNHEHVNVSWCFVCSEGGSLLCCDSCPAAFHRECLNIDIPEGNWYCNDCKAGKKPHYREIVWVKVGRYRWWPAEICHPRAVPSNIDKMRHDVGEFPVLFFGSNDYLWTHQARVFPYMEGDVSSKDKMGKGVDGTYKKALQEAAARFEELKAQKELRQLQEDRKNDKKPPPYKHIKVNRPIGRVQIFTADLSEIPRCNCKATDENPCGIDSECINRMLLYECHPTVCPAGGRCQNQCFSKRQYPEVEIFRTLQRGWGLRTKTDIKKGEFVNEYVGELIDEEECRARIRYAQEHDITNFYMLTLDKDRIIDAGPKGNYARFMNHCCQPNCETQKWSVNGDTRVGLFALSDIKAGTELTFNYNLECLGNGKTVCKCGAPNCSGFLGVRPKNQPIATEEKSKKFKKKQQGKRRTQGEITKEREDECFSCGDAGQLVSCKKPGCPKVYHADCLNLTKRPAGKWECPWHQCDICGKEAASFCEMCPSSFCKQHREGMLFISKLDGRLSCTEHDPCGPNPLEPGEIREYVPPPVPLPPGPSTHLAEQSTGMAAQAPKMSDKPPADTNQMLSLSKKALAGTCQRPLLPERPLERTDSRPQPLDKVRDLAGSGTKSQSLVSSQRPLDRPPAVAGPRPQLSDKPSPVTSPSSSPSVRSQPLERPLGTADPRLDKSIGAASPRPQSLEKTSVPTGLRLPPPDRLLITSSPKPQTSDRPTDKPHASLSQRLPPPEKVLSAVVQTLVAKEKALRPVDQNTQSKNRAALVMDLIDLTPRQKERAASPHQVTPQADEKMPVLESSSWPASKGLGHMPRAVEKGCVSDPLQTSGKAAAPSEDPWQAVKSLTQARLLSQPPAKAFLYEPTTQASGRASAGAEQTPGPLSQSPGLVKQAKQMVGGQQLPALAAKSGQSFRSLGKAPASLPTEEKKLVTTEQSPWALGKASSRAGLWPIVAGQTLAQSCWSAGSTQTLAQTCWSLGRGQDPKPEQNTLPALNQAPSSHKCAESEQK

SEQ ID NO: 32287 - protein, 116 aa, Artificial Sequence
  Synthetic polypeptide
GCQPKKKSTPLKYEVGDLIWAKFKRRPWWPCRICSDPLINTHSKMKVSNRRPYRQYYVEAFGDPSERAWVAGKAIVMFEGRHQFEELPVLRRRGKQKEKGYRHKVPQKILSKWEAS

SEQ ID NO: 32288 - protein, 34 aa, Artificial Sequence
  Synthetic polypeptide
EWLGQVSLLLTHHDLDSLLGAKRRRPEWPWVTGC

SEQ ID NO: 32289 - protein, 20 aa, Artificial Sequence
  Synthetic polypeptide
LTMTLTHSWGQSGAGRSGRG

SEQ ID NO: 32290 - protein, 83 aa, Artificial Sequence
  Synthetic polypeptide
AWRFVPVIPALWEAEARGSPEVRSSRPACPIWGQGRPPQDPQMPSLPRGAWSPWRKTPSTPPGRKWASFPWWCRGLRPPPAAS

SEQ ID NO: 32291 - protein, 68 aa, Artificial Sequence
  Synthetic polypeptide
SQHFGKPKHVDHLRSGVRDQPAQYGDRGGLLRIHRCPVSQEGPGPHGGKLHLLLLAGSGRVSRGGAED

SEQ ID NO: 32292 - protein, 217 aa, Artificial Sequence
  Synthetic polypeptide
GQEFETSLPNMGTGEASSGSTDAQSPKRGLVPMEENSIYSSWQEVGEFPVVVQRTEAATRCQLKGPALLVLGPDAIQLREAKGTQALYSWPYHFLRKFGSDKILLGTPGVSLLICKGERTDDVSGIILDESLLRAYSVPGAGGHSRVQDSLGPVLREPTFQGERSFLKTSMLRSLLCSCSWRHPRSQPRTQASCLQGSDCPAPHRNSTSAAHTLGTS

SEQ ID NO: 32293 - protein, 327 aa, Artificial Sequence
  Synthetic polypeptide
GQEFETSLPNMGTGEASSGSTDAQSPKRGLVPMEENSIYSSWQEVGEFPVVVQRTEAATRCQLKGPALLVLGPDAIQLREAKGTQALYSWPYHFLRKFGSDKGVFSFEAGRRCHSGEGLFAFSTPCAPDLCRAVAGAIARQRERLPELTRPQPCPLPRATSLPSLDTPGELREMPPGPEPPTSRKMHLAEPGPQSLPLLLGPEPNDLASGLYASVCKRASGPPGNEHLYENLCVLEASPTLHGGEPEPHEGPGSRSPTTSPIYHNGQDLSWPGPANDSTLEAQYRRLLELDQVEGTGRPDPQAGFKAKLVTLLSRERRKGPAPCDRP

SEQ ID NO: 32294 - protein, 100 aa, Artificial Sequence
  Synthetic polypeptide
GQEFETSLPNMGTGEASSGSTDAQSPKRGLVPMEENSIYSSWQEVGEFPVVVQRTEAATRCQLKGPALLVLGPDAIQLREAKGTQALYSWPYHFLRKFGS

SEQ ID NO: 32295 - protein, 64 aa, Artificial Sequence
  Synthetic polypeptide
AWRFVPVIPALWEAEARGSPEVRSSRPACPIWGQGRPPQDPQMPSLPRGAWSPWRKTPSTPPGR

SEQ ID NO: 32296 - protein, 57 aa, Artificial Sequence
  Synthetic polypeptide
SQHFGKPKHVDHLRSGVRDQPAQYGDRGGLLRIHRCPVSQEGPGPHGGKLHLLLLAG

SEQ ID NO: 32297 - protein, 43 aa, Artificial Sequence
  Synthetic polypeptide
GQEFETSLPNMGTGEASSGSTDAQSPKRGLVPMEENSIYSSWQ

SEQ ID NO: 32298 - protein, 51 aa, Artificial Sequence
  Synthetic polypeptide
AWRFVPVIPALWEAEARGSPEVRSSRPACPIWGQGRPPQDPQMPSLPRGAW

SEQ ID NO: 32299 - protein, 44 aa, Artificial Sequence
  Synthetic polypeptide
SQHFGKPKHVDHLRSGVRDQPAQYGDRGGLLRIHRCPVSQEGPG

SEQ ID NO: 32300 - protein, 31 aa, Artificial Sequence
  Synthetic polypeptide
GQEFETSLPNMGTGEASSGSTDAQSPKRGLV

SEQ ID NO: 32301 - protein, 52 aa, Artificial Sequence
  Synthetic polypeptide
GQEFRNNLRNKDLGAAAGSKRPTCVIMVKPHEEYQEAYDECLEEVQSLPLPL

SEQ ID NO: 32302 - protein, 46 aa, Artificial Sequence
  Synthetic polypeptide
QALWLTPVILVLWEAKTGGSVEDRSSGITCATKTWVQPQAPSAPPV

SEQ ID NO: 32303 - protein, 24 aa, Artificial Sequence
  Synthetic polypeptide
PAQQRPGCSRRLQAPHLCDNGQAP

SEQ ID NO: 32304 - protein, 25 aa, Artificial Sequence
  Synthetic polypeptide
GQEFRNNLRNKDLGAAAGSKRPTCV

SEQ ID NO: 32305 - protein, 18 aa, Artificial Sequence
  Synthetic polypeptide
PAQQRPGCSRRLQAPHLC

SEQ ID NO: 32306 - protein, 61 aa, Artificial Sequence
  Synthetic polypeptide
SRGFGVRQAWLSHGSYLILSLRLRGLNNMRKAVSAVTAGQGSTNYGKSQRRGGHQNNYKPY

SEQ ID NO: 32307 - protein, 32 aa, Artificial Sequence
  Synthetic polypeptide
GRQSLLSRLVRVVQTTARASDVVAIRITTSHT

SEQ ID NO: 32308 - protein, 13 aa, Artificial Sequence
  Synthetic polypeptide
HEEGSLCCHGWSG

SEQ ID NO: 32309 - protein, 345 aa, Artificial Sequence
  Synthetic polypeptide
DHCWSLVRSEANDLALRLARHYTGHQDVVVLDHAYHGHLSSLIDISPYKFRNLDGQKEWVHVAPLPDTYRGPYREDHPNPAMAYANEVKRVVSSAQEKGRKIAAFFAESLPSVGGQIIPPAGYFSQVAEHIRKAGGVFVADEIQVGFGRVGKHFWAFQLQGKDFVPDIVTMGKSIGNGHPVACVAATQPVARAFEATGVEYFNTFGGSPVSCAVGLAVLNVLEKEQLQDHATSVGSFLMQLLGQQKIKHPIVGDVRGVGLFIGVDLIKDEATRTPATEEAAYLVSRLKENYVLLSTDGPGRNILKFKPPMCFSLDNARQVVAKLDAILTDMEEKVRSCETLRLQP

SEQ ID NO: 32310 - protein, 33 aa, Artificial Sequence
  Synthetic polypeptide
CFLCWIQFPCLLLKDVITSFLGSLLELSEVRSQ

SEQ ID NO: 32311 - protein, 78 aa, Artificial Sequence
  Synthetic polypeptide
DHCWSLVRSEANDLALRLARHYTGHQDVVVLDHAYHGHLSSLIDISPYKFRNLDGQKEWVHVVCTAQLNNSDMLSSLG

SEQ ID NO: 32312 - protein, 100 aa, Artificial Sequence
  Synthetic polypeptide
DHCWSLVRSEANDLALRLARHYTGHQDVVVLDHAYHGHLSSLIDISPYKFRNLDGQKEWVHVAPLPDTYRGPYREDHPNPAMAYANEVKRVVSSAQEKGR

SEQ ID NO: 32313 - protein, 64 aa, Artificial Sequence
  Synthetic polypeptide
GLPSHAELCGIPKELTVLIGIAEKAGDMKAIVEVTSGRGDLIVAHKRTGIVNHITSLKNLIVII

SEQ ID NO: 32314 - protein, 42 aa, Artificial Sequence
  Synthetic polypeptide
QFLFHTHFSPLLPCEEGACFLFCHEAFPATQNYAAFQKNSLS

SEQ ID NO: 32315 - protein, 516 aa, Artificial Sequence
  Synthetic polypeptide
VFDNSSFTHTSLPCCLVRKVPASSSAMRPSQPRRTMRHSKRTHCPDWDSRESWGHESYRGSHKRKRRSHSSTQENRHCKPHHQFKESDCHYLEARSLNERDYRDRRYVDEYRNDYCEGYVPRHYHRDIESGYRIHCSKSSVRSRRSSPKRKRNRHCSSHQSRSKSHRRKRSRSIEDDEEGHLICQSGDVLRARYEIVDTLGEGAFGKVVECIDHGMDGMHVAVKIVKNVGRYREAARSEIQVLEHLNSTDPNSVFRCVQMLEWFDHHGHVCIVFELLGLSTYDFIKENSFLPFQIDHIRQMAYQICQSINFLHHNKLTHTDLKPENILFVKSDYVVKYNSKMKRDERTLKNTDIKVVDFGSATYDDEHHSTLVSTRHYRAPEVILALGWSQPCDVWSIGCILIEYYLGFTVFQTHDSKEHLAMMERILGPIPQHMIQKTRKRKYFHHNQLDWDEHSSAGRYVRRRCKPLKEFMLCHDEEHEKLFDLVRRMLEYDPTQRITLDEALQHPFFDLLKKK

SEQ ID NO: 32316 - protein, 178 aa, Artificial Sequence
  Synthetic polypeptide
VFDNSSFTHTSLPCCLVRKVPASSSAMRPSQPRRTMRHSKRTHCPDWDSRESWGHESYRGSHKRKRRSHSSTQENRHCKPHHQFKESDCHYLEARSLNERDYRDRRYVDEYRNDYCEGYVPRHYHRDIESGYRIHCSKSSVRSRRSSPKRKRNRHCSSHQSRSMKSWTLWVKEPLAKL

SEQ ID NO: 32317 - protein, 61 aa, Artificial Sequence
  Synthetic polypeptide
GLPSHAELCGIPKELTVLIGIAEKAGDMKAIVEVTSGRGDLIVAHKRTGIVNHITSLKNLI

SEQ ID NO: 32318 - protein, 88 aa, Artificial Sequence
  Synthetic polypeptide
VFDNSSFTHTSLPCCLVRKVPASSSAMRPSQPRRTMRHSKRTHCPDWDSRESWGHESYRGSHKRKRRSHSSTQENRHCKPHHQFKESD

SEQ ID NO: 32319 - protein, 66 aa, Artificial Sequence
  Synthetic polypeptide
GLPSHAELCGIPKELTVLIGIAEKAGDMKAIVEVTSGRGDLIVAHKRTGIVNHITSLKNLIGPVWI

SEQ ID NO: 32320 - protein, 124 aa, Artificial Sequence
  Synthetic polypeptide
VFDNSSFTHTSLPCCLVRKVPASSSAMRPSQPRRTMRHSKRTHCPDWDSRESWGHESYRGSHKRKRRSHSSTQENRHCKPHHQFKESDWTCVDIKTNALTLIRLGYLKGYSEIFTGHSVDILKN

SEQ ID NO: 32321 - protein, 62 aa, Artificial Sequence
  Synthetic polypeptide
GLPSHAELCGIPKELTVLIGIAEKAGDMKAIVEVTSGRGDLIVAHKRTGIVNHITSLKNLIG

SEQ ID NO: 32322 - protein, 89 aa, Artificial Sequence
  Synthetic polypeptide
VFDNSSFTHTSLPCCLVRKVPASSSAMRPSQPRRTMRHSKRTHCPDWDSRESWGHESYRGSHKRKRRSHSSTQENRHCKPHHQFKESDW

SEQ ID NO: 32323 - protein, 574 aa, Artificial Sequence
  Synthetic polypeptide
GRARWLTPVIPALWEAEAGRSQGLPFTKPKVISLLQQGEDPWEVEKDGSGVSSLGSKSSHKTTKSTQTQDSSFQGLILKRSNRNVPWDLKLEKPYIYEGRLEKKQDKKGSFQIVSATHKKIPTIERSHKNTELSQNFSPKSVLIRQQILPREKTPPKCEIQGNSLKQNSQLLNQPKITADKRYKCSLCEKTFINTSSLRKHEKNHSGEKLFKCKECSKAFSQSSALIQHQITHTGEKPYICKECGKAFTLSTSLYKHLRTHTVEKSYRCKECGKSFSRRSGLFIHQKIHAEENPCKYNPGRKASSCSTSLSGCQRIHSRKKSYLCNECGNTFKSSSSLRYHQRIHTGEKPFKCSECGRAFSQSASLIQHERIHTGEKPYRCNECGKGFTSISRLNRHRIIHTGEKFYNCNECGKALSSHSTLIIHERIHTGEKPCKCKVCGKAFRQSSALIQHQRMHTGERPYKCNECGKTFRCNSSLSNHQRIHTGEKPYRCEECGISFGQSSALIQHRRIHTGEKPFKCNTCGKTFRQSSSRIAHQRIHTGEKPYECNTCGKLFNHRSSLTNHYKIHIEEDP

SEQ ID NO: 32324 - protein, 21 aa, Artificial Sequence
  Synthetic polypeptide
SQHFGRPRRADHKGSHLPNQK

SEQ ID NO: 32325 - protein, 59 aa, Artificial Sequence
  Synthetic polypeptide
PGAVAHTCNPSTLGGRGGQITRAPIYQTKSDLPVAARRRSLGGGERRFWRLLSRIEEQS

SEQ ID NO: 32326 - protein, 104 aa, Artificial Sequence
  Synthetic polypeptide
GRARWLTPVIPALWEAEAGRSQGLPFTKPKVISLLQQGEDPWEVEKDGSGVSSLGSKSSHKTTKSTQTQDSSFQGLILKRSNRNVPWDLKLEKPYIYEGRLEKK

SEQ ID NO: 32327 - protein, 14 aa, Artificial Sequence
  Synthetic polypeptide
EAEAWCLWWRLWRL

SEQ ID NO: 32328 - protein, 225 aa, Artificial Sequence
  Synthetic polypeptide
SQHFERLRRGAYGGGYGGYDDYNGYNDGYGFGSDRFGRDLNYCFSGMSDHRYGDGGSTFQSTTGHCVHMRGLPYRATENDIYNFFSPLNPVRVHIEIGPDGRVTGEADVEFATHEDAVAAMSKDKANMQHRYVELFLNSTAGASGGAYEHRYVELFLNSTAGASGGAYGSQMMGGMGLSNQSSYGGPASQQLSGGYGGGYGGQSSMSGYDQVLQENSSDFQSNIA

SEQ ID NO: 32329 - protein, 248 aa, Artificial Sequence
  Synthetic polypeptide
SQHFERLRRGAYGGGYGGYDDYNGYNDGYGFGSDRFGRDLNYCFSGMSDHRYGDGGSTFQSTTGHCVHMRGLPYRATENDIYNFFSPLNPVRVHIEIGPDGRVTGEADVEFATHEDAVAAMSKDKANMQHRYVELFLNSTAGASGGAYEHRYVELFLNSTAGASGGAYGSQMMGGMGLSNQSSYGGPASQQLSGGYGGGYGGQSSMSGYGNQGAVNSSYYSSGSRASMGVNGMGGLSSMSSMSGGWGM

SEQ ID NO: 32330 - protein, 205 aa, Artificial Sequence
  Synthetic polypeptide
SQHFERLRRGAYGGGYGGYDDYNGYNDGYGFGSDRFGRDLNYCFSGMSDHRYGDGGSTFQSTTGHCVHMRGLPYRATENDIYNFFSPLNPVRVHIEIGPDGRVTGEADVEFATHEDAVAAMSKDKANMQHRYVELFLNSTAGASGGAYGSQMLGGMGLSNQSSYGGPASQQLSGGYGGGYGGQSSMSGYDQVLQENSSDFQSNIA

SEQ ID NO: 32331 - protein, 178 aa, Artificial Sequence
  Synthetic polypeptide
SQHFERLRRGAYGGGYGGYDDYNGYNDGYGFGSDRFGRDLNYCFSGMSDHRYGDGGSTFQSTTGHCVHMRGLPYRATENDIYNFFSPLNPVRVHIEIGPDGRVTGEADVEFATHEDAVAAMSKDKANMQHRYVELFLNSTAGASGGAYEHRYVELFLNSTAGASGGAYGSQMMGGMGL

SEQ ID NO: 32332 - protein, 156 aa, Artificial Sequence
  Synthetic polypeptide
SQHFERLRRGAYGGGYGGYDDYNGYNDGYGFGSDRFGRDLNYCFSGMSDHRYGDGGSTFQSTTGHCVHMRGLPYRATENDIYNFFSPLNPVRVHIEIGPDGRVTGEADVEFATHEDAVAAMSKDKANMQHRYVELFLNSTAGASGGAYGSQMMGGM

SEQ ID NO: 32333 - protein, 620 aa, Artificial Sequence
  Synthetic polypeptide
TSCYCTSFYWFSQMLCFYKLNVATLHQIMEGKWLLCMLLVLGTAIVEAHDGHDDDVIDIEDDLDDVIEEVEDSKPDTTAPPSSPKVTYKAPVPTGEVYFADSFDRGTLSGWILSKAKKDDTDDEIAKYDGKWEVEEMKESKLPGDKGLVLMSRAKHHAISAKLNKPFLFDTKPLIVQYEVNFQNGIECGGAYVKLLSKTPELNLDQFHDKTPYTIMFGPDKCGEDYKLHFIFRHKNPKTGIYEEKHAKRPDADLKTYFTDKKTHLYTLILNPDNSFEILVDQSVVNSGNLLNDMTPPVNPSREIEDPEDRKPEDWDERPKIPDPEAVKPDDWDEDAPAKIPDEEATKPEGWLDDEPEYVPDPDAEKPEDWDEDMDGEWEAPQIANPRCESAPGCGVWQRPVIDNPNYKGKWKPPMIDNPSYQGIWKPRKIPNPDFFEDLEPFRMTPFSAIGLELWSMTSDIFFDNFIICADRRIVDDWANDGWGLKKAADGAAEPGVVGQMIEAAEERPWLWVVYILTVALPVFLVILFCCSGKKQTSGMEYKKTDAPQPDVKEEEEEKEEEKDKGDEEEEGEEKLEEKQKSDAEEDGGTVSQEEEDRKPKAEEDEILNRSPRNRKPRRE

SEQ ID NO: 32334 - protein, 35 aa, Artificial Sequence
  Synthetic polypeptide
MWQPCIKSWKGSGCCVCYWCLELLLLRLMMDMMMM

SEQ ID NO: 32335 - protein, 45 aa, Artificial Sequence
  Synthetic polypeptide
LLLLHFLLLVFTDAVFLQIECGNPASNHGREVVAVYVTGAWNCYC

SEQ ID NO: 32336 - protein, 517 aa, Artificial Sequence
  Synthetic polypeptide
PGDVVDVYQREFLALRDRLHAAEQESLKRSKELNLVLDEIKRAVSERQALRDGDGNRTWGRLTEDPRLKPWNGSHRHVLHLPTVFHHLPHLLAKESSLQPAVRVGQGRTGVSVVMGIPSVRREVHSYLTDTLHSLISELSPQEKEDSVIVVLIAETDSQYTSAVTENIKALFPTEIHSGLLEVISPSPHFYPDFSRLRESFGDPKERVRWRTKQNLDYCFLMMYAQSKGIYYVQLEDDIVAKPNYLSTMKNFALQQPSEDWMILEFSQLGFIGKMFKSLDLSLIVEFILMFYRDKPIDWLLDHILWVKVCNPEKDAKHCDRQKANLRIRFKPSLFQHVGTHSSLAGKIQKLKDKDFGKQALRKEHVNPPAEVSTSLKTYQHFTLEKAYLREDFFWAFTPAAGDFIRFRFFQPLRLERFFFRSGNIEHPEDKLFNTSVEVLPFDNPQSDKEALQEGRTATLRYPRSPDGYLQIGSFYKGVAEGEVDPAFGPLEALRLSIQTDSPVWVILSEIFLKKAD

SEQ ID NO: 32337 - protein, 72 aa, Artificial Sequence
  Synthetic polypeptide
NLVSTKNTKISQATLWTFTSGSSWRCAIGCTQLSRRASSAPRSSTWCWTRSRGPCQKGRRCETETAIAPGAA

SEQ ID NO: 32338 - protein, 52 aa, Artificial Sequence
  Synthetic polypeptide
GRGGRITRSGVRDQPGQYGETSCLLKIQKLARRRCGRLPAGVPGAARSVARS

SEQ ID NO: 32339 - protein, 111 aa, Artificial Sequence
  Synthetic polypeptide
PGDVVDVYQREFLALRDRLHAAEQESLKRSKELNLVLDEIKRAVSERQALRDGDGNRTWGRLTEDPRLKPWNGSHRHVLHLPTVFHHLPHLLAKESSLQPAVRVGQGRTGD

SEQ ID NO: 32340 - protein, 128 aa, Artificial Sequence
  Synthetic polypeptide
PGDVVDVYQREFLALRDRLHAAEQESLKRSKELNLVLDEIKRAVSERQALRDGDGNRTWGRLTGPPIEAVERLTPARAAPAHRLPSPATPAGQGEQSAARGARGPGPHRSVGGDGHPERAARGALVPD

SEQ ID NO: 32341 - protein, 119 aa, Artificial Sequence
  Synthetic polypeptide
EREQMESDNCSGGDDDWTHLSSKEVDPSTGELQSLQMPESEGPSSLDPSQEGPTGLKEAALYPHLPPEADPRLIESLSQMLSMGFSDEGGWLTRLLQTKNYDIGAALDTIQYSKHPPPL

SEQ ID NO: 32342 - protein, 63 aa, Artificial Sequence
  Synthetic polypeptide
MACNMGLEKGNRWSRITVQEEMMTGPICLQKKWTRLQVNSSPYRCQNPKGQALWTPPRRDPQG

SEQ ID NO: 32343 - protein, 15 aa, Artificial Sequence
  Synthetic polypeptide
WRATWGLRKGTDGVG

SEQ ID NO: 32344 - protein, 107 aa, Artificial Sequence
  Synthetic polypeptide
VISKELEKRQKLLKNVFPSSSGGVGAARQPSLSPQQPPELLCAGGANRIPGPAEALPEKLAHGGPWSQGGQGEDERGVMAHPLLRVRAWRVHVPHSQDAGTGPEGYP

SEQ ID NO: 32345 - protein, 817 aa, Artificial Sequence
  Synthetic polypeptide
RMSSPAPQEGSEQPASPASPLSSRQSFCAQEAPTASQGLLKLFQKNSPMEDLGAKGAKEKMKEESWHIHFFEYGRGVCMYRTAKTRALVLKGIPESLRGELWLLFSGAWNEMVTHPGYYAELVEKSTGKYSLATEEIERDLHRSMPEHPAFQNELGIAALRRVLTAYAFRNPTIGYCQAMNIVTSVLLLYGSEEEAFWLLVALCERMLPDYYNTRVVGALVDQGIFEELTRDFLPQLSEKMQDLGVISSISLSWFLTLFLSVMPFESAVVIVDCFFYEGIKVILQVALAVLDANMEQLLGCSDEGEAMTMLGRYLDNVVNKQSVSPPIPHLRALLSSSDDPPAEVDIFELLKVSYEKFSSLRAEDIEQMRFKQRLKVIQSLEDTAKRSVVRAIPVDIGFSIEELEDLYMVFKAKHLASQYWGCSRTMAGRRDPSLPYLEQYRIDASQFRELFASLTPWACGSHTPLLAGRMFRLLDENKDSLINFKEFVTGMSGMYHGDLTEKLKVLYKLHLPPALSPEEAESALEAAHYFTEDSSSEEALPQEEQEGSGSEERGEEKGTSSPDYRHYLRMWAKEKEAQKETIKDLPKMNQEQFIELCKTLYNMFSEDPMEQDLYHAIATVASLLLRIGEVGKKFSARTGRKPRDCATEEDEPPAPELHQDAARELQPPAAGDPQAKAGGDTHLGKAPQESQVVVEGGSGEGQGSPSQLLSDDETKDDMSMSSYSVVSTGSLQCEDLADDTVLVGGEACSPTARIGGTVDTDWCISFEQILASILTESVLVNFFEKRVDIGLKIKDQKKVERQFSTASDHEQPGVSG

SEQ ID NO: 32346 - protein, 72 aa, Artificial Sequence
  Synthetic polypeptide
KHTRKTFLQADENCVLMFLSDLKGIRKTTETTKECLPQLLRRGRSSPPAQPLPSAAARASVRRRRQPHPRAC

SEQ ID NO: 32347 - protein, 834 aa, Artificial Sequence
  Synthetic polypeptide
RMSSPAPQEGSEQPASPASPLSSRQSFCAQEAPTASQGLLKLFQKNSPMEDLGAKGAKEKMKEESWHIHFFEYGRGVCMYRTAKTRALVLKGIPESLRGELWLLFSGAWNEMVTHPGYYAELVEKSTGKYSLATEEIERDLHRSMPEHPAFQNELGIAALRRVLTAYAFRNPTIGYCQAMNIVTSVLLLYGSEEEAFWLLVALCERMLPDYYNTRVVGALVDQGIFEELTRDFLPQLSEKMQDLGVISSISLSWFLTLFLSVMPFESAVVIVDCFFYEGIKVILQVALAVLDANMEQLLGCSDEGEAMTMLGRYLDNVVNKQSVSPPIPHLRALLSSSDDPPAEVDIFELLKVSYEKFSSLRAEDIEQMRFKQRLKVIQSLEDTAKRSVVRAIPVDIGFSIEELEDLYMVFKAKHLASQYWGCSRTMAGRRDPSLPYLEQYRIDASQFRELFASLTPWACGSHTPLLAGRMFRLLDENKDSLINFKEFVTGMSGMYHGDLTEKLKVLYKLHLPPALSPEEAESALEAAHYFTEDSSSEASPLASDLDLFLPWEAQEALPQEEQEGSGSEERGEEKGTSSPDYRHYLRMWAKEKEAQKETIKDLPKMNQEQFIELCKTLYNMFSEDPMEQDLYHAIATVASLLLRIGEVGKKFSARTGRKPRDCATEEDEPPAPELHQDAARELQPPAAGDPQAKAGGDTHLGKAPQESQVVVEGGSGEGQGSPSQLLSDDETKDDMSMSSYSVVSTGSLQCEDLADDTVLVGGEACSPTARIGGTVDTDWCISFEQILASILTESVLVNFFEKRVDIGLKIKDQKKVERQFSTASDHEQPGVSG

SEQ ID NO: 32348 - protein, 16 aa, Artificial Sequence
  Synthetic polypeptide
DAFWTSHLQNCKICCI

SEQ ID NO: 32349 - protein, 421 aa, Artificial Sequence
  Synthetic polypeptide
ERQGADSPQSLQKEPRSPAYLLRHKMHFGLLTSRTVRYAAFDTVLGINVAVKKLSRPFQNQTHAKRAYRELVLLKCVNHKNIISLLNVFTPQKTLEEFQDVYLVMELMDANLCQVIHMELDHERMSYLLYQMLCGIKHLHSAGIIHRDLKPSNIVVKSDCTLKILDFGLARTACTNFMMTPYVVTRYYRAPEVILGMGYKENVDIWSVGCIMGELVKGCVIFQGTDHIDQWNKVIEQLGTPSAEFMKKLQPTVRNYVENRPKYPGIKFEELFPDWIFPSESERDKIKTSQARDLLSKMLVIDPDKRISVDEALRHPYITVWYDPAEAEAPPPQIYDAQLEEREHAIEEWKELIYKEVMDWEERSKNGVVKDQPSDAAVSSNATPSQSSSINDISSMSTEQTLASDTDSSLDASTGPLEGCR

SEQ ID NO: 32350 - protein, 10 aa, Artificial Sequence
  Synthetic polypeptide
DMLHLIQFLG

SEQ ID NO: 32351 - protein, 379 aa, Artificial Sequence
  Synthetic polypeptide
ERQGADSPQSLQKEPRSPAYLLRHKMHFGLLTSRTVRYAAFDTVLGINVAVKKLSRPFQNQTHAKRAYRELVLLKCVNHKNIISLLNVFTPQKTLEEFQDVYLVMELMDANLCQVIHMELDHERMSYLLYQMLCGIKHLHSAGIIHRDLKPSNIVVKSDCTLKILDFGLARTACTNFMMTPYVVTRYYRAPEVILGMGYKENVDIWSVGCIMGELVKGCVIFQGTDHIDQWNKVIEQLGTPSAEFMKKLQPTVRNYVENRPKYPGIKFEELFPDWIFPSESERDKIKTSQARDLLSKMLVIDPDKRISVDEALRHPYITVWYDPAEAEAPPPQIYDAQLEEREHAIEEWKELIYKEVMDWEERSKNGVVKDQPSAQMQQ

SEQ ID NO: 32352 - protein, 421 aa, Artificial Sequence
  Synthetic polypeptide
ERQGADSPQSLQKEPRSPAYLLRHKMHFGLLTSRTVRYAAFDTVLGINVAVKKLSRPFQNQTHAKRAYRELVLLKCVNHKNIISLLNVFTPQKTLEEFQDVYLVMELMDANLCQVIHMELDHERMSYLLYQMLCGIKHLHSAGIIHRDLKPSNIVVKSDCTLKILDFGLARTACTNFMMTPYVVTRYYRAPEVILGMGYKENVDIWSVGCIMAEMVLHKVLFPGRDYIDQWNKVIEQLGTPSAEFMKKLQPTVRNYVENRPKYPGIKFEELFPDWIFPSESERDKIKTSQARDLLSKMLVIDPDKRISVDEALRHPYITVWYDPAEAEAPPPQIYDAQLEEREHAIEEWKELIYKEVMDWEERSKNGVVKDQPSDAAVSSNATPSQSSSINDISSMSTEQTLASDTDSSLDASTGPLEGCR

SEQ ID NO: 32353 - protein, 379 aa, Artificial Sequence
  Synthetic polypeptide
ERQGADSPQSLQKEPRSPAYLLRHKMHFGLLTSRTVRYAAFDTVLGINVAVKKLSRPFQNQTHAKRAYRELVLLKCVNHKNIISLLNVFTPQKTLEEFQDVYLVMELMDANLCQVIHMELDHERMSYLLYQMLCGIKHLHSAGIIHRDLKPSNIVVKSDCTLKILDFGLARTACTNFMMTPYVVTRYYRAPEVILGMGYKENVDIWSVGCIMAEMVLHKVLFPGRDYIDQWNKVIEQLGTPSAEFMKKLQPTVRNYVENRPKYPGIKFEELFPDWIFPSESERDKIKTSQARDLLSKMLVIDPDKRISVDEALRHPYITVWYDPAEAEAPPPQIYDAQLEEREHAIEEWKELIYKEVMDWEERSKNGVVKDQPSAQMQQ

SEQ ID NO: 32354 - protein, 336 aa, Artificial Sequence
  Synthetic polypeptide
ERQGADSPQSLQKEPRSPAYLLRHKMHFGLLTSRTVRYAAFDTVLGINVAVKKLSRPFQNQTHAKRAYRELVLLKCVNHKNIISLLNVFTPQKTLEEFQDVYLVMELMDANLCQVIHMELDHERMSYLLYQMLCGIKHLHSAGIIHRDLKPSNIVVKSDCTLKILDFGLARTACTNFMMTPYVVTRYYRAPEVILGMGYKENASQARDLLSKMLVIDPDKRISVDEALRHPYITVWYDPAEAEAPPPQIYDAQLEEREHAIEEWKELIYKEVMDWEERSKNGVVKDQPSDAAVSSNATPSQSSSINDISSMSTEQTLASDTDSSLDASTGPLEGCR

SEQ ID NO: 32355 - protein, 41 aa, Artificial Sequence
  Synthetic polypeptide
ERQGADSPQSLQKEPRSPAYLLRHKMHFGLLTSRTVRYAAF

SEQ ID NO: 32356 - protein, 5 aa, Artificial Sequence
  Synthetic polypeptide
DMLHL

SEQ ID NO: 32357 - protein, 239 aa, Artificial Sequence
  Synthetic polypeptide
ERQGADSPQSLQKEPRSPAYLLRHKMHFGLLTSRTVRYAAFDTVLGINVAVKKLSRPFQNQTHAKRAYRELVLLKCVNHKNIISLLNVFTPQKTLEEFQDVYLVMELMDANLCQVIHMELDHERMSYLLYQMLCGIKHLHSAGIIHRDLKPSNIVVKSDCTLKILDFGLARTACTNFMMTPYVVTRYYRAPEVILGMGYKENVDIWSVGCIMGELVKGCVIFQGTDRILPRDLGPAMLS

SEQ ID NO: 32358 - protein, 211 aa, Artificial Sequence
  Synthetic polypeptide
ERQGADSPQSLQKEPRSPAYLLRHKMHFGLLTSRTVRYAAFDTVLGINVAVKKLSRPFQNQTHAKRAYRELVLLKCVNHKNIISLLNVFTPQKTLEEFQDVYLVMELMDANLCQVIHMELDHERMSYLLYQMLCGIKHLHSAGIIHRDLKPSNIVVKSDCTLKILDFGLARTACTNFMMTPYVVTRYYRAPEVILGMGYKENAIKYWTLWH

SEQ ID NO: 32359 - protein, 100 aa, Artificial Sequence
  Synthetic polypeptide
ERQGADSPQSLQKEPRSPAYLLRHKMHFGLLTSRTVRYAAFDTVLGINVAVKKLSRPFQNQTHAKRAYRELVLLKCVNHKNIISLLNVFTPQKTLEEFQD

SEQ ID NO: 32360 - protein, 96 aa, Artificial Sequence
  Synthetic polypeptide
VASLSPLPPLRQQDQPSLPPPQPALREDDEDEDLYDDPLPLNENRAARERGGDSGDSVRWRRGSSWPPKSVYKLGQRNKNRHMRLLWAPVQTAPPL

SEQ ID NO: 32361 - protein, 85 aa, Artificial Sequence
  Synthetic polypeptide
DSRTNPPFLLLSLLYVKMMRMKTFMTIHFHLMKTEQPVSEVETRVIACDGGGGALGHPKVYINLDKETKTGTCGYCGLQFRQHHH

SEQ ID NO: 32362 - protein, 5 aa, Artificial Sequence
  Synthetic polypeptide
KQSSP

SEQ ID NO: 32363 - protein, 76 aa, Artificial Sequence
  Synthetic polypeptide
VASLSPLPPLRQQDQPSLPPPQPALREDDEDEDLYDDPLPLNENRAARERGGDSGDSVRWRRGSSWPPKSVYKLGA

SEQ ID NO: 32364 - protein, 133 aa, Artificial Sequence
  Synthetic polypeptide
DSRTNPPFLLLSLLYVKMMRMKTFMTIHFHLMKTEQPVSEVETRVIACDGGGGALGHPKVYINLVRSWPPVHMLGQPARPHTPLHSQCLFFLSSSLPAPEAALTGFTLLAHSPYSATLQGLHRAACPKTPFQL

SEQ ID NO: 32365 - protein, 20 aa, Artificial Sequence
  Synthetic polypeptide
GLPNCAELCICTPGQGHRCR

SEQ ID NO: 32366 - protein, 660 aa, Artificial Sequence
  Synthetic polypeptide
SSAISSACTSPSWHLVKKVPCFPFAFCHDCKFPEDSPTVLNCAYVLQVKATDADDPTYGNSARVVYSILQGQPYFSIDPKTGVIRTALPNMDREVKEQYQVLIQAKDMGGQLGGLAGTTIVNITLTDVNDNPPRFPKSIFHLKVPESSPIGSAIGRIRAVDPDFGQNAEIEYNIVPGDGGNLFDIVTDEDTQEGVIKLKKPLDFETKKAYTFKVEASNLHLDHRFHSAGPFKDTATVKISVLDVDEPPVFSKPLYTMEVYEDTPVGTIIGAVTAQDLDVGSSAVRYFIDWKSDGDSYFTIDGNEGTIATNELLDRESTAQYNFSIIASKVSNPLLTSKVNILINVLDVNEFPPEISVPYETAVCENAKPGQIIQIVSAADRDLSPAGQQFSFRLSPEAAIKPNFTVRDFRNNTAGIETRRNGYSRRQQELYFLPVVIEDSSYPVQSSTNTMTIRVCRCDSDGTILSCNVEAIFLPVGLSTGALIAILLCIVILLAIVVLYVALRRQKKKDTLMTSKEDIRDNVIHYDDEGGGEEDTQAFDIGALRNPKVIEENKIRRDIKPDSLCLPRQRPPMEDNTDIRDFIHQRLQENDVDPTAPPYDSLATYAYEGSGSVAESLSSIDSLTTEADQDYDYLTDWGPRFKVLADMFGEEESYNPDKVT

SEQ ID NO: 32367 - protein, 74 aa, Artificial Sequence
  Synthetic polypeptide
TVHMYSRSRPQMQMTRPMETVPESFTAFFRDNLISLLIPRQVLLEQLCQTWTEKSKNNIKYSSKPRIWEDSLED

SEQ ID NO: 32368 - protein, 731 aa, Artificial Sequence
  Synthetic polypeptide
NPRDLVYLPDSMARLHSDLDKGEGTVKYTLSGDGAGTVFTIDETTGDIHAIRSLDREEKPFYTLRAQAVDIETRKPLEPESEFIIKVQDINDNEPKFLDGPYVATVPEMSPVGAYVLQVKATDADDPTYGNSARVVYSILQGQPYFSIDPKTGVIRTALPNMDREVKEQYQVLIQAKDMGGQLGGLAGTTIVNITLTDVNDNPPRFPKSIFHLKVPESSPIGSAIGRIRAVDPDFGQNAEIEYNIVPGDGGNLFDIVTDEDTQEGVIKLKKPLDFETKKAYTFKVEASNLHLDHRFHSAGPFKDTATVKISVLDVDEPPVFSKPLYTMEVYEDTPVGTIIGAVTAQDLDVGSSAVRYFIDWKSDGDSYFTIDGNEGTIATNELLDRESTAQYNFSIIASKVSNPLLTSKVNILINVLDVNEFPPEISVPYETAVCENAKPGQIIQIVSAADRDLSPAGQQFSFRLSPEAAIKPNFTVRDFRNNTAGIETRRNGYSRRQQELYFLPVVIEDSSYPVQSSTNTMTIRVCRCDSDGTILSCNVEAIFLPVGLSTGALIAILLCIVILLAIVVLYVALRRQKKKDTLMTSKEDIRDNVIHYDDEGGGEEDTQAFDIGALRNPKVIEENKIRRDIKPDSLCLPRQRPPMEDNTDIRDFIHQRLQENDVDPTAPPYDSLATYAYEGSGSVAESLSSIDSLTTEADQDYDYLTDWGPRFKVLADMFGEEESYNPDKVT

SEQ ID NO: 32369 - protein, 23 aa, Artificial Sequence
  Synthetic polypeptide
NTGIEIQETWFIFLTQWPGSIPT

SEQ ID NO: 32370 - protein, 31 aa, Artificial Sequence
  Synthetic polypeptide
LNGPAPFRLRQGRGHCEIHPLRRWRWHRFYH

SEQ ID NO: 32371 - protein, 691 aa, Artificial Sequence
  Synthetic polypeptide
NPRDLVYLPDSMARLHSDLDKGEGTVKYTLSGDGAGTVFTIDETTGDIHAIRSLDREEKPFYTLRAQAVDIETRKPLEPESEFIIKVQDINDNEPKFLDGPYVATVPEMSPVGVIRTALPNMDREVKEQYQVLIQAKDMGGQLGGLAGTTIVNITLTDVNDNPPRFPKSIFHLKVPESSPIGSAIGRIRAVDPDFGQNAEIEYNIVPGDGGNLFDIVTDEDTQEGVIKLKKPLDFETKKAYTFKVEASNLHLDHRFHSAGPFKDTATVKISVLDVDEPPVFSKPLYTMEVYEDTPVGTIIGAVTAQDLDVGSSAVRYFIDWKSDGDSYFTIDGNEGTIATNELLDRESTAQYNFSIIASKVSNPLLTSKVNILINVLDVNEFPPEISVPYETAVCENAKPGQIIQIVSAADRDLSPAGQQFSFRLSPEAAIKPNFTVRDFRNNTAGIETRRNGYSRRQQELYFLPVVIEDSSYPVQSSTNTMTIRVCRCDSDGTILSCNVEAIFLPVGLSTGALIAILLCIVILLAIVVLYVALRRQKKKDTLMTSKEDIRDNVIHYDDEGGGEEDTQAFDIGALRNPKVIEENKIRRDIKPDSLCLPRQRPPMEDNTDIRDFIHQRLQENDVDPTAPPYDSLATYAYEGSGSVAESLSSIDSLTTEADQDYDYLTDWGPRFKVLADMFGEEESYNPDKVT

SEQ ID NO: 32372 - protein, 357 aa, Artificial Sequence
  Synthetic polypeptide
TPYASAQKVELVAVIEVLTAFNMLINVISGSSYMVHSTQLIENAELRFHTDEQLMTLFMQLQTAVRSRMHPFYITHIRAHTPLPGPLTAGNQMADRLVATAISNARHFHNLTRVNASGLKRRYSSTRKEAKAIIQRCPTCQMVHSSSFTGGVNPRRLEPNSLWEMDVTHVPSFGRLAYVHACVDTFSLWAACQSGESSAYVKRHLLQCFVSMQNHAAVFRVGSVLQEGCGKISKLYGDLKHLKTFDRGMVWNTDLVETLELQNLMLCALQTIYGAEARKESRGAHAREDYKVRIDEYDYSKPIQGQQKKPFEEHWRKHTLSYVDVGTGKVTLEYRPVIDKTLNEADCATVPPAIRSY

SEQ ID NO: 32373 - protein, 62 aa, Artificial Sequence
  Synthetic polypeptide
LMYMHVWTPFHFGLHANQESLLPTLNVTFCSVLCQCKIMLPCSVWEACCKKVVGKSASSMET

SEQ ID NO: 32374 - protein, 92 aa, Artificial Sequence
  Synthetic polypeptide
TSPFAVFCVNAKSCCRVPCGKRVARRLWENQQALWRPKAPEDVRPGNGLEHGPGGDPGAAEPDAVCAADHLRSRGTEGVTGRACQGRLQGAD

SEQ ID NO: 32375 - protein, 57 aa, Artificial Sequence
  Synthetic polypeptide
TASTETSCKDRSRTTGLVERPDNKKLGNSQCKIMLPCSVWEACCKKVVGKSASSMET

SEQ ID NO: 32376 - protein, 167 aa, Artificial Sequence
  Synthetic polypeptide
FSRTSHSGKNESFPETAAAKVKGGKQGLRDTPYAIESHYLNFLSLPKGQILSAAEQHLQKPAAKTEAEQLVWWRDLIIKSWEIVNAKSCCRVPCGKRVARRLWENQQALWRPKAPEDVRPGNGLEHGPGGDPGAAEPDAVCAADHLRSRGTEGVTGRACQGRLQGAD

SEQ ID NO: 32377 - protein, 86 aa, Artificial Sequence
  Synthetic polypeptide
FNVNAKSCCRVPCGKRVARRLWENQQALWRPKAPEDVRPGNGLEHGPGGDPGAAEPDAVCAADHLRSRGTEGVTGRACQGRLQGAD

SEQ ID NO: 32378 - protein, 174 aa, Artificial Sequence
  Synthetic polypeptide
GQIKKLSQMAEENLRKAGQPVTMSNLMSMQNHAAVFRVGSVLQEGCGKISKLYGDLKHLKTFDRGMVWNTDLVETLELQNLMLCALQTIYGAEARKESRGAHAREDYKVRIDEYDYSKPIQGQQKKPFEEHWRKHTLSYVDVGTGKVTLEYRPVIDKTLNEADCATVPPAIRSY

SEQ ID NO: 32379 - protein, 529 aa, Artificial Sequence
  Synthetic polypeptide
AEITPLNSSLGNRHAMMLPVLTHHIRYHQCLMHLDKLIGYTFQDRCLLQLAMTHPSHHLNFGMNPDHARNSLSNCGIRQPKYGDRKVHHMHMRKKGINTLINIMSRLGQDDPTPSRINHNERLEFLGDAVVEFLTSVHLYYLFPSLEEGGLATYRTAIVQNQHLAMLAKKLELDRFMLYAHGPDLCRESDLRHAMANCFEALIGAVYLEGSLEEAKQLFGRLLFNDPDLREVWLNYPLHPLQLQEPNTDRQLIETSPVLQKLTEFEEAIGVIFTHVRLLARAFTLRTVGFNHLTLGHNQRMEFLGDSIMQLVATEYLFIHFPDHHEGHLTLLRSSLVNNRTQAKVAEELGMQEYAITNDKTKRPVALRTKTLADLLESFIAALYIDKDLEYVHTFMNVCFFPRLKEFILNQDWNDPKSQLQQCCLTLRTEGKEPDIPLYKTLQTVGPSHARTYTVAVYFKGERIGCGKGPSIQQAEMGAAMDALEKYNFPQMAHQKRFIERKYRQELKEMRWEREHQEREPDETEDIKK

SEQ ID NO: 32380 - protein, 9 aa, Artificial Sequence
  Synthetic polypeptide
TPAWETDMQ

SEQ ID NO: 32381 - protein, 73 aa, Artificial Sequence
  Synthetic polypeptide
TQEAEVAMSRDHATELQPGKQTCNDATCSDPSYPLPPMPNAFGQVDRIYFPRSLSVAAGHDSSKSSFKFWNES

SEQ ID NO: 32382 - protein, 821 aa, Artificial Sequence
  Synthetic polypeptide
HAYSDPHQININSCDMYLCINTPLSHFRLPFEMNLLDVSSDTLPSTCVKLDSSSSLHIEFEIPLCKVIRFNIDYTIHFIEEMMPENFCVKGLELFSLFLFRDILELYDWNLKGPLFEDSPPCCPRFHFMPRFVRFLPDGGKEVLSMHQILLYLLRCSKALVPEEEIANMLQWEELEWQKYAEECKGMIVTNPGTKPSSVRIDQLDREQFNPDVITFPIIVHFGIRPAQLSYAGDPQYQKLWKSYVKLRHLLANSPKVKQTDKQKLAQREEALQKIRQKNTMRREVTVELSSQGFWKTGIRSDVCQHAMMLPVLTHHIRYHQCLMHLDKLIGYTFQDRCLLQLAMTHPSHHLNFGMNPDHARNSLSNCGIRQPKYGDRKVHHMHMRKKGINTLINIMSRLGQDDPTPSRINHNERLEFLGDAVVEFLTSVHLYYLFPSLEEGGLATYRTAIVQNQHLAMLAKKLELDRFMLYAHGPDLCRESDLRHAMANCFEALIGAVYLEGSLEEAKQLFGRLLFNDPDLREVWLNYPLHPLQLQEPNTDRQLIETSPVLQKLTEFEEAIGVIFTHVRLLARAFTLRTVGFNHLTLGHNQRMEFLGDSIMQLVATEYLFIHFPDHHEGHLTLLRSSLVNNRTQAKVAEELGMQEYAITNDKTKRPVALRTKTLADLLESFIAALYIDKDLEYVHTFMNVCFFPRLKEFILNQDWNDPKSQLQQCCLTLRTEGKEPDIPLYKTLQTVGPSHARTYTVAVYFKGERIGCGKGPSIQQAEMGAAMDALEKYNFPQMAHQKRFIERKYRQELKEMRWEREHQEREPDETEDIKK

SEQ ID NO: 32383 - protein, 16 aa, Artificial Sequence
  Synthetic polypeptide
TRHLPCILNLRFHCVK

SEQ ID NO: 32384 - protein, 9 aa, Artificial Sequence
  Synthetic polypeptide
PGQHALTSS

SEQ ID NO: 32385 - protein, 369 aa, Artificial Sequence
  Synthetic polypeptide
KFKTSLGNMPLRRPDSSDDRYVMTKHATIYPTEEELQAVQKIVSITERALKLVSDSLSEHEKNKNKEGDDKKEGGKDRALKGVLRVGVLAKGLLLRGDRNVNLVLLCSEKPSKTLLSRIAENLPKQLAVISPEKYDIKCAVSEAAIILNSCVEPKMQVTITLTSPIIREENMREGDVTSGMVKDPPDVLDRQKCLDALAALRHAKWFQARANGLQSCVIIIRILRDLCQRVPTWSDFPSWAMELLVEKAISSASSPQSPGDALRRVFECISSGIILKGSPGLLDPCEKDPFDTLATMTDQQREDITSSAQFALRLLAFRQIHKVLGMDPLPQMSQRFNIHNNRKRRRDSDGVDGFEAEGKKDKKDYDNF

SEQ ID NO: 32386 - protein, 37 aa, Artificial Sequence
  Synthetic polypeptide
SQYFRKTKVKGWLGARSSRLAWATCPYVVLTHLMTVM

SEQ ID NO: 32387 - protein, 176 aa, Artificial Sequence
  Synthetic polypeptide
KFKTSLGNMPLRRPDSSDDRYVMTKHATIYPTEEELQAVQKIVSITERALKLVSDSLSEHEKNKNKEGDDKKEGGKDRALKGVLRVGVLAKGLLLRGDRNVNLVLLCSEKPSKTLLSRIAENLPKQLAVISPEKYDIKCAVSEAAIILNSCVEPKMQVTITLTSPIIREENMREGG

SEQ ID NO: 32388 - protein, 33 aa, Artificial Sequence
  Synthetic polypeptide
SVALPHSHTHSLLSPCEEGACFPLAFCHDHWCW

SEQ ID NO: 32389 - protein, 742 aa, Artificial Sequence
  Synthetic polypeptide
VLTKADDFKVWHFLILTRTPSCHLVKKVPASLLPSAMIIGAGEEKQKEGGKKKNKEGSGDGGRAELNPWPEYIYTRLEMYNILKAEHDSILAEKAEKDSKPIKVTLPDGKQVDAESWKTTPYQIACGISQGLADNTVIAKVNNVVWDLDRPLEEDCTLELLKFEDEEAQAVYWHSSAHIMGEAMERVYGGCLCYGPPIENGFYYDMYLEEGGVSSNDFSSLEALCKKIIKEKQAFERLEVKKETLLAMFKYNKFKCRILNEKVNTPTTTVYRCGPLIDLCRGPHVRHTGKIKALKIHKNSSTYWEGKADMETLQRIYGISFPDPKMLKEWEKFQEEAKNRDHRKIGRDQELYFFHELSPGSCFFLPKGAYIYNALIEFIRSEYRKRGFQEVVTPNIFNSRLWMTSGHWQHYSENMFSFEVEKELFALKPMNCPGHCLMFDHRPRSWRELPLRLADFGVLHRNELSGALTGLTRVRRFQQDDAHIFCAMEQIEDEIKGCLDFLRTVYSVFGFSFKLNLSTRPEKFLGDIEVWDQAEKQLENSLNEFGEKWELNSGDGAFYGPKIDIQIKDAIGRYHQCATIQLDFQLPIRFNLTYVSHDGDDKKRPVIVHRAILGSVERMIAILTENYGGKWPFWLSPRQVMVVPVGPTCDEYAQKVRQQFHDAKFMADIDLDPGCTLNKKIRNAQLAQYNFILVVGEKEKISGTVNIRTRDNKVHGERTISETIERLQQLKEFRSKQAEEEF

SEQ ID NO: 32390 - protein, 148 aa, Artificial Sequence
  Synthetic polypeptide
VLTKADDFKVWHFLILTRTPSCHLVKKVPASLLPSAMIIGAGEEKQKEGGKKKNKEGSGDGGRAELNPWPEYIYTRLEMYNILKAEHDSILAEKAEKDSKPIKVTLPDGKQVDAESWKTTPYQIACGISQGLADNTVIAKVNNVVWDL

SEQ ID NO: 32391 - protein, 75 aa, Artificial Sequence
  Synthetic polypeptide
VLTKADDFKVWHFLILTRTPSCHLVKKVPASLLPSAMIIGAGEEKQKEGGKKKNKEGSGDGGRAESRPGRQHRYC

SEQ ID NO: 32392 - protein, 775 aa, Artificial Sequence
  Synthetic polypeptide
VLTKADDFKVWHFLILTRTPSCHLVKKVPASLLPSAMIIGAGEEKQKEGGKKKNKEGSGDGGRAELNPWPEYIYTRLEMYNILKAEHDSILAEKAEKDSKPIKVTLPDGKQVDAESWKTTPYQIACGISHTASCKNLSSLASLLASVAIPSSGMPWPPLFFLQGLADNTVIAKVNNVVWDLDRPLEEDCTLELLKFEDEEAQAVYWHSSAHIMGEAMERVYGGCLCYGPPIENGFYYDMYLEEGGVSSNDFSSLEALCKKIIKEKQAFERLEVKKETLLAMFKYNKFKCRILNEKVNTPTTTVYRCGPLIDLCRGPHVRHTGKIKALKIHKNSSTYWEGKADMETLQRIYGISFPDPKMLKEWEKFQEEAKNRDHRKIGRDQELYFFHELSPGSCFFLPKGAYIYNALIEFIRSEYRKRGFQEVVTPNIFNSRLWMTSGHWQHYSENMFSFEVEKELFALKPMNCPGHCLMFDHRPRSWRELPLRLADFGVLHRNELSGALTGLTRVRRFQQDDAHIFCAMEQIEDEIKGCLDFLRTVYSVFGFSFKLNLSTRPEKFLGDIEVWDQAEKQLENSLNEFGEKWELNSGDGAFYGPKIDIQIKDAIGRYHQCATIQLDFQLPIRFNLTYVSHDGDDKKRPVIVHRAILGSVERMIAILTENYGGKWPFWLSPRQVMVVPVGPTCDEYAQKVRQQFHDAKFMADIDLDPGCTLNKKIRNAQLAQYNFILVVGEKEKISGTVNIRTRDNKVHGERTISETIERLQQLKEFRSKQAEEEF

SEQ ID NO: 32393 - protein, 150 aa, Artificial Sequence
  Synthetic polypeptide
VLTKADDFKVWHFLILTRTPSCHLVKKVPASLLPSAMIIGAGEEKQKEGGKKKNKEGSGDGGRAELNPWPEYIYTRLEMYNILKAEHDSILAEKAEKDSKPIKVTLPDGKQVDAESWKTTPYQIACGISHGKSLWWMFMLRSANRKWILL

SEQ ID NO: 32394 - protein, 74 aa, Artificial Sequence
  Synthetic polypeptide
VLTKADDFKVWHFLILTRTPSCHLVKKVPASLLPSAMIIGAGEEKQKEGGKKKNKEGSGDGGRAERLTQRVSAE

SEQ ID NO: 32395 - protein, 137 aa, Artificial Sequence
  Synthetic polypeptide
VLTKADDFKVWHFLILTRTPSCHLVKKVPASLLPSAMIIGAGEEKQKEGGKKKNKEGSGDGGRAELNPWPEYIYTRLEMYNILKAEHDSILAEKAEKDSKPIKVTLPDGKQVDAESWKTTPYQIACGIRPGRQHRYC

SEQ ID NO: 32396 - protein, 85 aa, Artificial Sequence
  Synthetic polypeptide
VLTKADDFKVWHFLILTRTPSCHLVKKVPASLLPSAMIIGAGEEKQKEGGKKKNKEGSGDGGRAEGNLQVLFISAITETDTEGIC

SEQ ID NO: 32397 - protein, 40 aa, Artificial Sequence
  Synthetic polypeptide
ILLAMLPVKPAELLVLVKRSKRKEAKRRTKKDLEMEVELS

SEQ ID NO: 32398 - protein, 13 aa, Artificial Sequence
  Synthetic polypeptide
PCFLLSLQNYWCW

SEQ ID NO: 32399 - protein, 708 aa, Artificial Sequence
  Synthetic polypeptide
ACRTIGAGEEKQKEGGKKKNKEGSGDGGRAELNPWPEYIYTRLEMYNILKAEHDSILAEKAEKDSKPIKVTLPDGKQVDAESWKTTPYQIACGISQGLADNTVIAKVNNVVWDLDRPLEEDCTLELLKFEDEEAQAVYWHSSAHIMGEAMERVYGGCLCYGPPIENGFYYDMYLEEGGVSSNDFSSLEALCKKIIKEKQAFERLEVKKETLLAMFKYNKFKCRILNEKVNTPTTTVYRCGPLIDLCRGPHVRHTGKIKALKIHKNSSTYWEGKADMETLQRIYGISFPDPKMLKEWEKFQEEAKNRDHRKIGRDQELYFFHELSPGSCFFLPKGAYIYNALIEFIRSEYRKRGFQEVVTPNIFNSRLWMTSGHWQHYSENMFSFEVEKELFALKPMNCPGHCLMFDHRPRSWRELPLRLADFGVLHRNELSGALTGLTRVRRFQQDDAHIFCAMEQIEDEIKGCLDFLRTVYSVFGFSFKLNLSTRPEKFLGDIEVWDQAEKQLENSLNEFGEKWELNSGDGAFYGPKIDIQIKDAIGRYHQCATIQLDFQLPIRFNLTYVSHDGDDKKRPVIVHRAILGSVERMIAILTENYGGKWPFWLSPRQVMVVPVGPTCDEYAQKVRQQFHDAKFMADIDLDPGCTLNKKIRNAQLAQYNFILVVGEKEKISGTVNIRTRDNKVHGERTISETIERLQQLKEFRSKQAEEEF

SEQ ID NO: 32400 - protein, 114 aa, Artificial Sequence
  Synthetic polypeptide
ACRTIGAGEEKQKEGGKKKNKEGSGDGGRAELNPWPEYIYTRLEMYNILKAEHDSILAEKAEKDSKPIKVTLPDGKQVDAESWKTTPYQIACGISQGLADNTVIAKVNNVVWDL

SEQ ID NO: 32401 - protein, 50 aa, Artificial Sequence
  Synthetic polypeptide
ILLAMLPVKPAELLVLVKRSKRKEAKRRTKKDLEMEVELSQGLADNTVIA

SEQ ID NO: 32402 - protein, 41 aa, Artificial Sequence
  Synthetic polypeptide
ACRTIGAGEEKQKEGGKKKNKEGSGDGGRAESRPGRQHRYC

SEQ ID NO: 32403 - protein, 741 aa, Artificial Sequence
  Synthetic polypeptide
ACRTIGAGEEKQKEGGKKKNKEGSGDGGRAELNPWPEYIYTRLEMYNILKAEHDSILAEKAEKDSKPIKVTLPDGKQVDAESWKTTPYQIACGISHTASCKNLSSLASLLASVAIPSSGMPWPPLFFLQGLADNTVIAKVNNVVWDLDRPLEEDCTLELLKFEDEEAQAVYWHSSAHIMGEAMERVYGGCLCYGPPIENGFYYDMYLEEGGVSSNDFSSLEALCKKIIKEKQAFERLEVKKETLLAMFKYNKFKCRILNEKVNTPTTTVYRCGPLIDLCRGPHVRHTGKIKALKIHKNSSTYWEGKADMETLQRIYGISFPDPKMLKEWEKFQEEAKNRDHRKIGRDQELYFFHELSPGSCFFLPKGAYIYNALIEFIRSEYRKRGFQEVVTPNIFNSRLWMTSGHWQHYSENMFSFEVEKELFALKPMNCPGHCLMFDHRPRSWRELPLRLADFGVLHRNELSGALTGLTRVRRFQQDDAHIFCAMEQIEDEIKGCLDFLRTVYSVFGFSFKLNLSTRPEKFLGDIEVWDQAEKQLENSLNEFGEKWELNSGDGAFYGPKIDIQIKDAIGRYHQCATIQLDFQLPIRFNLTYVSHDGDDKKRPVIVHRAILGSVERMIAILTENYGGKWPFWLSPRQVMVVPVGPTCDEYAQKVRQQFHDAKFMADIDLDPGCTLNKKIRNAQLAQYNFILVVGEKEKISGTVNIRTRDNKVHGERTISETIERLQQLKEFRSKQAEEEF

SEQ ID NO: 32404 - protein, 116 aa, Artificial Sequence
  Synthetic polypeptide
ACRTIGAGEEKQKEGGKKKNKEGSGDGGRAELNPWPEYIYTRLEMYNILKAEHDSILAEKAEKDSKPIKVTLPDGKQVDAESWKTTPYQIACGISHGKSLWWMFMLRSANRKWILL

SEQ ID NO: 32405 - protein, 41 aa, Artificial Sequence
  Synthetic polypeptide
ILLAMLPVKPAELLVLVKRSKRKEAKRRTKKDLEMEVELRD

SEQ ID NO: 32406 - protein, 40 aa, Artificial Sequence
  Synthetic polypeptide
ACRTIGAGEEKQKEGGKKKNKEGSGDGGRAERLTQRVSAE

SEQ ID NO: 32407 - protein, 103 aa, Artificial Sequence
  Synthetic polypeptide
ACRTIGAGEEKQKEGGKKKNKEGSGDGGRAELNPWPEYIYTRLEMYNILKAEHDSILAEKAEKDSKPIKVTLPDGKQVDAESWKTTPYQIACGIRPGRQHRYC

SEQ ID NO: 32408 - protein, 60 aa, Artificial Sequence
  Synthetic polypeptide
ILLAMLPVKPAELLVLVKRSKRKEAKRRTKKDLEMEVELRATCRFYSSLQSQRLTQRVSA

SEQ ID NO: 32409 - protein, 51 aa, Artificial Sequence
  Synthetic polypeptide
ACRTIGAGEEKQKEGGKKKNKEGSGDGGRAEGNLQVLFISAITETDTEGIC

SEQ ID NO: 32410 - protein, 914 aa, Artificial Sequence
  Synthetic polypeptide
EKNQPLLFVFLLSLLNMKTTRMKVFMRIHFCLMNSYVDIGLIPKGARDIRVMEIEGAGNFLAIRSEDPEKYYLNGGFIIQWNGNYKLAGTVFQYDRKGDLEKLMATGPTNESVWIQLLFQVTNPGIKYEYTIQKDGLDNDVEQQMYFWQYGHWTECSVTCGTGIRRQTAHCIKKGRGMVKATFCDPETQPNGRQKKCHEKACPPRWWAGEWEACSATCGPHGEKKRTVLCIQTMVSDEQALPPTDCQHLLKPKTLLSCNRDILCPSDWTVGNWSECSVSCGGGVRIRSVTCAKNHDEPCDVTRKPNSRALCGLQQCPSSRRVLKPNKGTISNGKNPPTLKPVPPPTSRPRMLTTPTGPESMSTSTPAISSPSPTTASKEGDLGGKQWQDSSTQPELSSRYLISTGSTSQPILTSQSLSIQPSEENVSSSDTGPTSEGGLVATTTSGSGLSSSRNPITWPVTPFYNTLTKGPEMEIHSGSGEEREQPEDKDESNPVIWTKIRVPGNDAPVESTEMPLAPPLTPDLSRESWWPPFSTVMEGLLPSQRPTTSETGTPRVEGMVTEKPANTLLPLGGDHQPEPSGKTANRNHLKLPNNMNQTKSSEPVLTEEDATSLITEGFLLNASNYKQLTNGHGSAHWIVGNWSECSTTCGLGAYWRRVECSTQMDSDCAAIQRPDPAKRCHLRPCAGWKVGNWSKCSRNCSGGFKIREIQCVDSRDHRNLRPFHCQFLAGIPPPLSMSCNPEPCEAWQVEPWSQCSRSCGGGVQERGVFCPGGLCDWTKRPTSTMSCNEHLCCHWATGNWDLCSTSCGGGFQKRTVQCVPSEGNKTEDQDQCLCDHKPRPPEFKKCNQQACKKSADLLCTKDKLSASFCQTLKAMKKCSVPTVRAECCFSCPQTHITHTQRQRRQRLLQKSKEL

SEQ ID NO: 32411 - protein, 15 aa, Artificial Sequence
  Synthetic polypeptide
IVMLTLGSFQKEQGT

SEQ ID NO: 32412 - protein, 1458 aa, Artificial Sequence
  Synthetic polypeptide
ETQFLHLNERGWDTCPAPFYRVMGRTKTGFFQLPHGDFFIEPVKKHPLVEGGYHPHIVYRRQKVPETKEPTCGLKDSVNISQKQELWREKWERHNLPSRSLSRRSISKERWVETLVVADTKMIEYHGSENVESYILTIMNMVTGLFHNPSIGNAIHIVVVRLILLEEEEQGLKIVHHAEKTLSSFCKWQKSINPKSDLNPVHHDVAVLLTRKDICAGFNRPCETLGLSHLSGMCQPHRSCNINEDSGLPLAFTIAHELGHSFGIQHDGKENDCEPVGRHPYIMSRQLQYDPTPLTWSKCSEEYITRFLDRGWGFCLDDIPKKKGLKSKVIAPGVIYDVHHQCQLQYGPNATFCQEVENVCQTLWCSVKGFCRSKLDAAADGTQCGEKKWCMAGKCITVGKKPESIPGGWGRWSPWSHCSRTCGAGVQSAERLCNNPEPKFGGKYCTGERKRYRLCNVHPCRSEAPTFRQMQCSEFDTVPYKNELYHWFPIFNPAHPCELYCRPIDGQFSEKMLDAVIDGTPCFEGGNSRNVCINGICKMVGCDYEIDSNATEDRCGVCLGDGSSCQTVRKMFKQKEGSGYVDIGLIPKGARDIRVMEIEGAGNFLAIRSEDPEKYYLNGGFIIQWNGNYKLAGTVFQYDRKGDLEKLMATGPTNESVWIQLLFQVTNPGIKYEYTIQKDGLDNDVEQQMYFWQYGHWTECSVTCGTGIRRQTAHCIKKGRGMVKATFCDPETQPNGRQKKCHEKACPPRWWAGEWEACSATCGPHGEKKRTVLCIQTMVSDEQALPPTDCQHLLKPKTLLSCNRDILCPSDWTVGNWSECSVSCGGGVRIRSVTCAKNHDEPCDVTRKPNSRALCGLQQCPSSRRVLKPNKGTISNGKNPPTLKPVPPPTSRPRMLTTPTGPESMSTSTPAISSPSPTTASKEGDLGGKQWQDSSTQPELSSRYLISTGSTSQPILTSQSLSIQPSEENVSSSDTGPTSEGGLVATTTSGSGLSSSRNPITWPVTPFYNTLTKGPEMEIHSGSGEEREQPEDKDESNPVIWTKIRVPGNDAPVESTEMPLAPPLTPDLSRESWWPPFSTVMEGLLPSQRPTTSETGTPRVEGMVTEKPANTLLPLGGDHQPEPSGKTANRNHLKLPNNMNQTKSSEPVLTEEDATSLITEGFLLNASNYKQLTNGHGSAHWIVGNWSECSTTCGLGAYWRRVECSTQMDSDCAAIQRPDPAKRCHLRPCAGWKVGNWSKCSRNCSGGFKIREIQCVDSRDHRNLRPFHCQFLAGIPPPLSMSCNPEPCEAWQVEPWSQCSRSCGGGVQERGVFCPGGLCDWTKRPTSTMSCNEHLCCHWATGNWDLCSTSCGGGFQKRTVQCVPSEGNKTEDQDQCLCDHKPRPPEFKKCNQQACKKSADLLCTKDKLSASFCQTLKAMKKCSVPTVRAECCFSCPQTHITHTQRQRRQRLLQKSKEL

SEQ ID NO: 32413 - protein, 35 aa, Artificial Sequence
  Synthetic polypeptide
TKEDGIPAQPLFTELWEEQRLDFSNYHMETFSLNP

SEQ ID NO: 32414 - protein, 39 aa, Artificial Sequence
  Synthetic polypeptide
NSVSASERKRMGYLPSPFLQSYGKNKDWIFPTTTWRLFH

SEQ ID NO: 32415 - protein, 1373 aa, Artificial Sequence
  Synthetic polypeptide
ETQFLHLNERGWDTCPAPFYRVMGRTKTGFFQLPHGDFFIEPVKKHPLVEGGYHPHIVYRRQKVPETKEPTCGLKDSVNISQKQELWREKWERHNLPSRSLSRRSISKERWVETLVVADTKMIEYHGSENVESYILTIMNMVTGLFHNPSIGNAIHIVVVRLILLEEEEQGLKIVHHAEKTLSSFCKWQKSINPKSDLNPVHHDVAVLLTRKDICAGFNRPCETLGLSHLSGMCQPHRSCNINEDSGLPLAFTIAHELGHSFGIQHDGKENDCEPVGRHPYIMSRQLQYDPTPLTWSKCSEEYITRFLDRGWGFCLDDIPKKKGLKSKVIAPGVIYDVHHQCQLQYGPNATFCQEVENVCQTLWCSVKGFCRSKLDAAADGTQCGEKKWCMAGKCITVGKKPESIPGGWGRWSPWSHCSRTCGAGVQSAERLCNNPEPKFGGKYCTGERKRYRLCNVHPCRSEAPTFRQMQCSEFDTVPYKNELYHWFPIFNPGYVDIGLIPKGARDIRVMEIEGAGNFLAIRSEDPEKYYLNGGFIIQWNGNYKLAGTVFQYDRKGDLEKLMATGPTNESVWIQLLFQVTNPGIKYEYTIQKDGLDNDVEQQMYFWQYGHWTECSVTCGTGIRRQTAHCIKKGRGMVKATFCDPETQPNGRQKKCHEKACPPRWWAGEWEACSATCGPHGEKKRTVLCIQTMVSDEQALPPTDCQHLLKPKTLLSCNRDILCPSDWTVGNWSECSVSCGGGVRIRSVTCAKNHDEPCDVTRKPNSRALCGLQQCPSSRRVLKPNKGTISNGKNPPTLKPVPPPTSRPRMLTTPTGPESMSTSTPAISSPSPTTASKEGDLGGKQWQDSSTQPELSSRYLISTGSTSQPILTSQSLSIQPSEENVSSSDTGPTSEGGLVATTTSGSGLSSSRNPITWPVTPFYNTLTKGPEMEIHSGSGEEREQPEDKDESNPVIWTKIRVPGNDAPVESTEMPLAPPLTPDLSRESWWPPFSTVMEGLLPSQRPTTSETGTPRVEGMVTEKPANTLLPLGGDHQPEPSGKTANRNHLKLPNNMNQTKSSEPVLTEEDATSLITEGFLLNASNYKQLTNGHGSAHWIVGNWSECSTTCGLGAYWRRVECSTQMDSDCAAIQRPDPAKRCHLRPCAGWKVGNWSKCSRNCSGGFKIREIQCVDSRDHRNLRPFHCQFLAGIPPPLSMSCNPEPCEAWQVEPWSQCSRSCGGGVQERGVFCPGGLCDWTKRPTSTMSCNEHLCCHWATGNWDLCSTSCGGGFQKRTVQCVPSEGNKTEDQDQCLCDHKPRPPEFKKCNQQACKKSADLLCTKDKLSASFCQTLKAMKKCSVPTVRAECCFSCPQTHITHTQRQRRQRLLQKSKEL

SEQ ID NO: 32416 - protein, 96 aa, Artificial Sequence
  Synthetic polypeptide
ETQFLHLNERGWDTCPAPFYRVMGRTKTGFFQLPHGDFFIEPVKKHPLVEGGYHPHIVYRRQKVPETKEPTCGLKGIVTHMSSWVEESVLFFWLFY

SEQ ID NO: 32417 - protein, 52 aa, Artificial Sequence
  Synthetic polypeptide
SMFMNVRITVIFGIGDDQEVCEGSFSVGQNILFLILRLDFSNYHMETFSLNP

SEQ ID NO: 32418 - protein, 1446 aa, Artificial Sequence
  Synthetic polypeptide
RKLLCWTEYSLFDLETGFFQLPHGDFFIEPVKKHPLVEGGYHPHIVYRRQKVPETKEPTCGLKDSVNISQKQELWREKWERHNLPSRSLSRRSISKERWVETLVVADTKMIEYHGSENVESYILTIMNMVTGLFHNPSIGNAIHIVVVRLILLEEEEQGLKIVHHAEKTLSSFCKWQKSINPKSDLNPVHHDVAVLLTRKDICAGFNRPCETLGLSHLSGMCQPHRSCNINEDSGLPLAFTIAHELGHSFGIQHDGKENDCEPVGRHPYIMSRQLQYDPTPLTWSKCSEEYITRFLDRGWGFCLDDIPKKKGLKSKVIAPGVIYDVHHQCQLQYGPNATFCQEVENVCQTLWCSVKGFCRSKLDAAADGTQCGEKKWCMAGKCITVGKKPESIPGGWGRWSPWSHCSRTCGAGVQSAERLCNNPEPKFGGKYCTGERKRYRLCNVHPCRSEAPTFRQMQCSEFDTVPYKNELYHWFPIFNPAHPCELYCRPIDGQFSEKMLDAVIDGTPCFEGGNSRNVCINGICKMVGCDYEIDSNATEDRCGVCLGDGSSCQTVRKMFKQKEGSGYVDIGLIPKGARDIRVMEIEGAGNFLAIRSEDPEKYYLNGGFIIQWNGNYKLAGTVFQYDRKGDLEKLMATGPTNESVWIQLLFQVTNPGIKYEYTIQKDGLDNDVEQQMYFWQYGHWTECSVTCGTGIRRQTAHCIKKGRGMVKATFCDPETQPNGRQKKCHEKACPPRWWAGEWEACSATCGPHGEKKRTVLCIQTMVSDEQALPPTDCQHLLKPKTLLSCNRDILCPSDWTVGNWSECSVSCGGGVRIRSVTCAKNHDEPCDVTRKPNSRALCGLQQCPSSRRVLKPNKGTISNGKNPPTLKPVPPPTSRPRMLTTPTGPESMSTSTPAISSPSPTTASKEGDLGGKQWQDSSTQPELSSRYLISTGSTSQPILTSQSLSIQPSEENVSSSDTGPTSEGGLVATTTSGSGLSSSRNPITWPVTPFYNTLTKGPEMEIHSGSGEEREQPEDKDESNPVIWTKIRVPGNDAPVESTEMPLAPPLTPDLSRESWWPPFSTVMEGLLPSQRPTTSETGTPRVEGMVTEKPANTLLPLGGDHQPEPSGKTANRNHLKLPNNMNQTKSSEPVLTEEDATSLITEGFLLNASNYKQLTNGHGSAHWIVGNWSECSTTCGLGAYWRRVECSTQMDSDCAAIQRPDPAKRCHLRPCAGWKVGNWSKCSRNCSGGFKIREIQCVDSRDHRNLRPFHCQFLAGIPPPLSMSCNPEPCEAWQVEPWSQCSRSCGGGVQERGVFCPGGLCDWTKRPTSTMSCNEHLCCHWATGNWDLCSTSCGGGFQKRTVQCVPSEGNKTEDQDQCLCDHKPRPPEFKKCNQQACKKSADLLCTKDKLSASFCQTLKAMKKCSVPTVRAECCFSCPQTHITHTQRQRRQRLLQKSKEL

SEQ ID NO: 32419 - protein, 1361 aa, Artificial Sequence
  Synthetic polypeptide
RKLLCWTEYSLFDLETGFFQLPHGDFFIEPVKKHPLVEGGYHPHIVYRRQKVPETKEPTCGLKDSVNISQKQELWREKWERHNLPSRSLSRRSISKERWVETLVVADTKMIEYHGSENVESYILTIMNMVTGLFHNPSIGNAIHIVVVRLILLEEEEQGLKIVHHAEKTLSSFCKWQKSINPKSDLNPVHHDVAVLLTRKDICAGFNRPCETLGLSHLSGMCQPHRSCNINEDSGLPLAFTIAHELGHSFGIQHDGKENDCEPVGRHPYIMSRQLQYDPTPLTWSKCSEEYITRFLDRGWGFCLDDIPKKKGLKSKVIAPGVIYDVHHQCQLQYGPNATFCQEVENVCQTLWCSVKGFCRSKLDAAADGTQCGEKKWCMAGKCITVGKKPESIPGGWGRWSPWSHCSRTCGAGVQSAERLCNNPEPKFGGKYCTGERKRYRLCNVHPCRSEAPTFRQMQCSEFDTVPYKNELYHWFPIFNPGYVDIGLIPKGARDIRVMEIEGAGNFLAIRSEDPEKYYLNGGFIIQWNGNYKLAGTVFQYDRKGDLEKLMATGPTNESVWIQLLFQVTNPGIKYEYTIQKDGLDNDVEQQMYFWQYGHWTECSVTCGTGIRRQTAHCIKKGRGMVKATFCDPETQPNGRQKKCHEKACPPRWWAGEWEACSATCGPHGEKKRTVLCIQTMVSDEQALPPTDCQHLLKPKTLLSCNRDILCPSDWTVGNWSECSVSCGGGVRIRSVTCAKNHDEPCDVTRKPNSRALCGLQQCPSSRRVLKPNKGTISNGKNPPTLKPVPPPTSRPRMLTTPTGPESMSTSTPAISSPSPTTASKEGDLGGKQWQDSSTQPELSSRYLISTGSTSQPILTSQSLSIQPSEENVSSSDTGPTSEGGLVATTTSGSGLSSSRNPITWPVTPFYNTLTKGPEMEIHSGSGEEREQPEDKDESNPVIWTKIRVPGNDAPVESTEMPLAPPLTPDLSRESWWPPFSTVMEGLLPSQRPTTSETGTPRVEGMVTEKPANTLLPLGGDHQPEPSGKTANRNHLKLPNNMNQTKSSEPVLTEEDATSLITEGFLLNASNYKQLTNGHGSAHWIVGNWSECSTTCGLGAYWRRVECSTQMDSDCAAIQRPDPAKRCHLRPCAGWKVGNWSKCSRNCSGGFKIREIQCVDSRDHRNLRPFHCQFLAGIPPPLSMSCNPEPCEAWQVEPWSQCSRSCGGGVQERGVFCPGGLCDWTKRPTSTMSCNEHLCCHWATGNWDLCSTSCGGGFQKRTVQCVPSEGNKTEDQDQCLCDHKPRPPEFKKCNQQACKKSADLLCTKDKLSASFCQTLKAMKKCSVPTVRAECCFSCPQTHITHTQRQRRQRLLQKSKEL

SEQ ID NO: 32420 - protein, 84 aa, Artificial Sequence
  Synthetic polypeptide
RKLLCWTEYSLFDLETGFFQLPHGDFFIEPVKKHPLVEGGYHPHIVYRRQKVPETKEPTCGLKGIVTHMSSWVEESVLFFWLFY

SEQ ID NO: 32421 - protein, 57 aa, Artificial Sequence
  Synthetic polypeptide
KYSQGNDIKVTAESTGEHASSLPLPLHQPPHWMDSLPVQHAVLHRFHGPDCVPRGSL

SEQ ID NO: 32422 - protein, 249 aa, Artificial Sequence
  Synthetic polypeptide
ITEYLYDNIHAVIKNTRRAMTLKSLLRALVNMPPHYRYLCISHLIGWTAFLSNMLFFTDFMGQIVYRGDPYSAHNSTEFLIYERGVEVGCWGLCINSVFSSLYSYFQKVLVSYIGLKGLYFTGYLLFGLGTGFIGLFPNVYSTLVLCSLFGVMSSTLYTVPFNLITEYHREEEKERQQAPGGDPDNSVRGKGMDCATLTCMVQLAQILVGGGLGFLVNTAGTVVVVVITASAVALIGCCFVALFVRYVD

SEQ ID NO: 32423 - protein, 19 aa, Artificial Sequence
  Synthetic polypeptide
SRNIYMITFMRSLKILAGQ

SEQ ID NO: 32424 - protein, 179 aa, Artificial Sequence
  Synthetic polypeptide
ITEYLYDNIHAVIKNTRRAMTLKSLLRALVNMPPHYRYLCISHLIGWTAFLSNMLFFTDFMGQIVYRGDPYSAHNSTEFLIYERGVEVGCWGLCINSVFSSLYSYFQKVLVSYIGLKGLYFTGYLLFGLGTGFIGLFPNVYSTLVLCSLFGVMSSTLYTVPFNLITEYHREEEKEVCCH

SEQ ID NO: 32425 - protein, 140 aa, Artificial Sequence
  Synthetic polypeptide
ITEYLYDNIHAVIKNTRRAMTLKSLLRALVNMPPHYRYLCISHLIGWTAFLSNMLFFTDFMGQIVYRGDPYSAHNSTEFLIYERGVEVGCWGLCINSVFSSLYSYFQKVLVSYIGLKGLYFTGYLLFGLGTGFIGLFPNV

SEQ ID NO: 32426 - protein, 71 aa, Artificial Sequence
  Synthetic polypeptide
ITEYLYDNIHAVIKNTRRAMTLKSLLRALVNMPPHYRYLCISHLIGWTAFLSNMLFFTDFMGQIVYRGDPY

SEQ ID NO: 32427 - protein, 125 aa, Artificial Sequence
  Synthetic polypeptide
ITEYLYDNIHAVIKNTRRAMTLKSLLRALVNMPPHYRYLCISHLIGWTAFLSNMLFFTDFMGQIVYRGDPYSAHNSTEFLIYERGVEVGCWGLCINSVFSSLYSCKSFSLLRMSSKSFWSSTTWI

SEQ ID NO: 32428 - protein, 396 aa, Artificial Sequence
  Synthetic polypeptide
LTGYLFIYHLSLSLLLFFLSGCLSHLEHQSQLSRPVVLFSDESSVPGSVCCIVGFGGALGYLLGAIDWAHLELGRLLGTEFQVMFFFSALVLTLCFTVHLCSISEAPLTEVAKGIPPQQTPQDPPLSSDGMYEYGSIEKVKNGYVNPELAMQGAKNKNHAEQTRRAMTLKSLLRALVNMPPHYRYLCISHLIGWTAFLSNMLFFTDFMGQIVYRGDPYSAHNSTEFLIYERGVEVGCWGLCINSVFSSLYSYFQKVLVSYIGLKGLYFTGYLLFGLGTGFIGLFPNVYSTLVLCSLFGVMSSTLYTVPFNLITEYHREEEKERQQAPGGDPDNSVRGKGMDCATLTCMVQLAQILVGGGLGFLVNTAGTVVVVVITASAVALIGCCFVALFVRYVD

SEQ ID NO: 32429 - protein, 62 aa, Artificial Sequence
  Synthetic polypeptide
IFSSWKCLLHSRFWRCPGLPFGCYRLGPSGAGKTVGYRIPGHVLLLCIGAHFVFYCSSVQYL

SEQ ID NO: 32430 - protein, 326 aa, Artificial Sequence
  Synthetic polypeptide
LTGYLFIYHLSLSLLLFFLSGCLSHLEHQSQLSRPVVLFSDESSVPGSVCCIVGFGGALGYLLGAIDWAHLELGRLLGTEFQVMFFFSALVLTLCFTVHLCSISEAPLTEVAKGIPPQQTPQDPPLSSDGMYEYGSIEKVKNGYVNPELAMQGAKNKNHAEQTRRAMTLKSLLRALVNMPPHYRYLCISHLIGWTAFLSNMLFFTDFMGQIVYRGDPYSAHNSTEFLIYERGVEVGCWGLCINSVFSSLYSYFQKVLVSYIGLKGLYFTGYLLFGLGTGFIGLFPNVYSTLVLCSLFGVMSSTLYTVPFNLITEYHREEEKEVCCH

SEQ ID NO: 32431 - protein, 287 aa, Artificial Sequence
  Synthetic polypeptide
LTGYLFIYHLSLSLLLFFLSGCLSHLEHQSQLSRPVVLFSDESSVPGSVCCIVGFGGALGYLLGAIDWAHLELGRLLGTEFQVMFFFSALVLTLCFTVHLCSISEAPLTEVAKGIPPQQTPQDPPLSSDGMYEYGSIEKVKNGYVNPELAMQGAKNKNHAEQTRRAMTLKSLLRALVNMPPHYRYLCISHLIGWTAFLSNMLFFTDFMGQIVYRGDPYSAHNSTEFLIYERGVEVGCWGLCINSVFSSLYSYFQKVLVSYIGLKGLYFTGYLLFGLGTGFIGLFPNV

SEQ ID NO: 32432 - protein, 286 aa, Artificial Sequence
  Synthetic polypeptide
LTGYLFIYHLSLSLLLFFLSGCLSHLEHQSQLSRPVVLFSDESSVPGSVCCITRRAMTLKSLLRALVNMPPHYRYLCISHLIGWTAFLSNMLFFTDFMGQIVYRGDPYSAHNSTEFLIYERGVEVGCWGLCINSVFSSLYSYFQKVLVSYIGLKGLYFTGYLLFGLGTGFIGLFPNVYSTLVLCSLFGVMSSTLYTVPFNLITEYHREEEKERQQAPGGDPDNSVRGKGMDCATLTCMVQLAQILVGGGLGFLVNTAGTVVVVVITASAVALIGCCFVALFVRYVD

SEQ ID NO: 32433 - protein, 66 aa, Artificial Sequence
  Synthetic polypeptide
IFSSWKCLLHNSQGNDIKVTAESTGEHASSLPLPLHQPPHWMDSLPVQHAVLHRFHGPDCVPRGSL

SEQ ID NO: 32434 - protein, 216 aa, Artificial Sequence
  Synthetic polypeptide
LTGYLFIYHLSLSLLLFFLSGCLSHLEHQSQLSRPVVLFSDESSVPGSVCCITRRAMTLKSLLRALVNMPPHYRYLCISHLIGWTAFLSNMLFFTDFMGQIVYRGDPYSAHNSTEFLIYERGVEVGCWGLCINSVFSSLYSYFQKVLVSYIGLKGLYFTGYLLFGLGTGFIGLFPNVYSTLVLCSLFGVMSSTLYTVPFNLITEYHREEEKEVCCH

SEQ ID NO: 32435 - protein, 177 aa, Artificial Sequence
  Synthetic polypeptide
LTGYLFIYHLSLSLLLFFLSGCLSHLEHQSQLSRPVVLFSDESSVPGSVCCITRRAMTLKSLLRALVNMPPHYRYLCISHLIGWTAFLSNMLFFTDFMGQIVYRGDPYSAHNSTEFLIYERGVEVGCWGLCINSVFSSLYSYFQKVLVSYIGLKGLYFTGYLLFGLGTGFIGLFPNV

SEQ ID NO: 32436 - protein, 108 aa, Artificial Sequence
  Synthetic polypeptide
LTGYLFIYHLSLSLLLFFLSGCLSHLEHQSQLSRPVVLFSDESSVPGSVCCITRRAMTLKSLLRALVNMPPHYRYLCISHLIGWTAFLSNMLFFTDFMGQIVYRGDPY

SEQ ID NO: 32437 - protein, 162 aa, Artificial Sequence
  Synthetic polypeptide
LTGYLFIYHLSLSLLLFFLSGCLSHLEHQSQLSRPVVLFSDESSVPGSVCCITRRAMTLKSLLRALVNMPPHYRYLCISHLIGWTAFLSNMLFFTDFMGQIVYRGDPYSAHNSTEFLIYERGVEVGCWGLCINSVFSSLYSCKSFSLLRMSSKSFWSSTTWI

SEQ ID NO: 32438 - protein, 15 aa, Artificial Sequence
  Synthetic polypeptide
LQSVSTNRRTTPRLQ

SEQ ID NO: 32439 - protein, 275 aa, Artificial Sequence
  Synthetic polypeptide
FKVSPQTGGLPPDCSKCCHGDYSFRGYQGPPGPPGPPGIPGNHGNNGNNGATGHEGAKGEKGDKGDLGPRGERGQHGPKGEKGYPGIPPELQIAFMASLATHFSNQNSGIIFSSVETNIGNFFDVMTGRFGAPVSGVYFFTFSMMKHEDVEEVYVYLMHNGNTVFSMYSYEMKGKSDTSSNHAVLKLAKGDEVWLRMGNGALHGDHQRFSTFAGFLLFETKCHGETPAGPRDSAAGKSKAYLCQAEWIWPVRKLLPVSWPRYQLFGFVRWKEQHI

SEQ ID NO: 32440 - protein, 125 aa, Artificial Sequence
  Synthetic polypeptide
SKCLHKPEDYPQTAVSVVMETTAFEATKAPLGHRALLAFQETMETMATMEPLVMKEPKVRRATKVTWGLEGSGGSMAPKERRATRGFHQNFRLHSWLLWQPTSAIRTVGLSSAVLRPTLETSLMS

SEQ ID NO: 32441 - protein, 221 aa, Artificial Sequence
  Synthetic polypeptide
FKVSPQTGGLPPDCSKCCHGDYSFRGYQGPPGPPGPPGIPGNHGNNGNNGATGHEGAKGEKGDKGDLGPRGERGQHGPKGEKGYPGIPPELQIAFMASLATHFSNQNSGIIFSSVETNIGNFFDVMTGRFGAPVSGVYFFTFSMMKHEDVEEVYVYLMHNGNTVFSMYSYEMKGKSDTSSNHAVLKLAKGDEVWLRMGNGALHGDHQRFSTFAGFLLFETK

SEQ ID NO: 32442 - protein, 65 aa, Artificial Sequence
  Synthetic polypeptide
TRGSSRSLLCRGPPWGQRSPTPPSDTGTASTPSWTTWPACCRSRLTSSPSWTSFLSCASVSVTSG

SEQ ID NO: 32443 - protein, 79 aa, Artificial Sequence
  Synthetic polypeptide
SSVFLCCYKNPLQMQHQPGCFHIPPRDLGTWVNDEHAEAHVACCAEARRGGREVQPLQATPGPPQRRVGPPGQPAAVPA

SEQ ID NO: 32444 - protein, 680 aa, Artificial Sequence
  Synthetic polypeptide
LAVPRPAVGAEKSNPSKRHRDRLNAELDHLASLLPFPPDIISKLDKLSVLRLSVSYLRVKSFFQVVQEQSSRQPAAGAPSPGDSCPLAGSAVLEGRLLLESLNGFALVVSAEGTIFYASATIVDYLGFHQTDVMHQNIYDYIHVDDRQDFCRQLHWAMDPPQVVFGQPPPLETGDDAILGRLLRAQEWGTGTPTEYSAFLTRCFICRVRCLLDSTSGFLTMQFQGKLKFLFGQKKKAPSGAMLPPRLSLFCIAAPVLLPSAAEMKMRSALLRAKPRADTAATADAKVKATTSLCESELHGKPNYSAGRSSRESGVLVLREQTDAGRWAQVPARAPCLCLRGGPDLVLDPKGGSGDREEEQHRMLSRASGVTGRRETPGPTKPLPWTAGKHSEDGARPRLQPSKNDPPSLRPMPRGSCLPCPCVQGTFRNSPISHPPSPSPSAYSSRTSRPMRDVGEDQVHPPLCHFPQRSLQHQLPQPGAQRFATRGYPMEDMKLQGVPMPPGDLCGPTLLLDVSIKMEKDSGCEGAADGCVPSQVWLGASDRSHPATFPTRMHLKTEPDSRQQVYISHLGHGVRGAQPHGRATAGRSRELTPFHPAHCACLEPTDGLPQSEPPHQLCARGRGEQSCTCRAAEAAPVVKREPLDSPQWATHSQGMVPGMLPKSALATLVPPQASGCTFLP

SEQ ID NO: 32445 - protein, 698 aa, Artificial Sequence
  Synthetic polypeptide
LAVPRPAVGAEKSNPSKRHRDRLNAELDHLASLLPFPPDIISKLDKLSVLRLSVSYLRVKSFFQVVQEQSSRQPAAGAPSPGDSCPLAGSAVLEGRLLLESLNGFALVVSAEGTIFYASATIVDYLGFHQTDVMHQNIYDYIHVDDRQDFCRQLHWAMDPPQVVFGQPPPLETGDDAILGRLLRAQEWGTGTPTEYSAFLTRCFICRVRCLLDSTSGFLARGSQAWQLRLCCPEPLMTMQFQGKLKFLFGQKKKAPSGAMLPPRLSLFCIAAPVLLPSAAEMKMRSALLRAKPRADTAATADAKVKATTSLCESELHGKPNYSAGRSSRESGVLVLREQTDAGRWAQVPARAPCLCLRGGPDLVLDPKGGSGDREEEQHRMLSRASGVTGRRETPGPTKPLPWTAGKHSEDGARPRLQPSKNDPPSLRPMPRGSCLPCPCVQGTFRNSPISHPPSPSPSAYSSRTSRPMRDVGEDQVHPPLCHFPQRSLQHQLPQPGAQRFATRGYPMEDMKLQGVPMPPGDLCGPTLLLDVSIKMEKDSGCEGAADGCVPSQVWLGASDRSHPATFPTRMHLKTEPDSRQQVYISHLGHGVRGAQPHGRATAGRSRELTPFHPAHCACLEPTDGLPQSEPPHQLCARGRGEQSCTCRAAEAAPVVKREPLDSPQWATHSQGMVPGMLPKSALATLVPPQASGCTFLP

SEQ ID NO: 32446 - protein, 140 aa, Artificial Sequence
  Synthetic polypeptide
LAVPRPAVGAEKSNPSKRHRDRLNAELDHLASLLPFPPDIISKLDKLSVLRLSVSYLRVKSFFQVVQEQSSRQPAAGAPSPGDSCPLAGSAVLEGRLLLESLNGFALVVSAEGTIFYASATIVDYLGFHQTDVMHQNIYD

SEQ ID NO: 32447 - protein, 122 aa, Artificial Sequence
  Synthetic polypeptide
LAVPRPAVGAEKSNPSKRHRDRLNAELDHLASLLPFPPDIISKLDKLSVLRLSVSYLRVKSFFQGQGLAVADAEDVDDHTGERRPMSFRRPRALDTQALRRTQFGLHLLMVNIAGLIATDRL

SEQ ID NO: 32448 - protein, 64 aa, Artificial Sequence
  Synthetic polypeptide
LAVPRPAVGAEKSNPSKRHRDRLNAELDHLASLLPFPPDIISKLDKLSVLRLSVSYLRVKSFFQ

SEQ ID NO: 32449 - protein, 984 aa, Artificial Sequence
  Synthetic polypeptide
DTQCKYWKMLKFGTTWTNEWNKNDDRLLQAVENGDAEKVASLLGKKGASATKHDSEGKTAFHLAAAKGHVECLRVMITHGVDVTAQDTTGHSALHLAAKNSHHECIRKLLQSKCPAESVDSSGKTALHYAAAQGCLQAVQILCEHKSPINLKDLDGNIPLLLAVQNGHSEICHFLLDHGADVNSRNKSGRTALMLACEIGSSNAVEALIKKGADLNLVDSLGYNALHYSKLSENAGIQSLLLSKISQDADLKTPTKPKQHDQVSKISSERSGTPKKRKAPPPPISPTQLSDVSSPRSITSTPLSGKESVFFAEPPFKAEISSIRENKDRLSDSTTGADSLLDISSEADQQDLLSLLQAKVASLTLHNKELQDKLQAKSPKEAEADLSFDSYHSTQTDLGPSLGKPGETSPPDSKSSPSVLIHSLGKSTTDNDVRIQQLQEILQDLQKRLESSEAERKQLQVELQSRRAELVCLNNTEISENSSDLSQKLKETQSKYEEAMKEVLSVQKQMKLGLVSPESMDNYSHFHELRVTEEEINVLKQDLQNALEESERNKEKVRELEEKLVEREKGTVIKPPVEEYEEMKSSYCSVIENMNKEKAFLFEKYQEAQEEIMKLKDTLKSQMTQEASDEAEDMKEAMNRMIDELNKQVSELSQLYKEAQAELEDYRKRKSLEDVTAEYIHKAEHEKLMQLTNVSRAKAEDALSEMKSQYSKVLNELTQLKQLVDAQKENSVSITEHLQVITTLRTAAKEMEEKISNLKEHLASKEVEVAKLEKQLLEEKAAMTDAMVPRSSYEKLQSSLESEVSVLASKLKESVKEKEKVHSEVVQIRSEVSQVKREKENIQTLLKSKEQEVNELLQKFQQAQEELAEMKRYAESSSKLEEDKDKKINEMSKEVTKLKEALNSLSQLSYSTSSSKRQSQQLEALQQQVKQLQNQLAECKKQHQEVISVYRMHLLYAVQGQMDEDVQKVLKQILTMCKNQSQKK

SEQ ID NO: 32450 - protein, 75 aa, Artificial Sequence
  Synthetic polypeptide
ILNANIGKCLSLEQLGPMSGTRMMTGYCRPWRMEMRRRWPHCSARRGPVPPNTTVRARPLSILLLQKDTWNASGS

SEQ ID NO: 32451 - protein, 7 aa, Artificial Sequence
  Synthetic polypeptide
VWNNLDQ

SEQ ID NO: 32452 - protein, 143 aa, Artificial Sequence
  Synthetic polypeptide
DTQCKYWKMLKFGTTWTNEWNKNDDRLLQAVENGDAEKVASLLGKKGASATKHDSEGKTAFHLAAAKGHVECLRVMITHGVDVTAQDTTGHSALHLAAKNSHHECIRKLLQSKCPAESVDSSGKTALHYAAAQGCLQAVQILC

SEQ ID NO: 32453 - protein, 60 aa, Artificial Sequence
  Synthetic polypeptide
DTQCKYWKMLKFGTTWTNEWNKNDDRLLQAVENGDAEKVASLLGKKGASATKHDSEGKTA

SEQ ID NO: 32454 - protein, 60 aa, Artificial Sequence
  Synthetic polypeptide
ILNANIGKCLSLEQLGPMSGTRMMTGYCRPWRMEMRRRWPHCSARRGPVPPNTTVRARPR

SEQ ID NO: 32455 - protein, 130 aa, Artificial Sequence
  Synthetic polypeptide
DTQCKYWKMLKFGTTWTNEWNKNDDRLLQAVENGDAEKVASLLGKKGASATKHDSEGKTAFHLAAAKGHVECLRVMITHGVDVTAQDTTGHSALHLAAKNSHHECIRKLLQSKCPAESVDSSGKTALHYA

SEQ ID NO: 32456 - protein, 955 aa, Artificial Sequence
  Synthetic polypeptide
DTQCKYWKMLKFGTTWTNEWNKNDDRLLQAVENGDAEKVASLLGKKGASATKHDSEGKTAFHLAAAKGHVECLRVMITHGVDVTAQDTTGHSALHLAAKNSHHECIRKLLQSKCPAESVDSSGKTALHYAAAQGCLQAVQILCEHKSPINLKDLDGNIPLLLAVQNGHSEICHFLLDHGADVNSRNKSGRTALMLACEIGSSNAVEALIKKGADLNLVDSLGYNALHYSKLSENAGIQSLLLSKISQDADLKTPTKPKQLSDVSSPRSITSTPLSGKESVFFAEPPFKAEISSIRENKDRLSDSTTGADSLLDISSEADQQDLLSLLQAKVASLTLHNKELQDKLQAKSPKEAEADLSFDSYHSTQTDLGPSLGKPGETSPPDSKSSPSVLIHSLGKSTTDNDVRIQQLQEILQDLQKRLESSEAERKQLQVELQSRRAELVCLNNTEISENSSDLSQKLKETQSKYEEAMKEVLSVQKQMKLGLVSPESMDNYSHFHELRVTEEEINVLKQDLQNALEESERNKEKVRELEEKLVEREKGTVIKPPVEEYEEMKSSYCSVIENMNKEKAFLFEKYQEAQEEIMKLKDTLKSQMTQEASDEAEDMKEAMNRMIDELNKQVSELSQLYKEAQAELEDYRKRKSLEDVTAEYIHKAEHEKLMQLTNVSRAKAEDALSEMKSQYSKVLNELTQLKQLVDAQKENSVSITEHLQVITTLRTAAKEMEEKISNLKEHLASKEVEVAKLEKQLLEEKAAMTDAMVPRSSYEKLQSSLESEVSVLASKLKESVKEKEKVHSEVVQIRSEVSQVKREKENIQTLLKSKEQEVNELLQKFQQAQEELAEMKRYAESSSKLEEDKDKKINEMSKEVTKLKEALNSLSQLSYSTSSSKRQSQQLEALQQQVKQLQNQLAECKKQHQEVISVYRMHLLYAVQGQMDEDVQKVLKQILTMCKNQSQKK

SEQ ID NO: 32457 - protein, 70 aa, Artificial Sequence
  Synthetic polypeptide
DTQCKYWKMLKFGTTWTNEWNKNDDRLLQAVENGDAEKVASLLGKKGASATKHDISILLLQKDTWNASGS

SEQ ID NO: 32458 - protein, 70 aa, Artificial Sequence
  Synthetic polypeptide
ILNANIGKCLSLEQLGPMSGTRMMTGYCRPWRMEMRRRWPHCSARRGPVPPNTTFPSCCCKRTRGMPQGH

SEQ ID NO: 32459 - protein, 118 aa, Artificial Sequence
  Synthetic polypeptide
DTQCKYWKMLKFGTTWTNEWNKNDDRLLQAVENGDAEKVASLLGKKGASATKHDSEGKTAFHLAAAKGHVECLRVMITHGVDVTAQDTTGHSALHLAAKNSHHECIRKLLQSKCPAES

SEQ ID NO: 32460 - protein, 111 aa, Artificial Sequence
  Synthetic polypeptide
DTQCKYWKMLKFGTTWTNEWNKNDDRLLQAVENGDAEKVASLLGKKGASATKHDSEGKTAFHLAAAKGHVECLRVMITHGVDVTAQDTTGHSALHLAAKNSHHECIRKLLQ

SEQ ID NO: 32461 - protein, 108 aa, Artificial Sequence
  Synthetic polypeptide
DTQCKYWKMLKFGTTWTNEWNKNDDRLLQAVENGDAEKVASLLGKKGASATKHDSEGKTAFHLAAAKGHVECLRVMITHGVDVTAQDTTGHSALHLAAKNSHHECIRK

SEQ ID NO: 32462 - protein, 129 aa, Artificial Sequence
  Synthetic polypeptide
DTQCKYWKMLKFGTTWTNEWNKNDDRLLQAVENGDAEKVASLLGKKGASATKHDSEGKTAFHLAAAKGHVECLRVMITHGVDVTAQDTTGHSALHLAAKNSHHECIRKLLQSKCPAESVDSSGKTALHY

SEQ ID NO: 32463 - protein, 154 aa, Artificial Sequence
  Synthetic polypeptide
DTQCKYWKMLKFGTTWTNEWNKNDDRLLQAVENGDAEKVASLLGKKGASATKHDSEGKTAFHLAAAKGHVECLRVMITHGVDVTAQDTTGHSALHLAAKNSHHECIRKLLQSKCPAESVDSSGKTALHYAAAQGCLQAVQILCEHKSPINLKDL

SEQ ID NO: 32464 - protein, 40 aa, Artificial Sequence
  Synthetic polypeptide
SWTSQPPEVSEINVYCLSHPVCSILLQQPELRNLKSVKNS

SEQ ID NO: 32465 - protein, 10 aa, Artificial Sequence
  Synthetic polypeptide
TEEFEICKEL

SEQ ID NO: 32466 - protein, 91 aa, Artificial Sequence
  Synthetic polypeptide
SWTSQPPEVSEINVYCLSHPVCSILLQQPELRPMSGTRMMTGYCRPWRMEMRRRWPHCSARRGPVPPNTTVRARPLSILLLQKDTWNASGS

SEQ ID NO: 32467 - protein, 970 aa, Artificial Sequence
  Synthetic polypeptide
TETNEWNKNDDRLLQAVENGDAEKVASLLGKKGASATKHDSEGKTAFHLAAAKGHVECLRVMITHGVDVTAQDTTGHSALHLAAKNSHHECIRKLLQSKCPAESVDSSGKTALHYAAAQGCLQAVQILCEHKSPINLKDLDGNIPLLLAVQNGHSEICHFLLDHGADVNSRNKSGRTALMLACEIGSSNAVEALIKKGADLNLVDSLGYNALHYSKLSENAGIQSLLLSKISQDADLKTPTKPKQHDQVSKISSERSGTPKKRKAPPPPISPTQLSDVSSPRSITSTPLSGKESVFFAEPPFKAEISSIRENKDRLSDSTTGADSLLDISSEADQQDLLSLLQAKVASLTLHNKELQDKLQAKSPKEAEADLSFDSYHSTQTDLGPSLGKPGETSPPDSKSSPSVLIHSLGKSTTDNDVRIQQLQEILQDLQKRLESSEAERKQLQVELQSRRAELVCLNNTEISENSSDLSQKLKETQSKYEEAMKEVLSVQKQMKLGLVSPESMDNYSHFHELRVTEEEINVLKQDLQNALEESERNKEKVRELEEKLVEREKGTVIKPPVEEYEEMKSSYCSVIENMNKEKAFLFEKYQEAQEEIMKLKDTLKSQMTQEASDEAEDMKEAMNRMIDELNKQVSELSQLYKEAQAELEDYRKRKSLEDVTAEYIHKAEHEKLMQLTNVSRAKAEDALSEMKSQYSKVLNELTQLKQLVDAQKENSVSITEHLQVITTLRTAAKEMEEKISNLKEHLASKEVEVAKLEKQLLEEKAAMTDAMVPRSSYEKLQSSLESEVSVLASKLKESVKEKEKVHSEVVQIRSEVSQVKREKENIQTLLKSKEQEVNELLQKFQQAQEELAEMKRYAESSSKLEEDKDKKINEMSKEVTKLKEALNSLSQLSYSTSSSKRQSQQLEALQQQVKQLQNQLAECKKQHQEVISVYRMHLLYAVQGQMDEDVQKVLKQILTMCKNQSQKK

SEQ ID NO: 32468 - protein, 129 aa, Artificial Sequence
  Synthetic polypeptide
TETNEWNKNDDRLLQAVENGDAEKVASLLGKKGASATKHDSEGKTAFHLAAAKGHVECLRVMITHGVDVTAQDTTGHSALHLAAKNSHHECIRKLLQSKCPAESVDSSGKTALHYAAAQGCLQAVQILC

SEQ ID NO: 32469 - protein, 76 aa, Artificial Sequence
  Synthetic polypeptide
SWTSQPPEVSEINVYCLSHPVCSILLQQPELRPMSGTRMMTGYCRPWRMEMRRRWPHCSARRGPVPPNTTVRARPR

SEQ ID NO: 32470 - protein, 46 aa, Artificial Sequence
  Synthetic polypeptide
TETNEWNKNDDRLLQAVENGDAEKVASLLGKKGASATKHDSEGKTA

SEQ ID NO: 32471 - protein, 116 aa, Artificial Sequence
  Synthetic polypeptide
TETNEWNKNDDRLLQAVENGDAEKVASLLGKKGASATKHDSEGKTAFHLAAAKGHVECLRVMITHGVDVTAQDTTGHSALHLAAKNSHHECIRKLLQSKCPAESVDSSGKTALHYA

SEQ ID NO: 32472 - protein, 941 aa, Artificial Sequence
  Synthetic polypeptide
TETNEWNKNDDRLLQAVENGDAEKVASLLGKKGASATKHDSEGKTAFHLAAAKGHVECLRVMITHGVDVTAQDTTGHSALHLAAKNSHHECIRKLLQSKCPAESVDSSGKTALHYAAAQGCLQAVQILCEHKSPINLKDLDGNIPLLLAVQNGHSEICHFLLDHGADVNSRNKSGRTALMLACEIGSSNAVEALIKKGADLNLVDSLGYNALHYSKLSENAGIQSLLLSKISQDADLKTPTKPKQLSDVSSPRSITSTPLSGKESVFFAEPPFKAEISSIRENKDRLSDSTTGADSLLDISSEADQQDLLSLLQAKVASLTLHNKELQDKLQAKSPKEAEADLSFDSYHSTQTDLGPSLGKPGETSPPDSKSSPSVLIHSLGKSTTDNDVRIQQLQEILQDLQKRLESSEAERKQLQVELQSRRAELVCLNNTEISENSSDLSQKLKETQSKYEEAMKEVLSVQKQMKLGLVSPESMDNYSHFHELRVTEEEINVLKQDLQNALEESERNKEKVRELEEKLVEREKGTVIKPPVEEYEEMKSSYCSVIENMNKEKAFLFEKYQEAQEEIMKLKDTLKSQMTQEASDEAEDMKEAMNRMIDELNKQVSELSQLYKEAQAELEDYRKRKSLEDVTAEYIHKAEHEKLMQLTNVSRAKAEDALSEMKSQYSKVLNELTQLKQLVDAQKENSVSITEHLQVITTLRTAAKEMEEKISNLKEHLASKEVEVAKLEKQLLEEKAAMTDAMVPRSSYEKLQSSLESEVSVLASKLKESVKEKEKVHSEVVQIRSEVSQVKREKENIQTLLKSKEQEVNELLQKFQQAQEELAEMKRYAESSSKLEEDKDKKINEMSKEVTKLKEALNSLSQLSYSTSSSKRQSQQLEALQQQVKQLQNQLAECKKQHQEVISVYRMHLLYAVQGQMDEDVQKVLKQILTMCKNQSQKK

SEQ ID NO: 32473 - protein, 86 aa, Artificial Sequence
  Synthetic polypeptide
SWTSQPPEVSEINVYCLSHPVCSILLQQPELRPMSGTRMMTGYCRPWRMEMRRRWPHCSARRGPVPPNTTFPSCCCKRTRGMPQGH

SEQ ID NO: 32474 - protein, 56 aa, Artificial Sequence
  Synthetic polypeptide
TETNEWNKNDDRLLQAVENGDAEKVASLLGKKGASATKHDISILLLQKDTWNASGS

SEQ ID NO: 32475 - protein, 104 aa, Artificial Sequence
  Synthetic polypeptide
TETNEWNKNDDRLLQAVENGDAEKVASLLGKKGASATKHDSEGKTAFHLAAAKGHVECLRVMITHGVDVTAQDTTGHSALHLAAKNSHHECIRKLLQSKCPAES

SEQ ID NO: 32476 - protein, 97 aa, Artificial Sequence
  Synthetic polypeptide
TETNEWNKNDDRLLQAVENGDAEKVASLLGKKGASATKHDSEGKTAFHLAAAKGHVECLRVMITHGVDVTAQDTTGHSALHLAAKNSHHECIRKLLQ

SEQ ID NO: 32477 - protein, 94 aa, Artificial Sequence
  Synthetic polypeptide
TETNEWNKNDDRLLQAVENGDAEKVASLLGKKGASATKHDSEGKTAFHLAAAKGHVECLRVMITHGVDVTAQDTTGHSALHLAAKNSHHECIRK

SEQ ID NO: 32478 - protein, 115 aa, Artificial Sequence
  Synthetic polypeptide
TETNEWNKNDDRLLQAVENGDAEKVASLLGKKGASATKHDSEGKTAFHLAAAKGHVECLRVMITHGVDVTAQDTTGHSALHLAAKNSHHECIRKLLQSKCPAESVDSSGKTALHY

SEQ ID NO: 32479 - protein, 140 aa, Artificial Sequence
  Synthetic polypeptide
TETNEWNKNDDRLLQAVENGDAEKVASLLGKKGASATKHDSEGKTAFHLAAAKGHVECLRVMITHGVDVTAQDTTGHSALHLAAKNSHHECIRKLLQSKCPAESVDSSGKTALHYAAAQGCLQAVQILCEHKSPINLKDL

SEQ ID NO: 32480 - protein, 837 aa, Artificial Sequence
  Synthetic polypeptide
QGFPLLLLPHFLLPLPRKKCLSPHTMILRPPQPCGTEMPLFLVPYWELIENSYINTIKTVLRHLREDQHTVLAYLYEIRTSFQEFLKRPDHKQDFVAQWQADFNSLPDDLWDDEETKAELHQRVNDLRDRLWDICDARKEEAEQERLDIINESWLQDTLGMTMNHFFSLMQAELNRFQDTKRLLQDYYWGMESKIPVEDNKRFTRIPLVQLDSKDNSESQLRIPLVPRISISLETVTPKPKTKSVLKGKMDNSLENVESNFEADEKLVMDTWQQASLAVSHMVAAEIHQRLMEEEKENQPADPKEKSPQMGANKKVKKEPPKKKQEDKKPKGKSPPMAEATPVIVTTEEIAEIKRKNELRVKIKEEHLAALQFEEIATQFRLELIKTKALALLEDLVTKVVDVYKLMEKWLGERYLNEMASTEKLTDVARYHIETSTKIQNELYLSQEDFFINGNIKVFPDPPPSIRPPPVEKEEDGTLTIEQLDSLRDQFLDMAPKGIIGNKAFTDILIDLVTLNLGTNNFPSNWMHLTQPELQELTSLLTVNSEFVDWRKFLLVTSMPWPIPLEEELLETLQKFKAVDKEQLGTITFEQYMQAGLWFTGDEDIKIPENPLEPLPFNRQEHLIEFFFRLFADYEKDPPQLDYTQMLLYFACHPDTVEGVYRALSVAVGTHVFQQVKASIPSAEKTSSTDAGPAEEFPEPEENAAREERKLKDDTEKREQKDEEIPENANNEKMSMETLLKVFKGGSEAQDSNRFASHLKIENIYAEGFIKTFQDLGAKNLEPIEVAVLLKHPFIQDLISNYSDYKFPDIKIILQRSEHVQGSDGERSPSRHTEEKK

SEQ ID NO: 32481 - protein, 13 aa, Artificial Sequence
  Synthetic polypeptide
GLPSHVELKCLCF

SEQ ID NO: 32482 - protein, 838 aa, Artificial Sequence
  Synthetic polypeptide
QGFPLLLLPHFLLPLPRKKCLSPHTMILRPPQPCGTEMPLFLVPYWELIENSYINTIKTVLRHLREDQHTVLAYLYEIRTSFQEFLKRPDHKQDFVAQWQADFNSLPDDLWDDEETKAELHQRVNDLRDRLWDICDARKEEAEQERLDIINESWLQDTLGMTMNHFFSLMQAELNRFQDTKRLLQDYYWGMESKIPVEDNKRFTRIPLVQLDSKDNSESQLRIPLVPRISISLETVTPKPKTKSVLKGKMDNSLENVESNFEADEKLVMDTWQQASLAVSHMVAAEIHQRLMEEEKENQPADPKEKSPQMGANKKVKKEPPKKKQEDKKPKGKSPPMAEATPVIVTTEEIAEIKRKNELRVKIKEEHLAALQFEEIATQFRLELIKTKALALLEDLVTKVVDVYKLMEKWLGERYLNEMASTEKLTDVARYHIETSTKIQNELYLSQEDFFINGNIKVFPDPPPSIRPPPVEKEEDGTLTIEQLDSLRDQFLDMAPKGIIGNKAFTDILIDLVTLNLGTNNFPSNWMHLTQPELQELTSLLTVNSEFVDWRKFLLVTSMPWPIPLEEELLETLQKFKAVDKEQLGTITFEQYMQAGLWFTGDEDIKIPENPLEPLPFNRQEHLIEFFFRLFADYEKDPPQLDYTQMLLYFACHPDTVEGVYRALSVAVGTHVFQQVKASIPSAEKTSSTDAGPAEEFPEPEENAAREERKLKDDTEKREQKDEEIPENANNEKMSMETLLKVFKGGSEAQDSNRFASHLKIENIYAEGFIKTFQDLGAKNLEPIEVAVLLKHPFIQDLISNYSDYKFPVHIIYVVEMIVCAKGWAPLPSGKQCARWRN

SEQ ID NO: 32483 - protein, 58 aa, Artificial Sequence
  Synthetic polypeptide
QGFPLLLLPHFLLPLPRKKCLSPHTMILRPPQPCGTNKFPGVSKASGSQARFCSSMAG

SEQ ID NO: 32484 - protein, 766 aa, Artificial Sequence
  Synthetic polypeptide
GLPSHVELTSFQEFLKRPDHKQDFVAQWQADFNSLPDDLWDDEETKAELHQRVNDLRDRLWDICDARKEEAEQERLDIINESWLQDTLGMTMNHFFSLMQAELNRFQDTKRLLQDYYWGMESKIPVEDNKRFTRIPLVQLDSKDNSESQLRIPLVPRISISLETVTPKPKTKSVLKGKMDNSLENVESNFEADEKLVMDTWQQASLAVSHMVAAEIHQRLMEEEKENQPADPKEKSPQMGANKKVKKEPPKKKQEDKKPKGKSPPMAEATPVIVTTEEIAEIKRKNELRVKIKEEHLAALQFEEIATQFRLELIKTKALALLEDLVTKVVDVYKLMEKWLGERYLNEMASTEKLTDVARYHIETSTKIQNELYLSQEDFFINGNIKVFPDPPPSIRPPPVEKEEDGTLTIEQLDSLRDQFLDMAPKGIIGNKAFTDILIDLVTLNLGTNNFPSNWMHLTQPELQELTSLLTVNSEFVDWRKFLLVTSMPWPIPLEEELLETLQKFKAVDKEQLGTITFEQYMQAGLWFTGDEDIKIPENPLEPLPFNRQEHLIEFFFRLFADYEKDPPQLDYTQMLLYFACHPDTVEGVYRALSVAVGTHVFQQVKASIPSAEKTSSTDAGPAEEFPEPEENAAREERKLKDDTEKREQKDEEIPENANNEKMSMETLLKVFKGGSEAQDSNRFASHLKIENIYAEGFIKTFQDLGAKNLEPIEVAVLLKHPFIQDLISNYSDYKFPDIKIILQRSEHVQGSDGERSPSRHTEEKK

SEQ ID NO: 32485 - protein, 767 aa, Artificial Sequence
  Synthetic polypeptide
GLPSHVELTSFQEFLKRPDHKQDFVAQWQADFNSLPDDLWDDEETKAELHQRVNDLRDRLWDICDARKEEAEQERLDIINESWLQDTLGMTMNHFFSLMQAELNRFQDTKRLLQDYYWGMESKIPVEDNKRFTRIPLVQLDSKDNSESQLRIPLVPRISISLETVTPKPKTKSVLKGKMDNSLENVESNFEADEKLVMDTWQQASLAVSHMVAAEIHQRLMEEEKENQPADPKEKSPQMGANKKVKKEPPKKKQEDKKPKGKSPPMAEATPVIVTTEEIAEIKRKNELRVKIKEEHLAALQFEEIATQFRLELIKTKALALLEDLVTKVVDVYKLMEKWLGERYLNEMASTEKLTDVARYHIETSTKIQNELYLSQEDFFINGNIKVFPDPPPSIRPPPVEKEEDGTLTIEQLDSLRDQFLDMAPKGIIGNKAFTDILIDLVTLNLGTNNFPSNWMHLTQPELQELTSLLTVNSEFVDWRKFLLVTSMPWPIPLEEELLETLQKFKAVDKEQLGTITFEQYMQAGLWFTGDEDIKIPENPLEPLPFNRQEHLIEFFFRLFADYEKDPPQLDYTQMLLYFACHPDTVEGVYRALSVAVGTHVFQQVKASIPSAEKTSSTDAGPAEEFPEPEENAAREERKLKDDTEKREQKDEEIPENANNEKMSMETLLKVFKGGSEAQDSNRFASHLKIENIYAEGFIKTFQDLGAKNLEPIEVAVLLKHPFIQDLISNYSDYKFPVHIIYVVEMIVCAKGWAPLPSGKQCARWRN

SEQ ID NO: 32486 - protein, 79 aa, Artificial Sequence
  Synthetic polypeptide
RIFKGHTVLTACGLLWQGQRAMTERWRSRPRKSSPRPPTPLKDSDCSAWPGALLGSKDLAECLELWMTIIIEPLILKNL

SEQ ID NO: 32487 - protein, 12 aa, Artificial Sequence
  Synthetic polypeptide
QHVDYYGRDSAP

SEQ ID NO: 32488 - protein, 233 aa, Artificial Sequence
  Synthetic polypeptide
FPSLQNEVALENLQGSYSSNSMWITMAGTARHDREMAIQAKKKLTTATDPIERLRLQCLARGSAGIKGLGRVFRIMDDDNNRTLDFKEFMKGLNDYAVVMEKEEVEELFRRFDKDGNGTIDFNEFLLTLRPPMSRARKEVIMQAFRKLDKTGDGVITIEDLREVYNAKHHPKYQNGEWSEEQVFRKFLDNFDSPYDKDGLVTPEEFMNYYAGVSASIDTDVYFIIMMRTAWKL

SEQ ID NO: 32489 - protein, 215 aa, Artificial Sequence
  Synthetic polypeptide
FPSLQNEVALENLQGSYSSNSMWITMAGTARHDREMAIQAKKKLTTATDPIERLRLQCLARGSAGIKGLGRVFRIMDDDNNRTLDFKEFMKGLNDYAVVMEKEEVEELFRRFDKDGNGTIDFNEFLLTLRPPMSRARKEVIMQAFRKLDKTGDGVITIEDLREVYNAKHHPKYQNGEWSEEQVFRKFLDNFDSPYDKDGLVTPEEFMNYYAGVSA

SEQ ID NO: 32490 - protein, 205 aa, Artificial Sequence
  Synthetic polypeptide
FPSLQNEVALENLQGSYSSNSMWITMAGTARHDREMAIQAKKKLTTATDPIERLRLQCLARGSAGIKGLGRVFRIMDDDNNRTLDFKEFMKGLNDYAVVMEKEEVEELFRRFDKDGNGTIDFNEFLLTLRPPMSRARKEVIMQAFRKLDKTGDGVITIEDLREVYNAKHHPKYQNGEWSEEQVFRKFLDNFDSPYDKDGLVSKRA

SEQ ID NO: 32491 - protein, 472 aa, Artificial Sequence
  Synthetic polypeptide
RILYLQKYCQFGLKDFKKEEKSYQVISWLAPEDHQREFKKSFDFFLEETLGGRGKFENLLNVLEYLALQCSHFLNRKDIMDSLKNENFDMVIVETFDYCPFLIAEKLGKPFVAILSTSFGSLEFGLPIPLSYVPVFRSLLTDHMDFWGRVKNFLMFFSFCRRQQHMQSTFDNTIKEHFTEGSRPVLSHLLLKAELWFINSDFAFDFARPLLPNTVYVGGLMEKPIKPVPQDLENFIAKFGDSGFVLVTLGSMVNTCQNPEIFKEMNNAFAHLPQGVIWKCQCSHWPKDVHLAANVKIVDWLPQSDLLAHPSIRLFVTHGGQNSIMEAIQHGVPMVGIPLFGDQPENMVRVEAKKFGVSIQLKKLKAETLALKMKQIMEDKRYKSAAVAASVILRSHPLSPTQRLVGWIDHVLQTGGATHLKPYVFQQPWHEQYLLDVFVFLLGLTLGTLWLCGKLLGMAVWWLRGARKVKET

SEQ ID NO: 32492 - protein, 36 aa, Artificial Sequence
  Synthetic polypeptide
KILKRKKNHIKLSVGLHLKIIKENLKRVLISFWKKL

SEQ ID NO: 32493 - protein, 15 aa, Artificial Sequence
  Synthetic polypeptide
NFIPSEVLPIWTKRF

SEQ ID NO: 32494 - protein, 69 aa, Artificial Sequence
  Synthetic polypeptide
RILYLQKYCQFGLKDFKKEEKSYQVISWLAPEDHQREFKKSFDFFLEETLGGRTWRTSLPSLGTLVLSL

SEQ ID NO: 32495 - protein, 87 aa, Artificial Sequence
  Synthetic polypeptide
RILYLQKYCQFGLKDFKKEEKSYQVISWLAPEDHQREFKKSFDFFLEETLGGRGKFENLLNVLEYLALQCSHFLNRKDIMDSLKNEN

SEQ ID NO: 32496 - protein, 65 aa, Artificial Sequence
  Synthetic polypeptide
NPCFSLLLIVKRQRREIHGRNCQKKRNQNLKDRGWQWQMPKMWMTTRANEGPCRSGGPEHWTPRP

SEQ ID NO: 32497 - protein, 116 aa, Artificial Sequence
  Synthetic polypeptide
ILAFCGKWNLQVMKWGVLLVRFLSKVLKPLLLLTAYSETSEERDTWKELPKEKEPELEGQGLAVADAEDVDDHTGERRPMSFRRPRALDTQALRRTQFGLHLLMVNIAGLIATDRL

SEQ ID NO: 32498 - protein, 75 aa, Artificial Sequence
  Synthetic polypeptide
NPCFSLLLIVKRQRREIHGRNCQKKRNQNLKSCRSRAHGSLRPAPPRPETAVLLQGLPCWREGCCWSLLMALLWS

SEQ ID NO: 32499 - protein, 674 aa, Artificial Sequence
  Synthetic polypeptide
ILAFCGKWNLQVMKWGVLLVRFLSKVLKPLLLLTAYSETSEERDTWKELPKEKEPELEVVQEQSSRQPAAGAPSPGDSCPLAGSAVLEGRLLLESLNGFALVVSAEGTIFYASATIVDYLGFHQTDVMHQNIYDYIHVDDRQDFCRQLHWAMDPPQVVFGQPPPLETGDDAILGRLLRAQEWGTGTPTEYSAFLTRCFICRVRCLLDSTSGFLTMQFQGKLKFLFGQKKKAPSGAMLPPRLSLFCIAAPVLLPSAAEMKMRSALLRAKPRADTAATADAKVKATTSLCESELHGKPNYSAGRSSRESGVLVLREQTDAGRWAQVPARAPCLCLRGGPDLVLDPKGGSGDREEEQHRMLSRASGVTGRRETPGPTKPLPWTAGKHSEDGARPRLQPSKNDPPSLRPMPRGSCLPCPCVQGTFRNSPISHPPSPSPSAYSSRTSRPMRDVGEDQVHPPLCHFPQRSLQHQLPQPGAQRFATRGYPMEDMKLQGVPMPPGDLCGPTLLLDVSIKMEKDSGCEGAADGCVPSQVWLGASDRSHPATFPTRMHLKTEPDSRQQVYISHLGHGVRGAQPHGRATAGRSRELTPFHPAHCACLEPTDGLPQSEPPHQLCARGRGEQSCTCRAAEAAPVVKREPLDSPQWATHSQGMVPGMLPKSALATLVPPQASGCTFLP

SEQ ID NO: 32500 - protein, 692 aa, Artificial Sequence
  Synthetic polypeptide
ILAFCGKWNLQVMKWGVLLVRFLSKVLKPLLLLTAYSETSEERDTWKELPKEKEPELEVVQEQSSRQPAAGAPSPGDSCPLAGSAVLEGRLLLESLNGFALVVSAEGTIFYASATIVDYLGFHQTDVMHQNIYDYIHVDDRQDFCRQLHWAMDPPQVVFGQPPPLETGDDAILGRLLRAQEWGTGTPTEYSAFLTRCFICRVRCLLDSTSGFLARGSQAWQLRLCCPEPLMTMQFQGKLKFLFGQKKKAPSGAMLPPRLSLFCIAAPVLLPSAAEMKMRSALLRAKPRADTAATADAKVKATTSLCESELHGKPNYSAGRSSRESGVLVLREQTDAGRWAQVPARAPCLCLRGGPDLVLDPKGGSGDREEEQHRMLSRASGVTGRRETPGPTKPLPWTAGKHSEDGARPRLQPSKNDPPSLRPMPRGSCLPCPCVQGTFRNSPISHPPSPSPSAYSSRTSRPMRDVGEDQVHPPLCHFPQRSLQHQLPQPGAQRFATRGYPMEDMKLQGVPMPPGDLCGPTLLLDVSIKMEKDSGCEGAADGCVPSQVWLGASDRSHPATFPTRMHLKTEPDSRQQVYISHLGHGVRGAQPHGRATAGRSRELTPFHPAHCACLEPTDGLPQSEPPHQLCARGRGEQSCTCRAAEAAPVVKREPLDSPQWATHSQGMVPGMLPKSALATLVPPQASGCTFLP

SEQ ID NO: 32501 - protein, 134 aa, Artificial Sequence
  Synthetic polypeptide
ILAFCGKWNLQVMKWGVLLVRFLSKVLKPLLLLTAYSETSEERDTWKELPKEKEPELEVVQEQSSRQPAAGAPSPGDSCPLAGSAVLEGRLLLESLNGFALVVSAEGTIFYASATIVDYLGFHQTDVMHQNIYD

SEQ ID NO: 32502 - protein, 611 aa, Artificial Sequence
  Synthetic polypeptide
NPCFSLLLIVKRQRREIHGRNCQKKRNQNLKSLNGFALVVSAEGTIFYASATIVDYLGFHQTDVMHQNIYDYIHVDDRQDFCRQLHWAMDPPQVVFGQPPPLETGDDAILGRLLRAQEWGTGTPTEYSAFLTRCFICRVRCLLDSTSGFLTMQFQGKLKFLFGQKKKAPSGAMLPPRLSLFCIAAPVLLPSAAEMKMRSALLRAKPRADTAATADAKVKATTSLCESELHGKPNYSAGRSSRESGVLVLREQTDAGRWAQVPARAPCLCLRGGPDLVLDPKGGSGDREEEQHRMLSRASGVTGRRETPGPTKPLPWTAGKHSEDGARPRLQPSKNDPPSLRPMPRGSCLPCPCVQGTFRNSPISHPPSPSPSAYSSRTSRPMRDVGEDQVHPPLCHFPQRSLQHQLPQPGAQRFATRGYPMEDMKLQGVPMPPGDLCGPTLLLDVSIKMEKDSGCEGAADGCVPSQVWLGASDRSHPATFPTRMHLKTEPDSRQQVYISHLGHGVRGAQPHGRATAGRSRELTPFHPAHCACLEPTDGLPQSEPPHQLCARGRGEQSCTCRAAEAAPVVKREPLDSPQWATHSQGMVPGMLPKSALATLVPPQASGCTFLP

SEQ ID NO: 32503 - protein, 60 aa, Artificial Sequence
  Synthetic polypeptide
ILAFCGKWNLQVMKWGVLLVRFLSKVLKPLLLLTAYSETSEERDTWKELPKEKEPELEVS

SEQ ID NO: 32504 - protein, 629 aa, Artificial Sequence
  Synthetic polypeptide
NPCFSLLLIVKRQRREIHGRNCQKKRNQNLKSLNGFALVVSAEGTIFYASATIVDYLGFHQTDVMHQNIYDYIHVDDRQDFCRQLHWAMDPPQVVFGQPPPLETGDDAILGRLLRAQEWGTGTPTEYSAFLTRCFICRVRCLLDSTSGFLARGSQAWQLRLCCPEPLMTMQFQGKLKFLFGQKKKAPSGAMLPPRLSLFCIAAPVLLPSAAEMKMRSALLRAKPRADTAATADAKVKATTSLCESELHGKPNYSAGRSSRESGVLVLREQTDAGRWAQVPARAPCLCLRGGPDLVLDPKGGSGDREEEQHRMLSRASGVTGRRETPGPTKPLPWTAGKHSEDGARPRLQPSKNDPPSLRPMPRGSCLPCPCVQGTFRNSPISHPPSPSPSAYSSRTSRPMRDVGEDQVHPPLCHFPQRSLQHQLPQPGAQRFATRGYPMEDMKLQGVPMPPGDLCGPTLLLDVSIKMEKDSGCEGAADGCVPSQVWLGASDRSHPATFPTRMHLKTEPDSRQQVYISHLGHGVRGAQPHGRATAGRSRELTPFHPAHCACLEPTDGLPQSEPPHQLCARGRGEQSCTCRAAEAAPVVKREPLDSPQWATHSQGMVPGMLPKSALATLVPPQASGCTFLP

SEQ ID NO: 32505 - protein, 71 aa, Artificial Sequence
  Synthetic polypeptide
NPCFSLLLIVKRQRREIHGRNCQKKRNQNLKSLNGFALVVSAEGTIFYASATIVDYLGFHQTDVMHQNIYD

SEQ ID NO: 32506 - protein, 456 aa, Artificial Sequence
  Synthetic polypeptide
IVQGYAYYFEEVRKVNESIKYNHPLRKCVDTILKKCPTEYQEKMGRNMDDYEDFDEKHSIYPSEKSLVKLHKQVIYSVQRHRRTQVQWQILLEQAFYLEDVAKNETSATHQFVHTFQSPEPENRFIQYFYNPTFEWYWECLLRPWFYKILAVVLSIFSVIVVWSECTFFSTTPVLSLFAVFIQLAEKTYNYIYIEIACFLSIFFLSICVYSTVFRIRVFNYYYLASHHQTDAYSLLFSGMLFCRLTPPLCLNFLGLTHMDSSISHKNTQPTAYTSIMGSMKVLSFIADGFYIYYPMLVVILCIATYFSLGTRCLNLLGFQQFMGDDDMTSDLVNEGKELIRKEKRKRQRQEEGENRRREWKERYGHNREDSTRNRNIHTDPKESNFSDVNTNRSAFKYTRANNRTERDRIELLQDAEPLDFNAETFTDDPLESESGRYQPGGRYLSMSRSDIFNDV

SEQ ID NO: 32507 - protein, 13 aa, Artificial Sequence
  Synthetic polypeptide
CRATPIILRRFVK

SEQ ID NO: 32508 - protein, 670 aa, Artificial Sequence
  Synthetic polypeptide
VFWTDLHVVKQPLDRETGCEPGAQPGSLLSRGQEWDGTTPAETLSAWPKENRTGVVQEQSSRQPAAGAPSPGDSCPLAGSAVLEGRLLLESLNGFALVVSAEGTIFYASATIVDYLGFHQTDVMHQNIYDYIHVDDRQDFCRQLHWAMDPPQVVFGQPPPLETGDDAILGRLLRAQEWGTGTPTEYSAFLTRCFICRVRCLLDSTSGFLTMQFQGKLKFLFGQKKKAPSGAMLPPRLSLFCIAAPVLLPSAAEMKMRSALLRAKPRADTAATADAKVKATTSLCESELHGKPNYSAGRSSRESGVLVLREQTDAGRWAQVPARAPCLCLRGGPDLVLDPKGGSGDREEEQHRMLSRASGVTGRRETPGPTKPLPWTAGKHSEDGARPRLQPSKNDPPSLRPMPRGSCLPCPCVQGTFRNSPISHPPSPSPSAYSSRTSRPMRDVGEDQVHPPLCHFPQRSLQHQLPQPGAQRFATRGYPMEDMKLQGVPMPPGDLCGPTLLLDVSIKMEKDSGCEGAADGCVPSQVWLGASDRSHPATFPTRMHLKTEPDSRQQVYISHLGHGVRGAQPHGRATAGRSRELTPFHPAHCACLEPTDGLPQSEPPHQLCARGRGEQSCTCRAAEAAPVVKREPLDSPQWATHSQGMVPGMLPKSALATLVPPQASGCTFLP

SEQ ID NO: 32509 - protein, 89 aa, Artificial Sequence
  Synthetic polypeptide
NSHWIGRLGVSQEPSREASSAEARSGMAPRPQRHYQLGLRRTGRESCRSRAHGSLRPAPPRPETAVLLQGLPCWREGCCWSLLMALLWS

SEQ ID NO: 32510 - protein, 43 aa, Artificial Sequence
  Synthetic polypeptide
GEQDGSRAGAELTAACGRRPLARRQLSSCRVCRAGGKAAVGVS

SEQ ID NO: 32511 - protein, 688 aa, Artificial Sequence
  Synthetic polypeptide
VFWTDLHVVKQPLDRETGCEPGAQPGSLLSRGQEWDGTTPAETLSAWPKENRTGVVQEQSSRQPAAGAPSPGDSCPLAGSAVLEGRLLLESLNGFALVVSAEGTIFYASATIVDYLGFHQTDVMHQNIYDYIHVDDRQDFCRQLHWAMDPPQVVFGQPPPLETGDDAILGRLLRAQEWGTGTPTEYSAFLTRCFICRVRCLLDSTSGFLARGSQAWQLRLCCPEPLMTMQFQGKLKFLFGQKKKAPSGAMLPPRLSLFCIAAPVLLPSAAEMKMRSALLRAKPRADTAATADAKVKATTSLCESELHGKPNYSAGRSSRESGVLVLREQTDAGRWAQVPARAPCLCLRGGPDLVLDPKGGSGDREEEQHRMLSRASGVTGRRETPGPTKPLPWTAGKHSEDGARPRLQPSKNDPPSLRPMPRGSCLPCPCVQGTFRNSPISHPPSPSPSAYSSRTSRPMRDVGEDQVHPPLCHFPQRSLQHQLPQPGAQRFATRGYPMEDMKLQGVPMPPGDLCGPTLLLDVSIKMEKDSGCEGAADGCVPSQVWLGASDRSHPATFPTRMHLKTEPDSRQQVYISHLGHGVRGAQPHGRATAGRSRELTPFHPAHCACLEPTDGLPQSEPPHQLCARGRGEQSCTCRAAEAAPVVKREPLDSPQWATHSQGMVPGMLPKSALATLVPPQASGCTFLP

SEQ ID NO: 32512 - protein, 130 aa, Artificial Sequence
  Synthetic polypeptide
VFWTDLHVVKQPLDRETGCEPGAQPGSLLSRGQEWDGTTPAETLSAWPKENRTGVVQEQSSRQPAAGAPSPGDSCPLAGSAVLEGRLLLESLNGFALVVSAEGTIFYASATIVDYLGFHQTDVMHQNIYD

SEQ ID NO: 32513 - protein, 12 aa, Artificial Sequence
  Synthetic polypeptide
SGPNISSKISLL

SEQ ID NO: 32514 - protein, 62 aa, Artificial Sequence
  Synthetic polypeptide
GLFCLYGDICQCLETFFIVTAVGVLMVSHGRKPGCWWTVYRMENSMHNNLVQTSVPRSLYFS

SEQ ID NO: 32515 - protein, 141 aa, Artificial Sequence
  Synthetic polypeptide
WSLMGGSQDAGGRCIGWRIACTIIWSKHQFQDLSTLVRRCPNLVHLDLSDSVMLKNDCFQEFFQLNYLQHLSLSRCYDIIPETLLLVTRAGVRIRLDSDIGCPQTYRTSKLKSSHKLFCQHVRVICIFVCDFYFYRLVLKQ

SEQ ID NO: 32516 - protein, 155 aa, Artificial Sequence
  Synthetic polypeptide
WSLMGGSQDAGGRCIGWRIACTIIWSKHQFQDLSTLVRRCPNLVHLDLSDSVMLKNDCFQEFFQLNYLQHLSLSRCYDIIPETLLELGEIPTLKTLQVFGIVPDGTLQLLKEALPHLQINCSHFTTIARPTIGNKKNQEIWGIKCRLTLQKPSCL

SEQ ID NO: 32517 - protein, 37 aa, Artificial Sequence
  Synthetic polypeptide
WSLMGGSQDAGGRCIGWRIACTIIWSKHQFQDLSTLV

SEQ ID NO: 32518 - protein, 88 aa, Artificial Sequence
  Synthetic polypeptide
NLTNEYNESLLYSPEEPKILFSIREPIANRVFSSSRQRCFSSKVCVRSRCWDACMVVDGGTSFEFNDGAIASMMINKEDELRTVLLEQ

SEQ ID NO: 32519 - protein, 7 aa, Artificial Sequence
  Synthetic polypeptide
RNLKSNK

SEQ ID NO: 32520 - protein, 19 aa, Artificial Sequence
  Synthetic polypeptide
GLLSHVELKICHCSTHICF

SEQ ID NO: 32521 - protein, 95 aa, Artificial Sequence
  Synthetic polypeptide
RETPFAWLSILSCLPACKMSFSPSTMIVRPPQPRGTKNLSLLNPYLFLKRENKLLRDLQKTPCMKQQNQNVMVFQQSVYGLHLLLFILQILSPRE

SEQ ID NO: 32522 - protein, 103 aa, Artificial Sequence
  Synthetic polypeptide
RETPFAWLSILSCLPACKMSFSPSTMIVRPPQPRGTKNLSLLNPYLFLKRENKLLRDLQKTPCMKQQNQNVMVFQQSVYGLHLLLFILQILSPRECQPCLRSK

SEQ ID NO: 32523 - protein, 2123 aa, Artificial Sequence
  Synthetic polypeptide
QIVKRNKLLITCDNIDESQNRHDPIEEEDANLLFGSVQEVLKASVMADADILSETFQLLIDSAKDFSKRLWGLVPFGLYLPAPPLYCPQPAILSEEDGDDLLLKAEKNNRQKVSGILQRVLLLFRAAQCSFPVAQWYILQLRWARKVMQKIRMKGSLPSLSPFPQSLLNYCKGGIAFFRPGAAGDHKLDEVSIRAIGCFRELCALCWMLHVRDKLSYSCRQYQKARENVKGEKDLEVEFDSCMIEHCLSAVEWAYRMLPFSRFFNMEELIQDIILSLIGELPPIRKVAEIFVKAFPYPEDVRVPLRDKYHSLHQRLRHCVVKGPQTEEMMSVVMHSIQKVRVKALKRVQRNIGSFEVNIWEPIEEEKPDEAPGVDRYSLGTSLSRSTLTELGDSVVHSDADTFSEALSVEEKSRINIYQRNAPNHMELTSIHKPTDKRKMCNQKENPTKKEDHEKLSQNTLPVIGVWEFERDDDEYIKFLDLFLSYILERDLPYSRDADIPFLTSFSGKLREHELNSLLFDVHTTLKRHQSKTKSQNVFRAGSCFVVAPESYESEKSSSLNDEYGMHLENQKLSSSVLVNQGIKPFLQYPSNEVNKNEGMSGLFGLKQRSIYKIQDDTREKCLIQRSSNHIFWTPKSIKTRRCIFKAIQCNDINPQEDLPLALNTFGSIGRLLEWMIRWSNRRLLCDSGITESSSEYSPVIRVKTSTAAILTSLWLLEQPYFATYKAKNAIIKMVENRDTGCQIGPNIERESKSDAGGSVAVATPGGTEERNGQNKSCQNILNRMPTEAKNPDIKEINDDIISITHNTKKEFIDIDENLLEVEAFTEEEMDMHISDYEEDIEESVGGFRSPSLAICMMTLPQQLEEEFTEEVQCQREEPLETIMEEKSTEQKGMIEAFSHPGHTTPQSMQVDTSSEISSAQISTYKEKSSSVPLLISNGVNVASQPPAPTPQKTQRNEFTAQLPDCSESVRQMLQDEMFKLVQLQQINFMSLMQIVGSSFANLPDTQQLVQQSQSVHLGESQESNLRGCGDVEDSNKNLKERFFIKPQSMGENAREPRKNSPHCHEGTIPSGQNSTGNVQNVPHGSIPLCQLNGQPRKKGPIPSSQNLPSTSFYPAPAGNTHLYLLSTPSVVQKAPRLIPHAKTFSPGDGFPLLQFKSKQEFQPLFLHTGSIPQVPFRPLPQPREAWGLSDSFQPALPQRAAQTTPASHLNVSQYNTEARKKEVEQKTWAETVITEIPNHVNLDQYVGQENLTPQQDSSVFIKPEKLFDVKPGTLEISPHHSFGLPLLYLPLKPPNMFPSTSRASITVPSTPIQPIAEERKYPRLSLLHSHLSPENRCKKTQLIPLENLIAFKQSQQKLTHNLFEQGDAGHLQLLKVKIEPPEVRQGKDSKKRQRRRAEKELQEKRCEKLRRKPNVTFRPENSIINNDDSEIIKKPKEQQEHCGSHPLDDFDVPFEMLQDDNTSAGLHFMASVKKKAIGSQDASTNTDPEHEPLTAPQLLVPDVYLNLKLSSEMSEKPWSPSIPHTVTNLELPVREEPSNDNVIKQQSDHLAVPSSAELHYMAASVTNAVPPHNFKSQGLPKPEFRFKGQSTKSDSAEDYLLWKRLQGVSAACPAPSSAAHQLEHLSAKLQKIDEQLLAIQNIAENIEQDFPKPEMLDLHCDKIGPVDHIEFSSGPEFKKTLASKTISISEEVRFLTHMDEEDQSDKKETSEPEFSITENYSGQKTCVFPTADSAVSLSSSSDQNTTSPGMNSSDELCESVSVHPLQMTGLTDIADIIDDLIIKDGVSSEELGLTEQAMGTSRIQHYSGRHSQRTDKERREIQAWMKRKRKERMAKYLNELAEKRGQEHDPFCPRSNPLYMTSREIRLRQKMKHEKDRLLLSEHYSRRISQAYGLMNELLSESVQLPTLPQKPLPNKPSPTQSSSCQHCPSPRGENQHGHSFLINRPGKVKYMSKPSYIHKRKSFGQPQGSPWPHGTATFTIQKKAGGAKAAVRKATQSPVTFQKGSNAPCHSLQHTKKHGSAGLAPQTKQVCVEYEREETVVSPWTIPSEIHKILHESHNSLLQDLSPTEEEEPEHPFGVGGVDSVSESTGSILSKLDWNAIEDMVASVEDQGLSVHWALDL

SEQ ID NO: 32524 - protein, 25 aa, Artificial Sequence
  Synthetic polypeptide
MNHRTVMIPLKRKMQICYLVQYKKY

SEQ ID NO: 32525 - protein, 1810 aa, Artificial Sequence
  Synthetic polypeptide
QIVKRNKLLITCDNIDESQNRHDPIEEEDANLLFGSVQEVLKASVMADADILSETFQLLIDSAKDFSKRLWGLVPFGLYLPAPPLYCPQPAILSEEDGDDLLLKAEKNNRQKVSGILQRVLLLFRAAQCSFPVAQWYILQLRWARKVMQKIRMKGSLPSLSPFPQSLLNYCKGGIAFFRPGAAGDHKLDEVSIRAIGCFRELCALCWMLHVRDKLSYSCRQYQKARENVKGEKDLEVEFDSCMIEHCLSAVEWAYRMLPFSRFFNMEELIQDIILSLIGELPPIRKVAEIFVKAFPYPEDVRVPLRDKYHSLHQRLRHCVVKGPQTEEMMSVVMHSIQKVRVKALKRVQRNIGSFEVNIWEPIEEEKPDEAPGVDRYSLGTSLSRSTLTELGDSVVHSDADTFSEALSVEEKSRINIYQRNAPNHMELTSIHKPTDKRKMCNQKENPTKKEDHEKLSQNTLPVIGVWEFERDDDEYIKFLDLFLSYILERDLPYSRDADIPFLTSFSGKLREHELNSLLFDVHTTLKRHQSKTKSQNVFRAGSCFVVAPESYESEKSSSLNDEYGMHLENQKLSSSVLVNQGIKPFLQYPSNEVNKNEGMSGLFGLKQRSIYKIQDDTREKCLIQRSSNHIFWTPKSIKTRRCIFKAIQCNDINPQEDLPLALNTFGSIGRLLEWMIRWSNRRLLCDSGITESSSEYSPVIRVKTSTAAILTSLWLLEQPYFATYKAKNAIIKMVENRDTGCQIGPNIERESKSDAGGSVAVATPGGTEERNGQNKSCQNILNRMPTEAKNPDIKEINDDIISITHNTKKEFIDIDENLLEVEAFTEEEMDMHISDYEDIEESVGGFRSPSLAICMMTLPQQLEEEFTEEVQCQREEPLETIMEEKSTEQKGMIEAFSHPGHTTPQSMQVDTSSEISSAQISTYKEKSSSVPLLISNGVNVASQPPAPTPQKTQRNEFTAQLPDCSESVRQMLQDEMFKLVQLQQINFMSLMQIVGSSFANLPDTQQLVQQSQSVHLGESQESNLRGCGDVEDSNKNLKERFFIKPQSMGENAREPRKNSPHCHEGTIPSGQNSTGNVQNVPHGSIPLCQLNGQPRKKGPIPSSQNLPSTSFYPAPAGNTHLYLLSTPSVVQKAPRLIPHAKTFSPGDGFPLLQFKSKQEFQPLFLHTGSIPQVPFRPLPQPREAWGLSDSFQPALPQRAAQTTPASHLNVSQYNTEARKKEVEQKTWAETVITEIPNHVNLDQYVGQENLTPQQDSSVFIKPEKLFDVKPGTLEISPHHSFGLPLLYLPLKPPNMFPSTSRASITVPSTPIQPIAEERKYPRLSLLHSHLSPENRCKKTQLIPLENLIAFKQSQQKLTHNLFEQGDAGHLQLLKVKIEPPEVRQGKDSKKRQRRRAEKELQEKRCEKLRRKPNVTFRPENSIINNDDSEIIKKPKEQQEHCGSHPLDDFDVPFEMLQDDNTSAGLHFMASVKKKAIGSQDASTNTDPEHEPLTAPQLLVPDVYLNLKLSSEMSEKPWSPSIPHTVTNLVGHTYINVIDIEANDLLQELPVREEPSNDNVIKQQSDHLAVPSSAELHYMAASVTNAVPPHNFKSQEVTPACLDGKSLRAGITEVKEPSVTSPTPSDIQQNKGLPKPEFRFKGQSTKSDSAEDYLLWKRLQGVSAACPAPSSAAHQLEHLSAKLQKIDEQLLAIQNIAENIEQDFPKPEMLDLHCDKIGPVDHIEFSSGPEFKKTLASKTISISEEVRFLTHMDEEDQSDKKETSEPEFSITENYSGQKTCVFPTADSAVSLSSSSDQNTTSPVFQYIRSR

SEQ ID NO: 32526 - protein, 2141 aa, Artificial Sequence
  Synthetic polypeptide
QIVKRNKLLITCDNIDESQNRHDPIEEEDANLLFGSVQEVLKASVMADADILSETFQLLIDSAKDFSKRLWGLVPFGLYLPAPPLYCPQPAILSEEDGDDLLLKAEKNNRQKVSGILQRVLLLFRAAQCSFPVAQWYILQLRWARKVMQKIRMKGSLPSLSPFPQSLLNYCKGGIAFFRPGAAGDHKLDEVSIRAIGCFRELCALCWMLHVRDKLSYSCRQYQKARENVKGEKDLEVEFDSCMIEHCLSAVEWAYRMLPFSRFFNMEELIQDIILSLIGELPPIRKVAEIFVKAFPYPEDVRVPLRDKYHSLHQRLRHCVVKGPQTEEMMSVVMHSIQKVRVKALKRVQRNIGSFEVNIWEPIEEEKPDEAPGVDRYSLGTSLSRSTLTELGDSVVHSDADTFSEALSVEEKSRINIYQRNAPNHMELTSIHKPTDKRKMCNQKENPTKKEDHEKLSQNTLPVIGVWEFERDDDEYIKFLDLFLSYILERDLPYSRDADIPFLTSFSGKLREHELNSLLFDVHTTLKRHQSKTKSQNVFRAGSCFVVAPESYESEKSSSLNDEYGMHLENQKLSSSVLVNQGIKPFLQYPSNEVNKNEGMSGLFGLKQRSIYKIQDDTREKCLIQRSSNHIFWTPKSIKTRRCIFKAIQCNDINPQEDLPLALNTFGSIGRLLEWMIRWSNRRLLCDSGITESSSEYSPVIRVKTSTAAILTSLWLLEQPYFATYKAKNAIIKMVENRDTGCQIGPNIERESKSDAGGSVAVATPGGTEERNGQNKSCQNILNRMPTEAKNPDIKEINDDIISITHNTKKEFIDIDENLLEVEAFTEEEMDMHISDYEEDIEESVGGFRSPSLAICMMTLPQQLEEEFTEEVQCQREEPLETIMEEKSTEQKGMIEAFSHPGHTTPQSMQVDTSSEISSAQISTYKEKSSSVPLLISNGVNVASQPPAPTPQKTQRNEFTAQLPDCSESVRQMLQDEMFKLVQLQQINFMSLMQIVGSSFANLPDTQQLVQQSQSVHLGESQESNLRGCGDVEDSNKNLKERFFIKPQSMGENAREPRKNSPHCHEGTIPSGQNSTGNVQNVPHGSIPLCQLNGQPRKKGPIPSSQNLPSTSFYPAPAGNTHLYLLSTPSVVQKAPRLIPHAKTFSPGDGFPLLQFKSKQEFQPLFLHTGSIPQVPFRPLPQPREAWGLSDSFQPALPQRAAQTTPASHLNVSQYNTEARKKEVEQKTWAETVITEIPNHVNLDQYVGQENLTPQQDSSVFIKPEKLFDVKPGTLEISPHHSFGLPLLYLPLKPPNMFPSTSRASITVPSTPIQPIAEERKYPRLSLLHSHLSPENRCKKTQLIPLENLIAFKQSQQKLTHNLFEQGDAGHLQLLKVKIEPPEVRQGKDSKKRQRRRAEKELQEKRCEKLRRKPNVTFRPENSIINNDDSEIIKKPKEQQEHCGSHPLDDFDVPFEMLQDDNTSAGLHFMASVKKKAIGSQDASTNTDPEHEPLTAPQLLVPDVYLNLKLSSEMSEKPWSPSIPHTVTNLVGHTYINVIDIEANDLLQELPVREEPSNDNVIKQQSDHLAVPSSAELHYMAASVTNAVPPHNFKSQGLPKPEFRFKGQSTKSDSAEDYLLWKRLQGVSAACPAPSSAAHQLEHLSAKLQKIDEQLLAIQNIAENIEQDFPKPEMLDLHCDKIGPVDHIEFSSGPEFKKTLASKTISISEEVRFLTHMDEEDQSDKKETSEPEFSITENYSGQKTCVFPTADSAVSLSSSSDQNTTSPGMNSSDELCESVSVHPLQMTGLTDIADIIDDLIIKDGVSSEELGLTEQAMGTSRIQHYSGRHSQRTDKERREIQAWMKRKRKERMAKYLNELAEKRGQEHDPFCPRSNPLYMTSREIRLRQKMKHEKDRLLLSEHYSRRISQAYGLMNELLSESVQLPTLPQKPLPNKPSPTQSSSCQHCPSPRGENQHGHSFLINRPGKVKYMSKPSYIHKRKSFGQPQGSPWPHGTATFTIQKKAGGAKAAVRKATQSPVTFQKGSNAPCHSLQHTKKHGSAGLAPQTKQVCVEYEREETVVSPWTIPSEIHKILHESHNSLLQDLSPTEEEEPEHPFGVGGVDSVSESTGSILSKLDWNAIEDMVASVEDQGLSVHWALDL

SEQ ID NO: 32527 - protein, 69 aa, Artificial Sequence
  Synthetic polypeptide
GWARWFTPVISAIWEAKIIPPFLACQIWIILCKDLVCCPYPTFQRSVPSEEFLSHLNLLSSLDICSVIA

SEQ ID NO: 32528 - protein, 8 aa, Artificial Sequence
  Synthetic polypeptide
SQQFGRQR

SEQ ID NO: 32529 - protein, 1355 aa, Artificial Sequence
  Synthetic polypeptide
MGSVVYSCNLSNLGGKDNPTVSGMSDMDYPLQGPGLLSVPNLPEISSIRRVPLPPELVEQFGHMQCNCMMGVFPPISRAWLTIDSDIFMWNYEDGGDLAYFDGLSETILAVGLVKPKAGIFQPHVRHLLVLATPVDIVILGLSYANLQTGSGVLNDSLSGGMQLLPDPLYSLPTDNTYLLTITSTDNGRIFLAGKDGCLYEVAYQAEAGWFSQRCRKINHSKSSLSFLVPSLLQFTFSEDDPILQIAIDNSRNILYTRSEKGVIQVYDLGQDGQGMSRVASVSQNAIVSAAGNIARTIDRSVFKPIVQIAVIENSESLDCQLLAVTHAGVRLYFSTCPFRQPLARPNTLTLVHVRLPPGFSASSTVEKPSKVHRALYSKGILLMAASENEDNDILWCVNHDTFPFQKPMMETQMTAGVDGHSWALSAIDELKVDKIITPLNKDHIPITDSPVVVQQHMLPPKKFVLLSAQGSLMFHKLRPVDQLRHLLVSNVGGDGEEIERFFKLHQEDQACATCLILACSTAACDREVSAWATRAFFRYGGEAQMRFPTTLPPPSNVGPILGSPVYSSSPVPSGSPYPNPSFLGTPSHGIQPPAMSTPVCALGNPATQATNMSCVTGPEIVYSGKHNGICIYFSRIMGNIWDASLVVERIFKSGNREITAIESSVPCQLLESVLQELKGLQEFLDRNSQFAGGPLGNPNTTAKVQQRLIGFMRPENGNPQQMQQELQRKFHEAQLSEKISLQAIQQLVRKSYQALALWKLLCEHQFTIIVAELQKELQEQLKITTFKDLVIRDKELTGALIASLINCYIRDNAAVDGISLHLQDICPLLYSTDDAICSKANELLQRSRQVQNKTEKERMLRESLKEYQKISNQVDLSNVCAQYRQVRFYEGVVELSLTAAEKKDPQGLGLHFYKHGEPEEDIVGLQAFQERLNSYKCITDTLQELVNQSKAAPQSPSVPKKPGPPVLSSDPNMLSNEEAGHHFEQMLKLSQRSKDELFSIALYNWLIQVDLADKLLQVASPFLEPHLVRMAKVDQNRVRYMDLLWRYYEKNRSFSNAARVLSRLADMHSTEISLQQRLEYIARAILSAKSSTAISSIAADGEFLHELEEKMEVARIQLQIQETLQRQYSHHSSVQDAVSQLDSELMDITKLYGEFADPFKLAECKLAIIHCAGYSDPILVQTLWQDIIEKELSDSVTLSSSDRMHALSLKIVLLGKIYAGTPRFFPLDFIVQFLEQQVCTLNWDVGFVIQTMNEIGVPLPRLLEVYDQLFKSRDPFWNRMKKPLHLLDCIHVLLIRYVENPSQVLNCERRRFTNLCLDAVCGYLVELQSMSSSVAVQAITGNFKSLQAKLERLH

SEQ ID NO: 32530 - protein, 1291 aa, Artificial Sequence
  Synthetic polypeptide
MGSVVYSCNLSNLGGKDNPTVSGMSDMDYPLQGPGLLSVPNLPEISSIRRVPLPPELVEQFGHMQCNCMMGVFPPISRAWLTIDSDIFMWNYEDGGDLAYFDGLSETILAVGLVKPKAGIFQPHVRHLLVLATPVDIVILGLSYANLQTGSGVLNDSLSGGMQLLPDPLYSLPTDNTYLLTITSTDNGRIFLAGKDGCLYEVAYQAEAGWFSQRCRKINHSKSSLSFLVPSLLQFTFSEDDPILQIAIDNSRNILYTRSEKGVIQVYDLGQDGQGMSRVASVSQNAIVSAAGNIARTIDRSVFKPIVQIAVIENSESLDCQLLAVTHAGVRLYFSTCPFRQPLARPNTLTLVHVRLPPGFSASSTVEKPSKVHRALYSKGILLMAASENEDNDILWCVNHDTFPFQKPMMETQMTAGVDGHSWALSAIDELKVDKIITPLNKDHIPITDSPVVVQQHMLPPKKFVLLSAQGSLMFHKLRPVDQLRHLLVSNVGGDGEEIERFFKLHQEDQACATCLILACSTAACDREVSAWATRAFFRYGGEAQMRFPTTLPPPSNVGPILGSPVYSSSPVPSGSPYPNPSFLGTPSHGIQPPAMSTPVCALGNPATQATNMSCVTGPEIVYSGKHNGICIYFSRIMGNIWDASLVVERIFKSGNREITAIESSVPCQLLESVLQELKGLQEFLDRNSQFAGGPLGNPNTTAKVQQRLIGFMRPENGNPQQMQQELQRKFHEAQLSEKISLQAIQQLVRKSYQALALWKLLCEHQFTIIVAELQKANELLQRSRQVQNKTEKERMLRESLKEYQKISNQVDLSNVCAQYRQVRFYEGVVELSLTAAEKKDPQGLGLHFYKHGEPEEDIVGLQAFQERLNSYKCITDTLQELVNQSKAAPQSPSVPKKPGPPVLSSDPNMLSNEEAGHHFEQMLKLSQRSKDELFSIALYNWLIQVDLADKLLQVASPFLEPHLVRMAKVDQNRVRYMDLLWRYYEKNRSFSNAARVLSRLADMHSTEISLQQRLEYIARAILSAKSSTAISSIAADGEFLHELEEKMEVARIQLQIQETLQRQYSHHSSVQDAVSQLDSELMDITKLYGEFADPFKLAECKLAIIHCAGYSDPILVQTLWQDIIEKELSDSVTLSSSDRMHALSLKIVLLGKIYAGTPRFFPLDFIVQFLEQQVCTLNWDVGFVIQTMNEIGVPLPRLLEVYDQLFKSRDPFWNRMKKPLHLLDCIHVLLIRYVENPSQVLNCERRRFTNLCLDAVCGYLVELQSMSSSVAVQAITGNFKSLQAKLERLH

SEQ ID NO: 32531 - protein, 360 aa, Artificial Sequence
  Synthetic polypeptide
HSPRGSMASCLRTVRTWEVENPKKQKSVFKPRTMQGKKVIPTTCTYSRDGNLIAAACQNGSIQIWDRNLTVHPKFHYKQAHDSGTDTSCVTFSYDGNVLASRGGDDSLKLWDIRQFNKPLFSASGLPTMFPMTDCCFSPDDKLIVTGTSIQRGCGSGKLVFFERRTFQRVYEIDITDASVVRCLWHPKLNQIMVGTGNGLAKVYYDPNKSQRGAKLCVVKTQRKAKQAETLTQDYIITPHALPMFREPRQRSTRKQLEKDRLDPLKSHKPEPPVAGPGRGGRVGTHGGTLSSYIVKNIALDKTDDSNPREAILRHAKAAEDSPYWVSPAYSKTQPKTMFAQVESDDEEAKNEPEWKKRKI

SEQ ID NO: 32532 - protein, 59 aa, Artificial Sequence
  Synthetic polypeptide
RSVASLLKSARPRTHWKEETPDTSEHLKEQTPDTPSLRTVTLTARVHGFMFEDCEDVGS

SEQ ID NO: 32533 - protein, 93 aa, Artificial Sequence
  Synthetic polypeptide
HSPRGSMASCLRTVRTWEVENPKKQKSVFKPRTMQGKKVIPTTCTYSRDGNLIAAACQNGSIQIWDRNLTSNKLRLSYGTVCMLWAHTEVCVM

SEQ ID NO: 32534 - protein, 12 aa, Artificial Sequence
  Synthetic polypeptide
DEDSAQNHVCPS

SEQ ID NO: 32535 - protein, 30 aa, Artificial Sequence
  Synthetic polypeptide
MRTQPKTMFAQVESDDEEAKNEPEWKKRKI

SEQ ID NO: 32536 - protein, 165 aa, Artificial Sequence
  Synthetic polypeptide
PSRKANMPEDYPDQFDDVMDFIQATIKRLKRSPDKQMAVLPRRERNRQAAAANPENSRGKGRRGQRGKNRGCVLTAIHLNVTDLGLGYETKEELIFRYCSGSCDAAETTYDKILKNLSRNRRLVSDKVGQACCRPIAFDDDLSFLDDNLVYHILRKHSAKRCGCI

SEQ ID NO: 32537 - protein, 54 aa, Artificial Sequence
  Synthetic polypeptide
ASPGWKPGMLPNILQCTGQPPTMKNDPAEKQICQRIILISSMMSWILFKPPLKD

SEQ ID NO: 32538 - protein, 14 aa, Artificial Sequence
  Synthetic polypeptide
RMTQPKSKYARGLS

SEQ ID NO: 32539 - protein, 41 aa, Artificial Sequence
  Synthetic polypeptide
PSRKANMPEDYPDQFDDVMDFIQATIKRLKRSPDKQMAVLP

SEQ ID NO: 32540 - protein, 41 aa, Artificial Sequence
  Synthetic polypeptide
GQAQWLTPVIPAFWEAEADGSPEIRSSRPAWPTCKYARGLS

SEQ ID NO: 32541 - protein, 185 aa, Artificial Sequence
  Synthetic polypeptide
SQHFGRLRRTDHLRSGVQDQPGQHANMPEDYPDQFDDVMDFIQATIKRLKRSPDKQMAVLPRRERNRQAAAANPENSRGKGRRGQRGKNRGCVLTAIHLNVTDLGLGYETKEELIFRYCSGSCDAAETTYDKILKNLSRNRRLVSDKVGQACCRPIAFDDDLSFLDDNLVYHILRKHSAKRCGCI

SEQ ID NO: 32542 - protein, 35 aa, Artificial Sequence
  Synthetic polypeptide
DQEFKTSLANMQICQRIILISSMMSWILFKPPLKD

SEQ ID NO: 32543 - protein, 61 aa, Artificial Sequence
  Synthetic polypeptide
SQHFGRLRRTDHLRSGVQDQPGQHANMPEDYPDQFDDVMDFIQATIKRLKRSPDKQMAVLP

SEQ ID NO: 32544 - protein, 503 aa, Artificial Sequence
  Synthetic polypeptide
GCVRWLTPVIPVLWEAEAGGSPEVRSSRPAWPTWYQVISTPSDIFMVMEYVSGGELFDYICKNGRLDEKESRRLFQQILSGVDYCHRHMVVHRDLKPENVLLDAHMNAKIADFGLSNMMSDGEFLRTSCGSPNYAAPEVISGRLYAGPEVDIWSSGVILYALLCGTLPFDDDHVPTLFKKICDGIFYTPQYLNPSVISLLKHMLQVDPMKRATIKDIREHEWFKQDLPKYLFPEDPSYSSTMIDDEALKEVCEKFECSEEEVLSCLYNRNHQDPLAVAYHLIIDNRRIMNEAKDFYLATSPPDSFLDDHHLTRPHPERVPFLVAETPRARHTLDELNPQKSKHQGVRKAKWHLGIRSQSRPNDIMAEVCRAIKQLDYEWKVVNPYYLRVRRKNPVTSTYSKMSLQLYQVDSRTYLLDFRSIDDEITEAKSGTATPQRSGSVSNYRSCQRSDSDAEAQGKSSEVSLTSSVTSLDSSPVDLTPRPGSHTIEFFEMCANLIKILAQ

SEQ ID NO: 32545 - protein, 37 aa, Artificial Sequence
  Synthetic polypeptide
FQYFGRLRQADHLRSGVRDQPGQHGTRSSVHHLIFSW

SEQ ID NO: 32546 - protein, 19 aa, Artificial Sequence
  Synthetic polypeptide
GQEFETSLANMVPGHQYTI

SEQ ID NO: 32547 - protein, 518 aa, Artificial Sequence
  Synthetic polypeptide
GCVRWLTPVIPVLWEAEAGGSPEVRSSRPAWPTWYQVISTPSDIFMVMEYVSGGELFDYICKNGRKSDVPGVVKTGSTKELDEKESRRLFQQILSGVDYCHRHMVVHRDLKPENVLLDAHMNAKIADFGLSNMMSDGEFLRTSCGSPNYAAPEVISGRLYAGPEVDIWSSGVILYALLCGTLPFDDDHVPTLFKKICDGIFYTPQYLNPSVISLLKHMLQVDPMKRATIKDIREHEWFKQDLPKYLFPEDPSYSSTMIDDEALKEVCEKFECSEEEVLSCLYNRNHQDPLAVAYHLIIDNRRIMNEAKDFYLATSPPDSFLDDHHLTRPHPERVPFLVAETPRARHTLDELNPQKSKHQGVRKAKWHLGIRSQSRPNDIMAEVCRAIKQLDYEWKVVNPYYLRVRRKNPVTSTYSKMSLQLYQVDSRTYLLDFRSIDDEITEAKSGTATPQRSGSVSNYRSCQRSDSDAEAQGKSSEVSLTSSVTSLDSSPVDLTPRPGSHTIEFFEMCANLIKILAQ

SEQ ID NO: 32548 - protein, 160 aa, Artificial Sequence
  Synthetic polypeptide
GCVRWLTPVIPVLWEAEAGGSPEVRSSRPAWPTWYQVISTPSDIFMVMEYVSGGELFDYICKNGRLDEKESRRLFQQILSGVDYCHRHMVVHRDLKPENVLLDAHMNAKIADFGLSNMMSDGEFLRTSCGSPNYAAPEVISGRDCNIIRILTSQFTNYQH

SEQ ID NO: 32549 - protein, 37 aa, Artificial Sequence
  Synthetic polypeptide
GWAWWLTPIILALWEVEAGGLLELRSLRPSWSICWQT

SEQ ID NO: 32550 - protein, 523 aa, Artificial Sequence
  Synthetic polypeptide
DHPGQYVGKHELTGHKVAVKILNRQKIRSLDVVGKIRREIQNLKLFRHPHIIKLYQVISTPSDIFMVMEYVSGGELFDYICKNGRLDEKESRRLFQQILSGVDYCHRHMVVHRDLKPENVLLDAHMNAKIADFGLSNMMSDGEFLRTSCGSPNYAAPEVISGRLYAGPEVDIWSSGVILYALLCGTLPFDDDHVPTLFKKICDGIFYTPQYLNPSVISLLKHMLQVDPMKRATIKDIREHEWFKQDLPKYLFPEDPSYSSTMIDDEALKEVCEKFECSEEEVLSCLYNRNHQDPLAVAYHLIIDNRRIMNEAKDFYLATSPPDSFLDDHHLTRPHPERVPFLVAETPRARHTLDELNPQKSKHQGVRKAKWHLGIRSQSRPNDIMAEVCRAIKQLDYEWKVVNPYYLRVRRKNPVTSTYSKMSLQLYQVDSRTYLLDFRSIDDEITEAKSGTATPQRSGSVSNYRSCQRSDSDAEAQGKSSEVSLTSSVTSLDSSPVDLTPRPGSHTIEFFEMCANLIKILAQ

SEQ ID NO: 32551 - protein, 16 aa, Artificial Sequence
  Synthetic polypeptide
TEEFETILVNMLANMN

SEQ ID NO: 32552 - protein, 538 aa, Artificial Sequence
  Synthetic polypeptide
DHPGQYVGKHELTGHKVAVKILNRQKIRSLDVVGKIRREIQNLKLFRHPHIIKLYQVISTPSDIFMVMEYVSGGELFDYICKNGRKSDVPGVVKTGSTKELDEKESRRLFQQILSGVDYCHRHMVVHRDLKPENVLLDAHMNAKIADFGLSNMMSDGEFLRTSCGSPNYAAPEVISGRLYAGPEVDIWSSGVILYALLCGTLPFDDDHVPTLFKKICDGIFYTPQYLNPSVISLLKHMLQVDPMKRATIKDIREHEWFKQDLPKYLFPEDPSYSSTMIDDEALKEVCEKFECSEEEVLSCLYNRNHQDPLAVAYHLIIDNRRIMNEAKDFYLATSPPDSFLDDHHLTRPHPERVPFLVAETPRARHTLDELNPQKSKHQGVRKAKWHLGIRSQSRPNDIMAEVCRAIKQLDYEWKVVNPYYLRVRRKNPVTSTYSKMSLQLYQVDSRTYLLDFRSIDDEITEAKSGTATPQRSGSVSNYRSCQRSDSDAEAQGKSSEVSLTSSVTSLDSSPVDLTPRPGSHTIEFFEMCANLIKILAQ

SEQ ID NO: 32553 - protein, 180 aa, Artificial Sequence
  Synthetic polypeptide
DHPGQYVGKHELTGHKVAVKILNRQKIRSLDVVGKIRREIQNLKLFRHPHIIKLYQVISTPSDIFMVMEYVSGGELFDYICKNGRLDEKESRRLFQQILSGVDYCHRHMVVHRDLKPENVLLDAHMNAKIADFGLSNMMSDGEFLRTSCGSPNYAAPEVISGRDCNIIRILTSQFTNYQH

SEQ ID NO: 32554 - protein, 15 aa, Artificial Sequence
  Synthetic polypeptide
ESSPAKLFNQLANMN

SEQ ID NO: 32555 - protein, 157 aa, Artificial Sequence
  Synthetic polypeptide
IVSHISMYIYILLVMSLKNAVCRELCLSRMLTNTDLVLRKPNIIPSYCIPYSTVEETCEIVPLQKGCDKLSIPGYLMLKEKSLKANYYWCCEDRKSLNCNGQAITRFLNGQHILTKYLDHNRSSLNTSECFEDHRSEYAGEKYKKAPLPNYSISWQT

SEQ ID NO: 32556 - protein, 545 aa, Artificial Sequence
  Synthetic polypeptide
TQVNVLKIIEVNMQVKNIRKLPCQIIQSVGKHELTGHKVAVKILNRQKIRSLDVVGKIRREIQNLKLFRHPHIIKLYQVISTPSDIFMVMEYVSGGELFDYICKNGRLDEKESRRLFQQILSGVDYCHRHMVVHRDLKPENVLLDAHMNAKIADFGLSNMMSDGEFLRTSCGSPNYAAPEVISGRLYAGPEVDIWSSGVILYALLCGTLPFDDDHVPTLFKKICDGIFYTPQYLNPSVISLLKHMLQVDPMKRATIKDIREHEWFKQDLPKYLFPEDPSYSSTMIDDEALKEVCEKFECSEEEVLSCLYNRNHQDPLAVAYHLIIDNRRIMNEAKDFYLATSPPDSFLDDHHLTRPHPERVPFLVAETPRARHTLDELNPQKSKHQGVRKAKWHLGIRSQSRPNDIMAEVCRAIKQLDYEWKVVNPYYLRVRRKNPVTSTYSKMSLQLYQVDSRTYLLDFRSIDDEITEAKSGTATPQRSGSVSNYRSCQRSDSDAEAQGKSSEVSLTSSVTSLDSSPVDLTPRPGSHTIEFFEMCANLIKILAQ

SEQ ID NO: 32557 - protein, 560 aa, Artificial Sequence
  Synthetic polypeptide
TQVNVLKIIEVNMQVKNIRKLPCQIIQSVGKHELTGHKVAVKILNRQKIRSLDVVGKIRREIQNLKLFRHPHIIKLYQVISTPSDIFMVMEYVSGGELFDYICKNGRKSDVPGVVKTGSTKELDEKESRRLFQQILSGVDYCHRHMVVHRDLKPENVLLDAHMNAKIADFGLSNMMSDGEFLRTSCGSPNYAAPEVISGRLYAGPEVDIWSSGVILYALLCGTLPFDDDHVPTLFKKICDGIFYTPQYLNPSVISLLKHMLQVDPMKRATIKDIREHEWFKQDLPKYLFPEDPSYSSTMIDDEALKEVCEKFECSEEEVLSCLYNRNHQDPLAVAYHLIIDNRRIMNEAKDFYLATSPPDSFLDDHHLTRPHPERVPFLVAETPRARHTLDELNPQKSKHQGVRKAKWHLGIRSQSRPNDIMAEVCRAIKQLDYEWKVVNPYYLRVRRKNPVTSTYSKMSLQLYQVDSRTYLLDFRSIDDEITEAKSGTATPQRSGSVSNYRSCQRSDSDAEAQGKSSEVSLTSSVTSLDSSPVDLTPRPGSHTIEFFEMCANLIKILAQ

SEQ ID NO: 32558 - protein, 202 aa, Artificial Sequence
  Synthetic polypeptide
TQVNVLKIIEVNMQVKNIRKLPCQIIQSVGKHELTGHKVAVKILNRQKIRSLDVVGKIRREIQNLKLFRHPHIIKLYQVISTPSDIFMVMEYVSGGELFDYICKNGRLDEKESRRLFQQILSGVDYCHRHMVVHRDLKPENVLLDAHMNAKIADFGLSNMMSDGEFLRTSCGSPNYAAPEVISGRDCNIIRILTSQFTNYQH

SEQ ID NO: 32559 - protein, 531 aa, Artificial Sequence
  Synthetic polypeptide
ICLHLDLGLPSLQNFGKHELTGHKVAVKILNRQKIRSLDVVGKIRREIQNLKLFRHPHIIKLYQVISTPSDIFMVMEYVSGGELFDYICKNGRLDEKESRRLFQQILSGVDYCHRHMVVHRDLKPENVLLDAHMNAKIADFGLSNMMSDGEFLRTSCGSPNYAAPEVISGRLYAGPEVDIWSSGVILYALLCGTLPFDDDHVPTLFKKICDGIFYTPQYLNPSVISLLKHMLQVDPMKRATIKDIREHEWFKQDLPKYLFPEDPSYSSTMIDDEALKEVCEKFECSEEEVLSCLYNRNHQDPLAVAYHLIIDNRRIMNEAKDFYLATSPPDSFLDDHHLTRPHPERVPFLVAETPRARHTLDELNPQKSKHQGVRKAKWHLGIRSQSRPNDIMAEVCRAIKQLDYEWKVVNPYYLRVRRKNPVTSTYSKMSLQLYQVDSRTYLLDFRSIDDEITEAKSGTATPQRSGSVSNYRSCQRSDSDAEAQGKSSEVSLTSSVTSLDSSPVDLTPRPGSHTIEFFEMCANLIKILAQ

SEQ ID NO: 32560 - protein, 44 aa, Artificial Sequence
  Synthetic polypeptide
GHSICKDAAFKIPSWEQKWPSLDTESAYTLILDFPASRTLANMN

SEQ ID NO: 32561 - protein, 12 aa, Artificial Sequence
  Synthetic polypeptide
SWTSQPPELWQT

SEQ ID NO: 32562 - protein, 546 aa, Artificial Sequence
  Synthetic polypeptide
ICLHLDLGLPSLQNFGKHELTGHKVAVKILNRQKIRSLDVVGKIRREIQNLKLFRHPHIIKLYQVISTPSDIFMVMEYVSGGELFDYICKNGRKSDVPGVVKTGSTKELDEKESRRLFQQILSGVDYCHRHMVVHRDLKPENVLLDAHMNAKIADFGLSNMMSDGEFLRTSCGSPNYAAPEVISGRLYAGPEVDIWSSGVILYALLCGTLPFDDDHVPTLFKKICDGIFYTPQYLNPSVISLLKHMLQVDPMKRATIKDIREHEWFKQDLPKYLFPEDPSYSSTMIDDEALKEVCEKFECSEEEVLSCLYNRNHQDPLAVAYHLIIDNRRIMNEAKDFYLATSPPDSFLDDHHLTRPHPERVPFLVAETPRARHTLDELNPQKSKHQGVRKAKWHLGIRSQSRPNDIMAEVCRAIKQLDYEWKVVNPYYLRVRRKNPVTSTYSKMSLQLYQVDSRTYLLDFRSIDDEITEAKSGTATPQRSGSVSNYRSCQRSDSDAEAQGKSSEVSLTSSVTSLDSSPVDLTPRPGSHTIEFFEMCANLIKILAQ
